United States Patent Application Publication US 2007/0277267 A1 - sequence listing, part 2

SEQ ID NO: 6446 - DNA, 558 bp, Glycine max
agcttttatccacaacaatcgcttgaatccgttcaaggtccaacgccttaatgatctcttttacttttatcggttaaaatgaacctttcaaaagtctaaaatcaaccctatgcgtaactttcttgctttcaaagaactacataggtatgagttcctcatcggaattgaggatacgttggagcaagagccccgctcttgtcgacctcaaaaagataaaaacataaaaaagggagaatgaaataaagattgaagtcatgattttgcacatttggattaaaggctgtcgtctgatgtgacagacgtgtggggtgctaataccttccccacacgtaaacaattctcgaacctttgatcctttaaattcatagaccgctttttggtttttctaaccgtttcctcaaataaatgttggtggcgactccgtgtatttttctttccttgaagacacacccatgagtcttacgtcgcccttctgccgaagggtaggttgtgacaattggcgactccacttgggaatttttttaaaaagttaaccctttaatctatgggcatttttta

SEQ ID NO: 6447 - DNA, 590 bp, Glycine max
  unsure at all n locations
ttgaatgcactattcaatggagttgacaagaacatcttcagactgatcaacacttgcacagtggccaaagatgtatgggagatcctgaaaatcactcatgaaggaacctccaaagtgaagatgtccagattgcaactcttggctacaaaattcgaaaatctgaagatgaaggaggaagagtgtattcatgacttccacatgaacattcttgaaattgccaatgcttgcactgccttgggagagaggataactgatgaaaagctggtgagaaagatcctcagatccttgcctaagagatttgacatgaaagtcactgcaatagaggaggcccaagacatttgcaacatgagagtggatgaactcattggttcccttcaaacctttgagctaagactctcggatggggctgaaaagaagagcaaaaacttggcattcatgtccaatgatgaaggagaagaagatgagtatgacctgnatactgatgaaggtctgacaaaagcagttgtgctcccgggaaagcagttcaacaaagtgatgagcagaatggacaggaggcagaagcccatgtncagaacatccctttcgacatc

SEQ ID NO: 6448 - DNA, 474 bp, Glycine max
agcttgtccttggtttagacatgattggtacatgatttgggacttgtaggattcaatttgggcaaaattggatgagggaaagagtggttttcgaaatctgcactttatgcagaattttgctgttgaaatgtgcagcagaattttgtataagtgcagaaaaaatgcttgtgtatggctggttgtaaaaagggtagtacatatggggttttgtacatttgctagcagatcccaacggtcaaaatgtagacttatgtactagagacttccagtaaaattttcgagtcgatccaacggttaacgaattggaacaaaggaaatgttactggggtatttgtatgtgaaaagttgtgattttgagttgtgttttgggcagagttttctgcctttgccctgttttgcttgggtttgttagtccatgatgattggatgtggaattacttggatgttgtggaaacttgggaggattgatgggga

SEQ ID NO: 6449 - DNA, 581 bp, Glycine max
  unsure at all n locations
tcttatccaaggctcatcttggtggtgaagctccttcctccatggcttattccataatggatggcgcctcctctcacctcttttcctttgtcttccgctgcatctccatggtggaaaatcaccattaaaggaccccattgaagctcaaagatccagcctccatagaagccccacaagcaagcttccatcaccttgccctaatccatttggtgaaatagtcaatggcgattagtaggaattagattgctcctggggcttttggcagtggtcctagtatgcctattccctataaggcaaaaggccaaggggaactcaagctatggaggatgtcangaggggtgtgtggaatgtctacaaactcttggcatcgcctgaacctccttatgaagtcaagggtgtcggccaataatagccggcgcgcaccacttangttgctagggagcgacccctgatatggaggtcacagattccttcatgtagctcttgcatgagatagtctacttgttggttttttaggcatttaagcaatgatgtgttcaaccctcttttgaatagctcaccatcaaggatggcgttgtatc

SEQ ID NO: 6450 - DNA, 392 bp, Glycine max
tattattctcaaacatgagttggggaggacccaatactaatggctttctaactagatgattgaaatgatgcatgtttatgtgtgtagctctacgatgccacaaccaaaaatcatctatttttgttaccaaacaacctcaactaatgaaatgaggcatgttcaatgtctaaaatatagaaattacctatcattttacctataatggacaacctccccgggacatggtttcattattaggcataaattcttgttgaattcgattatgaagccttttgccacatagttggctaaagcttaggacgttatgctttagtccatcaatatataaaacaattctttatcaaggttttgaatggaattccaatattttccttctcccataattatccctt

SEQ ID NO: 6451 - DNA, 406 bp, Glycine max
ttttgtctctcttattaggcaatggttggccctctctctctctattgtgaaatcctcatcttttattcttttctacttttgcagcaacaacaaatttaatcatcttttcaccgacgagcttgtccctttcaataccaaccccgacaagatgctcgacctccaacacaccaccaccttcctcccctgcaccaagatcaaagcctctgctgattcctctgtcaccgctgactctgacctctgcattttcactactggcgcccgccagatcactgatgagtcacgcctcaacctcctctagaggaacctctccctcttcggcaccaccattctgactctcgttcgttactcccccaacgctattctcctcatcatttccaaccctggcgacattctcacctacacacat

SEQ ID NO: 6452 - DNA, 344 bp, Glycine max
agcttctaccttggctgagattggttctattgttctttccactagcgaccctcactggaagtcccagctttctcacatggcttactccatgtggcgccgccacaacctcccccttggcatttccaaacccccctttcgccccgccagacccccaataccccaattggttcgttccctcaatttcgcttctcctttcttattgcaaattctgttatttaaatctaattacctcaatttgatttatatttttcaagcctctgatttcactctatccttctcttctatcctttaaaactaaagcttcttttttttttttttgtgaccttctgacctgaattgggaaa

SEQ ID NO: 6453 - DNA, 635 bp, Glycine max
  unsure at all n locations
tacataaaaggcagcctttaagggctagcccgcgggcccgaaccctaagtggatgcacaaaacaacttttagattacttttttgttgtttggttaagttaaggagatggaacaaggagcacaggtgtgtcatatgagaaattcaatcattcttcattcttacaatgtaatgtccccagtttcagatgctctttttttctgggtgggctgcctctatctatcagcaaaagcccatcaaagatcctaatcgaaattcaattatgatatgtgcaaattgggttgggcctattgaagtctgtaccttctaaaacatattcttcagaagaaattatgcaataaaatttttgtaaataaaaaaggggaaataaccctaactgtgcaactaaatgaactaatgaagttcccaaattcctctttgctacattaacgtatatgttaactgtgaaatatcccacccgaggaatactacacatgaacgaatctagtaatatattaatttaatcagcaacacattccataataaactggttctcagttgttaagggttntactcagttgattcaacaagagcgtgagttggtatanaagttcttaanaatgttttcaatttctacccataaaaaaaaattgattctc

SEQ ID NO: 6454 - DNA, 441 bp, Glycine max
agcttgctaacccatggaagctcctaatatctcccacactttttggggtgggccattcgtggatggccttgatttcccagggtccacatggaccccatttctaccaactacaaaacctaagaaaactatattatctacacaaaaggtacacttctctatatttgcatagagggtgtttttcctatggactgaaagaacttacctgagatgtcctaagtgatcatctaggctcctattgtacactaaaatatcatcaaaataaacaactacaaatctacctatgaaatcccttaagacatgatgcataagccttataaaggtgcttggtgcattactgagcccaaaaagttggtcttgaaagcgaattttcactcatcaccctttttcatcctgatttcgggataaccacttttaagaacaatttttgaaaaaatattggca

SEQ ID NO: 6455 - DNA, 583 bp, Glycine max
  unsure at all n locations
ttagtctctatagatcttcacacagcaaaatctctcaaaactctctggaacttggacctttctctctctaaaatctctagacatgcaaagctctgaatcccagtccaaactccttatctaaaatctgatttcaggcttaaataggtgaccttgttcgtgctcgtgcgcttagcgcaattttggaccgcttagcgcacattagtgaatttcggtttagcgcgtgcctttgtcgcttagcggatggactgaagcggtgcgcttagtgagatgaagcggtgcgcttagcgaacctatacaactcatcttcttccagattcttccttgcgcttagccaatgagtgttacgcttagtgggcgctcgctaagccaatggactggcttagccataaggtgaaaaacaacacttttaaaagcttgcctaattaacccgaaattgtcagacaatgattattaaacacacaaaatggaagtactaagtatttattacctatacttaacatanagtacttataacactacaaactaaccataaattggggaagtttgatacaatntacacaggttttacacacaaaagttagtc

SEQ ID NO: 6456 - DNA, 607 bp, Glycine max
  unsure at all n locations
agcttgtaccacatttcattacatagagaagacaaatagcaaactacacgttagccacccatgaaaatggagaagcaacataactttcagttaaataccactatttgctagcttggctcacttcctagaatacattgacaaatactttaattataagttgatttattttatatagtaagttagcaaaaatgcttgaaatggtgtaaggttgattaaaaggagacaatgtgtcaataaaatttctaaatctagcttatctccactaaatttttggtgtttgccttgttacaatagaaagtcgtacagttgaacctgtttgaattttactaatccccaattgtttaatgcaaattattagaaagttgatattaacagtgtgataaatatgtgatatttttaccaaggtctagcatgaatggtaaataattgagtcttgattatgtggatgaaaaaagctttgttagtaaaaaattacctactttggtgaattgtcttaaaagggaatagttttttataccctttatgcattccaaaaagagagtaatanttcatcaatagaattatagtcattgcaatcatttttcttagggtggttgaatactttttt

SEQ ID NO: 6457 - DNA, 522 bp, Glycine max
tatcaacacttttatatataacaattactggatttggtttatgttgatgaaggtatatggtagcatatacttcagatcatctttcttcaagtgagtttgaaccccaaccgtaggaaaggcagtaaggcacatgttgtgagtctagaccactcacaagtattttagtcatgtgatgagcaatttatgtagtaacataataacatgcgagtcttcaactaataagttttcaagctatgattatgaatttgctctcttcctttttgtttaatgctttctaattgtggtaagtgtgtcataaagtgttttgttataggaaagttaaaacaagttaattgttgacaaaaaatatttttttaggcacaattaattacttatacaactaataatgtaataaattggtgagtgtggttatgtttgctaagtcaaccatcaaatctaatctgtgaataactgaaaatgaatagaacttatggcggtctttttagatatgtcttgttttttagagcatggtgaggatagatc

SEQ ID NO: 6458 - DNA, 381 bp, Glycine max
agcttgcttctacacttctccttgaagtggggtctccaatcacctttcctctgtctccattccactaccactgatcttcaagaagcaaaggactccattgatgaaggatatccaaggcctacaagttctacatggagctacattatgtggtatcagagtatcttcatctaggtgatcttttgcttactctatcttttgttcgggcaattcactttaatttctttttgttcatcgtcttctccatgtatctcctccattgtctagtggtttggtgttggttaaattacattcaaaaaaataaaatgatcaaaacttagatctacacttgttcttgcatttccatggggtccaacccatgcctcatcaattaaggaatgcttt

SEQ ID NO: 6459 - DNA, 677 bp, Glycine max
  unsure at all n locations
tccatcaagtggtatcagatcacaagagcttcaagtaggtgctccttaaacctccattaattttcagctttaccttttcttccattgttgtttcttcagttttttctccatgtatctcctcacatttgttgtgctaaatgttgttaacatgattttttagaatttacaccgattaaacttgctatagaagctagatttgattttctatggttcaaattccttgttcttgttcttgaaccatgaattgtgttgagtttagattcctttgagttttgtattgccatttttttttgctgaaacctaaaccataaaatacttacaaaaacattaaagtagaagaaaacctcaaaaatctagagtgacatgttcacctattatagtgttgtcttagaggtcatgcctagtcatgaaacttgtcacataagactccttatgttntgttgaattttatttttcttgattctttatctaactcatttgttcataagtgtatgaaatttttttagcctattatttgattcgagtcaaatcttgcatgttaattagtccttaacatgtccatgcataattcttagagactctttgattgtgaaccttttcttgacttttanngttccttatgattgtgtctattgtacatttgangtttggtgattgaattgctggctgaattttga

SEQ ID NO: 6460 - DNA, 520 bp, Glycine max
agcttcttgatggattcaagtacttgctatgcgtgttactttataagcaatttcttataggatattgaaatcaatatatatatatatatatttgcggagtgaaatacctgtcctttttctttgaaattgaattgtttgttttgcactttttcttttggctaaatattcttctgtagttggcatggcatgacattgggttcaaccattttttgctttcagaatataatattgagacatctctgattaataatgctttcattcgtaaactacaatgaaaacaaaagccttcctatattgacatgtactcaacgagatatttgaatctgtaggtgcaaagtgatgaagtaccccattgtcagttttgtattaacatcttcgtgaagcatttatggtccactgtcttatatttcttatttacaaagttttgcttttgaccttttctctgatttcactgaatctgttttcccttatattgagacccaaagtattttttgggcatatgttatctttggttgattat

SEQ ID NO: 6461 - DNA, 692 bp, Glycine max
tgatgtgagaaagcgtggaagagtcagtcttcctacttttgtttgttgaccacagagtggtacctagagatatgtcgcgggggtcaggagaccttggggacgtcaggtggggtgctatttcccaaaaccaagcatgaccaatcccgacccaacccgggcatagtcagtcagtgagaacttgtgacgtacctaaacaggtgagctcctggcagtcaaccaataaaagaacaaagaccacgaagcaaggaggcttgtgtggcggctggtcagctatgaatcttgagtggtatttggaaattggcctctggtaattgattaccaagggtgtgtaatcgattacagggcttagaaatggaaacaggaagttaaaatggcctctggtaatcgattaccaagggggtgtaatcgattacagggcttaaaaatagagacaggatgttaagatggcctctggtaatcgattacccatggtgtgtaatcgattacatagagtaatagggcactggtaatcgattaccagttaggtgtaatcgattacacagtgtaatttgtaggtttccatgtgcagaagctgtgtaactcgagttttgggcactggtaatcgattacatactttggtaatcgattaccagagaggaaatcccttgagaaggatattttgactatgcgtaaccattatgggacgcattgta

SEQ ID NO: 6462 - DNA, 383 bp, Glycine max
agcttgatgattacctatgggcatatataacaaccttcaaaacacctattggtctctcattgtttcaaatggtgtacataaaagcatgccacctacaagtggagttagaaataaaagatcattgaagttcctcaacttggactctgtggcatccagagaaaagatgaaagtagagctacatggactttaagagatgtgcctcaatgcatatgaatcatccaagctctacaaagaaagctctacacagagaattaaggatggaacaacaagtattgctttgcaactcaagattaaagttgtttcctagaaaattaaaatcaagatggagtggtcctttacaatcaaagactttaagccttatggagatatagagatagaagact

SEQ ID NO: 6463 - DNA, 541 bp, Glycine max
ttcttccgtcggtgctcccctcatggggtaccctagttttcttatagcgagcgcgggattgtagttaatacaacccctcgttcctaccagcggaatgtttgtgtatcctccacatgagaaaaggactccttcctttccttccttccatcgggggaaccaattgattgttctacctcctatcccagccaaaagctggtcccaatctattctcctcttttcagtacacgagagatggctcaggagcggacatggatgccttgtgtcttgcaggaacaagtgtgaaaccaaccaaacacagagggcgggcaagcaacagatgatccgtgcgctactcttttcacaccttcggtcaaatgtgtcaaataaatctgccaagacagctaccaccggactttccttgctatggtggtatgcaaggaaagcgtcgattgctgctaggtccaccaaaccatccgcgtttggaaagaggacgaccccaaaaattaacaaagctaacacatccataaacgggacccaatctccttgattggccatacccctc

SEQ ID NO: 6464 - DNA, 486 bp, Glycine max
agcttgtcatatgcgactttgaattggtaaggctctcgaggcaatccatcattgttaactgcctcacaataaatttgttgacatgaaataaaaatgagtaggcatttcactagaaaaacttatgcataagtttatgtggaagcaaagctaccatgatgattcaccaagatgttttgatgatgccaaagctcaaagagttgtttcaagattaaagaatcaagcattcaagattccactcaaagattcaagaatcaaatgaagaaatcaagaagcatcaagccaagtcaaagtaagtagtaaaaagtatttttaaaaaaaaacatcaaatagcacactttttgttttaaaaaggattttctgaaatcttctaagttaccagagtttttactctctggtaatcgattaccatttggttgtaatcgattaccaatgaccaggatgggtttcaaactggtttcagtgctttacaacgttccaaaatgattt

SEQ ID NO: 6465 - DNA, 559 bp, Glycine max
tctcttcgacctttggcaagcctttaactcgtctttcaagatcatgcctttgacgaacgattgatcctttcgtctctttggagcttaagctcactgctgctgccccataaagctcctcggaacttgttttagccatgttcttcctttcgggccctcttggtttctcgttccaaggcttcggcgatggccatattgatgtcccttagttcatcatactctttccaaactttgatggccattgatttgaacttctctttgactacttgggctttttcaagttccgcctttagggtttgcacttcctcactctcctccagagttttagcctcttcctctcttgcagccttcagctttgggagccaacccaactcttatgttctgactatcagccacttatgatagtcgttggtgatcccgttgctacttcccctaagctccttatctttactttgtactgcacctcatgccttgcggactccttgaagtactctcgcattggggtcactaaaaccccgggcgatgaaaggcgtgatgctttccttcaatggcgctcctctca

SEQ ID NO: 6466 - DNA, 451 bp, Glycine max
agcttctacattcaatttcgagcttttcgatatattacgggactcaatcggacatccgagtaaaaagttattgtagtttgaatttgctcagggcttcggtattccatttcgagcgtctcgatatattacgggactcaatcggacatccgagtaaaaagttattgtcgtttgaatttgctcagagcttcggcattccatttcgagcatttcgatatattacgggactcaatcagacatccgagtaaaaagttattgtcgtttcaatttgctcagggcttcggtattccatttcgagcgtctcgatgtattacgggactcaatcagacatccgagtaaaaagttattgtcgtttgaatttgctcacagcttctacattccatttcgagcttttcgatatattacgggactcaatcagacatccgagtaaaaagttattggcctttgaatttgc

SEQ ID NO: 6467 - DNA, 519 bp, Glycine max
ttgagcaaattcaaacgacaataactctttactcggatgtctgattgagtcctgtaatatatcgagacgctcgaaatggaataccgaagctctgagcaaatttaaacgacgataacctttttactcggatgtctgattgagtcccgtaatatatcgagatgctagaaattgaatgttgaagctctgatcaaattcaaacgacgatgactttttactcggatgtccgattgaggctcgttatatatcgagacgctcgaaatggaatatcgaagctctgagcaaattcaaacgataataactttctactcggatgtccgattgagtcccgtaatatatcggaacgcttgaaattgaatgttgaagctctgagccaattctaacggcggtaagtttttactcggatgtctgattgagtcccgtaatatatcgagatgctcgaaatggaatgttgaaactctgagcaaattcaaacgacaataatcttttactcggatgtctgatggaggcccgcaatatatc

SEQ ID NO: 6468 - DNA, 490 bp, Glycine max
agcttgtagggttcaccccaaattccgttgtcatatgctaaacttgatcccatatctacttgataattcaatggtagccataaccctagccaaggttcatcaacctccatttctccgagaatacgactcgaacgcaacgtgtgcttgtcacggagaagccccggggcgttccattgagcattgtaaggctctgaagcgtaaggtgcaaggtctaattgatacgggctggctgaaatttgaggagaatcgcttgttgaatcctaacattaacaagcaacaccatacatggggcaattctggaagctgttgttatgactcatcaggattttcaagtttatgccataaaccacagttacaatgttaaatgatatagataaaatggacatcctctcacgaacacatttttgcttattcaacttccaccggaatgtgagtgtaagccattggtctgtttgctcaagcaacctgcactcctgaatgttgacttcca

SEQ ID NO: 6469 - DNA, 642 bp, Glycine max
  unsure at all n locations
tctcccctattttgctataaatagggggagaagtgaagaagaaaagggttcaaccccttaggcacttctctctctctctcgaatttgctgaggaaaattatttccgtgaagaaaatccaagccgaggcgcttccgtaacgtttccgtgagtaattacgcgaagagtctcgaccgttcttcaaaattcatcgttcgttcttcattttcttcaatcttcaacgggtaagtacttcaaaccaagcttttccattcattctatgtacccgtggtggtccaaattttgtttcatgtatttttattcttgttttcatttactttttatacccccttttgacgtgcttaagccatttatttaagtcatttctcgcttaatctaaaaataaaactaacttccaccgatcgtttgaattgtatcattcgttaattttggttaaaatgaattccgaccgttcggtcgtgccgtaaccacgttggaaataaaaaaagaggtaaaataataatataataataaaaaatgtcttttagtaaagtaaaagcgaaaaaatcaatcagacgttttctctttgggatttctgattcttaattgaatcgactaataactaaagtgaaactaaggctaaanatcactcgcctagtcaagct

SEQ ID NO: 6470 - DNA, 554 bp, Glycine max
  unsure at all n locations
agcttgccacccagctcgcccaggcgagcagggttgcttcctccagaagcaacagccttctggaggaatcttctgaagggcccaagtgggcctggttgctatttgcacccccatttttactaagtacaccccctgcctttttttggtgattcttttttcgtaaagttacggaaacttacgaattttgtaacgatacttgttttctttccgtaatgttacggaaccttgcggattacataatcatccccttttttgacttacggaatgttacggaacctcactaattgtgcaacgatgcttccatttgatttccggtgtgtcacggaaccttacggattgtgcatcaatattttcttttgttntccggcatatcccggaatttcacaaattgcctaatgatgggtgccaagcacctcacaaggaccaaacaaaagttgcatgtcatcaagcaaaggtcccccggacgaaattagggtatgacagtngcccctctttacttgtcttttattggagataaaaagggaagtaagataagaaccctatttcgttcctct

SEQ ID NO: 6471 - DNA, 618 bp, Glycine max
  unsure at all n locations
ttgctggtaaaggtcttgaatgaagctcacgtagcccaagacatctccgtagaaggctttgggggaatcgtcaataacatcaaagccaacaactacctcaccttcgctgaagaggaaatccccgccgaggggagaggacataaccaggctttacatgtgtcagtcaaatgcatggaacacgttatggccaaagtactcatcgataacggctctagcttgaacgcgatgcccaaaagcacattggagaaattgccatttaactcttcccatctaaggccaagttccatggtggtctgtgccttcgacgacagccgccgagaggtaaggggagagatcgacctcccagtacagatagggcctcatacctgccacgttacattccaagcgatggatatcaacccagcctatagctgtcttttggggcgtccatggatccactcagtgggagttgtcccctccacactccaccaaaagctgaagtttgtagtggaaggacatatggtcatagtatcacgtgaggaagacgtcctgntaagttgcccttcctctatgccatacgtggaagccgcggaggagtcattataaacgactntccaatcttttgaggtagtaagcatc

SEQ ID NO: 6472 - DNA, 482 bp, Glycine max
agcttcccagttatggaaagctaaatcctctgtaggatcttccttgtaggtacttgatgtaaatatcttattatctatttaatgatgttttgtgtgttcactgtgctatcagaacttcattctaccatgcttttaccttgctcacgtagatgcatgtgtccttaagatcattcaacagtggaaactggtttgatttttagaacttgataggacaagactagtttatcgtatttccatgaggaatcggggtacggtaacctagttgttgtatgtttgtcttaattcggtcccggtcgagtttagtccaacaaaaggaatctgcggacgatactttatcaggattactagactatcatgaggaatcgagatttagcatttcaggagacaccatagaacacataagcattgttatgtagaaaacatccctttaacaccaggcacctactaagaagaccaacgtgatgtaagctccattggagctt

SEQ ID NO: 6473 - DNA, 368 bp, Glycine max
  unsure at all n locations
tcaagaggcaaagtgcaaacatccttcatttcaaaatgttcacttatgtgtattcaaagaattgatcaaatcataaaaaagataagggtaaatagtcacttttgtccttcaatgtgtgattcgctaacaaatacgtgtctgaaagatgaaaaaagtgcgactgntgtgtctagccgttctcatgtcgtgcactagttaaatacaaaggcctcacaggcacagtaaggacatatcctactactaaaatgattgactactatagactttatatcacactgacgtgatctgcataggtacgaatggtaacacacaccatacgttattatgacaactctatctcttagctaggtatctgatatatagactca

SEQ ID NO: 6474 - DNA, 565 bp, Glycine max
agcttttggtacaaaagaagaagaagaataacttcaaagagatttcaaggcttgtaaatgattgtaagagattgttagaaagattgattaaaaatgcaaaacaaagccttacttttatagactcttcatgtatggtcaagaaagccattcagaagagttataacttttagaaaaacttaaaacccatttgaaagggtcaaaacctttttgaagagttacatctttagatttttcagaaacaaacattggtaatcgattaccaaataagtgtaattgattacacaaagattttgagtgaaacaatgtgactcttcacatttaaatttgaatttcaacgttcaaggacactggtaatcaattaccaaatcattgtaatcgattacagccttttgaaaatatttggaacgttgtaaattcagtttgaaaactttttcaaactcattttgctactggtaatcgattacaacaatatggtaatcgattaccagaagagtaaaactcttttgtaaaggtttttgtcaaaactcatgtactattcaaaagttttgaaaaccttttaatactt

SEQ ID NO: 6475 - DNA, 486 bp, Glycine max
  unsure at all n locations
ttagaggtgctagtggaagtagaaagaagttgattgtaccctttaattaaatcttctctagatttgaatattacctcttcaccatcagagttgacagtgttatcaggctaaggatgtatcaaccattagacataggttggtttcttcctcattgtccttatcagacaatgaattatccaagtcctcccaagtgttcatgaggcttttagatgcaatcctaccccgcaagggcattggatagaagactccaagtttattgggccagagatccaagggaaggccctanggttctcatgagccttanggtagatttcgagcccatgggctaagtatgagcccgcttatctttgtaaatattagaatagatttttcctttgcttcgcgcccttgtatttggccattctagtaatatagggctttaaccctgtatttcggggcattttgagtagtctttgtaacaacgacttttnttgtttttcatgtttt

SEQ ID NO: 6476 - DNA, 494 bp, Glycine max
agcttgtcgaagaacatgcatgatataattataaaacatgtatatctgtctcccaagaagccattcaaattcaaagtggctgaggctagcttttgcttattgttgttgcatgcatgaataactagctatatattgtaagttaccaattaccacgtatatgttggctatgcaatactatattatcagttatcacgatcataaagtactacgaatgatgcacggtaacacgtttggataaaatttctgtgcactggtttccatgaatatctaactaacgtgggatgttttcctcgaacaattttttttttgggtacgtaatagtaacatttagttttttttttctttttttgatttaatacgagatccatagtatccgaatgttaaattagactggatcaactgagggtaatattacttattctttcttttcatattggtaagtataacctttttaatataaatttaattcttttgagcataaaatgaaatgaatg

SEQ ID NO: 6477 - DNA, 470 bp, Glycine max
  unsure at all n locations
ttctgccaaaatcccagtaattaaaatttgtaccttacaagatttagataacaactggttgttgccccaaactcgcagcacttgagttttaaaatcgttcagaagtataattgcttgcaaaaatgcagccttcgggctcttgaggcttgaagtgagagaaataaaaattctagttgttaaggaactcatggttagcgatcaattctctgatgatgatactcatcacatgaatatctatcttgagaggatcaaagttttggagcagtgaaaattcaacctctaaggagtgtgtcgctgagattttttttttttttttacaatatgcttgcaattaattagtttgtgttcaatcacaaattggcttttatgtaaattattgtgatattcacttntccattttgaaaaactttttatgctgtcctaaaaaatctttaattctatgagatataaatacattgttataaatagca

SEQ ID NO: 6478 - DNA, 1107 bp, Glycine max
  unsure at all n locations
tgcgggttcctcgtatacgctctagcatacaccctgaccaccctccgttacacantnntatnacgatatttctcgtcataacacctattattaatatattcctgtaatatacccncccccnnaannnnccacgattgagaccatggcagaaccggggatcctctanaagacgactcgcaggcatgccaacctgcaggctcgttaaaagaagaaaactttgctataaaaagttatccaccacacgaatcaaaacactgagggcacttattttaaaaactaacaagcctctaaaatatatttttaaaatatttccataaacttatttaattttctggctcagaaatccctaaataaatctttttggtcgtattcgcaatttccttatatattaaaatttgctctcggagtgtttaatccgtataaccgggttcctttttaaggttgataatttaaaagaattgactggtgagaagaaatcatattatcacttcactacttcaaaacaaaaaggtttgaacataatctaggggctaataattatattatataacaaaaacttattctggagaacctccagctaaaaaatcggatcccttttatcttattacggatctccaacagaaattttaaaacacttcttctcgggcatcttcagaagtgaactcgcaaatgtacaaacaaagaagggattcttttggtgatttggcttgaaaaccacccacactccttaaatctggtgataggctacaaccctcaggacctatattttgtcgcacggcattttggaaccttgggactcccactttttccatggtcatggaaataaagagatgggaattttcatttgcattgaaggcgccccattggaggactatgaaggccttttagcttttaccacctcccaaaatttactagactaccttcttttcgtttgttaacattaaaataagttaaaatacccctgtctgtttctcttctcgtgtcagggntgatctaactcatctccaccatacaacgatcatagcgctgatctcatcggtcccgctcgtctgtattctaacgtcgagctacttataccgtcgatcacgactacacagcgacacgccg

SEQ ID NO: 6479 - DNA, 565 bp, Glycine max
ggctcaaacacgctatgaccaactcaaccttattgaaggtaaacgcttgatggccatgtgccatgggcgcctatatcaacaaagaatgaagaatgtgttcgacaagaaagtgcgcttgcccaagttccacgaaagggaccttgtgctgaaaaagatgtcccacgctgttaaagaataatcgagggaagtgggcctccaactaccaaggacctttcattgtgaaatgggctttttccggaggggccttggtgcttgccaacatgaatggcgaggagctacctttacccgtgaactctgatgttgtcaagcgatactatgcttagaatctggggcaattaaggatatcattgcatgttcttttatttttatgtgttcttcttgggttcccccaaggattcccgtctgctgtatatttctcgtcacagtctttttaaaaagaagagaacaagagtttgaggcttcaatcctcactttgggctttaaaccatgtgcagtttgtgataacctgagcctttttccttagtccatgggatgccccaagcgcttaattaaaactgaacctgac

SEQ ID NO: 6480 - DNA, 476 bp, Glycine max
cttacaagtttgatatcaaacaaaatcggtctctattacattcacttcctacctcaataactgttttgactcaactttgttctactaatcaacttcagctttgtgagccatattaatgccaatctatatgttcaaggagcatgacattaatgtaaatgcaaagattcattgaccctcacctttgttcctttcaaaaattcagttgcctttggtgatggcatttgaattaccttccattccaagccatggctccactagcacagatctatttgttattgctgtctccatcttgttagtgttatttggctcactttgttattgcttggtaactcgcaagtccaagggaacatattacaatgacaagccatcaaaaagctctgttacttgtagagtgttcacattccaagaagtccaaaaagcaaccaacaactttcaagaagattttctttttggcatttgggggtttgggaatgtct

SEQ ID NO: 6481 - DNA, 462 bp, Glycine max
gaggtccgagtgtgcaatgaatatgtgtacaaagagaatgggagactaagcatcaaaaaaagaaggtgcatgagaatgatgagataaatttcaaagacaattttctaataaaactgtctttgaatacttaatttctaagataatttttataaaaccgcccttggatatataactatagaagcaaagcttcatggggaatcaaaggtgattcaaaggtgttttgatgataaccatgatgattacacaagatgatgactcaggtgatgacaaaaagctcaaagatcaatcacagaaagccttaagtgaatcaaagatcaatcaaagaaccaccttatgtgaatcaagaacaattcaagagttcaagataagaatcaggaagaattttatactcaagaagaaagtctaaagtcaagaatcaagattcaaggttcaagatgtcaagaattcatatcaggattcagg

SEQ ID NO: 6482 - DNA, 1035 bp, Glycine max
  unsure at all n locations
ccccgccgcgcacagcatccatgcccttctgcccgaccgccctctccatcattacattcctcctcccacacctgcaaacccgcncncgtgaacttgtcttcccgtcccggacctaatgtgggcatcagcttgcttgcgttatcattaacagcgtaacaacgtgatgtatgtatctccgatgtatttaaaatccgcacctagcggtaatatccaacaaatgatcatggatttattttagacaaatgaatacgttttgtgaaatcaatcctcatcccagaatggcctattcacatgctcatggggatatcttcattgacatcgattatgacttggagaccgtcattagtaggtggagcaaccacactttctttcctttgacttatacttgaaaaaagaatatcccgcactatattcgcttctagcatgcactaatgcaaagagaatatattccttccagggtgaggagctattactctttaaaaactcgcctcatagcttttcttaggacgggagaactcacatcaataccaattaaacacttgacgatttcacctgaagattccattgacctcccccatgtggttgtttatcctaaaccggaggcgacatctctagtntacctaataccgaagactcttcgacgtctctttttatttcacaatcataacacctctcattgcaatttcatctataaaaaaaatgcggtgccccccgcctcactttaatttcagccaatcgaaccttaacagcccccttgctaaagtaattaataactgaaaatttcctaaaatcgggaggaagtatcctcgaccccaactaaaaggattggggttatttctcttgggcaaaggggcattttcaaaacacaatataatgggggcttcgaagctcgggtcaaaatagtttcacccccccaccattctatctacactcactatggttcggcctaagcattcaaaacttccctctggcaaacaaaagagtccctctctcaccatagagggttccaattatctccactctactggtccgcct

SEQ ID NO: 6483 - DNA, 909 bp, Glycine max
  unsure at all n locations
agcatcgaagactcctcctntatcacgtctcagtaaatcgacctctatgcttnccttctctcctttttctacacactcagcctccantacncnnnagccncctgatgattctttgcatatccgggacctggatantctaaaggcgagctgcagcattcaagcttattcgaagccccttgaattgattgccaagctctggtcgttcatgaatccttcgccgaaatgattgcctaaccctggtcctgcatcctccaatatcaaatcttattccgagccccatgaattgattggcgttcatgcatccttcccattgagtcccgaaccataccaattgactgcccagctccggatatgcctaccttatcaataaaatctattcgaagccccatgaattgaatggcattcctggatccccccaccattgaaactggaacccgcccaaatggatggctaatggtggtccggccatctccaccaatctattgttaccccatgaaatgaatgtggtaacgcattcctcacctttgagttcagagccttacgaaatgactgccgcgctctggagatgcctcctctataattaaatcttaatccaagccccatgaaaaaatggcacttaatgcatgcccctccattgaggccagagcccaccaattgattgccaaacgctgttcgcgcatccttcacaatttattccggaccccctaacatggtggggattaatgaatcctacccccttgattctcaaatcccacaaattgatggcttggccttgtgcagccattcctcattaaaaactctaatctagcccctgaattatttgcctttgtggcctctccgacataaacttggaaccacaccaaagagttgctaaacgtggaccggcctacccccacatcaagtgcagcc

SEQ ID NO: 6484 - DNA, 372 bp, Glycine max
cagcttttattattgacatcaggggtgaagctaattaaattctatttgtttggagaagggtatatggctacacctttgagcatgatgtatttatttttttaacttggggttatttttttaattttactatgttagcaagttttgttgttcttgattgatgcccctttggcaccttatgaattcttgtattataattggcacaacctaccttacgacaggatggcgaagaccaaataaataagccaaagcgttcgtcttcaagggaaaaaatgaacggagtccccaccaacgtttattcgagaaaaaaatgttagaaaaacccaaaagacatctatgaattttgaaaataaaggtttgcgagttgtttacaca

SEQ ID NO: 6485 - DNA, 452 bp, Glycine max
agctttaaggaaaattaatatgggattgtgctataatttaaattattaacttattgtaatttaatttattttggtgggaaatggcactatgacataaccatggaactcatcccacttccttcaaacttctatccctctttcttttctttttttgaaacttctcctttgtggttgagtttgatctatgttttttctcatatctatcccaagtcacaggtaagttagtttttccactcactactaaaaaatatacatttaacatcggcaggttaacatcggtttccgaaaaaaccgatgttaacaaaagcacggtggcatacttgtaattaagattagtttattaacatcggttttatacaaaaccgatgttaacacaaatgccgtggcaatgttaacatcggttttttaaataacccgatgttaacattccctaattaacatcagttttttaa

SEQ ID NO: 6486 - DNA, 439 bp, Glycine max
agcttgacacaacactctgagcataaaagtgtgttttcttttttaaaatgtatataagtgtatggcaattaaaatatattaaatgttcttgtatgttgacatgggtaataagatactttctacacatgcgcgtgtgcataaatggattacatgagtttggtctaaatcaaaggggctagcacgacatttttgcgttaatataagcattatcttgtaaaactaacttctaaatgtttgttctcgcaggaaatggccccgaggaaacttgcctcaaagagatccaggaaggataaagcggccgaaggaactagttctgctcccgagtatgatagtcaccgctttaggagcgctgaacaccaacagcgctttaaggccatcaagggatggtcatttctccggaacgacgcgtccaacttagggacgacgagtataccgattt

SEQ ID NO: 6487 - DNA, 538 bp, Glycine max
gcttggcctcaaacttgctgatgatatgctgtcaaaaactccaacttttaaaactcgtccctactggaattccaaaataagaaaaaggctttctttctctctttggcccagggaaggaaactgaacaccatctaaggttggcctattaaaattctcctcagaaaatctgtctttgaaatgatataaagctgcatttttaacactgctaggcttatggacccacacaccatctatgatcagaccttgaatagcattgcgcctccttctatgattaatcagtctatgaaaatagttagaattgttgtccccttcttttaaccacttcagtctggcctgattcaaaaacataagctgcattccaaagctgatcctgaaggtatttcttgagctccacttcagcttgagacaaagttctatcattaatacctacctccaaaacgttcaactccatctttaaatttggatttttctagcattaataacacccttggataagctccactgccttatgccaactttaatgaactttagcttttgc

SEQ ID NO: 6488 - DNA, 890 bp, Glycine max
  unsure at all n locations
caacctattataactatcaccccccttttacgcatttttcttccccaaccagatactatcncccnccncccgtgattgtttcttccaaccgggccggaaacttaatgcaaccggcggattctaattttaaaccttggcgcccatatcttcttcaaatcaccaaaagagggcattgtctaaggctgaagtgcgtgtctacagtgggaattttaaataccaggtgtgggtggactactttctctcttgaaccacgcgggcgatggggctttaggaaacaccatgggtcgcgttgctaagtttttggttaatgaaagataatcgggaaggaatatggggaaagcatgatgaaattgccatgctcggatgagctaaacccacccaaaaagttatagggttcttatgacgacgcttgtgaagaataagagctgaaaaaacctaagggaaaactgttgaaattaaagatacaactcccctaggggtttaaagacagaatggggtgtttaaaacccgaaaccaagaaagaacctagggcctggaaggcccaatggaggcagtggtacttatataaaagggaggaccgtttaaagctcgaatctttaacctcgacaatgcccccgtacgcaaacgtagaaatagatatgggacgcccccctccctatcggaaaaacccatggaacaaaggacctgcccacctcgagtgtctccttataacacaactgacaaagaaagcgttctgcgggtacaccaaacaacaaaggtgcgggatatactctctgaggttcttaacaaacgaacactctcccctcttcataagcttctcaataaccccccgtcattcaatgctttcactcatcaacactagcatctctcttccactaccttatcccccg

SEQ ID NO: 6489 - DNA, 614 bp, Glycine max
cctttaccccataattcctccaaatttgggccaatttgctttgaaccaaaatcttcttttatgaatgaagctctcctaccacctaagacaaggtagaaggagataaactgtacaggatcaaagttcaatcaaacaatcatactttcagcttaaaatgggtgcaagggataaatcaatcatgcaccaggtaagctttttagctaagtggctctcttcaatcaaaatatggccttcatcatcttcaatttcacgcattcattccatactcaaagattcatgcaaaaatcattactcaatgttagtcgttctctcataattaaagatcacactctcaccaggttgtggctaatgagtaccttcacaatcaaactgtcaaactgactaacattttcagtcatgatcctaatcaatgttctttcttctttaatgactgcacacttcattcaaacatatgatttacgcattccaaattcactcaaatcacgccattgatcacttcaaaccaattacaaacacttgaatgccaaaatcaagtttcaaccactggtccattcaagctttgtacaagctatcaacccaaattaaaaatttaacctaaaatttaaaagctaaaa

SEQ ID NO: 6490 - DNA, 455 bp, Glycine max
agcttaaaagaatcagaggggctcaaacacgctatgacttactcaaccttattgaagggaaacgcttgatggccatgtgccatgggcgcctatatcaacaaagaatgaagaatgtgttcgacaagaaggtgcgcttgcgcaagttccaccaaggggaccttgtgctgaaaaagatgtcccacgctgttaaagataatcgagggaagtgggcctcgaactacgaaagacctttcattgtgaaatgggctttttccggaggggccttggtgcttgccaacatgaatggcgaggagctacctttacccgtgaactctgatgttggcaagcgatactatgcttagaatctggggcaattaaagatatcattgcatgttcttttatttttatggggtcttcttgggttcccccagggattcccgtctgctgtatatttctcgtcacaagtcttttaaaaa

SEQ ID NO: 6491 - DNA, 1014 bp, Glycine max
  unsure at all n locations
aggaggagggaaggagaaagacgaagcaaacaaagttaaaaaactgacggaatctacgtgcggcaatgcaaagccaaaaaggcnnccnaagatgaccgaggcaatgcaannccgggcaataaaaaagacaggaagcgggcaaacagggaagacgaaggggaaggtggagattttggggagcggacagaaaaaaaagaacggggggggagtgtttgataggggaaagaacgacccccctaaagaaagaggggcgcgggagaacaaaacacacggaggggagagggcgaacggaataaagcacacgaaagaaagggggagaaaggagggcggcggcggaacggaggaaggaaaaggacggaaagaaggagaaaaaaggagcagcgacgggcgcaacggcgcaagcgaaaattaatagaaaaagagaaaggagacgcggaaagaagaaaaggaaagggaagagaaaaaaaggaaaacgggggggggggagacaaaaaaggcaaaaagaaggggacagaggacagaacaacagaaaagcaaaggcaaagcaggggcggggggacgaaagacaggaacaccagaaaagagcgcaacggaaaaacgaaaaaaaaacggagaggggggaaagggaggaacagagaagaacgaacacgagaaggaggcggacgagagggaagcaggggaggaacggggggaaaagaagaaaggggcaaaaggaaagaagcagacggcaacgcggggacgaggcgggagaagcgaggggagcgcaagaggggaaacacagaagggagggaggccggcgacaggggtgggaaaataggggacgaacaaggggaaaaaaagggagaccaaagacggagtgaacaaaagagagaggagggaaaagggacaaaaggaaggggagagagaagggagcaagagggggagaagggggaaagaaaagaaaaagacagggaagagaggagcggacgagaaaaaagggggaaaaagaggagagaaaggggaaagagcaaaaag

SEQ ID NO: 6492 - DNA, 792 bp, Glycine max
  unsure at all n locations
agccgagacggtcagaatggaatatcatcacgactgaaggaatggtgtagtacagaatagaacgaatatttgactaaagaanacggnnagtgaactgtctcccgaccaaaataaagagaacaacagacgaacaaccccaggaattttcattttggaaaaaacgagcagggacaaccgataaaaagaggtccaccagaaacacaaggaaaggaagaacggcacagggaaaggatatagaagataaaacattaaggggatggggacacgaaacacaaatttgcacaaggagattttatcacaacaccatcttaaaaagaagagggggtcaaaaggacaataacagaatctaaaaaccaaaagaaaaggagcaaagaaataaccaagaaatccgcctgggaaaattaagaaaccagcccaacaagagggggaatgattactgtataaacgaacagcgaccgacaaaaattatggaatgaacgaagcaagggggtcttgtaaaggactgggcaccaataaaaaaaaggataacacctccaataattgaaaatggcaaagatagttaaaacatacaaacacggaaggcgaaacgacaaaatcaaggaaaataaaatccgaaaacatctcctccctctaaaaaacatcaaattagaaagtaaagcctaaaaaaagaaagataaaagagggaaaaacaaaactcgttaaacatacacaaacggttacacaatctattcatcaaaaaacaccaaccactaacggattgcacaatgaacacaagaagcagacaaagcaacg

SEQ ID NO: 6493 - DNA, 488 bp, Glycine max
agcttcttaattccccttttaagaaggttgttttatgtgttcattgtttctatcagtactttattattgcatgcttgtggcttgatcacccatatgtgtgtactgttaggggctttagcatggaaagatgtattgtctccttaaaacttgatagagcaggattaggttatcgtatttctggacacggagtgcggtaatttagtttttattatgctatgatcataaagctgttcaattaaactaagttcaataagagacatctgtgaacgaagtttaattagaattaggctaaactcatgagacatcggtgtttagtacttgagccttcaacatagaacacaaaaacatctttaattagagaaacatccttaattgcatcaatttgctcagtaagaggacccaacacctttaaatatttgttttcacacttgctcacatttaaggcttttgtaattagaatagaacatacttttacttttattcacaat

SEQ ID NO: 6494 - DNA, 522 bp, Glycine max
agctcttcgattcattctatgtacccggagcggtccacattgtgtttcgagcattttggatctcggtttgtttactttttatgccccctgttgacgtgcttaagccattttacttaagtcgtttctcgcttaacttaaaaataaaataaatttccaccgaacgtttgaattgtattatccattaactttggtcaaaatcaattccgaccgttcggtcgtgccgtaaccacgttggaaatcaaaaagaggtaaaaaataatataattattcaaaagacatcttttagtaaaataaagccgaaaatcaatcagacgttttctctttgggaattctcattcttaatcgaattgattaataactaaagtgaaactaaggctaaaatcaactcgcctagtcaagctcgtccacaaaaataagcttttgaagattgtcatttcaatttttcactaagtaaaatgggtcatttttaaagtccaacgctttaaaagatcaccccttaaaaccaaaaagaatcacttgatt

SEQ ID NO: 6495 - DNA, 502 bp, Glycine max
agcttggacgcggttgacgcgtatgtggaagattgggtgtttgcccgaccagaaaacctggtcaacgtttttacaggaaacgatggtccattaaaaagctgaccctgaaaatatatcaccgtcaagtatagtattctgaatatgccattttttatgaagagatgatatttatctgaatgataagtatcatcttactctgtaaacagctcccaacccgccttgtccaagtttattaaaatcagcgaattcatttgtagcagctcgaatggtatcaaaattgaattgcaatgactcaccaaatgtaatttcatcttcgggactatcttctcctttaacctcacctgaatggggacccccctgaaattatgtgagctattcaaaatataacattgagagatattatttctcatatacaaacccagaaggaaatggctaaattggcttcctccgctatcttttttttattcttagctataagtgaatgagtaaagcatgcgttcaa

SEQ ID NO: 6496 - DNA, 1081 bp, Glycine max
  unsure at all n locations
agcaggaggagcgcgcatgataacgaggacggctacacagaatgcgaggcacangaacagatagctcnnggagaccaaactgcngcatacaacgacaactagtgacaacaancnntcaaggcnncnacnacgagggttgaaatcgatggtggaacgcatctggaaanggaggctaataaaataaacccccacggcaactcaacaacgaacaaaaaggagagaagatctctgattttattatatatacaacgcgccaaagaagagggggagagatttttttatacccaccaccaccaccgcccggaccgcggaagaggagcgtggagaagacggaacaggatagcgagccggcgacacaaagaaacaaaatggcgagaagcacgaaatgcgtagcgccggacggaacgaacgggaagagggcgaaccaggacgccgaacaaggagcgacaaccaggcggcgggggaacagaagagagaacaagagagccgaacgggaaatgagaagacgccgaagggagaaaaggagaagagaaaggggaacaggaaagcgaagaccgggacaagaagagagggcaaaggagaggagcaaaagggaggcgcaaacacgaacggagacgcagatggaagagcaagaggcgacgaacacagaggaacaatgacgaagggaggggaaagggagagatgaaggacagataacaacgatgcgggaaggacgacgcggacgaagacgacaggacaccgaggagaggcaaagagggagcgaacagagacgcgcgcaaggaagagaagaggaaacagagggaaggtgaaacgggagacgggggaaagcggaaacgggggagtagcgcagaacgggagagatgaaacccgagcaaagggagacgagaaggggaagtggcgaccagaggcagaggacgagcacggcaggggacaaaacggcgaagaggacaagaaccgatgcgacgggaccagaaaggacgacacgagcgaggaaggacgcgagcgacgggaaaaaacaccggggggacacgcgacagagacgcgagaaaagggtgcgaaacaggtaagcaaagaggcgggg

SEQ ID NO: 6497 - DNA, 496 bp, Glycine max
agctttttctttcttcttctctcttgctttctcacttctactcttttctttcccttctttattttattaaactttttctttttcttcattttctttctttttctacctctatttctttttcttggtcatttatttctttctccacgaccattattggtttttcactctcctgacttgtcacatctgttacctcctctttctttttctcagtgccatcctttacaacaatttgtttctccaaagccaccctatcttcatcctcaactaccaaacgcttcttgtttcttgtcatcacagcattacattcctctttgggattcttttctatgttcgccccaaagctattggatgacttttcagctaattgtttggctagttggcccacttggatctaaaggttcttcaatgctggctcagtgcttttggtgatttgacatggtcacctgcatgaattgagtcaaagcctcctcagcttgggtgcccttttgaaaatggt

SEQ ID NO: 6498 - DNA, 481 bp, Glycine max
agcttaatttacgagaaaggtaaaccacagactaacttgttacatttccaacagtaaactcgttatgaaaatctgagatttatctacttccatagtaactggctatatgtttaagtttgttttcagtgcccatagtaaattggtgtagaaagagcttaaaattccaaatgaatatctaatttctggccaagatccatttaacatgaataaataaataaattggcaattgtttaatgtctttgtacctgaaaccttgaggaagaaaataagaaacatatttgcgaatgaaccaccacaaacttcatgatttagacatgtgcttttatgcctaaattaatttttctgaatgtaagtgacaactaccactttgatggaaagtgccgaactcgttcaccaattatagaaaataccaaacttggtcactctatctgaacgtatattttggtaaaaagcgcccaaaattaagttcaacttttcacct

SEQ ID NO: 6499 - DNA, 888 bp, Glycine max
  unsure at all n locations
aacgacatccgatttatagaacaaaatgcctctcgaggaataagtatataaataataatagtataatatagtataaaggggaaaccgagaaatgaacttgccttcganaccnnaataaangnaaacacccccccccccccaaggnnnannnagatttttttttttgagaaaaaaaaagaaaacaagataaacataaattatacccaaaaaactaaataaagtaaaaaaaacatcacagtaaagacaataaaactataattaacaaaaaaaaaaaatcaacaatctaggaatttacaaaaaatataaaacagaaaaagcttataaataataaaaaaaatattaaaaacaaaatgtggtatcaaaaccacaaaacattaaaaaaaactacttaaccaataaattattaattatacaaaaataaaattacatgaaagaaaaacaattaaaataatttaaacagaagaaaaagaaaaaagaactaaattgcatacataacacaaaacacttaaaatcatctaaaacgaaatacaacaaacaaatcacacaagaaatagaagaaaaaaaaaataaataaaagcaaaaaatcgaatttcacaaaacatataaagagcataaataaaacaaaaatgaaatagacgaataaatggaaaaaaaataattaaagattttttgttgtataaaaaaaagcccccctggagttataaaaaaaaaaaacaccaaacaacacccacaacacaaagagagaagaaaaaaataattaaaaaaagtgtatggtggnggttnnnnnnnnnnnnnntnnnntattattataaggtgtaaataaattangaacatccatactccacatacacatatgtataggagggttgaanngtgctcatggtntag

SEQ ID NO: 6500 - DNA, 400 bp, Glycine max
atactgaaacttttgcccctattactcatctaaaagcaatacacattttactatcccttggtgctcatcatgggatgatggtgtatcaaatggatgtaaaaatcatatttctcaatggactaattaaggaagaagtctatgtggaacaacccctggagtttgagaattctatctaccttcatcatgttttcaagcttaaaaaggaccttgtatggtttaaaacaaactccttgagcttggtatgaaaagctaagtttggttataactgaaaatggctttaaaagaggaaaagtagatactactttgttgcccaaaaattatggtaatcaattcctaatcggctagatatatgtggatgatatcatatttgatgctcctaatgactctttatgccagcttt

SEQ ID NO: 6501 - DNA, 938 bp, Glycine max
  unsure at all n locations
atagaaaaacggaagacgaagaatacaaaaaagaacacgagaaatcaaatgggagaaaagaagttccanaaacnccccaaagggatggacgagatgaaccntatgaaaaccnaannaanaggaagaacaaaaggaaaaacaacaagaaaggagatagggaaaagagaaaaaggagaggaaagggaggggggggaggagaagaagagagcaaaaaagaaaaggagaagaagaggggaagaaagagagaaaaagaggagaagagaagagggaggaaaaaaagaagaggaagagaaaaagaggaaaaacgagaggagaagagaagaaagaggaaaaaagaggaaagaagaggaaaaacgaaagaaaaagggaaggaggagaggggggaagaggggaaaagaaaggaaagaaagagggacaacaggcaagaggaaaagagaggaaagagagaagagggaaggggaagagaaaggaaagaaaagaaaaggaagagggaagagaagagagaaagaggaacagggaagaggagggaggaggagaagaagcaaaggagagacgggaaaagaagagagcggcagggaaaaagaaaggaaaaagaagaagggaacgaaagagaagaaaggacgaaagagagagagaggaagaaagaaagaaaggaggagagagaaaaaaggacagaggaaggagagaaaaaggaaaaagaggagatgggagaggagaagaagagcaaacagaaaaggaagaaacaatagagagagagaggggaaagagaggaacggggaaaagaagaagaaagagggaggagggaagaaaagacggcgagaagcagaaaaacggagaggggcgaaaggagagagaagagagaaggaaagtacgagaaagagggggaggaaaaaagagagagaaagagagagagggaaaaaagagagaagagaggaaag

SEQ ID NO: 6502 - DNA, 687 bp, Glycine max
gcttcccaagtttttaagttattcctcaaaactgtcctaagcaaagttcccaaagtcctattaacaacttccgtttgcccatcggtttgggggtgacaagtggttgaaaataacaatttaatgcccaacttgctccacaaagtcctccaaaaacgcaaatcatcaagcctaagtataggatgcctatatttaatggtgatgttattaagggctctacaatcagaacaaatgtgccatgtcccatcctttttagggaccaaaatcactgggacagcacaaggactcatactatctcttacccaacctttgctaatgaattcatccacttgtctttgaatctctttggtttcttttgaattacttctataggctggcctattgggcaaagaagctcccggaatgagatcaatttgatgctcaattccccctcaaggaggtagtccacttggcacatttggtggaaacatgtcatgaaaatcctgcaaaagaattttaacactagaaagcacttaaaatcatcaaaagtgttaggggcaaaatctgatttttgcataacaagatatagaacgactgtttaacaccaaacaaccctcttgacctcactttttgtgggttaatacctctccctcactctaagggttccccctttcttttggaccctctttttccctcccagtggttccctca

SEQ ID NO: 6503 - DNA, 437 bp, Glycine max
agcttgaaccaagatcaatctcaatggtcttgtttctaatgagaccatccctttttttcagataagctctttctgcctctcccacttctcgcttggcacaagcacaatgatccaaccaaatccccaacacttgcttggaaatggggtccaaatggtccctgatgatctcctccatgcgttccactccgccattttccgtcagaacgcgaaccattatggctgtaggagaagaaacagtgcggatgtaaagggaagaagaaaagtatggttgaacctctggaactctctccagagtctgcctatgtttgtctagttgagtgtcctcatagaaagttttgaggtcatctggccaaagcacatggtctttccggggaggccaatcaagaatgagaagtagcattgttggactactggggatcatttcaaacacaaaattt

SEQ ID NO: 6504 - DNA, 1035 bp, Glycine max
  unsure at all n locations
aaaccgacaatctacacgcgagacaagcccgggcgcggagagaaacgcgaagaaacaacccaggacccacacataacccggccccccgcggccaatgggccgtgaccacgccnnncnnanaaaaaaaccaagggagaagcgacgccgaccgccccgaacgcggacgcatcagaaccaccgcagacccgaacaacgaggggacgacagacaaccacaccaccccccaccacccccaagaaaaaagggacagacgacagcggcgaaaaagacacagcagacaacgaggacgaccggccccaggcagagagcacgaacgcgcacgcgccagggcgcgagaaaggagcaaacagggggcacgcagaagcaccaagcccggcgacaacacacgacccaaaacaccgaccaaaacgacacaccggcggcgggggccgcgcagagccgagctcagcaccacgaccgccacaacagacaagcgccgccacacccacaacacacggaacaagacgccccaacggtcgaaacaacgacacacagaccgcggccacaaggcaccagggcatcgacgacgcaatcggcacgagagacaggaccaagcacaagccacaccaccagcgaccacagcgccaaacgacccccaacagcaagacacccgccaacgccaacgcgcggcacacccgcgccagaacccgaacccgggcagcacacgcacgaaacgaccgacagcgaccacgcgaccgccaagtcagcgccgcacagcgaccccacaccgacccagaacgacaccaacgcaggaagcggcgaacggaaacaagaaaggcgcgggcagacgaccgggcgcaagccggaccgagaggaccggcgcacaacggcgcgaccgaacgcagaacacaagagagcagcgagcaagaggacggacaccacggagcggaaagcaagacgcgacacaacagaccaagacgcaacacgaacganaccacgagcgaccaaacaggagaaacccacagccggtggcagccggcgcgcgacgagcaaccc

SEQ ID NO: 6505 - DNA, 916 bp, Glycine max
  unsure at all n locations
gcacactctatatcgatgctgtcacgtccaactccaactcanaacactatactgcttatcgcaacttctctgatcgtaccacctactagatccactcacnnnnnnnnnnccgcgccatgaaccgttgttgcacccggtagcaccacacncganctgcatgcatgcaagcttctgatgccacctcactcccacggagactttgttggaaattaaaggatatggcgcattcccatagtgggcattggaggcttggggaagaccacacttttcaaggtggcggtcaacgacaagaggatggatgaaccttttcaactgaacaagcgggcggggatcctcggtgaccttgacacttggcacaaaattattaaaaatgtcaaccatgctttagttccaaccatttccctggcttaacatgaaatcattaaccatctagaaattgacccagcccacaagtcattcaagaataagccttctggccaaaaggtcttactcaggcttgatgacctatggaatggaaaacatgccaaaaggatagagttaaacaagtggactcagtcggcccataggaaacaaaatccaatgggcgctgaaccaaacccactggtccaaggaacgctcccccaaaagcataaacaggccttccaaggaaaatggccaacaatccttcgcacgggccgccaaggaagccaagaaaaccttgagcgaccaggcgagcgccggctgtaaactagcacagcctagctccccaccgcaccacaatccatcccgcgcccctcacgctctcaaacccacacatacaaatcagcactcctccgcgaccaccccacccccgcagcccacctctcccacttgacacaaccgcgacgaggcccaactcctcggccaccgactgcccaggcgcatcacaccgaatccg

SEQ ID NO: 6506 - DNA, 248 bp, Glycine max
tagttaacctatattgaaaaatccccatttatttattcccaataagaaagaacagaaaagatgtcccctaaccttgtaatcttttactcactctaaaaggtcaaaagcgggtgaagtaccggttttggcgacacaaaaaatagttctcataattgtgatacacaccattatgacccccaggggggctcctcttggcagccctttatttctccaataaacgtttttctgtaaaaatcctttacctgaga

SEQ ID NO: 6507 - DNA, 1009 bp, Glycine max
tgctctcctgatctaaaggatccttcttctcaactatcattatctgctttatctgacttaaactctaaccagccacgggagcttgatcgttgtcctccccgaccggtaactaatcgcagcctgcagccttcaaaatttataagagatacctccaaacttgcgtcaacccaaaggcgcacgcagctcgatcgaccacaaaacggtgcactatgggctagggagcgaacacgggcggctaaaccaaaacttcttgacgtccgcttggcgcgaacaaaggcgtctaaaagcgccctacctggacagataggccattcgaagcccaaattaaggagagtggcaaagagagggttcaaagactgggaagaatgtgtccgagaaccattaggtatattatggaccccaaggaacctcggggaccataccctcggacctcaaatttcctctgctaaacacagcctcgtgctacggaatctatccgggggagggagtgaagaacccccattgcgtcttgaaaactgaaatactctttcctactgggaacgcgcccattctactctcgagaaaaccctcctgcctctgggcaagggagggggtagcatatctttagcgtgggaggaggcgggcgtaaatacctgcacctgagaggtgccaaaatctagcctagtaagaagctcactaatccaagtgctcaaacggctccaagctcattcctatttaatacaccgccccggggggtagaaccccacatggcggggggctgttacaaacttttatcactgcacaacggacgcgcagtccttacgtatctagtatgagccggtctataacacatcccctagcaaccgcagctcaaaggtacacgcttctcggcacctctttaggcccgaggatacatatcgcgcgtcgtaaatcaagcgtccaagtataacccgcatgacctcacgcgaaggcatctttatcccttaacacgaacgccctggccacctacaggacaagcgtgggcagatct

SEQ ID NO: 6508 - DNA, 983 bp, Glycine max
  unsure at all n locations
gcacgatacgcgaggactcgagccacgaacgcatcacacagacncacccttccactaattacctctacaattangctgtccacagntacctnacacccccaccaacgtgngatgagcccgtgtacctacccananncanaanacaaaacaannaactcgcggacgccaacccctcacaaacacacaacggactctgtaaaggtcccacacggcgcttccgggaatagacaatcctccgacatggaaaaccaaacaacaccccccgggcgaagcggcccaaaaccacattcaactcaacgccaatcctccgcttaacctcaaaaaaaaacaaacaatccccacccgaacgcccgaaaccggactaaccaacaaacccgcgggaaaaaaaaataccgaaccgacgggcgaggccgaaacccaccgcggaaaacaaaaaagagggacacaatacacatcaccataacaaagacaccctttagaaaaatcaaaccggaaatcaatccggacgccacacttagggaaaaccccaacccaaagcaaatggacacaaccaaaggcgaaacaaaagccaaaaacaaatcgcccaagcaaggccgcccaccaaaaaaaggctttcgaaagtcgacacctaaaagtcaccaccaaaagaaagggatcactcatctaagcgcccacaccctacaaagagcacccccttaagtaaaaaagcaatcactccgagaacccaaaccaccgcagcgccgcaccatcccacgcgcaacaccgaaaccgcgacacaaaaaagtcgggacacgagcccgcctcccaaagacaccacgtgaggcaatcatccccggacagcatcagcgcccacgcacaaccaacaacgccaccacccaacagtaccgaccgagcggtccacacagaaccctacacaccagctacagaacaccctgcaccaaacacaccaccggccgaccagacagcgaagacgcaggaagccg

SEQ ID NO: 6509 - DNA, 1398 bp, Glycine max
  unsure at all n locations
tgcgactctcagcgcgaccggaccttcantgccntatacgtgcccctcnacactagatctcactacgtatccagtacatctgtatcatgttcattcagttntgacgagaactatacagtcgtcaaataanctacactancatnnctatgccctncnnncnntctcacgagactgcnacnagattgtanancccagctangatctcatctcccancacttacncccgagaggnancccatanntanacagnatctaacactcgcgcgggccaatggcacaagcttgggaatatttcttaatagacgggaacactcttattatacgctctgggccggtaattcacatgagggacacaaacagctgggtgtcccctcggtgcgagaaaacattggntaatatccggcctcaacacatattcccaccaccaaacattacacgagaccgggaaagcataaaaagtggcaacaggcccggggcggggccctaaacggaggtgaagcccaaacttcacaatttatatttgcggcttggcgcctcaccttggcccggcctttcccagatccgggaaaaaccctggccggggcccagcctggacattaaatggaaatcgcgcccaaaccccggaactcccgatcgtagtaccaccccagcaaccaacatgacctacactatatcaaaagacaccgaacatgttttaacacatagcaatctactatgcacctagcgccaccgcgttaaactaaaaccctctactgtaagggagcaaacgcgcaacacgcgccttctcaacacggtaacacaatcctaccagcgtctttatggaacattcataccactctccgaaccaacgtcgccatccactacacacggcaccgcttcatcattctccattcactcgcaattctgcgccctaacacgactacagccttcctcatgacaccatgntcatatatctaacctcgacgataatcatcacaccacgccattatcctacaccttgtccgaccaatcgtcacaacacacacatccacccccaccctcaacataagcacgggcgctcacctacacgagcggccatatatcgcctcaaactggtccacacattacntcctgtcgtggatcacacaatcccgcacggactcgcagcaccagtccactgcagacaaagactctgccctcgcaccagtaccatcgctagcgcactcaacgtgacgacgttgaccgctatatccgtactctacaacagatcccgcactgacgacacatctgatcccgcacacaaatgttacaatcaccaaccnctatcctcgttacatccacgctctctctaccacctcctcacaactcatatattatcatatntactctgctctccgcgaagtgacgtgcgcacggccg

SEQ ID NO: 6510 - DNA, 1451 bp, Glycine max
  unsure at all n locations
gggggagaaggggaggaagggtaaaggccagtacacaaaaaagacaaagaaagagctgaaacgaaacgaacgtncncccnnccnggcgggatgagacctgatgacatcgcgacaaccncnnnnnannnnaannnnannacagcaagaacgaaggagaaaacacaaacaaaagaaagaggggttgtagttgttataaagagacgcanactgagagaagagaggaggagagagaaagggggactacgaagaacaaccgacggcataaaacagaccaaaaggcggaggaagcagaagggcagaagaaagtagaagaaagaggaggagaagagagaaggaagagacggaggggaaaagaggggaggagagggagagaaagaagggggaggcaaagaatgaaaagggagggacgaagagaagagaggcaaagaggaaggagagaacggaagagtgaaaaaaataaaagaaaaggagggaaggagacagggaagcagaaggagaaagggaaggaagacggacgaaatcagaagaacagagaagcgagagacaaaccgaagaagtgctgacagtagagagaagaagaaggatcacggagaagaagaagagagaaagggagaggaagcaggacaagaggagagcgagaagaaaggaggaggagagacaacgacgagaggagagaagaggagatacgacagtgctaggangactgaacacgagaatgagggagagaggacggagaagaggcgaacgagaacaggagagacgagacgagagggcgacgagagaagagacaggacgacggagcagcgcagggagaggaagatacgacagcggagcagaggaacgcangaagggagcgagggaggcggtgcagcagcgagagggacagaaaggaaggcagagaggcgagaggacgggcgcacgagacacgaaaacagcggcgtgcgagaganaaagaggcacaaggcatgtacgcgcgacatagacgagtagaggcacgatgngcangggaganagacgaggcacggacacacagagagcgagagaattgcgacagaaggaagacgganggtancgcaggaaagagacacatggaaggtagaacgcgtngacgatgcgagaggacagagtgcacgacatgcgataccacgatacgatatacgcacgaggatagaggagagacggtacgaaggagcacacgacacatagaagangagggatggcggangaacgangagctacangaacgtaaggcgtaggagacgaaacgaggtacgagacgaggaaggcagggaacgagtcaagacacgagcacangangcggagactggacgggagacggacagagagacgagcgtatacacgtaaggagtagaacgagacaggtagacacagagaggagagcgagnagatgacagcgcacgcgagacgtgaggggcgtgaggcgcgtagaa

SEQ ID NO: 6511 - DNA, 560 bp, Glycine max
caatgcatttattactaccaatgatcatacatggacccatacctgaaattaaccaatctcaaaaccatcaaaattttaaataatatcaaggaaaaaaaattaacacaaacatgataatattaaaattggtagaatattataaaaaatttataaatcacaaatattatattacaaaaattataatgaccaaaaaattagccgtgaggaaatccactatggtgattcctcccttgcgtggtaacaaatttttttggagctaaatgaccagcttaaaaaatcggtaagaaatatgttttctaacctcaataagggttgggggaaaccatccgatccttcaggtggcaggggcccaacaaaaaatgggaggtggcacactaagtgggaaaaaggggggtaccaaataaccgaatgaaccttaaactggcctttaagtacttttatttggctcggcgcctggaataattatggtggggccggggttatattgggtcctaaccataactggttcatgggccccttacaaaacctttcaaacttttaagcaaacataccccttctta

SEQ ID NO: 6512 - DNA, 183 bp, Glycine max
cagcttttaactaagcttgtctcgtttaatttattacaagcatttctaaatgaaaacctattaagcggtttagagaaatacttatttttttattaactttcttaaagaatttttaaaacaaaggtataaccagcatggattaagttaattcaaccctgtctgtaataacgcggaaaaaattta

SEQ ID NO: 6513 - DNA, 263 bp, Glycine max
aacttattctactttacaaaatcgagggtcaattcttgaagaaagtataaagaccacctctctgatattaccaatttgataattgagaacaaaggctcaagattcttcaatgtactctaaaatttttttgctaaaccaacaaaaactcagattaactaccaaagccaactattgaatttgttaaaaaaaaaaaagaaacctcctctcaaccttgcattttgtactggaagaaaacaaattaaaatccgctatgaaaaaaaaaa

SEQ ID NO: 6514 - DNA, 533 bp, Glycine max
agcttcgtccacaagatcttgggcgttttttgtatgtttatgcaaaaaaccacagtttcttggtgttccaagaacacacacacccacattataagaggcattccaaaagggttttagtatccttagaaatgccaaaacttgcccaaagttaaatggttaaaacaaataaacaaatcacataatgggaaggctattggctagaagaaagacaacagaaaaccaattggaggggtggtttttcctttttcatttttttatatgaaaaaaataaattataatataaaaataaaataaatgaaacagaatctacagagaaaaaaggtttgataggcaacaacttaaacattccttccacaaaacaaggtggagtgaaactaactaaaatacctcaaactatctgaatcctcaaggtagatagacgaagcaaccaagggtacaagtgatttggacttagatatctaaacccaaaaaacacctactttgcaatagcctgaaatatgccatggttacattttgttgggaaagtaatgagg

SEQ ID NO: 6515 - DNA, 516 bp, Glycine max
agcttcaaaaaaaagatggcctcggcaaactccttatttccagaagggaattctatcaatagacctccaatcattaatggagagggttaccactactggaaaacccgaatgcaaatttttattgaggcaatagacctaaatatttgggaagccatagaaatagggccttatatacccaccacagtagaaagagttacaatagatggcagttcatcaagtgaaagtataacaattgaaaaacctggagataaatggtctgaagaggatagaaaacgagtacaatacaatttaaaagccaaaaacataataacatctgccctgggaatggatgaatatttcagtgtttcaaattgtaagagtgctaaggaaatgtgggacactctttgattaacacatgaaggaactacagatgttaaaagatctaagataaatgcactaactcataagtatgaactaattagaatgaatgtcaatgaaaatattcaaagcatgcaaaagagatttacacatatagta

SEQ ID NO: 6516 - DNA, 1106 bp, Glycine max
  unsure at all n locations
gagaggtggatctgtacatatacgagtcactctgacgangttgaatacgacgggatctttccgattattttaacgccatgaacacagacgtccncatagcaagagctgtgagtgaancatgtttgaaaccgttgagataacgcagaatgtaggaagcaaccttagaataaggctattgggggaaaatagtacaaaaatgttttattatatttgcgaggaagagcgagaaacgcgggaatagagaagtggaggatgtgattgtagagtgatattgtatagaggcacaagaacgttggacaacggcgtcgagtgagattatagcgtcatcctaacagaagatgtcancaatggataggcacaatgcgcgaggcgaattgtggacctgtggatcatggataaaggaaaggagcatagaggtgggaactatgatagttacatccaccacaggataggtntgaattaaaaagaatggagtttagaaattgggagtagaaaaaaaaggtctggggggaaaaatatggggcaacgtatataatagtggtggataaagcacaaaagcaaggattgtttccttaccaggtgtaggggaaataggtataaaggggataaacataagagatagaaggatggaaaggggttttactaaatattgggggggtgtggtgcagataagaaattaagggagtggagtttaaatttacctcaaaaagaaaataaattgagtgtggagaaaaataacaattatcgagctgatgtttaaagttcaaacaactggaagggggaggaaaacagggttaatgtatactggaagaatgaaaattgagaaatgggaaataaaattaaaacagaactccagtcattgctttgaagaatgatataggaacttgggaggggagaactaggataaagggattacttgggacgccaaagaggaaaaaatttgggttgcccaagggaaagttaaggattatataaggacaagaaaaacaacggcattagagaaaggggaaatgggttaaaaactacatctaggtgtgttcaagtatggttccggtaatatagtagaaatgaaacggcaaatattgtcgtgatgggtagaattttgg

SEQ ID NO: 6517 - DNA, 487 bp, Glycine max
gctttggagatttcaccacggagcatgccaattatggctattatggatagagttggtgggttcgaatttttgaagcacattgttttcaaatttcaacagtgttggagattggataatgtgtgtacttgactactacttgtgctatggtttatgggttttctttgcatttttcttttcaaaagaaaatgtagccaatgaaaagattcttagtgcatattaattgtaatatattttcttttattgaatattataatttggaaggtcaaatgttagatgataacttcttggagtttgtattttgatagcctagtcatttaccaggacttgggaaatgttctagatggtggccttggtcttctatgcattttgggccttggaaacaatgataccagcccccaatattatcattaaaaaattattgacctcaattttctcaagaaccccatttaaaagctagtgttttctacacaattttctcgaaaaattt

SEQ ID NO: 6518 - DNA, 940 bp, Glycine max
  unsure at all n locations
ggctgacggatcgagtaatacaatcaatacggaggcanacgtcgtacgaaatgattgcctaccatacaatcgactnttccccccnccccacgccctgganatganatcgattggcggtaccgggacctttaaagtcgaactgggagcatgcaagcttcaagagttaaaccgtcgaggggctcaaaatattattaaaacgaaaccttcttaggagtaaaaggttagaaacattttagtcccagaaaggagaaccgtcaagcagatgtaaaccgggaaaaaaagaaagtggacgaagaggggatcccaagaaaaaaaaagggcaaattaaaaaaaggagggggcggggccagcaaaaggaacaagtctgcaaagtgggcgagtggcggtttggggcaatccatgaaaccaaggactaggagggagaaacactataataacaattaaaccaaaacatatcaaaaaacaaaggcggctagagataacaaggaagcacctttgcatacaataccagcgggagggcacagaagtaatctacttacatacaagaattaaaaccggaggaagaatcagggagtccagccactgataccataggaactaggccaaagaatagaaagaccggaaaaaaaaagagtggacgatagatttgaaaaatgagacggctgaactggaatcgggaagatcacagcacgactagacggagcgaaaaaacaatacaagggagcggggtgaacacgaataatcaatagggaaccgaaggggcatcaatgaaatgaataagtgaacacctaaccagaagacagaacgaagtcatcaggctgtgatagacgggcataatgatgagaacaaccgcgcagccgaaacaacgtggtacaacggcagcgcagcgaatacggtacatgaaaaatgcgaacatgcaaatctccaacgcatgataacg

SEQ ID NO: 6519 - DNA, 323 bp, Glycine max
cctgcaagcctgcaagcttgacgtaaatcacatgactgttttagacttttccttctgagacgcttaccaaaaactgcataccaagaatatatactttgtgaaacatgtcagaaggggaaaaaaattcaaccttattttcaaacaaaaaatttgtttccacctcaagaccactggtaactcgttggccaatgtaccaaaatctcacaagtaagaaagttctcggaagttcgaatgtccaatccacagggactttgtttggacttaaaataatgccaacccaatttaaaacccagagaaaagaatttaaaataacagattatgaa

SEQ ID NO: 6520 - DNA, 459 bp, Glycine max
agccttggggctaaagacctatataacagcaccatggttatagtttaagaagtttggggtgaagagaataattttagaagcttcgcaaatccagtttggattacaggtcatgcccactgttcacgtaaaataaaattcggtttctggaaatttgtttctgcttcaaactacaatagtgttttctgctgattaatggaaggctaagtctccagcgcggttttctattgaagagcacagctctctttgaagtttcgctattactattgaatactgatcagttattcctcttcaccaaatactctgaatttggcgctaataatcgatgcatgcttaaagcttgattaatagactctgagcctaaattacattcatgcttaatgatcaagttcgtacatgagaaataggggaatatgtagcttaaccacaaaaagaaaagcctatgtccattttcgcttaata

SEQ ID NO: 6521 - DNA, 482 bp, Glycine max
agcttatgcgcatatttccctacgaacgttcacttgcacaagacatcctattaactaagaaaaatgcacccatatacaatcaaggtagcttcattacctagattatttacatgtacttccaaggtgtatttgttatttacatcacacacgcctccttggctaaatttacatacatgcatactcaaagcatttcggggtaccaaaaattgcacatgcgctcatcttggtatttctaatacctatacatatacaaacttcatgatgaatcttgactacctacgcaataaggtgctacatttcatgctcttttttttttttttttttttgaggggaatattaaccatgtcccctcccttctcatggattagcatcttgcctaacttgaacttacttaggttagaattaggcgttggatacttatttttttacttttttaaacaaacaaaaagtaaaagaaagctgcaaaatacaaaagatacggg

SEQ ID NO: 6522 - DNA, 318 bp, Glycine max
  unsure at all n locations
tggccagatgaaataccgggggacaagccttgagaaccgagcttgaacagggctcttttgatggggcagagacctttgctggatgggtgccgaatggaggggtttccggcatagccaaaaagcttggatggtgctaggcatattgatgaatattgtgaggtgttgattggggttttggccaagcaggaaccgaggtcacggcatgagcatccctttcttttctttttgccccggccattctgaatcttttgttgcttgtgctggcaggggcgacatantcgaacttccctattttaggcctatctcgatccctctacc

SEQ ID NO: 6523 - DNA, 451 bp, Glycine max
taacatcatgaaaatttcttaaatcacattatttttatatgggtattgctaattggggtttttaaagatattagttaagaaattaaaagaaaaaagtatttattatataattataagaatattaaaaaaatcattaataatgtaattttatgtattttgataaaaaaaattaattttttaattaatattttaacagcactcggtagtatttgtattttttatttattaatttttcgtttaaatataattttaatccttaattcttgtaacataattacacttttactttaaattttttattttttatttttgaaaaattttatattcaacttttttatttttgatgaattttatccttaaatctttttgggaaaaatttatttcacacttttgtgttccttaatagataaatgatgaataaattcttaaatttcttaagagaacatttatt

SEQ ID NO: 6524 - DNA, 521 bp, Glycine max
agcttgttgagttctttcacttttctggtttaaatgattgataattaactgacagccaaaatcatttggatttgcgggtacaaaggacaagcgtgctgtcacgacccaaagggtgataaattttcactttcattgttattttacattaaacattcattcctttcttcattttccagaattggtatcggtgctcatttagtaataaatacttcaattggtttattacttgttttgtttctaggttactgtttacaagcagcgagcaagtcggctagcttcccttaacaagcgcttgttcggtattaaattgggtgatttctggtaatgtgattgaattttgaatggttgacgttcttacctatcagttattcagttttttggggaatgatagctataaatgtactattgtccagttttgttaaggaaggactttgtcttggccagctcttgggaaatcgatttacaatcacattgcggtgaggactttatctttgcatgaaattcaatttcctatgtgaaac

SEQ ID NO: 6525 - DNA, 384 bp, Glycine max
aatccaatattcttatggcctaccaagtcacttttgacttcatacaaatcaatcaaaatttggtttttttttttgcacaatgactaactcttaatcgacttacagataaatatacaatctcaacacttagtcttttctctcaagaggtttaaagagctttgagggctttttcaaactatacaaaaatttacaaagagctttttacataaagaatttgaataataatgtgtaggtttgtatctcattcctttaaatgacaagtgtatcctacgccttagtaatattggactaaaagtttgaatattataccctaaagaccattcttgctaaacttgtctctctcaacaaagactatttgtatatataaagaggaaacaaattgtc

SEQ ID NO: 6526 - DNA, 445 bp, Glycine max
agcttatgcttttaatttagcccatttaaatataagtatgagcaacctttctttttcagaagccaagcttgaacttcaagtgttcaacttggctagatagacttgtttgcacctttactgataaatgactaatcagaaaattaaattcacatagaggaatacaatcattatactaatgtataggtgacagacacaccttacttttgcatttaaccttgtagactgcctctctgaatgatgagacaaagctgttattaattctgatctgccaataaaaaggcaggggaaataaaaagtattagctgtgaaatatagaggtgagaataagaacagaaccaacctgtgcatgatgaagatctggctcaatgtgtttcctaaataatggaaaaatgctatcaataaggtaatccagtgaacaagaatctccaatgtcatagcgaacttt

SEQ ID NO: 6527 - DNA, 626 bp, Glycine max
gctttggggctgggaaaaaaaaccatataacagcacctttgttctagtttaggctctgtctcttctatttttcgtttttagttttggtctctcttctctttcgcttttattttcgttttttacaatttcagttcacacttttagttttatcaataaaatttcgttctctatttgattaatggaaggctaagtccgcagcgttgttttctcttgaggatcaagcacagttctctttgaggttctattattactgttaaattttgttcagtttttcctcttcactaattactctgaatttgttgctattaattcatgcatgcttagtgcttgattaattgtctctgcgcttaatttacgttcatgcttaatgatcgtttatgagtaattggtgtgtgtgatgcttaatcacataatgaatgctttatggtaaattccccttagtaatttaatttaagggtgggattaaggggttaaactgataagggataaaattctcccacctacgataagaaacttgcttgtgaatcaaggggaaccaacctattttaattccgataaatttctaaatcaattttcctcgctgggtaaattaaccaaagcaaccaacccccccccccccccccctt

SEQ ID NO: 6528 - DNA, 329 bp, Glycine max
ccccccctcggcccaaagtgcatgaaaataccaccattttagtgcctaccactaagactactccaaatgccctgaaattcaaggctaaaaccctatactactatggcacccttaacttgtacccttaatttgtatggttccctacaaacctattctaatatttgccaagaataagtggacccaaccttggcccatgggctcagaaatctattctcacgttcatgacaaccctaggaccttctttatcagctctcacccaattctcttggagactcttgcttatggctctggtgactgcccccttactatggaggatagtatcatcccct

SEQ ID NO: 6529 - DNA, 483 bp, Glycine max
  unsure at all n locations
agcttgcagccattagaagagaatgagcatgtgattcgaattatgactaaaaatgttagttagtttgtcagattgattatgaaggaatgcattgaccatatcccggtgagagtgtgatccttaaattttaagagaaacgactatcatttaatactaatttttgcatgaatctttgaagtatggattgaatgcatgaaattgaggatgatcaaggccatgtttgattgtgatagccacttagccaaaaagctgaccacgtgcttgaatgaattatcccttgctcccaatttgagttgaatgaattattgattgattgaaccctgagcctatacaatgttatatcctgctaccttggattangttgtaggagagcctcatccacaggaaatgtggttcaaagcaaatttgtccccaatttgggggagtaattattcaagtaaaattgtcccaaatttgggggaagcactgggtaaaaattgaaat

SEQ ID NO: 6530 - DNA, 495 bp, Glycine max
agcttcagaactaggattggtataaaataggcaccaattatagaacaaattttgagccaaaacaaaaagcacacttcgctttcactttttttttcctggacactgatttttctgttaacttgtgtgatttttcttattttttttcttgaatccaaaatcgcttggttctttttttataattttggtccagatgtctagaaaattcaataaaaatttcagctcaaaacatgtagtgaccaattcccagtaatttatacaagtttgtatgttcaagttgccagcaccagtgatttcaacctagaaatcaagagtagtgtttatgttgcttaaggcttggatagttacaatttgtgtttgcttatgctcaattatcttgaataacacaattcaagagagcttaagacttatttgattcacaaatccagacactacttagcaccacaactcaacttcattataggcatcatgtaggaaaacttgaaaacaaaaaaaaaa

SEQ ID NO: 6531 - DNA, 489 bp, Glycine max
agctttgctgatttaattttcaccgacgaaaggatcaaagtgggtataaaaagaagcaaatttaatcatcctgcttggacgaatgaaaaaactagggcaattaaagaaggtgagaatgaaggaaaaacccatgctatgactaccattcctatacagcccagtttaccaccaacccaacaatgtccttactcaacccataacaaactttcttcttccccaccacccaattatccataaaggccatccctaaatcaaccacaaagcctgtctaccacacaaccaatgctaaacaccacctttaacacgaaccaaaacaccaaccaaaaaggaattttgcaacaaaaagcctgtaggattcaccccaaattccggtgtcatatgctaaacttgctctcatatctactcgataattcaatggtagccataacccctgctaggtttcctcaaccttcatttttctgaggatacgacttgaacgcaacatgtgca

SEQ ID NO: 6532 - DNA, 460 bp, Glycine max
  unsure at all n locations
agctttgagggtgcgtancccaccatcttttcatagtagagtatcgataatgtgtctaccatcacgatcatcgtctccctttccatcattgggggtaccacctgggccgccagatccctccaccttttgggcgtgttctttgaaagatccgtccccctttttgcaaatgttctgtagttgcatcctatccggaaccatatcaaaattgtactgatactgcctaacaaaggcaaccattaggtccttccaagaatggactcaggaaggttcctaagttagtataccaggtgacagttgtcctagtaagactttctcaggaaaaatgtatccgcagtttctcatcttttgcgtatgcccccatcttcagacagtacatccttagatgggtcttggagcaagtagtccccttgtacttgtcaaagtccggcaccttgaacttgggaatgaccatgtttgggta

SEQ ID NO: 6533 - DNA, 416 bp, Glycine max
agctttgagctaattcaaacgacaataatgttttgctcggatgcccgactgagacccgtaatacatcgagacgctcgaaattgaatgttgaagctctcagcaaattcaaacgacaataactttttactcggatgtctgattgagtcccataatacatcgagacgctcgaaattgaatgttgaagctctcagctaattcaaacgacaataacttttttactcatatgtctgattgagtcccgcaatatatcgagatgatcgaaattgaattctgaacctctaagctaattcaaacgacaataatcttttggctcggaagtctgattgagtccccgtttctattgagacgctcaaaatagaattcttaacctcctagctaattaaacgacaataacttttttctcggatgtctgattg

SEQ ID NO: 6534 - DNA, 356 bp, Glycine max
  unsure at all n locations
agcttgctctaaatttacattgatgtttgcattttatgggagaagttgtatgccctttttgttttaagaatagtgtcccactggtaaaactaactttccaaatttttgccttcgcaggaaatggcccccaagaagcttgccttaaagaagtccaggaaggacaaggcagccgaaagaactagtttccgtccggaatatgaccagtaccgctttaggagcgctgtacaccagcagcgcttcgaggccatcaagggatggtcgtttctccgggagcgacgcgtccagctcanggacgacgaatatactgattttccggaggaaatatggcgccggcgggggcatcactggttactccc

SEQ ID NO: 6535 - DNA, 368 bp, Glycine max
gggtttgagaaagaaaacttacaaaacttataccaaagtttgaatgcttgataacgattgaacattccagtctctgactttaacacttcaaaacttcaagtataaatagacttgtaggaagactaatcattggctctaaatgaccttttttcgtttgatgatcttctggtatgaaggtgtccattgagggattaaatgcatgtcagcaacttgtcaaagcatactattaaaggtagtgacagatccatgtttaagtgtatgggaaccattgcccccataatatttttttttacttgaatatacttaaaaaactttatttttacccttattaaaatggtattgcccacacaatttttttaaaatgaatg

SEQ ID NO: 6536 - DNA, 448 bp, Glycine max
  unsure at all n locations
agcttgttcaggagggcagcagtgaaatgngactgccactacccttctctctctcttggattgactatatatatgttttttattgaactaccaaattaatatatatatatatatatatatatctatatatatatatatcaagcaataaatactaccagaggtactacaggatagcacacgagagaagaactccttaaattgagaacaaaaaacagaaattcatttgcccacaaaaaccaccagaaacctgaccttacagaacacactctaattaaaagccatagacatagctgaggaccattgatgaaaagggaccattaaagtccttttcccgcccccctcagccaggacgaagtgaaaaaatttgtgttttccacccaccttagagatgtgaaaaggttgattatgaaaagaagatattcattggcggaacctttcatatttgacc

SEQ ID NO: 6537 - DNA, 968 bp, Glycine max
  unsure at all n locations
cgaccgacgaaagtcgcacaccttcacacccccactcgttctcaaggtaacaaacaatacatctccnncccgcgctgattgagccttccaaacccgaacccaacagagactgcaagcttctaccaaaggactaccacggacaaagccttttataaccccaaggaaccttggggaacaatccacggattgaaactcactacaacacctaagtgaaaaatcatgataaaaaccaagtcacgtaaggagataaaggagctttcggaacccgacatgggaaaagagcgaggagggatttaagtcccataggacaacatagactcggcggggtatgcataaacgacgcatgttggggcctatacatgaaagcacattgcacaatcggcacaaatggcaggacaatgctgaaccgaaaacggctaactattcaaagggcaagggcaaccagaaaaaaaaacacacaaaccttcgaaaaaaaaaaaggaaaaaggaaccgaaccctggaaaaaccagtcacaggtcgaagggaaataaacaccttaaggggcgccacaaaggaaaaaaggacccacgggagcaaacaccccacggtgaaaaactgccaaactaaaacaaccaagaaaaggcggaaattaaagaaggcaccgaagacaccacatgataagccctattccattcggggagtaaagacgacataaggcccagatcatcagcaaaccttgggccgctgggacaaactaacacgctaaaaagaaccataaaaaccctaacacgcccggagcttaaggggacgatgggcaagataaaaaaactgacccacaaataggggagcaagcgttctacgggggcccatgagggcaaacagcaaccaaaaaactcgaaagaaaaaaggtagtaaccggggagaggcgatcacaccgcatgacatgaacacaataccaacctagggtcaacaagggaggcgacggaag

SEQ ID NO: 6538 - DNA, 526 bp, Glycine max
agcttatggacatcaacaaacaaaaaaaaaaatcatcatttcaatcattaaacacacaaccaaaacattaacctaaccaaattaaagcttcccttacctttcaagctttttccccaagctaagttttgacaaagagaatggagaaatagaatcttgagatccaccaaggatttcctacaatcaatagcaccaacacaccatacccagggctccaatttgggtcactccaaggaaaggaaaaaagtaaagaaatggagcaaggagatcaaaggcggaatgaggagagcttacccactccatggcagtcaaagaagctctaaggaagaagacataagccaccaaagacaaaagagtaactttgagataaagaaggagataaaagggagaagatgagagatggaggaagctttgcatgtttaaagctttggaaaaatagaaatttttgctaactggacctcaacttcctctaaatatacccctcactaaaataaaatacacatattttaagtccattttcgtgaaaacc

SEQ ID NO: 6539 - DNA, 1462 bp, Glycine max
  unsure at all n locations
agcgagacatgcgcttantcgagtctgtacttacgataanctctagtgtgaaacgtagctatgactntaactttcgtacgtatctgtacgtcactgtatgnatatgcatgtcacacatgtatatgtatgtatancatacaatatcgggcacngagagtgangttgatgtacgttttcgcgattatcccagtgagaatnctcaccttgataagcaatggcaaggccttggctaaatcaaatataaacatatagacacgaagttgagaaatgtgagagagtatcgtatcgttttatatangcgcnagtgtgactcgcactaaagagagggtacgcggtcgtcgcacattggtgtcacaaaacgatttcgtnctatctcgactatatctgactgttggaatatctccactaggatatgagtgacgcgcctacataagggtacaagacaatatgcatcttataacactgatacggatatataccggtatacaccgtaccatcacgtcgcggggccactgaaaagcgaagacctaagaggtatacagagcccctcggtggaggtgagctgaagccagagaccanctctgcgattgttatgcggatggcagtntcgtctgctatcaccaaccaantccgcggtctttcgataagctcacatccatacggggatcgaggcgcggcttttgtgccacgaggaactcgcacctccgttcctagacatttagagggtagcataacggaagttataacatggtaattctcctcaagcgacagaggaaaataatcgaggcgcgctcgtgatcgaggagagagcaacccacatttgggtgtaacatactcgatgggggcgaaaggttatgaactacaacgaaaactaaattaccttggaagtgtctaatggtccgacggctgtgggaccaaaacaaaagggtaggggcggtcgctcacaaacattagacaaataccacgggagtgcaaggtgcgagtcaaattaggaatcaccacattgctaattgactcaccagacgtaatcaatcacacaacacactngtggtagaatagtcacgttcgaggagttaacgaatacagtaggtagatacacgatatgtcacaatgttaatgccgaacatattgtgtatatcgcagggtgcgaaatgagcatcgttcacagacatgaatgaactatcttcttgattaacgtatagatacaatcagatcacgctatcagattcttaactgctatgtcgtctcgcagagtacatagaactgacatactacatgtgacacgatcataaaacggctcgcgtcgtaacctaactgctaatgacgatattgcaccatggagatacggtaaagacgtgcgtaccacatgaattatatacagcagccttcactgtacttaaccaatatctctcgttgctgatttacacgctcactatacgatattacacctcactcatgcacg

SEQ ID NO: 6540 - DNA, 906 bp, Glycine max
  unsure at all n locations
ccgcgccccaaagaccactcccccacacgagaaacaaaccttggacaatacgtgtcactctaaacgcccccgtccnncncccccgnnatgaaccgtgaccttccgggaccccagagngancggaggcagccaacaccatactggaacatacaaccggcaaacatattttttatgggggaaatcacggagggcttcaaacccccacaggaaagaaataacagaaaatatcttaaggtcataaactgcccaaaattctcctaacaaaaaatgaaatcaatcatggagtgattaagaactgaaaactaactagaacctcacctaaacatttatggtaaatagctctttcactacggcaacattctggcctaaatattaccttgcaggctaccactgggagggaaaacaactatctaagacataagctcggctttgggctaactgctaagcaaaaaaaggaggccctcagcaacaaaacgccccaacatggaccatactggctgaacctgagacggctctcccccccaccggccctttaacatgaataccctgaaaaaaacacacctctgcagccggaaaataaaaactcggcttccccccccggacacaactgacaccaccgcacaggctcatccatcgtacgaaaccgccggcacaccgcaacgcaacaccacccccacgggacacaccccccacaccaaacaccaaaagcctcacccaaagttattgtttaaatttttaacccccgtgggtagggaacgagtttgtggttcccccggtntttttntttataaaaaaagaagacaagagaagacccnnnnnntncccccccagaaggacataaagcctgtctnnnccnnnnttttnttttttnnncacgcaggttcgccgcccccccccccccgcagc

SEQ ID NO: 6541 - DNA, 415 bp, Glycine max
cttgaagggtggaacccaccattttccataataaaaaactgggaaaggggctactatcattggcatcatttttttcatcattgaggggccaactgagctgccaagttctccacctttgggggtattctttgaaaagacccgagccccctttttgcacatgttttggagttggatcctatccgaagccattataccgacactgcctaacgaaggcaaccattagggcctcccaagaatggacctcaggaaggttccaagttagtgtaccagggaataactacccccagaagactttcttggaaagaatggatcaacaattccctatcttttgcggatgcccctatcttttcgacaatacatctttaagatggggtcttggggccaagtaatcccccttggactttggcaaaagccc

SEQ ID NO: 6542 - DNA, 394 bp, Glycine max
agcttaagctccttcaactgcacaagctcttaatatttgaagagtatccttgtggaaccttcacctgacgaagacactgacaaaaacttatcttctccttcttggacaaaatatggcaggctgggggcaagtaaattttcttcccatcataccttggatgcaaatgtgattgtatacccatatcaggtagatcttgacgggtattcaagccatccttcgtcttgccttgaatgttaaagagcgtcccaaccacactgtcacaaacatttttctccacatgcataacatcaatacaatgtctaacgtcaagatcacaccaagtcggaagatcaaagaaaaaggacctcttcttccatatgcaactctgacttttatcctttttttggggccttcc

SEQ ID NO: 6543 - DNA, 1759 bp, Glycine max
  unsure at all n locations
tccgcttagcccgcaagtctagcgtgtgttantgtagtcgcagaatcntctcagtagcacgtacagcactctttgtgtcatcatcgnanatcantgnanctatctaagtgttcacatcacntatgtagatgatgtcgctcgngcgtgcactntacacacagtagacgttgaangctcgttgagatctcttctcgcagtgacaccgtggaatacatttctagatagatcgatcatctagcatacgctatacctaatantgcctgatcaacgagacaatcacaacanacacagatcgtctatgtatcgatctttctctcaggtatgcgcgccaatggcacngaccacacgacctcaatgagcgagacgtacacacatctcgctctctgactcatcttcgtgaggctctcaancacaacacacacatgatatctcgcgcgtgcgctatatacgacacgacacaactctcgcaacgttgtacactgtcagtcgctcatcaacgngcggctgcaaggagagatgtggngtgcgtaacgttgctgggcccattagcatcggagaccaaggaatagagcgacctatatgtagatatgcgctgtcggtacgtctcaancgcgtgagacaacatggccgcgaggcgagaagcgtgtgtcgtgtaaattatggacactcggcgcaacactcttattgtggcgcggcggcaatatatacataggacgggagtaacatagtagtgatgagtcgacagacgagtacatccacacaaggcgctcacgnttaatancgttctgtgaaataggacaataatctactcttaggtggcaccatatgaggaggcgcacatagaccncgttacaaggtactgtttctaaggacgtagtgtggacacgcgggcgtgaacatatcgccgacataacgtcctctatgggagantggcttaagtcangatctctcattccttgcagataagcccgcgtctcctgtttattattcgctggacaatagaatagcgtcttctctctagtacaaatcggcgagaggggtcaatagagatcaccctctatggagtaggcggagtagcattctgggctgttataactaactcgtggcagctatcntgaaagtactctatctctacagtacaaactgctatgatctgtgtaacgcgcgcgcagtgattgtgaatactgtgtgtcgggcgcacacgcgcgctctagtantntatcaatacatatcgcgtacgcaagtatacatacgtangagaganatgcgctcgtcgtgtcgtgtgcgtatacgacgagacagcatctgactantagcgcgcgtgcgtgcacgtgctgtgtatatgagcagcacgactgtgtatagcacacantgagcgagagaaatnaagggcgtatttgtgtgtatacacacttacagatacacgcgttcgtagctctcagcatgcacgtgacgtgcttcgcaanactaataactctcgacngaatacattctattgagaaacacacctgatatgctcacatgcggngtatacgcgacgttcattattactgcggactgtagccantatgactaaaatagtctcatgctgttatgcgttacgcacgcaccgatagcgctcacgacnattgtcgtataatgctcctgtactcatatatgtatacgcgtttactatcacacacantgatgcatagtgcacgaacgtactgangctaactcatatttatgcgtgcatccgcgcgtgtacgtctacgtccgn

SEQ ID NO: 6544 - DNA, 266 bp, Glycine max
agcttgagatgaggaagtgttgaagggtgaaacttcctgcttttattggtgaccacagagtggtacctggagatatgtcgcgggggtcaagagaccttggggacgtcaggtggggtgctattgcccaaaaccaagcttgaccaatcccgacccaacccgggcatagtcggtcagtgagaacctgtgatgtacctaagcaggcgagctcctggcagtcaacagattaaaggaaccaagaccacctagcaaggaggcttgtggtggct

SEQ ID NO: 6545 - DNA, 537 bp, Glycine max
agcttggagaggatgcttcaatggaggaaaatatagagggagagaaagagggaggggggagcacgaaattgaaggaagaaaaagggagagaagttgaactttgagttgtgtctcacaagactctcattcatcaaagttacaacaagtgttacacatgcttctatttatagactaggtagcttccttgagaagatttcttgagaaaacttccttgagaagcttctttgagaaaacttccttgagaagctagagcttagctacacacacccctctcataactaagctcacctccttgagaagcttccttaagaagattcctaaagaagctagagcttagctacacatacctctctaatagcttagatcacctccttgagatgagaagctagaacttaactacacaccccttataatagctaagttcacccccatgacaaaaaacatgaaaataccaaaaaatgtccttactacaaagactactcaaaatgccccgaaatacaaggctaaaaccctatactactagaatggccaaaatac

SEQ ID NO: 6546 - DNA, 1247 bp, Glycine max
  unsure at all n locations
gcccgacgcagagcgagnacntaaggcncgactacaccacagatgtatgacacaccancanggcactaaatcactacggctactcctaggcggcgatgatagagtcgcgacgagcggnnacgnnncncnnnactccacgcgcaattgaannttcgtagattcgaattggcatatgtgcaccannccccacannnnnanaacgccgnanacgaggggggcnagcgcgccgaggcgtaaagaccacgagcgaaggcggccgccatgggcatattattattgttcgtagacaagcagcgcacaggccgggagacgcgcncggacgagcgacggacanaacaaccggaccggacaagacagcaatccactcggcgtcaaccaggaggcgagaaagagagagcgaaagggccgcgcggcgggcataggaatacaatgccaggaactcacagcgcacggaacgcgagggaacgccacaacggcggacgacggagaacccgcagaaagcgaagggagggagacaaggacggggggagatcaaagagcccgaacctacggggatacggcctaagaaagaggtaaaagagaggggtggccaaacaagcaacgggtggacgaaagacggaggatatacgcacgaaagcaagaacaagagaaatagcagatgggagaagacgcgacgagaaagcccacaccgagcacgcgagagaatacaaagaaacacaagggggcaggtgtcgctccaagacgagcggctacaaggaggacgaacaccaccgtagtaggagcgccgcgccaacaaaacaggacatacggagggcgctgggacaccgcccgcgggaacaccaggccgcacagagagagacgaggaccgggggggagcaaacaacggccgggggtgagagcaacgaacaaggcgaattgctgacgacccagacgcagaagagaaaaggaggcgacgcaaaagatgctgcacaagacacacagaggggacgggcgaccacagcacgcagatgcggcgagcaggagacacgcgaggcgccaccggggaggcagacgccgagcgcgaagcgaagcgctcgaaacgggcgcgcgcgttaagcgaacgcgagcgcgcgcagaagacgcaatcaagcagagacgcggagagcacgcagacagacaataccgaaacggccggcagctacgcgccacaatgcacacgcgccagagaaggatgcgagaaccagcgagcgcgacacgagacgtagacg

SEQ ID NO: 6547 - DNA, 347 bp, Glycine max
accctataacgcaacggggcggacaaaagcgggcagttaacttgaatggtcattattgtcaatgccgaagggattttgcgctttactatccatgttcacacattattgcagcttggggttacctgaacatgaactactaccaatatataaatgttgtttacatgaatgagcacatcttaaaagcatactccgcacagtgggggcctcttggaaatgaagcgggaattccttcttctgatgaggcatggacactaatccctgacccaactgcaattcgtgcgaaaggtcggccaaaatcaacaaggataaggaatgagaaggattgcctcgaaccatctgaacaccga

SEQ ID NO: 6548 - DNA, 382 bp, Glycine max
tgaaccattttatcaattaacaccagttgagttttattcagaaaattaaaggttatctcttttatcttagggagagtgattctcctaaattcttgagtgattcaagaacaccctggctgtatcaaaggactttcacaacctttgtgtgttgccctcgctggaaagaaggattctttccttcctttcatcttcacccttgttctttcaaaccacaattccaaaaaatccacctctgcccaaaattatctcgtggccataactcccattttacccactcaaattaagtgattcttgagcctaaattgactttcaaaacgagacctttcaccttgttttggaatcacctcatttggagccctgtaccttcagttattgccatttc

SEQ ID NO: 6549 - DNA, 463 bp, Glycine max
agcttacaataaatctattttttttttcctgtctacactctagcatgaaaattcttttttctatttttgagtagggatgaaggaactggtggcctaatactcaatcaataaaaacagaatgggctaagaatgtttggctagaaaatttggagaccggtaaagaatggggcactttgttttaaaaacagtaaaatatattttcaaagttttttttatgattttaattataaatttaacaaatactacattgtaattttgttttcaaatatacataatttcaggtcatgtttaatttaactcaaattaatttcaaagcattaatacaccctttgcactattttctttttcgaagaaaaaaaataaaactagctgtacgaaagagtgattagtgacagagacatggtaacaaaaattggcaagagaaaacaggaatagagattagaaggtgtgaagaaagagtgag

SEQ ID NO: 6550 - DNA, 600 bp, Glycine max
agcttgttacaatccaatattctttggcctaccaagtcacttttgacttcatacaaatcaatcaaaatttgttttttttttttgcacaatgactaactctcaatcgacttacagataaatatacaatctcaacacttagtcttttctctcaaaatgtttaaagtggtttgaaggctttttcaaactatacaaaaatttacaaagagctttttacataaagaatttgaataataatgtgtaggtttgtatctcattcctttaaatgacaagtgtatcctacgccttagtaatattggactaaaagtttgaatattataccctaaaaaccattcttgctaaacttgtctttctcaacaaaaactattgtatatataaagaggaaacaaattgtctctctcaacaaagactattgtatatataaagaggaaacaaatatatgaaatgtgaaaaaaaaaaatgcagattgcaaccccttgtacaataaagaaagagtgccaaaattagaaagatcataaacctataaaaaaagcgtattaatctaacactaatattaaaattaaccatatatttgggagaaaaaattgattaatatatatttta

SEQ ID NO: 6551 - DNA, 589 bp, Glycine max
agcttatagggagccatgccaatggtaaagtgaaaactattgttataagttaactctatcaatggaagaaaactctcccaacttcccttcttctccaagacacacgccctcaaaaggtcctccaatgactgaatggtccgttcagtttgtccatcaatctaaggatggtaagctaaacttaatctaagcttggttcccaatgctctgttcaagctctcccaaaatctagaggtgaatctaggatctctatcagatactatgctagatggcacaccatgtaatctgacagcctcacatatatacaaggaggtcaacttctccaaggaaaatctgatattaatgggaatgaagtgagcagactttgtcaatctatcaacaataacccagatagaatctaaacctctaggggttctaggtagtcctaccacaaaatccatggaaatactgtcccactttcactggggtatctctaaaggttgtaacttccctgaaagtctctgatggtctatcttagccttctgacagactaggcatgcatacacaaactcactaacctcttcttttatgttgggccaccaaaacatcggct

SEQ ID NO: 6552 - DNA, 1024 bp, Glycine max
  unsure at all n locations
acacaacagcgatgccaacacgacaccgcacccaccacgcagccggatacacccttccaaacccatcacaagtcgcaacctatacaccntcacnncnnnnnnnnnncggatggaaccgaggacactcgagaacccccagagncnancngcaagcatggcagcnnggaggaacagcnaaggaaaaccccaaaccagctgggttaagcataagcaccaaaangggaactgggcgccaggcccaacacggtntcccggatacaaggccaaagcccctcaaagggtagggggatcccgaaagaaggcggataaggcatggaaaaaaaaaggcgagtctccacaaggccccccggaaaagaggggccagaacaacaaacccaggttggaaacccaaaaaaaagaaaccatgcgcaacccaaaaaagggggggggggaaaaaccccccggaagttaagaccaaggggaccccacaaacacaaaaagcgcacccctcgagacccactaaagcccgggaaaagaaaagggaaaaaccacaaaacgcgcccccgggagcgccaccaaaaaaaaacgagaacccggggactccccccaaaagagaagcaaacccaaaaataccacatccccataggggccccaacacccgctgaataaacaaaaaagaggaactcggaggggagaaaaacgcacagggcgcggaaaaaaagaacagaaggagcaccccgcggcaaaacacaaaaaaacccccccaaaaaaccagaccccacaccaggaaaaaccccacaggggcgacacacccgtcccacacaaagccggagaaaatagcccgccaacacaaagacgggggaaacagacaacacaccggagagacaaggacacacggccacccaccaaaagaacgacccacacaccaacaagacgcgaaccacacaggcgccgaccaccccggcaactacacacccaccaacgacaaagacacaccgcagacacaacagagaacagacaccaccacgcacacacaccaaaacct

SEQ ID NO: 6553 - DNA, 414 bp, Glycine max
agctttgagccaattctaacgacaataactttttacttggatgtccgaatgagtctagtaatatatcgacacgctcgaaattgaatgttgaagctctaaacctattcaaacaacaataacgttttactcggatgtccgattcagtgacgtaatatattgggatgctcgaaattgaatgttgaacctctgagccaattcaaacgacaataactttttactcggatgtctgattgagttccctcatatatcgagacgctcgaaattgaattttgaacctctgagccaatttaaacgaaaataacgttttactcgaatgtctgattgagtccccgaatatattgaggacgctcgaaattgaatgttgaaactctgagccaattcatacgacaattactttttactcggatgattgat

SEQ ID NO: 6554 - DNA, 446 bp, Glycine max
agcttttaaaacaaaaaagttatatataaaaaataaacagaactaagataaaaaaaaaaacaaaaatctaataattctatctttttggtccctaaacttttttcacacttctgcttttaatgcctaatctaaattttgaccaagaaaatccctgaactccattaccacttttagaccttgtcaaataacattaattgatggcataatagcgacattgataatccaatgacttgtcacatcatcaaggagtttggcgggataatcacgtgtaattaatataaaaaaaaattgtaaactgtgtttttaatccctcatcaactagtctacgtcacatatctaagtggtatggaaattcatgaaactacacacaaagagtccagtttggactaaattggatttgttttcaaatttagattcaaaacacaattcaatctgataaaaaaaaa

SEQ ID NO: 6555 - DNA, 303 bp, Glycine max
agcttgagatgaggaagtgttgaagggtgaatcttcctgcttttattggtgaccacagagtggtacctggagatatgtcgcgggggtcaagaaaccttggggacgtcaggtggggtgctattgcccaaaaccaaacttgaccaatcccgacccaacccgggcataatcggtcagtgaaaacctgtgatgtacctaaacaggcgagctcctggccggcaacaatttaaaggaacaaagacccccaagcaaggaggcttgtggtggctggccaccttggaactttgattgatatgtgggttatgg

SEQ ID NO: 6556 - DNA, 340 bp, Glycine max
tgctctaaaattacatttgatgtttgtatttatgggaggaagttatatgccatttttgctttaagagtaatggcccactaaaactaactttccaaatgtttgccttcgcaggaatggccccgaagaagcttgcctcaaagaggtccaggaaggacaaggcggccgaaggaactaattccgccccggagtacgacagtcaccgctttaggagcgctgtacaccagcagcgcttcaaaaccatcaagggatggtcggttttccgggagcgacgccgccagctcaaggaccacgaatatactgattttcaagaggaaataaggcgccggcggtgggcaccact

SEQ ID NO: 6557 - DNA, 279 bp, Glycine max
aacgaatctattagttatttaaaactgtaatattaatgccaggtcagaaaaccaccctttatcttatttaattttcaaccttttgttcgtgtcaaaagactaaaatatgtaatatgtaatgattatcacatttaaagaggtaatcaataaatagcaaattcaaacaaaaaataaatagtactaaaacttataattaacccattatattacttaagaaactaaattaataataatcaaatttagctttttttggtatatcaaaggacccaattaatccaa

SEQ ID NO: 6558 - DNA, 1003 bp, Glycine max
  unsure at all n locations
cactgtatccgcaacataatgctcggtacactctcccctcctattcctcggactcatattcgtcatcggtttanttcgccatacttacctatcagaccgtcccgcgannnnncctgatttgagttcatngcaattccaancccgggatccctaaaaccaaccggaggcttgcaagctgggaagtggaaaaacaactcctttgatcaaccggaagacccccctgaacccctgccttgcctgaacaaaattcctttccagaatcctcccaaccgctaaaccccgtggagccctccttaaaggaagacctcttgggtacccggcattggagcctcgccttaaccagaaaacttcaccttttaacactctttgtaaaaaaaaccccccttttttccccgtaaattggagaagaaaattgaccattaaatttcataccacaagggttctacctgagccccagaataaaaacccaggccaaaatttattttcaactcccaccccaaagaaaacctatattggcgggaaaaataaaacatttttgaaaaaaatatcctttacaaaaaagttgtcgctttagaaaacctaacaaaacaccccccaaaattacactgttgctggtccgcccccccccaaaaaagaacaccctctggtctccagggagaaaaaaaacagcggggggttctcaagcggggtggccgcccaaaaatcacccccccgaaaagaatggcggacaagcctgcatcacccctttctccaaaaaagacggcttctttaaaaggcaaccttcctttctatggccgcccccccactcaacctagccgaaccgggcgttgtcatacatggcgggatcatcacaccccccacatcaccctgccggatcaccacataactcatgccctcacccactccctcgccgctcaccaccctaccgattctcacacaaccagtgctccgccactccctcattggcaccatcatctcctcacacctctacatcgtacttccg

SEQ ID NO: 6559 - DNA, 492 bp, Glycine max
agcctttaacaagtttcttcacaaataactatcatgaagcataaaactagcaagactacccatcatatctccccaaaccccatacccacgaaaatcaaaggagaaagaagtccacccaaacctgaaatttcgaagtcccactcgtagccacgcacttcacgactccaaaaacgccatcctttcacgatttggggaagaaatgatggccaaaggttggagctttgttggggtttcaatggagaatggaggagaaggaaaaagcaacgtgaggaagagggagagcttctgaattttctgctttggctgagtgaggagagagaaaagctttttggttttaaataaaaagggttttccctttttctattattttattcaagctctgccacatgtccctatttgagtggagcaaaagggcccacttttcctttttactgtgacccacacctcgcccacaaagtgaaaaaaatctgacctttgaaaccctaaaatcct

SEQ ID NO: 6560 - DNA, 516 bp, Glycine max
agcttcaagaattatggcctcatcaaaatacttgtttcccgtaggaaattctataaataaacctcccatctttaatggagtgggttaccactactggaaaacccgcatgcaaatctttatagaggcaatagatttaaatatttgggaagccatagaacaaggaccttatgttccctctataataaccggaagtgcaacaatagaaaaacctaaaacaaattggactgaggaagaaagaagattagtacaatataatttaaaggccaaaaatattattacatctgccttaggtatagatgaatactttatggtttcaaattgtaaaagtgctaaggatatgtgggatacactacaagtaacacatgaaggcacaacagatgttaaaagatctaggataaacactttaacgcgtgagtatgaactttttaagatgaaatgtaatgaaaatatacaagacatgcaaaagagggtcacacacataggtaatcatcttgcatctttaagaaaaaccttttc

SEQ ID NO: 6561 - DNA, 1030 bp, Glycine max
  unsure at all n locations
cgccacatctcttcatggtaggtcaccggaataccttgtgttacactatccaantactactactgttgtagttctgccacaccccaacnaatgcnttaatnaggacccncgatgagcctgtgtccatccgctatacacaaccccgggactgcaagaaagcaagcttatgaaggcctttatgaaaaaaatactattactggtttcttttgcttagaaagaactggacctggcgttgcaactattattcctattcccgaacaaatacaattctttacccacgaggagggatactcatagaaggaaactccctctagggtaaggaaagttgagacaagtttttgcttggacacttcaaccccttaccctatcaagggggagaaatgggttccttcccggatgggcactaacaattttcttgaaccttgctgatccaacgagacagaaaacttgacccgctaaatttctcccagtgtgagattagccttccttttcccctcttaagctttacctaagatcgagacggcagttttttattcttttccagaatgaaggaaaaaaccctacccccataacaaaatcattatttaccagaggcttccgcttcacatttatgaaggtttgttgggggtttacatctcactggaccatataaaggtatctctttcccacttaaggagaaaggcgaaaaacccattattcttctaggggagatccaacttggactccatgttccaggacattggataatcatgccagcctgagtgaaccaaaagcgtcctttgacataaaagagtgttattgtccggagacatacctaatcgcgtgaagggaaacggtcccacataaaggaaatccggagaatgtcttctttcttctcaggagtttaattttcacatagcaccttttggacacctcctggattaagggctctgagggacttttggccacgctattcgtttaacggacaacatgaacccaccctttggccctattaacccccacagaaggtctaagcctgggagtgcctcca

SEQ ID NO: 6562 - DNA, 1768 bp, Glycine max
  unsure at all n locations
accatgtcgtcgtncaaactccagtntagccgtngcnagcaaaanangcgntcgctgtgagccaccnagtnncnnttcctnacntacatctnagtcagcacgtgcttcttanntaatcantnnaccgtaaacgntnanntaaaanntcccctanattattanntacatcaaatannntccgnnncccgannttganantancaaattacnntncttcatnntantannacgggcnaaaaannannnntnnnnnannnnnnnnnnnnnnnnnnnaaatcaggannnnnattaggtatntgnnanccccnacttttcgcccanngnnaannnnccccnnncnnaagnnnagnnnnncngnnacnnncctagganncagnggggncnantctgngccannangggccncntnntgggcnacannaaccccccnancannataggggcnctnntccacnnccnancanntnannatatnaangnaaagcagggaagnngactanaanattttctnntcntnataaatgcnntncggcgtncnntncncaactaaaatnataannaaccccctgtccccctgcgcgtctgccttangaaaaatacganccntcaactnattaaacangaacaaananagcgtcntggtcgtctnttcccaacgagtgtcnccacatncntctggangtaggcccanaaaccnctccgagnatgggggtgcgacnacaaaactatggataggaagaaaaacctcattagcttggcttctacacaggaaatnacaantcaaaccngaaaacagaaaagnangatctgtcntnntgtgtctttcttaaagaacatatacccatacgggaaaaggaacaacacaaagtcgggtnctctntnctctggggcgggtngaaaacatncgctcaacatactcncccctccttctccttcttctggtnaggaaggnatnaananaantncnnccnacttttctaaaaacccacaangnagaatngnntggcgtcntcgggcaccnnctctcggtaaaatncncatccatgccaaaaataggtgntaggcnncctcatcaaacagaacnanataccccncntntnntntggggggtgncgtcttataaaaatacacctccccacatntcntaaccaaaatacgtcacaagtggtggcggcctctnttgggcgcccccccactatnagagacncagttcnntctttaaccanaagaggtgttgcccagagaaacctctntcgcgtataacctcctctgcccaatgggaggntattacactantncaattccactgttcgagtggngccacttncataacccattataaattttgaactcttttaacaacctcgggggctttgatcaaaaaagtttcagggatcatttttcaacttccaggtattataagtcacgattcttggcaaaatatacaattaataatcacctatgaaatagcttggaattttcttaactcctaggaagaccccctttaaagggggcatccaacattctccttgggggatcatgtcggttaaaccttgctggttcaacatatttccatgagattagaggaatcaacctgatccaccggattatcaaccacacgtttggggaaagcccaaccaggggtattcatacatccctttgaacttgaaggggtgaaataacagccaccttttacttggagtggaaggtggagatcctaataaacaatttccaaacccaaggccctcaatggacgcctcccccggcc

SEQ ID NO: 6563 - DNA, 195 bp, Glycine max
ccaaacttatgaaaagatttgataatcttaaacaccaagtataatggtgttataatggtacagtgatgcacatttgtgatgcgtggtttgggctattaatttattggtgctgagaatattatattggtgaccagataattatattaattaatgaatgtcttgagttgtgttggttgatttcttgatgatgaaatg

SEQ ID NO: 6564 - DNA, 404 bp, Glycine max
agcttttgagcaaattaaatggtcataacttcttactcggaggtccgattgaggcgcataatatattgagacgcttcaaattgaaaaatggaagctcttgaaaaaatcaaatgggcataacttgtgacttcggagtcgaattcacgcccataatatatcgagacgctccaaattgaacaatggaagctcttgaacaattcaaatgggcataacttttaactcggaaggtccgattgaggcgcataatatatcgaaacgcctcaaattgaacaatggaagcttttgagctatacaaatggttattacttttcactcggaaatccgattcaggcacataatatatccaaacgctccaaattgaacaccggaagctttttgaacaattcaaatggtcataactttta

SEQ ID NO: 6565 - DNA, 932 bp, Glycine max
tccgcttcaacctgtttgaatcctcttttgccttctacctagtctttcatatctaatccatctcctattatgcaaccccgccccaccgtgatttgaatccatcccattcccaggcaccctaaagacaaccgcagcctgccagctttatggggaaaccaaagggaatcaaaagtgtttttgatgataccatgatggatacaaaacattaataccaaggggatgaccaaacgctcaaagaaccaatcaaaaaccacttaagggaaataaagaacaattcaagaaccacctcaagggaatcaagaacaattcaagaattcaagataggaatcaagaagaattccagactcaagaaaaaaatttagaagtcagaatcaagattcaagggttaagaatctcaaaatccagatcagattcaagactcaagattcaaaaatcaagagaaggcttaatcaagaaagtataaaagttttttctcaaaaattgagaaccacatgatttttttcaaaacaagttaaccaaagaatttttactctctgggaaatccaatacccaaattgtggcaatcaataacaagctacaaaaatggttttaaaaaagttttcaaaatgacttaccaccgtcccacataatttcaaaaaacttggatataaatttcaaggtcttgtcgctcatactactccaagtacgttcaactgacattaattttattgcaatgatccttagctaataaccctactactgatacccctctacaaatactactcatcgtataacgtattctaacctacccctcttcgtcagtactccgcatcttacacatgcctctctacatcaacattccgacttctactcagaccgcactacaatcatcacaactcaacaccactctactattccatatacagcccgtcattaaccccgtctacactccg

SEQ ID NO: 6566 - DNA, 598 bp, Glycine max
cttgaatcagttgaacatttcccaacaagttcataacccaacagcttatcaagtgcttcgggtgaaacatttaaatcaatatcaccatccttgtgaaaagaaaataattgtatcacacaaaccaaaaataacatatcaaaaataaaaagttacttttgaatccaaaaacggacttcaattttaagcttattaactgcatcagctgattgaccaattaattcactgcattcacggtcccaaagcaggaattttgtgctttcatctccgtggttgaacatcacctcaagcctatacctgctaccatatgtaccaatagtgtaaaaaatataaaggtatgaagaatacacaacattttaaaagatcgcaatgacctaagcacaacttccttattgtattttccgcatgcacatgtgaagggcgccatctctggatcacttctttttatgaaactgaatgcaagttgtataacaccatgaatgattgtccataacaatcatagtaattgggccaacagttacacaaacaatttcttgggtgaaacaacatacacttcaaatgctgaaaaaaacttggcttggggaagggtaaagaattaaaa

SEQ ID NO: 6567 - DNA, 556 bp, Glycine max
  unsure at all n locations
agcttgtataaccatgtctagatatgaagttattgaaacaatcaagaatgttcttttaatgaatattggggctcttataccaatattgagaaggaaataataacattatattctctaacaccttttgacacacttttttatttggtgaaattgatgtaagtctcactaaatgagactcatttcttatttggcgcatctccttttaaactagtggaattcaaataaattttaaccaatatcagaagagagtctattagaaagagaattataattatgttacacgaggctgaagtgccctgaatagcagactgataaaagacaagaaattttgtttgcaggtacttactccttcgtactcactccaaggaggctttccccgtgaacatttcaataattgtacaacccanactcccaatattaacagcgaaagccaggtcagagctgttatctttttgcacaaccgcttgaaaaagctgcatgtatgaggaataagtgtctatagagaacgcatgagacatcgcggagttatagagttataaaccttaatagatatacc

SEQ ID NO: 6568 - DNA, 481 bp, Glycine max
actagcaggggtggcttacacaaagcccccaaatccttgttgtcttacaaaaagcctaagattgaagtcctagatgaagatgatgatgaacactttaccgtaccaaaatttggataaagcacatggtcatgtaaacaattgcctgaatcagtaggcagtaggttgacgagttggatatgcatactaagtgcagatgttaatgaactcttcaatgtgcctggtctagctgaagctcaagaccatgaggactattgcatgaatcttgtaattgatgagctgtatatgcatacttctcttaggacagtaagtaatgaagtatgttaactagcttggggagttgataaatatctcattttaagagctatgaatggtttgatttttagaatatagcataaattaaaaccttagggggattaaattttccttggtctttgggatcatcactgtttacatcctataagggctcacaccacacaacaat

SEQ ID NO: 6569 - DNA, 936 bp, Glycine max
  unsure at all n locations
cgcatgacgctcgaaacgaagcgtatctaaactaaaccatgcttcatctaggacgtgaactttgctagaaataacatcgcggaatatacagcccacnaanacncnacgtgaacctgaatgcaatccntagcacaacccccggaacctataagtggacccgcaagcatgccaagctaacccatagggaccttcccttcgggtgtatgaaaaaagatatgaactgggacactgtcaagtttttaaaaagacaaacaacgggatacaaatcactttagccggtggttattgaataaatatctgaatttaagtcccaatgggctctagaactcatttaacaggaaggatataacctttttttttctttttagcagctatgcataggtaccataaaaaatgattacctgggtatgagcaacgaccctgcaacaatcaaaaaaccccttaatgaactttttttttaaataggagcaattaaagaaagctacttttctactaaaaagcttatttaaatcaggggttaaaacttggataagttaaacaaacttaaggctcatatgaaattataattagcctaggagggtattggatcaggatattaacaagtttaattgattttttttagtcaattagagtttaaatgaaataaaaaaatcctaaggaaatcaaaaatactttaaaattttttaagaggtgcacaaaaaactaacattaatgcagtaaggatcttaaaaaatttaaaaaaaaagccttttaaaagaggggtggggggaacctgtgcggaagcccacacccctaaaagtggaccccccgcccagcttaaaagaacgccggagaaaagtacgacccgaaccgattccgtacggatacgggggaaacacttcccacgcagatagaaagtccacttcggtctcgatccccacacgggccggataaccg

SEQ ID NO: 6570 - DNA, 435 bp, Glycine max
ctgccaacttattcaaaaaaaagtttatttttatttttttcctaatgaacatggggctaacctcggggtcaaactaatgccggtcatgtctttttggttgccagggcaaatggatatttctttaattcagggttaagaatattgattttcaacgcagaacaaggatactccacactccctttttgttgttccaaaccaatttgtttgattaagtgaacttgtaattttaccgagaaatgttttactttttcttctttcataattttggatggaaaaaaatattccgaatgtaattaccattcagtaatgaataacagctttgccaacgccagctgggtacacccacatttttctgcatgcttggatccggtgactccgttaaatacactctgtacttgaattgaaataattccctggggagaatacctttaaacc

SEQ ID NO: 6571 - DNA, 469 bp, Glycine max
  unsure at all n locations
agctattcctctagtngctctgatagggtttcctagtcattatatagaaagagaatggattggagcctcaattatattgtctctgtgcgaggggcatttctttctctacaaacattattttgcacatcccaacggtgggaatatgcggaaatgagttccgaatgtggtgaccaaattctatgatgctccaatggttaatgaatatgggatcatacttttacttacacaagtttgggtgtatgcatgttttgggagaggaagaagcgataactaanttgagaggaagaaagagcgcatagacgtatccgatgtgtcaaaactgacctaatgtgtccatttataactatgagaccgagtctactatatatnctatctgttgctataattaattactncataaaaagagagctctattatactctctatcaaatacataaatataacatcctcttatgttctaaaaacacat

SEQ ID NO: 6572 - DNA, 371 bp, Glycine max
  unsure at all n locations
agctagttcttgattntttctaagttctttaacaagctntgaacaatatacttgcccttcatttaactgtctntgcgcttggcggccccgctcaacaaagtactttcgacacctactgtacgttgatttaaccaatgctgttatgggaatgttgcgacaatccttcaaaaccttattgatacattctgagaggttggttgtcatgtggccatatcgacgtccttctctatcataagccatcgtccatttttcctttgaaattcgatcaatccatgtggctatggctggactcagttcacgaaaaattttctaaatttgatcaaaaatgtgcttgcaaggagtgtacgctgcataaaattagttatgaataa

SEQ ID NO: 6573 - DNA, 204 bp, Glycine max
  unsure at all n locations
agcttcttactccattntaaaaagctttcttctcattttccactttttcctgcggcattgtctcttgttcgtgggggtagcaaggttgagtgcagcggtgaaggtgaagtttccggcgtcaagctttgcggtggtcggtggcggcaaacaaggtacgcagatggcgtttgttcgtcgcggacgtacggatggcttccggatcaa

SEQ ID NO: 6574 - DNA, 442 bp, Glycine max
  unsure at all n locations
agctagagttgtgtttgtgatctttgaaactctcttgatcattgcaagagtttagagatctcatgctttaggtgaccctgacataaaggcactacgattttttttgttgccttaatgtttgttttttttttggtattttaagagtcaaaatgggtgaaaagtctttattggtatatgaattattattttgctttcttgctttctgcttattctcttgttcttgtttgcataatttgatgaactagatctctaatgtttaacgattaatgaaactccaatttcatgatttacattaaattaaaaacagcttgtacatgtgaaacaatgaacttggttagctaatatctctaaatctcgctattttcatattntaagaggcacgagcttcagaacacttccatagttttnnttttttttttgcttaccctaccaaacaatgatg

SEQ ID NO: 6575 - DNA, 493 bp, Glycine max
agtcacctgcggcatgcaagcttcttctccaatattttataaggactcagtaacatggagagaagtatgacaaatgctgccagtggtggagccttaggagacatgactcctgctgaagccagaaatttaattgagaagatggcttccaactcccagcaatttagtgccaaaagtgatgttattgtcattagaggagtgcatgaagtaaccacaaattcatcttcatcagccgagactaagaaacttgaaggtaaactaaatgccttggttaacctggtaacccaactggccgtgaatcaaaaatctgcacctgtcgacagactctatggtttatgctcctctgcctaccaccacacagacctttgcccttttgtgcaacaatctgaagcaattcaacagcctaaagcttatgctgcaaacatctacaatagacctcctcaacctcagcagcaaaatcagccacaacaaaacaattatgaacctctcagcaata

SEQ ID NO: 6576 - DNA, 425 bp, Glycine max
  unsure at all n locations
agcttgtcagaataacagtacgtgtgatggtatattgagaggcatggataagtatgcagaatatactgctgaggaaagaaaagaagaaaactatatatgcataattattgtcttaaccaaaggcttttggcatcacaaccactggcatgataacttatggtgattattactatgagtcgcccacgaggggatgacgaaatactaatcatattagagcttttcaattgctctcaccatttcaaattatcagccacttttatttcatagtttttgttactntaaaaaaataatgatgacttcactttaacagtttaactctcttgataacgatattntagttaaaaaggactattttataatagtaatcggtgttattaaaaatagttaactctcatcttctctgtagatgcgggtttaattctcct

SEQ ID NO: 6577 - DNA, 439 bp, Glycine max
  unsure at all n locations
gacaagtggcctcagatatcttaagaagnnnggggnnggtgtcttnnncctttggccnccctccttatcttcgccccttttacacctactgtgccgtgatttaaccaatgctgctattgtaatgttgcgaccactcttaacctctcttattgataccttcctcagagggtggttagcacgtgcccatctcaacctccctttctattaatagccctcttcacttctcttcctcatatcgaatactccttccgtaactgggtctactcaagtctccaacattttctaaaaccttgtaccaaattctttctcaccggcttgctctgcacataatttattttctactaatgtcttcgtaccccttctcctcaatgtcacttttctttcccttaactattctgtctctcatagacgcacccttgggtcttactcatacgccccg

SEQ ID NO: 6578 - DNA, 371 bp, Glycine max
agcgtctcgttgtcgaagttcgagcgtctcgatatatcatgcgctttaaacggacctgcgagatgagagctatgaccatttgaatttctcgaaagcttgcggcgttgaagttcaagcgtctcgatatattatgcagcgtgaatcggatgtacgcagggagaagttgggaccatatggatttttagagtgcttccgttggtcaatatcgagcggctcgagatattatgcgcctgaatcggacctccgagatagaagtcatgaccatttgaattcctcgagatgtctcgttgttcaatttagagcgtctggacatattatgcacttgactcggacctccgagtgaacagtttgaccatttgaatgctcaagag

SEQ ID NO: 6579 - DNA, 294 bp, Glycine max
agctttaactcggaggtccgattcaagcgcatatatatatcgagacgctcgaaattaaccaacggaagctctcgagaaattcacatggacataactcttaactcggaggtccgattcatgcgcataatatatcgagacgctcgaaattgaacaacggaagctctcgagaaattcaaatggtcataactttgcacacggaggtctgattcaggcgcataatatatcgagacgctcaaaatttaacaacggaagctctcgagaaataccaatggtcataacttttcactgggatgt

SEQ ID NO: 6580 - DNA, 424 bp, Glycine max
  unsure at all n locations
agcttaacatgtagagattggaacacatcatcgatagtatcccaacaggtatgtgttcggttctgcaagttaaggaggatgaagtataacttctcaatggttcttttgaanaattgcatttgcaggtgcaaganagaaaagtactacctatataagcatgaagtttagccgcttcaagaagctgggacttggctttgatatgcttatgaaggatagggacacaggctagtaaaactatgtgtcgagcaagagtaatgctataaactattgtgcagattatcttcatgtattcattatgaatagaaagggttcaatccttagtgacaccctgatattcgaatatttgaaacgtgtaatttgctaagatgaaattcaatcgtcacgatatttcatctatgcagtagtttgttgtatgttatgactt

SEQ ID NO: 6581 - DNA, 418 bp, Glycine max
  unsure at all n locations
agctntaagcataagcaaactgttagtcgtcttatacagctaactgtggtatagaaaactnttacaaaatgtacatattttccccaatttatggttctttttgtaggattgtaaataaattttgctctttcttatctgggctcagtagacgccttgtgtatggaattaatgtcaatttcaggcaaaaaggagttattttgaagaagtgttaaagttgatgtctcattaagcgagctcaatgcgcttagcgagtgttatccgctaagtgaggcatcagcgcgcttagcgaataggaggaatctggaagggaatatgtcacgcaggcacgcgctcagcgcgtcattagctcgctcagcgagtcgtttgtcaccttccaggcttagcacgagtttggcattgagcgaaaatcacttactca

SEQ ID NO: 6582 - DNA, 229 bp, Glycine max
  unsure at all n locations
atgaatccgttgtacacagcgattacatcaganttctaataatctattagggatctactttaatgagagatttgaatcctcatatgggaataatattgtagttgctgaatctgcctacggaatactgactaccactatgtcttttctctttcttttccattaagacatatgccacatcacataaatcttagactagcttcgattctgatatattgcgaccatcacctac

SEQ ID NO: 6583 - DNA, 317 bp, Glycine max
  unsure at all n locations
agcttcacatgaagctacatcatttactccctatcaaatgaatgaataaaacattctttntattttcttagaaaatatatttattttatttaccttaaaactattattttaattaataaaactatttcttcttatttatttaattacaacaacatcattattttctaaaactctatttattttaaaataaaattctttttaatttattttacaaaaaatgaggtgttacaaagtatattctagaaagacttttatgggggtaattttacacctctccttggttctcgactccatttgtgactctatgctctctttct

SEQ ID NO: 6584 - DNA, 439 bp, Glycine max
  unsure at all n locations
agcttgtatgagtactgagaaagattcaagaaattgtgtgcaagctgtcctcaccaccagatttctaagcaactccttcttcaatatttatgtgtgggacttagcaacatggagaggagtatgattgatgctgccagtggtggagcccttggagacatgacccctgctgaagccagaaatttaattgagaagatggcttccaactcctagcaatttagtgccagaagtgatgctattgtcattagaggagtgcatgaagtagccacaaattcatcctcatcgggcgaaactaagaagctcgaaggtaaactagatgccttggttaacctgntaacccaactgaccatgaataaaaaatctgcacctgccaccagactctgtggttatgctcctctgctaccaccacatctacctttgcccttctgtgaacattctgaag

SEQ ID NO: 6585 - DNA, 490 bp, Glycine max
agtcacctgcggcatgcaagcttcattctacacctgaaaaagaggatgagatagttgcacaaaggagaaagcttcctaacaaaaattttcatgcaggtggaccttcttctagtaattctaacttaccgcagcctcctatccctcttccattcccacctagagcaattctagacaaaaaaatggaagaagtggaaaaggagatcttggagaccttcaggaaagtagaggtgaacatacctctgctagatgccatcaagaagattctaagatgtgccaagtttctaaaggagttgtgcacccacaaaaggaagctcaagggcaatgaaaggattagcatgggcagaaacgtgtcagcattgataggtaaatctgttcctcacattcttgagaaatgtaaggacccaggtactttctgtataccttgcattattgggaacagtaaatttgagaatgccatgctagatctaggagcatcagttagtgtcatgcc

SEQ ID NO: 6586 - DNA, 479 bp, Glycine max
  unsure at all n locations
agtcacctgcngcatgcgagcttacacaatttatctttctcaaacttgagtttcgaaaggccaagtatgaagtctttcctaactagatgattgagatgatgcatgtgtatgtgtgtagtcctatgatgtcacaaccaagaatcatctatcttaattatcagacaactcatctcatgagatgatgaatgctcaatgtttaacatattgatattacctattctcttgccaatatggacaacctcaccggacatagcttcactaataagacaacgattcttactgaattcaattttgaagccttagtcacatagttgactaatgctcaggaagttatgctttagtccatccacatagaacattctttatctgcgttgtgactaatttccaatatttccttctcccattatctttactttattggtgtctcctgtcacaacctacccttcggcgggagggcgacgcgagactcacgtgtgcat

SEQ ID NO: 6587 - DNA, 391 bp, Glycine max
catgcaagcttattcaaggtctaaaactttcatagagcagttcactcatgtcatgcaatcaatttatttcagatcaagatatcaagacaaacaaaatctactaaaatgttcaaaacgtagctaccataaaagcgctaaaccaaaaccactgttaaaccaaaaaccaacataataaataaaagttgtctgaaaagagggagaattaaatgaaatcctggtcaatcatcaatcttgtgctggtgtgggccatgggtcccaaagcccctgtgttgcggtgacatctactacataattagtgtccatgcctgccttcgctgcacctgtgtcctcttcaacctcttgtgctggatactgagtctctggagtgtcctcagcatcctgagcctgtgca

SEQ ID NO: 6588 - DNA, 426 bp, Glycine max
agcttatccaaacatgtcctaagtgtaaataatatgctcagggaggtaggtcaagaacgagctattcttcatggaggtgaaatgtattttaccctacatcataacagagaatcagtatcgcagaatgtaagcaagtattgaaaactcacattcccattactaacttctagagtgctggcattctccttcaccagccgtgtactagatctgggatctcctctttcattgtaaaaagttatattaccatctaattctgtaacctctcgtgatacctgatgttgtggaggtttccatgtatttacattaacagaaatattcactatcttatgagatgtgttgggtgatgctgcaagttgctcctgttctcgattccgcttttggcgcacactatcatcaacaatttttgctacactatactgcaccatc

SEQ ID NO: 6589 - DNA, 458 bp, Glycine max
  unsure at all n locations
agctttagatngaacgtttaaatgacaaanattacttctcttcttgttctcatagagttccaatattttaagattattattccatttgtcaaatttgttggagaatagagattagtttcagtgtggatacacgtgtagtcttcacactattgaagaaatnttttatgtttcaaaaactcatcaacatgtatatatttagtatgttatctgtttcaatataatttagatgtaaaataaatcttttttaacgcgctgtgtgtattttgaacactctttttttcccttcgattggtatcaaagccaggttcttttgtattaaaattatatttatgaaactgtcacanaggttcatattnntattgctngcacattgaagcagtactcatgctgcatagtgtgtcatttggcatgaagcgttcaagtgatttaacaaaagctatcgtacagtggtgcttata

SEQ ID NO: 6590 - DNA, 614 bp, Glycine max
  unsure at all n locations
ctaccttatanctnctatcactagcttcncgcgnnntanccngcgactcgncgctaaantannttttntnnnnnnnaagtaannnnncgagtgttgaacctganacanctaganaccgtgatcctctacgtcgacccgaggcatgcnagcttatgatacttgataatgttatcttactaattgtggntatttgatttttgtattaatttcttttataataaactcacccctcgcaattattgtaccgcgtggctggtacttatgatgatcgcaaacttttattcgtgggagcacaatgacagtagtagagtgcgagaagtgagattcttttgttgagccgccgagccgacgtgatgatgttggtattattttgggagagagttgtgttatgttaatcaactcctacatagctagttccataattattttgttgaatcgaggaagtaaatcacacatttaattataagtatgaacaaatttactttacactatgtgaatgatgtgtgcggagttactataccaagatatatatatatatatatatatatatatatatatatatatatatatatatatatatatatagatacatatatatgtatatttacatatcn

SEQ ID NO: 6591 - DNA, 422 bp, Glycine max
  unsure at all n locations
agcttgctattggaatcgcgaaagcttcactccttcatcaggattagtacctgacatcccaaacaaacaaatcaaacgtatcaagacaagtatatgtgctgtttgaatacctcacccgctcaagtgtatcacacactgatggcttttctttaatgaaacactctttcattttaccactctaattcccctcgagttcttaggcaatacaagagattatggtcacaccaaagaacaattcaccaatatgtgtaaggtttggctagagagacaaggaaaaggttaaccaagaaaaggctaacaatgtgtttatgcacaaatgaatgaaataaaattcacaagttatgaattcaagtaacaatcctccatgcaaccattatattaccttatagagatttttgntaaagtttttcaagcatgaacca

SEQ ID NO: 6592 - DNA, 469 bp, Glycine max
agcttagacatgactataatttactggcatggtatgcatatggcctctgaggcatgtactggacctggcatagataacttccggctgctaaaatagcattaggaatgagagtgattgtttctaatactctgatatgttgaatcttaacctgcattctattgaagttaacaagcacaagttctctttgaacagtgctgggctgttctagaaatgcaaatgggaaatatcaggagagcaaaagagttgtttgatgctgccacggttgctgataagaggcatgttgctgcttggcatggatgggcaaatctagaattaaagcaaggaaatctaaagaaggcaaggattctacttggtaaaggtcttcaatattgtggacagaatgagtacatataccaaacacttgcacggcttgaagctagagcacatacatatcagcatgctcgatacttattcaatcaggccactaagt

SEQ ID NO: 6593 - DNA, 264 bp, Glycine max
gatctcaagtcacctgagcatgcaagctttagtcgtgtgtgggtaatttgatcactctctcactcttgttctgaactatgtatatgtgctaataacaaggctatgagcggctgagacaaaaaatctccgcaactgtctatactccttcagccatgacgctctggatgtacatcaatcggtatcatctttacatgaacttgcaaaaatctagtgccgtatcagactcacaatcattcagatgtacaatatcttattattaccacg

SEQ ID NO: 6594 - DNA, 244 bp, Glycine max
agcttgtaggccttggatcttcttcatcaatggagtcctttgcttcttgaagatcaatgacaatggaatggagaaggaggaaaggtgattggagactccacttcaaggagaagataagttgagaacaagctcaccaccataggaagccatggataagagcttgaaggtaagagaagatgagtagagggagagaagagggagaatgaggtcttaactttgaagtctaatttctcaaatcatcaaa

SEQ ID NO: 6595 - DNA, 279 bp, Glycine max
  unsure at all n locations
agctntacaccaaacttgaaacaatccagtattctttgtcctagtggctctaaacaaatcanaagaattgagggttgtttgctcactgactaactcttaattgtcttatagatagatatgaaatctaaacacttagtcttttctctcaagatgtacaaagtgtttcgagattgtttcaaactntacaagaatatacaaaaaaactttttacataaagaatttgaacgatagcacgcaaaaatgtgtcttaggtctttaaagcttttggtattcataggc

SEQ ID NO: 6596 - DNA, 204 bp, Glycine max
  unsure at all n locations
agcttctatagttcccttttttatataaaaaaagtgaaagctactttaattttttttgtttcggaggaggggtggtggcgccacatacctcnccgcggtcacgacaccctgtggacgcctagtggggtgctactgcccacaaccatgcttgatcaattccggcctaacccaggcataatcagtcagtgagaacctgtgacgtac

SEQ ID NO: 6597 - DNA, 259 bp, Glycine max
agcttctccggtcaatgtcagaccgtaccgataccctcattatcagaaacaagaaattgagaatcaggttgatggcatgttgcagcgaggcttcatacaaccaagcacaagcccgttttcctcacccgtgttgtttgtcaagaagcacgataggtcttggcgcttatgcgtcgactaccgtgctttaaatgctttgacggcgcatgatcagtttccaagtgcgactgtggatgaactcttggacgaatatgaggcgcca

SEQ ID NO: 6598 - DNA, 75 bp, Glycine max
tataatcacataaggcttactctcatattcaatcattggcttgataaaagtgttccatggaggaatttgacgagt

SEQ ID NO: 6599 - DNA, 342 bp, Glycine max
  unsure at all n locations
tgcagctataatcctttctgagtgactcatggcaaccctgagtttacttaaattattgttctttacagaatttctttntgaatacacttaagcaaactcataaatagtcataaactcagaagacttatgatttatgtttagaaggtttgccataattaaaacaccaaggaatttggggtcaacaaaaacctcttgtgccatagcttagaatcaagctcagtcttactacattgcactcatgttcagaaattaaattccaattaacaagaaaagttatttttttaaacaacaagcaataaccactttgcatcatttgacccacacttaataggttctgatcaa

SEQ ID NO: 6600 - DNA, 324 bp, Glycine max
agctttatattttcttacgtgtaggtgacttctcatcatgaaatttatatgtgcaaaggttattagataattgaattgactaaaatcatttgaagaaattgattgaagctttattcacattgtaattaggaaattctttaatgtctgagacttcgttgaaatatgtttaggatataggtatacatgtttttcatgcaaatcaatataagtatataatttttgattcgttatatacatatcatatttatttaatgatatgtttgatattattggtattatatatatatatatatatatatatatatatatatatatatgtatata

SEQ ID NO: 6601 - DNA, 326 bp, Glycine max
  unsure at all n locations
agcttgaagtgagaaagcgtggaagagtcagtcttcctacttttatttgttgaccaccacagagtggtacctggagatatgtcgcggtggtcaggagaccttgnggacgtcaggtggggtgctattgcccaaaaccatgcttgatcaatcccggcccaacccaggcataatcagtcagtgagaacctgtgacgtacctaaacaggcgagctactggcagtcaaccaataaaagaacaaagaccacaaagcaaggaggcttgtgtggtggctggccagctatggatcttaagtggtatctggaatttgacctctggtaatcattacc

SEQ ID NO: 6602 - DNA, 432 bp, Glycine max
  unsure at all n locations
agctntaggagaaaccattanaactaaggtagttcctaaacaaaaatcaattgaggaagcttcgccgagtgtccccattgaaaaacctttattcaaacctttcaaagttagtgataaggctaaacgaaaaattagggaacttagaaaaactaaatccttaattgaaggcgtaggtgacaatcatagcgaattactaaacaagattagtagtttgcttaaggtcattccagatactccccaagcttcggaaaatacttccaaaatggtaacaagaagtacctncaaattaattaatgttattaatgaagatagtgaccaaaacttagataacacaactgagataggatcagtgtcagaaaagaatataaatccattaaactccaaacactggaaagacccctccaaattatattatcaacgtncaactggccc

SEQ ID NO: 6603 - DNA, 389 bp, Glycine max
  unsure at all n locations
agcttctccctatttntgctataaataggggatgaagtgaagaagaaaagggttcagccccttagacacttctctctctctcgaaatagctgaggaaaattagttccgtgaagaaaatccaagccgaggccgcttcgtaacgttttcgtgagtaattacgcgaagattctcgaccgttcttcaaggattcatcgntcgttcttcgttttcttcagtcttcaatgggtaagtacctcaaaccaatctttttaattcattctatgtacccgtggtggtccacatcttgtttcatgtatttttattctcgctttcatttactttntataccccctnttggcgtgcttaagccatttatctaagtcatttctcacttaatctaaagataaaat

SEQ ID NO: 6604 - DNA, 402 bp, Glycine max
agcttcacatggagctatatcaaagaagaagtctatatcaccacatgattcaaaaagagacctcatatgtaagttactcatttataccaatttaatgatgatcatgaggaccaaaacatttcattcacaagattagtaggctactcaaaagtaggttattgaagtgtgtttaaatgactcgtgttcacaagaaaaatatcagtagggaagaccttaatttaccatacaatttgagaaggggaacaacttgtagaaaacattatctgacaagagattcatacaaatttggatcagtaaagaataaccctatcacctatcatatacccctttggcacaatcaactcattacccttctatagatagcacgatcatgagaaattctcaggataagggatagtctat

SEQ ID NO: 6605 - DNA, 456 bp, Glycine max
  unsure at all n locations
agctcgngaacatgtgtgtttaggtagaacatttatgaactaaaaccctaaatgtgacccanacattaaatcaatttttaattgatttaaattaaaatcaaaattaaaaatttccctattgtcaatgaataacaaactaaaattaaaaataacaacgcatttgttaagtatgactctgtcacatcatcaaaatgtatagatggcaagaaaaacattggcatgagctacgcacgtgatcagacaagtagaaacttaacgttgcaagtgatagtaaggatgaaaacaatggacggaatacaagtttggggatgttgatgagtctccatcaagtttaaggaccaacaccaaaaatgttgaacagatagaggactaaacaaataattattcctaataataacaacacaagtctcgatccttttacataacatatcttaccttaaacatatcttttcacct

SEQ ID NO: 6606 - DNA, 498 bp, Glycine max
  unsure at all n locations
atggatcnnngnnattagacatgagccctgacncntggaaanccccgtacttaagtgagccgagctgcaagctttaatatgttattcattcagcggactatctaatgaattagacacatagagaccattactacatatcctatggcactggaaaacagatgtcacctttcattctgcgtcactgggccctctcactgcagtataatggcttagaccaccaatatccaagcacgtatctcacagcattttcaataacattttggaactacaagccactcatatgattctaacaaagccgttatcgttatcacacagtgcatgaacttgcttattgctgtaagcttatggaatatattatttggattcttctcgtatcaacttttggacggagacctatcttacatgaatgaatgttatacacgtgaagtgacccaccatttttgatacgtagatgttgagtgataagcagacacactacaaatatcattaacatatgcg

SEQ ID NO: 6607 - DNA, 205 bp, Glycine max
  unsure at all n locations
agctttntccaagttaataaaaaccatatgtaagtctctntctttgctttggtaactatccatcaatccctgttaaagataaatgacttctgttgtagactttcttggtataaaccaaattgattctttgcaattcttatttcttatctatgaccaatcacttgttctcataatttcatagtgtggtaattaacgttgaaagtga

SEQ ID NO: 6608 - DNA, 463 bp, Glycine max
  unsure at all n locations
agcttgatggtgttgagaagaaatcacatgtttgtcatcatcaaaaagggggagaatgtgaatgtatgtatacatgattntgatgatgtcaaaagaagaatcaaacaaggctcattntgtttaaagattaatacaagattgtttcaacaaacaaagccttgattcaagatttcttcaagatcaagccttgcctcacaatgaaaggtttcaagtcattcaaggcacatgtaatcgattaccaatacatgtaatcgattactaatggtttgaaagtgtgtaatcaattacacatcatatgtaatcgattaccagagacaatgaacgttgggaattcaaatnttaaatgaaggttcacaattgttcaagaaaaacaactgtgtaatcgattacactaattctgtaatcgattactagagaggattttcaaggaatatcgccaacagtcacatcttatcatttggat

SEQ ID NO: 6609 - DNA, 478 bp, Glycine max
  unsure at all n locations
gcatgcaagctntctgctcatagaacannatttnttcttcctctcttaattctccaacatctgaattcaatttctcaaaagtgtgcctaaattctctcttcagggcactgtaagagtgcttcagcctctctttaagctccccttgcttcctactgttgtattttggcatagaccaaatctgtccagtaacaacttcctcttctcttttcactttgtattggccaagtagcccactcaattggccatcatatgagcatttttgctcccacgcatcagcaataaaatcagcagatcctggaacttcaagatctttatcatacggtatatcgccagtcacaaagttcaaatagggagcatcaatatcttcatcataagcatctttgatacgccggtaaagtctacccaggaatttcttcgacctgtaagactggtgccgctctttccccatganatcagggtacaattttggtttcagatg

SEQ ID NO: 6610 - DNA, 430 bp, Glycine max
agcttgtatattctgtttgtggtaggctggaactatagttcttacacaaccatggcatgatttgcactgcagaatagatggacctgctgcatatgatgttcttattaattttgagcagcgatggagaaaagcaactaagtggaaagagtttgcgatccttttcaaaaatatcctctcaatggcatggcgatgctttaataagaatagaacgcatctgaaaggataaattggattattatactactctaggggatgaccctgtagtatgggtttctagtgaagctgatcctgataatagcatgttcaggatggacaatgcaatcttagttttgagtgacgtcacttgcttgctatattttcttgattgtggagataaatactttcattacattgtattccaacccttacagatcttacactccgttgactc

SEQ ID NO: 6611 - DNA, 293 bp, Glycine max
  unsure at all n locations
agcttgagatgaggaagtgttgaagggtgaaacttcctgctnttatntgtgaccacagagtggtacctggagatatgtcgcggnggtcaagagaccttgnggacgtcaggtggggtgctattgcccaaaaccaagcttgaccaatcccgacccaacccgggcatagtcggtcagtgagaacatgtgacgtacctaagcaggcgagctcctggcagtcaacagataaaaggaaaacaagaccacagagcaaggaggcttgtggtggctggccagctgtgaattttgtgtaatat

SEQ ID NO: 6612 - DNA, 454 bp, Glycine max
agctgccttgtcccttgatatatttgagggactcatgatcactatgaatgacaaattccttgggataaaggtagtgttgccatgttttcaaagcccatactaaggcatacaactccttatcataagttgaatagttaagggtaggaccacttaacttttcactaaaataagcaattggatgaccttcttgcatcaatacagccccaatcccaacatttgaagcatcacactaaatttcaaaagatttttgaaagtttggcaacgcaagtatggcggaattagttagcttttgcttaagaacattggaagcatcttcttgtttctctccccatttgaaaccaacatctttcttgagcacttcattgagaggtgctgccaatgtgctaaaatccttcacaaatcgtctataaaaacttgctaagccatgaaaactcctcacctcggtcacggactt

SEQ ID NO: 6613 - DNA, 463 bp, Glycine max
  unsure at all n locations
agcttaggttntaggagagcattcatccatagataaaccttcactttttcattcattcacatcccatactttccttttagttagacagtcagcttaatttcattattttgcagcatacacacttactaatttcatttgtacttacaatttcttttaaacacaatatatacagagatatcatgtgtatgtacataaataatgtgtgtatgctatttactttgaccatttgcattcttacccagtgcctcccccaaatttggaacaaatttaccttgataattactcccctanaattgggacaaatatgttttgaatcgcgcttcttgtggatgatgctctcctacaacctaagtcaaggtagcaggagataacattggataggctcaagggtcaatcaatcaataattcattcaatcaataattcattcaactcanatggggtgcaagggataattcattcaag

SEQ ID NO: 6614 - DNA, 518 bp, Glycine max
  unsure at all n locations
cggattagccttgagntctgacnncttcgaaaatcccccagangcgnnaggatgaagcttnttaataatctttcatttgttttgttatccaagcccataacattgtgacttatacttgatatcatatattggcttatcttctttcttcatactgtatattcctcctatctctatattcatatatatatatatatatatatatatatatatacatatatatatatatatatatatatatctatataaaccctatttcgggaaacaaaagattgttcaaatcacaagactataattggtgaagatgctactccagcttatctatagaatctaaacctagatatatactggcaactgatgcccatatctttcacatacaatatttactaaaaaaagtaaaaaattagtggagatgtggattattaacactggtgcctcttcgaattacagacgatatagatctgactctataggcgcccattatcccacctttatatatatatagtttgtgaaaaaggacn

SEQ ID NO: 6615 - DNA, 439 bp, Glycine max
  unsure at all n locations
agcttcgctaacttgtacatttcccaacgtactcacgggaaagcttacacaggctgacatgcacacagaaccacacatgcaatagacaaagaanaacagagaaaataattaaaaagatgctatggcaatattgcatgactttgtatacaaggcagatcagaaaattatgtagtttgaacaagtataccaatattggccctcatagagtcatagtacaattatgttgtccttggcctttgggtatacaacaacttgatgaaagagaaacgaaagaccattccttcactacatcgatcttctcaacttgtttttattcatgcatgagttatgcaattcctgtgaacattaagttagagaatactgttattacatacatacataaatacatagctttgaatctttcaaggaaaatttagtaaaaagcataacaccctaattt

SEQ ID NO: 6616 - DNA, 431 bp, Glycine max
agctatgataaatcaaggtgaatggacctcgttcattgacatattagcattggtggtgcttgggaccatactatacacaaatgtagacgggctagtggacttagcagcgatcgaagcctttcttgcttgatcatcacaagcaattgaaagccagatcatcactattttagccgatgcatatgatacgttcgacctgagatgcgagaagaacagtgcacgaattgtctgttgcatgcctgctctctatgagtgggtgcactaccacgttgatcgttacgaacgtaggcctgtgacacatatgtatggaatcgcgctgcgcgcggatgaggctctcctacaacctaagacacggtagcatgagattacattgcatacgctcacgggtcactcaatcaataattcatccaatcaataattcattcaactcaaat

SEQ ID NO: 6617 - DNA, 131 bp, Glycine max
agcttgcattatctatagtgactgctaaaactcttgtcgctgtcatggccgtaagcgtgtcctgtatgacaatggtcgccgcttactattgcacacaacttacgagacgcgaacgtaatgtggaaagactg

SEQ ID NO: 6618 - DNA, 482 bp, Glycine max
  unsure at all n locations
tcttaagtcacctgcangctgcagctntatagaactccnttaaaaaatcacttcggaatttaagtttgattatgcacaccatgctgataaaattntatttaaaacaagttcatcagtttatcttaaaaaaattaatatacaatgtaccgttgaaaatagaaacaattatcaaaagtctattttttctaatttggtgggtatggtaaacataacactcatgattgaaaattagatagatgaaaacatcattccatcatattaatggtgcaggtatatcaaatgttacaccaattagaaagcattatgaatatgattagtaaatgtgtgattatacatttaaattattttttaacatcacaagtgactgcttcagaaatcagaattgatgatantttactagaaaacaaaaaggaacttgagacattattaataactatccagtgttattacaaaagcatatatgttattatcaatcaattacc

SEQ ID NO: 6619 - DNA, 462 bp, Glycine max
gcaagctttctttctcaatcaatttgtctactgactaacaattctaattgcaagttcacattcttgttctttctttgtctagcatgcatatttgttcaaactcatgaaaagaaacacaaactccatcaaaatcatgcactcaattcaaaatacagacatacacccattttcataaaaagataaaagtgtttccctgccatgtcataaaaaaacaagtcaaactgttcaaaatgctttaggatgagcaaactaattacccataaataagatagcagtatatgtagacataaagaaaatactgtacgaaaaccaaaaattataataataaatcaagaagcaaaaagtatcatcaagaatcaaaattcctgtgactagtcctgtatatcctatgtttgaccatcctcctcatctgttagctgaagaactggagtaatgggaggagaagtgtccacagcaaggact

SEQ ID NO: 6620 - DNA, 448 bp, Glycine max
agcttgttctgaactatagctatcgaatggccaacatatattgagatgctatgagcatgtcgactacatagagtagtatatagatgtgggaaccatcctccaccttactatgataaacacatgagtcacagggactttcgatgtcccatgagagacaatgaaatcattaaatctcttgtaccactgccttagtgagtgcttcaacccataaagagatctctttaatctacagacataattttcctttcctttcacttaaaaaccttcaggttgtagcattagaatgtcttcctctagtcttccatggagagaggcagttatgacatcgagttgctctaactccaagtccttagttgccactagggccagcagaacacgtatgaaggtgtgttgactaccagatgtgctttataacatacgtgctgtataaaagatgacttcttcagtc

SEQ ID NO: 6621 - DNA, 151 bp, Glycine max
gagctctcatagctcaattacgagtgtatcgatatgtgaggctccatgatcggacctgcgaaagaaaagttatgaccattagagtctctcgagagctaacttggttcaattccgtgcgtcgagagataagacgcgcctgtctcggtccttc

SEQ ID NO: 6622 - DNA, 477 bp, Glycine max
  unsure at all n locations
caagcttgtcgggggctcagcaaatcttagtttcagagtcaatagattgtatatgcacattctgcctctaaagcgacaaaaccacatagcagagcctataacctatgctatatactggctacacaactttgcattttcaaatgattaattcatgtcatcaacatttcgttgcttatgcttatgaaggggtgttactgtgactttgagttggtggattcgaattttaaacaatcgatagccatgtctttcttttcactttccactctccagaaccaacatgttcatgaaaaaggacttggttcatgtgcagccaagactgtctccagctctntaattatccaatattcaacttctttagctagttctttctaattattttcttccttcactttctgtttcttcttttgattntcttggctggtaattaaggatgaagagcagaagagaatatatctcatttacaagagcaaacacata

SEQ ID NO: 6623 - DNA, 419 bp, Glycine max
  unsure at all n locations
agctngtattattcatctttttcattcccttctccctttgccaaaaagaattcgccaaggactaaccgcctgaattctttttgtgtctctcttctcccttttccaaaagaacgaaggactaaccggctgaattcttttgtgtctcccttctcccttgtcaaagaattcagaacgatacagtctgagaattcttttgattattcccattcccttatacaaaagtgttcaaaggactaaccacctgagaattcttttgtatccccattcacgaagtatcaaaggtttaaacggctgagatctttgtcataacacattggaagggacatcctttgtggtccaagaaagagacatctacttggtttgactgagaacaaagagggacatctcttggtgatagatctagtggagggacatccact

SEQ ID NO: 6624 - DNA, 382 bp, Glycine max
  unsure at all n locations
agctttggctctcaagaagagatcaaccaaaggatggagtattaaatatggatctcatatgatccataattccaagtctgatgtgggaggagntatgaaggtccatcatcatgacatgcctgtcatgttcttggttcattatacagacatacacccatgatcctagagagattagagtgtttccctgtcatgtcataaacaagcaaatcattctgtgcatagagctctacgatgaacaaactaattacccattaataacatctcattctatgtagacatctagagaatacttgtcgaataccaacacttataatcttaaatcacgacgctatttgtatcatcacgattcaaacttcctgcgactagtcccgcatatcctatg

SEQ ID NO: 6625 - DNA, 468 bp, Glycine max
  unsure at all n locations
agctntcttaatatcttatcatagtgtggatgtacatgtccatatnttgtgaaagtagcatgaatggaacgatgtgcctatcaaactagagtgtcaaatatgccatttaatgagtgatgagtcacctcttcctttcttccttgggatgtgcttattaattaacactatgtctaatgtatattatattggaggcatatcaaatcatatgacatctcaagaaatgagaaaatttaatcttatcatgtgcaagattgaatggtattcgtcaaaataatctcttctcaatttttcatatgtgtgtgtgagtgtagaaagtatatcaaataagagcttaataggagctaatatttatcatatagaaaaagtgaagttaagattagatntaagtaaaccaattttaattatccatgtaagaatgcatgactaacattaactcctgtcacactagctagatatgctccacatgta

SEQ ID NO: 6626 - DNA, 109 bp, Glycine max
  unsure at all n locations
tgcttgntcatatcgagatggtgagtggtcattctcatttgagtgtgatggtgcaacatatttgtttgccctagctggaactccagtgcttcacagctgttaatgatct

SEQ ID NO: 6627 - DNA, 508 bp, Glycine max
  unsure at all n locations
gcccagcgtttggccttgagcgtganacgtgaactcaagcgacgagcatgagcttatctgccctactattccctgtatgccttgttctgtaatacacgataggcctacaggacaagccaaggtctaatggattagccatggtgaattttgaatcctggaatgtccctcctttcttgaaccaactcgtacgacatggcacaccacaatccaatccacatattcgggaccgatctaaataattaaaaaaaacaattatatattttcaccagaccaatagtttattaacttttatgaaacatataatttcataatagcaaaaattttcacaaattgttaattgtcacaagaataagactagataacattaatatcaatttggttctcttttaaaaggttatcttctataacttctcatatgctttctttttttaacaaaagctatttcttacaagactatttaatttttttatggaaacangaagacctaattatttaatacatgtaagct

SEQ ID NO: 6628 - DNA, 422 bp, Glycine max
gcctccaacattgggatcgcagggcattctgactacctagaggctacgtgtatccacataagacgtttaataatgactatgcgaagtcgaaatacaagaataagacataacaaacagtaacggataccagctaatggatgaagcctgagtaatacaattgtaccaacacccaacgaggatgatcggcggcttatcgattcacatggatcgacgtggagggacaagttgagggagggttctatttaagggtggcgtaaagaactgaatagaattatgatgatgcaaagtgtcatttttagaaatcgacggtgacggcgatttcgatgaggactcactaaagtgacttaaacaaggcaactgggccccctattatgattacggatagatgctgtctgggcccccgaattttcatgggcaccccc

SEQ ID NO: 6629 - DNA, 460 bp, Glycine max
  unsure at all n locations
agcttcatggtgaatcaaaggtgattcaatggtgttttgatgataacaatgatgataacaaaagatgatgacaaaggtgacgacaaaaagctcaaagatcaatcaaagaacaactcaagtgaatcaagaacaattcaagagttcaagataagaatcaagaagaattcaagactcaagaagaaagtttagattcaagaatcaagattcaaggttcaagatctcaagaatcaagatcaagattcaagactcaagattcaagaatcaagagaaggcttaaccaagataagtatgaaaagtttttctcanaaattgagtagcacatgattnttctcanaacatgtttaccaaagagttnttactctcaggtaatcgattaccagattggtggtantcgataccaatagcaaaaatgggtttgaaaagttntcaaaatggaattacaacgttccaattaatttca

SEQ ID NO: 6630 - DNA, 491 bp, Glycine max
  unsure at all n locations
atcttaagcacctgagctgcagctatgctgaaacattacaatagacctcttcaacctcaacagcaaaataagccacaacagaacaagtatgacctctccagcaacaggtataatcccgggtggaggaatcatcccaaccttagatggtcgagtccttcacaacaacaacaacaacaatagccttattttcataatgctgctggcccaagcagaccatacgttcctccaccagtccagcagcaacaacaacaacagcagcaacagcaacagtcccaaaaacaacaaacagttgaggctcctccacaaccttcccttgaagaacttgtgaggcaaatgactatgcaaaacatgcagtttcaacaagagaccagagcctacattcagagcttaactaatcaaatgggacaattggctacacagctaaatcaacaacaatcccagaattctgacagattaccttctcaatctgtccagaatcccaaanatatgag

SEQ ID NO: 6631 - DNA, 361 bp, Glycine max
agcttctggtgggacatcttgacttgctttccaatctgacattcaccacagattctgccttcttctattttcagattgggaatgcctctaacagcacctttgtcaatgatattcttcatgcctcttaagtgcagatgtccaaatctttgatgccatattttgacttcatcttctttggaggatggacatgtggaggagtaactggtttcttgaggtgtccataggtagcagttgtcctttgatctgttgcccttcattagaacttcattcttctcatttgtcaccaagcattctgactttgtgaagtctacattgaatccttcatcacacaactgactgatgctgatcaagtttgctgtca

SEQ ID NO: 6632 - DNA, 442 bp, Glycine max
  unsure at all n locations
tgcggcatgcaagcttgtgaattctatctttccttttattttgtagtgttntaaatttaatcattacgtgtatcatctaatagtgtactgatatattatttaatatattaaatttataaaaaaatattttaattttttatattttaaaaattttcattttgatatattacgtttttaaatttttattttagtatttttatattctaaaaaatttcattttaatcttcttttttcatctgttaaaaaaaccggtgcggcattaatatttaaaattgtgaaatatttaattattttaaccactatttttttaaattgattattttacttatatttaatcctccattgaaaatgtctacaattcagctgaactgtttatgttaaatataatgtaactgaactgcaacatgattaaatagacaactattacatataaatcttcaaa

SEQ ID NO: 6633 - DNA, 469 bp, Glycine max
agcttggacgaataaggtgatgcatctaggaaacacaacaactaacaagtatgaaaattgtaaatatatattggttttagggtttacacacgaatggataaaaataattgtttgtgttttacaaatgcagggttaagtttgcacattgggccttaaagagactactaccgaatagccttggagacctatgtagtgtttgagaagccatgaacaatatgatcactctacaacatattgaaattaaggcatcgtttgagacaactacacatgtggttgggcatgtttttaaagttaccttatacaagaaactatttggcatggtatcaaggtatgtgttaaaccagattgttgctgagtttgagcatgtaaattatgctagcattgatagttctcattatagatatataatgagaactactcacggtctctcatgtgcacgtgagctagctagatatgttcttggaacata

SEQ ID NO: 6634 - DNA, 343 bp, Glycine max
agctttgagcaaattcaaacgacaataacgtttactcggatgttcgattgtgtcccgtagaatatcgcgacgctcaaaattgaaaatagaagctctgagcaacttcaaacgacaataaatttttactcggatctccgattgtgtcccataatatatcgagacgctcgaaattgaaaacagaagctctgagcatattggaacgaccttaacttttttctcggatgtacgattgtgtcccttagtatatcaagacgctcgcatttgacttcggaagctcttagcatactcaaacgacaatattctttacctcggatgtccgatagagtcctgcaatatattaaga

SEQ ID NO: 6635 - DNA, 450 bp, Glycine max
  unsure at all n locations
agcttatccaaacacaataaattctacaccaactcatgtccagtctatttagataaacgttaggttttcaacaattgtgtcaagtttttcctttcatgtgaatcacgtcagtcttaaatgcaataaaagtacatttcacttttgtcaaaaagcatatatcatgtcaatgtaaatttattttaatttcattttcataaatctagatataaacaattttatcaatatttcctgttttagcactaactgtattaaaacacatataaaataaatttatcataataacatttattctccaaactttagtaataaacacagtagccaaacaattaaaaaaaataccaataagtatatttccaatgatattntttttaattcgctaaggttgtgttcgtttaagaaaaaaagactaaaaaatgaanaataaactataaaataatatgagatctatac

SEQ ID NO: 6636 - DNA, 460 bp, Glycine max
  unsure at all n locations
agctattatgaagttaaagaaatctttgtaagctttntacttcttgttatatgtataacccaatctagccttttcgatagcacatttttgttgtgtaagtaaagcttccaaattatctctccccatagtgaacttggataaagtttttagcaagtattctaccttgacttctaaaactttacatccttcacaaggagaagtgacattagtggtgttagtgcaattgcaagaagacttgttcttttctttttctaaaatatcattttttgctctttctttcaaaaattctttttgaatttccactagcttatccacatgccacttcagttttccttttagaagattatttgcaatagacaaattntgtgcttcttcatgtatttcattgaaagcatgtagtagctaatcatagttatcatcaacttccaaatctaaaatgtttacctcactctcaacttca

SEQ ID NO: 6637 - DNA, 363 bp, Glycine max
ccaatgcgagctctgaccgctgttcgttcttcccgcgatgctccttatcatgttcgcctgagtgggcttatagcctagaccatactggccacgaggtccttgggagactatcacgctagatatgccgacattgattttgcgtaaacccatccctggaccataaccgctccccaccataaattgggcctacagtatcgtcggatacgacaaacaaagtgtgccagagagtggatccacggacgatatgctgaccactttagagactggaagcggctctgaaattctcacttgttccacgcaggcatggagatgggagctaccaagatatcttctcgctgaacgagaccaatgccctccctacaa

SEQ ID NO: 6638 - DNA, 609 bp, Glycine max
  unsure at all n locations
gttcctgcgctatctcccntactacgtcngnntctcgcntnctntttgccgtanacaatgtcactcnnnnnntnnntnnnnnntaggnnnnnnngntgnnnattgaatctttgagcccctcgnatcnccgagagaccaccagagnggacccgaacgcatgcaagctaaagagacgcatatacganacacttccttcttcaggtctgaaaataggaaagacaccgtaggtctaacggtttacacacacacatggattgaaaataatgattgggtttcacacaagcatgaccaaggtagggcataggggcatataaagactactaccgaatagcctaggacacctatgtattgctagaaaaccaagaacaaatgaaccctctcgacataatgaaataaagtatcgtttgagacactacacgtgaggctggcatgtttagaagtaccttatacaaagagtagacggatggtatagcgggagagtagtcccgattgaacataacacgagtatgcggtgactctagggtagatgtgaatgttcccatacataaagaattctggccggactgacacgttgcacccttccaaaggtattctaggccacaaacttcc

SEQ ID NO: 6639 - DNA, 378 bp, Glycine max
gcttggccatattagacttaataatttgattgttcgagtataacattacaaggaaatgtttttaaagaaatcataacattgatctggtactacaaaaaaattagagattcaactttcttcactaataattaacaactaagatttattgataaaaaaatgatatattattctagaagtattcatagatcaatcaaatgtattgataaaaaacatagatcaatcaaattttatgaagattggaaaaactcaatatggaaaagtgaaaaaagaaatatgtagtattaaacatatttatttaaaagcatgtaagccaagtctaattacattaataaaaaattaacataaaaaaatgtatcccaaacattcagtttggaaaat

SEQ ID NO: 6640 - DNA, 398 bp, Glycine max
agcttgtttgaaggatagattctcattatacaaatcttgcaggaactagctcagcaaaggccaattatgagtgtaaagcagttcattgagaaggtggcctggcctggagcccgaccttcttttgtgggggataatgaaaatcctacattctacctacgcttctagcacgatccatacatcacaaggaaaacttactttgatgcagctacccagttcaagaagacttgttcttttcttttatcaaatatcatcttttgctctttctttcacatactcctttcgaatttccactatcttatcctacatgccacttcagttctcctattacaagattatctgctatataccacatcttgcgcttcatcatgtttctcattgcaagcacgtagtagctaatc

SEQ ID NO: 6641 - DNA, 349 bp, Glycine max
  unsure at all n locations
agcttacatcaaggaattgatggtactctntgatgatatatcatctcaccatattcctagagaggaaaaccaagtggtttatgctcttgccactctgtcatcgatgttcaaaataggccctcacatagacttttcgtgcatagacatcaaatgccatattaagcctgtacactgttgtttgatagaagaagatgaggatggtaacccttggtatttcgatatcaaaacatacatcaaggacaaggaatactcgtccgaggcctctgacaatgacaagaggacattacagaggttggcagccagtttcctcctgagtggcgatgccctatataaaagacaccatgatatg

SEQ ID NO: 6642 - DNA, 298 bp, Glycine max
  unsure at all n locations
agctagannttgtgagttgatttagccttaatttcactttattattatcagctcatttaaaggaactttcaaagtaaaatgtccgattggggtttttttattattttattattatattattattttcagatattttgattattttattattatttttgctttttttatttaaccgaggttacgacatgaatgatcagttggattntattttaaggcggattaaacgagattacgacacatacgatcgattgatattcctttaaacatcgattaagtgaaattactgcttatacgatct

SEQ ID NO: 6643 - DNA, 375 bp, Glycine max
  unsure at all n locations
agctntataagtgcgggttcgggagacaaaggtcaagcgttcgcgatatgcgaagatgatattccgagtactttggatttggtacgaccatgctctcctgatttccagctgggaaattggcgagtggaggaacgccccggcatttacgcaacaagcataatgtaaacctttacggttttaaaagctctatagttgggcctaggctttagagttttcattttgttaaggctttgtgtcttttgtttttgaatttataaatacaaggatctttcttcatctgttcctgggctctacccattctcattcatttgcatgtttacttctttntctaaaacgacagattcgatgacgagtcctccgaaggcactaatacct

SEQ ID NO: 6644 - DNA, 364 bp, Glycine max
agcttatgcaggcagagttcgagatgagtatgattggaacattgatgccttacttggactttaaatcaagcaaagcagatgaaggaatatacatacatcaaaccacgtatgtgatggaactgctcatgaagttcgagatggacaatacaatgtcaatgaagacctctactcatccaaccattgtgcttggattggacaatgtgtctaagcaggtgagtgaaactgcatatccaggaatgataagatctcttcgatatctatctacttccagaactaacattatgctcatcgtatgagaggcaacctaactgctccatggcatttgatagaagactccaagacgattatgccatagatgcatgag

SEQ ID NO: 6645 - DNA, 476 bp, Glycine max
  unsure at all n locations
agcttggctttaaaaagttcaccttaagatccgtaacaacttcaaagcacctcataattgcctttaatgtgaggacgttcattaaagttggttttcctaggaagagggtatcatccgcaaattgaaggatagataaagaaaagtccccttctcctaagggaataccttcaaaaaagatattgtttcaccgcttctcacatcaagtcaccaagaccctctgccaccatgatgaaaaagaagagggctatggaatccccttggtagagacctcttttacccttaaattcttccgtaggacttccatttatcaaaatagacttataagtgaatttcacgcaacatctaacccacttaatccatattncactaaagtttattctattcataatatagttaaaaaaacgtcacctagtgggcgcttctcacctaatccactctcaataagatgtcctgactattttcatacactctatcaa

SEQ ID NO: 6646 - DNA, 302 bp, Glycine max
  unsure at all n locations
taataacactggagtcgagaggaactcatttaacttgtctgcctctatcctgaccaaatggcctcttattctagcacatttaggagcttgatttgcaggactatagaaattggcatagacatctntaaccactggcacatcgatgctaatttcctgaaagtggcaacgcatttgagaacacttcgcctctacaattctactttaaactcatcaaactcagaatcgataagtttcacattcctttccggaaggatccttcggtctagaatattatcgatatatcggctccaggctttctctga

SEQ ID NO: 6647 - DNA, 257 bp, Glycine max
agcttcctcgaatagtcaatgcaggtcctctagatgtggatagtgttggagtcgtcattggagaagtcaaggcaaaagaggtagatctaggtggagtggatttcagatttggagaaagaaacatcaccaccgttggcaaggcaaactccacctttgccgcgagatacgacgttggcgaggcataggtgaacggagtctttagtcgcaacgacgcctttaacaatgagaagaagttgttgtcactatcgttggacaag

SEQ ID NO: 6648 - DNA, 333 bp, Glycine max
aagcttaacaaaatccctttaatcctcagacctagtctccaagagcaagagagaagatggagttctttcccctttgttagtaaaaaatgacgcacacccctagaaattctagggttgtgttgccttatgcagtgggtcttaatctagcttaaattaaggcccaattaggttaggtgtccttatcaaaatgctaataccttcaatcaaaaggtttttcccgctcgaatctatgctcttgcaatgctttatgggtagagttatgggctcttcacaaaggtatcaagctagtaaggaacttgcatctcacctatgcatttttatttagagatggac

SEQ ID NO: 6649 - DNA, 432 bp, Glycine max
  unsure at all n locations
agcttatgcgcatatttccttacgaacgttcacttgcacaagacattctattaactaagaaaaatgcacccatatacaatcaaggcagcttcgttacctagattatttacatgtacttccaaggtgtatttgttacttacatcacacacatttcttttgctaaattcacatacatgcatactctaagcactntggctatcgaaaattgcatacgtgcacatcctggtatttctaatacctatacatacacaaactttatgataaaccttgactatctacacaataaggtgttacatttcatgcttctttttttcaagttttttttttactacctanagccgcatgcaaactcaagtatatnttcttttgctcactaaaattgtattaaaaaaaaaggtatcnttgtaatggtattcatgcaacatatttata

SEQ ID NO: 6650 - DNA, 395 bp, Glycine max
  unsure at all n locations
agcttagtgcacagtgactttttgataaacataacactgcagcatttggaggatataaaacgaggcactatgcnttttggaggaggttggtgaaaggcatgctctgaagcaaaaacatccactttgggagcttttcttctgtcattatctttcatttcctctgtttcatcttttgtttttgagctnttcatgactatgagagactaaattacccattgttgggggctcggataccaaacactctttgatgtaatgatttttactatccatctaatgttatgtcaatatcactgctccctttctaagaatatttccttggttatgcgttgataactcatctacatgtatgttataggcgtctaatcattggaaaatgcttttaacctaaaaacttg

SEQ ID NO: 6651 - DNA, 459 bp, Glycine max
  unsure at all n locations
agctntaaatatataatctggctttatgttaaaatttcatatttttcatctaatacattaaaatatgcaatatttgagaacaaaaaaaatgcaatattttagtttattttaacatagacaggttagttaatagtttttctatatatatatatatcacaagacatgatgataaatagttaacttctttaagttattgtcatagtttaatttaattttttttggacgtaggcacgtagccatagcttaattttttttttttacgcagtcatagtttaatttctgagcatgtgaatgaagagaatcttcttaacagaaataaaatccacttaagtaatctcattatctcgaaaagaaattgtgatgagatatctttagtgaaaaaagttctacatactntaaaatgtttntggtaaactagttaagaaaccaatagtgaattagcatacacgaattaaaaaa

SEQ ID NO: 6652 - DNA, 350 bp, Glycine max
  unsure at all n locations
agctagtataatggctatacatgatacatgtcatggcttggttnggatcaagggtaaaagggatgccccacattattttcatgacacaaatgcagaaatgatgatttggaaactctatgcaaaactggtcatgcatgcatctatgcggacactcacatgtcaaaattttatggtcatgtgatgctagggctcacgattcatttcctctatatataaataacccaatgttgccaaaatatgttcttttatcaatgtgtgcattcatccgagtccatttcgggcgtccgggaaatttacagcattcactcttatgcgtagacacattttccataaattggttatgatcaatg

SEQ ID NO: 6653 - DNA, 207 bp, Glycine max
  unsure at all n locations
agctntgatctaattcaaacgacaataactctttactcggatgtctgatagagtcccgtatatatctagacgatcggacatgcattctgaagctctgagctaatatcaacgacaataacgtttagctctgatgctctgatcgagacctggtatctaatgagacgctcccaattgaattatgaagctcatagcttattcaaacgacaa

SEQ ID NO: 6654 - DNA, 357 bp, Glycine max
  unsure at all n locations
agctngcttgtggagcttctatggaggctggatctttgagcttcaatgaggtcctttaatggtgattttccaccatggagatgcagcggaagacaaaggagaagaggtaagaggcggcaccatccactagggaataagccatggaagaaggagcttcaccaccaagatgagccttggataagaagcttggagaggatgcttcaatggaggaaaagaaagagggagagaaagagagagggggggagcatgaaattgaaggaagaaaaatgggagagaatgtgaactctgagttgtgtctcacaagactctcattcatcaaagttacaacaggtgttacacatgcttctatttattgac

SEQ ID NO: 6655 - DNA, 274 bp, Glycine max
agcttggatgatgactgcgatgatgaaaaggcatgtcccatgactcccatccacatgggggctgctaacagcaataacagcattgaagaggttgaatctgatgacaatgtctaagcaatggaatctgatgacactgttcaagcaatggagtttgatgacaaagtccaagcaatggaatccgatgacaatgtccaagcagcagaatctgatgacaatggccatgctgtggaatatgatcaaggaaactggcaattacgttttaatggtgccccca

SEQ ID NO: 6656 - DNA, 471 bp, Glycine max
  unsure at all n locations
agctngcatgaattcacattctcccctttctcaagcaaattcttcttgacatgatcaagatcttcatgatttacattctcccccgttttgatgatgacaaccacctgtaggttaggagcaaaaacaaagaaaaatatctgaaattctgataccaatgccagatgtcgtacaggatgtcacgacatcacgcttcagaacatgcagattatatttgagagtatgaacagattaaacaggtaaataacacaagagaattgttaacccagttcggtgcaatgtcacctacatctgggggctaccaagccagggaggaaatccactaaaatagtgttagttcgaagatctaacagccactgtttacaaccttctcacctaaccactacccgtgcaatctctacctaagagccactcttagatatgagaacccctctcactccctctcaatcactcttccgtgtttacaaataaatc

SEQ ID NO: 6657 - DNA, 417 bp, Glycine max
  unsure at all n locations
agctntacagcccagacacctcaacaggtgagacccgacgaggctactcctcttgagcccacacctgcacaggtcgaaccagtgccaactaatccaccatctccagtggcggatccatcttcttccaagcttgaagcagctccctcatcttcacctattattattatctctgaagactctatagagtcagcatctggatgagctactactccttctgctacccctgttttccatctaacagatgaggaggatacacaggaccagtcacaggaattctaaattcttgatttttcctttctggaaattattataactactatggtttagtacatttttttttgtgattttggtttataattataattatatacttgcgtttttcttgcgaatacttagagtgcatgctttgaagcatac

SEQ ID NO: 6658 - DNA, 364 bp, Glycine max
  unsure at all n locations
agcttgcaaagatattntatgggccctaccaaatcgtggaacacatgggcaaaactgcttacaaactccangttgtgaaagatgctcgcattcatccagttttccactgctcattacttaagccctntcatcactccaccatagagcccatcacccatttacctctgcctgtcaattgcatgaactgccaacctctgattgctcccttggtaattctgggttgtcgctgtaacacggaaaattcaggtgttggtgctgtgggacgaccttctacctgaagagacatcgtgggaagattgagagccattgaaagctaccttccaccttaaggacaaggtgcttttccaagccatgaggaatgata

SEQ ID NO: 6659 - DNA, 440 bp, Glycine max
  unsure at all n locations
agctnggattgatccagtctaactatggatcgaggtttagtaatttaggctacaacatagaacacaaaagcatgattgattagagaaacatccttatatgcatcagctggtttgttggaaagacccaacacttctacctactgctgtcaattttacttacttgcatttttattgtttttatcctaaacttagtttaattctgttttaaaccatcaattatcaatgtttctttcaacaatgtcttatttctgaatttaacccggtcttagactagttccctaagtttgatactcggattcatccattttaattttaaatacttgacgaactggtgcgctttntggcaaaccagatttcccttgaacatatttgtataaaaaaaaagtgaaccaaaaagtaactacaagggaaatccatcatttccctttcacacacctaac

SEQ ID NO: 6660 - DNA, 393 bp, Glycine max
  unsure at all n locations
agctnntagcgatttggactagcgaactaaccgattgagtccaccacatctgatgaagagcccctccaaagcccttcggtcctagaacctatgaattccactatcaaattttagtttcttgaaacctaacacaagaaaaactttgatatttaggttcaagtacaacatcagttctcataaaactgatgttaacgcacgacactcaacattgattctacataagaccgatgttgagtacaatactttacatcagttcttttaaaattgattttaacaacttccagttattttaaaaaataccactgtgtatttgttaacatcaattntcatattaaccgatgttaactgagcgatataatatacatattttttagtagtgcaaacacaatttaa

SEQ ID NO: 6661 - DNA, 382 bp, Glycine max
  unsure at all n locations
agcttccatcaagtggtaatcagagcacaagagtttcaagtaggtgctccttanacctccattaattntttttctttgccttctcttccattgttgtttcttaatttttctccatgtatctcctcacatgtcttgttctaaattttgttaacatgattctttagagtttccaccgattaaacttgctatagaagttagatttgattttctatggctcaaatttcttgttcttgttcttgaaccatgaattgtgctgagtttaggttcctttgagttttgtcttgctattttctgaggctgacacctaacccatataattcttacttacatatgtaatctgacgaatacctcataactctagcgtgacctgttcacctacttg

SEQ ID NO: 6662 - DNA, 401 bp, Glycine max
  unsure at all n locations
agctnnttacaaaaggttcatcaagtcatagtgaaatatggaagtaaccatcctgcaaaattggggcaaaagatgaatcgagtcacatcactgcttcgtctactgccaaacatatttaggattggtgatgtccttgttacttccagtttcaccttgacaaagatgtcatggaccatgttgaaaatctaaattgattcaaccccatatcctgcgtaaaaattcgcaatacttcgactgtacatcattcgcatgcatccatgcttttcattggatgcattgctcgttgcattctttccttgaaaaataaaataaaatgaacttaatcattgttataaaaaaagaaagggacacgctttacgacgcccttaccgaactcgtgctatagctagagtaatgggtga

SEQ ID NO: 6663 - DNA, 312 bp, Glycine max
  unsure at all n locations
agctnnnttgaaagacacatctcttcaaaccattttgaanaggtacaatggacatatatacatgtgtgtctgaatttgaaaagtaagagagagattntaaaaagagaactttattatcaaatgttctctaaacaactattggccaaacactcgcaaatcaattgaatattcttctaagattntcaacttgtattatcatctctaaaagagagaaattcttctgtatattctaaacattggtgtgatcaagagaatgtttgtctcttgacttgtgagaatcttgaacacaagggagacggatcccacgatgtg

SEQ ID NO: 6664 - DNA, 327 bp, Glycine max
tgcaagctgcatggtgaatcataggcgactcaatggtgcggtgatgatcactaggacgatgacaaaagatggtgacataggtgccgacaaagagctcattgaccgatccaagctctgctcaggtgaatcgagacaattcatgagctcaggatgcgaatgatgatgaattccagactcatgaggatacggtacattcctgaatcaagattcatggttcaagatctcaataatcacgatcctgattctcgactcttgattcatgaatcatgagaacgcttaaccaagataagtatgacaagtttttctcaaatattgagtagcacatga

SEQ ID NO: 6665 - DNA, 326 bp, Glycine max
agcttgtcacacccaatgtccacccttaatgagttctataggcttatatgccacgtctccagtgcgtgccactccacgagtgacacgtatgcaagagcacgacactacgtctccagtacgtgccacttcatgagtgacacgtatgcaagagcacaccacaacgtctctagtgtgtttcactccatgaagtgacatgtatgcaagagcatgccacatctgtagtacatgccactccacgagtgacacgtatgcaagagcacaccacaacatctttagtatgtgccactccatgaagtgacacatatgccagagcttaccaccatgtc

SEQ ID NO: 6666 - DNA, 127 bp, Glycine max
aacatcaaagtgaaacgacattcaaacagcacaagctatcacagccaagcaaaacagagcaaaggcagagaactctgccaaaacaccaaccaaatcacaagctttctcacttaaagactccaataac

SEQ ID NO: 6667 - DNA, 445 bp, Glycine max
  unsure at all n locations
agcttcttatctaaggcactcttttggtggtgaatcttcttcttccatggcttattctctagtggatggtgcctcctctcacctcttctcctttatctttcgctataactccatggctgaaaatcaccattgaaggaccttattgaagctcaaagatcaagcctccatagaagcttctcaaccaagcttccatcactcatgattgtcatgtatgaatgcaaaaactatntactgtagcaattcgtggtatctttcctgacaaagttagggttgccataactcgtctatgctttctttntaatgctatctatagcaaagtcattgaccctagaaaattggatgaattggagaatgtggcttccattgtcctttatcaaatggagatgtattntcctccatcattntttgacataatggttcacttaattgttcatctggcgaggga

SEQ ID NO: 6668 - DNA, 533 bp, Glycine max
  unsure at all n locations
ngccgccagganaatgatacctgatgacgctagcgacagactgncatgactcagcggtgcactgtatagcagatagtgtacaatccgtcttcacagatggtactctttcacaatttacttcagaagaacatggtgctgaagaatatttccctgcccgatgtcaatgatcaaggcgagtaggcccaccactatgagatacccatctgtggagcattggcatgacaatgcctacctctggtggctaacaccatcctatagttgtatttgtagtgggagacataggcttaacatacgtgtgattaccatattattctaatgaaaggaaataggcgaaactagctgttcgcgaattcaccgattgtgctagtgtttggagggatcaacttatgacttgacggctcaagactgatgataggcctattcgttgatgagaggagatgcatattgcttacgatggagatttgacctagacactatcatctggatctcacataacctgccactctactcaagattctgaggtgaggacactc

SEQ ID NO: 6669 - DNA, 443 bp, Glycine max
agcttacggtccatgacctcatacattcgctcttattgggtatatcccactagttttcttcttaaaagcttgctaattttatgccatgcagataggctatatggaagtatccacatacaacagagggaagttgaaagggcgtagaaactaaacatatttcaagcgtttcactttaacgcacaattgtctaatgaacagagttgcactcatctacaatttcaagctgacgtacagcataagtatccatttccctcgacattaactcaaattttgtgtacagaacataaaaatatttgttactaaatactgattctgactaggacaggatagccatgacatctgaggccctcaaggcaatgtagacagaaccatctctgcccttgaagtcattcgctgcatatctggagtacagaactgtattcccaggcatgacggacaatggc

SEQ ID NO: 6670 - DNA, 457 bp, Glycine max
  unsure at all n locations
tgtggcaatgctacagtactgacaacattatacgccgctcgctatcactctccanatccatatagccaagagcaatgtgagttaaattgtgaaattcacgcatgtagtattgaagatatacctgcaagggttacatcaaaacaataatctgtcagtatcagaatcccctgttattcttgaaaaagcggaaagtaatgacatagaaatctcacacatcgtatccaatctatgctcataaactcaacattgttaacaacttctaatggaaccacagcatcgggtttatggatatgggctctgaccaacttgcgcaatggtttaaaccgagcttgaattccttccatatcatcataaaattcatcgccatgttcatcgtaaatacagcctaaattctccgcattcaaatcctcaagattaggacactcacaaagaagctcagcagaatgcatagcactta

SEQ ID NO: 6671 - DNA, 461 bp, Glycine max
agctttctctctagtagttttctgtttgatttatagattaaagtgaaaggaaaaaatatatataaaaaagaaaaaaatatataagaaaataagatgattttttgaattgtttaataagagaaaataaaaggaaaaatattttaatgtgttaaaaattaagaaaacaaaaatattgtacccaaaatgacataaacaccctgaaaacaaaatgaaccataatatgtataaaatgtcattttagtctttttattacaaaaacttattttctacttttttctctctctccaatttgaggagatacagatgaggaaaacaaacaattttctctccacttttgctacttaaatttttctttcttccttgttactagatgaaccaaatgagggaaacaaacagaattaataagttttctttcctttactttctaggataaattagtttgtagatttttattctattac

SEQ ID NO: 6672 - DNA, 477 bp, Glycine max
  unsure at all n locations
ngtatgtaatggacgatgtcatggtttcagccaaaataaagtttgttattcatcgcctttaatagcgagccagctaatagctatactagcttcctgttgagtattgacttgctcatgtcaagaatttaagaagcatcttccacatgattaaaaagaaaaggtgtttaattttgtttaatgtgctaatacctgtaggttcttttgggataaataacacctatgatttttctgaaagtcagaaataaaattccaaattgtgtctaaggtaacttgtagtttttgcttaaattttcaataaatatatagatggagaaaaaatacaataatttttcaagtttctctgttttcaattcttttccattaattgaggtgtataaattaattctaacctgtaagagaaatctgatttattctattttcttatataagtgttngagtagttctcaaatttactctaccaatggttaaatatctgac

SEQ ID NO: 6673 - DNA, 449 bp, Glycine max
  unsure at all n locations
agcttctggtgggacatcttgacttgctttccattctgacattcaccacagattctgccttcttctattttcagattgaggatgcctttaacagcacctttgtcaatgattttcttcatgcctcttaagtgcagatgtccaaatctttgatgccatattctgacttcatcttctttggaggatagacatgtggaggagtagctggtttcttggggtgtccataggtaacaattgtcctttgatctgctgcccttcattagaacttcactcttctcatttgtcaccaagcattctgactttgtgaagtttacattgaacccttcatcacacacccgaccgacgctgatcaagtttgcagtnagtncctttaccagcagtactttgttcagactaggaagtccatcatgagctagctttcccattccaatgatctttcctttagagccatc

SEQ ID NO: 6674 - DNA, 467 bp, Glycine max
  unsure at all n locations
ggataggttgacctatatatatgtatatatacttatattattttttgggtaccaatatatacttatattattctttaggtacaattaattatttttttgaaacaagtagactttgattacacattactgttccataacttccattcctataatcaagtaagactttaattacaatttaggtatgagtcatgtgtccctttatattcctcattatttttattggctttcctattcctgttaatgtttccttttcctttaactttcctattaagttcctactactccatagcanaggaatattaatgtgaagaagacttttaaaaaggctatcaggccaagccagactnttaaaaaggtcaggtcgagccaaaataaaagcanttgatagactataggctaggctcaggcctcanaaatttattataggctaggctcaggccttttaaagtctggtctgacctagtcta

SEQ ID NO: 6675 - DNA, 446 bp, Glycine max
  unsure at all n locations
agcttctatataagctgaaccattgtatcaatatacacaagttgagttttattcagaaaattagagtttatctcttttatcttggtgagagtgattctcctaaattcttgagtgattcaagaacaccctggctgtatcaaaggactttcacaacctttgtgtgttgccctcgctggaaagagtgattctttccttcctatcatctccacccttgttctttcaaaccacaattccagaaaatccacctctgcccaaaattatctcgtgaccataactcccattttacacactcaaattaagtgattcttgagcctaaattgaatttcaaaacgagacctttcacctcgttttggaatcacctcatttggagccctgtagcttccgttattgccatttctatatttctgtccagccaccacttaacctacgttntaccatcccattca

SEQ ID NO: 6676 - DNA, 466 bp, Glycine max
  unsure at all n locations
cccatcacatgtggtactatgtggcggtcgggcgatggtgcacaacaagttttccacatccacaaagcgcgcataaacccaccatcccctgttgcccacctccaactgagctcacgtactcccacgtagcccatatactcttttctctcaacaccgggtccccatcaatcctcccaagctttcccaacatcaaagtaaaacgacattcaaacagcacaagctatcacagccaagcaaaacagagcaaaggcagaaaactctgccaaaacaccaaccaaatcacagctnttctcacttaaagactccaataacaattccttcgttccggttcattaaccgttggatcgactcgaaaattntactggaagtctttagtacataagcctacattttgaccgttgtgatctactagcaaacatccagaactcgatttacattactcttttcacaaccagcaaatacatag

SEQ ID NO: 6677 - DNA, 531 bp, Glycine max
  unsure at all n locations
gggcccggggatgatgcttctatctctgtcgcgggatccttagagtcacctgaggcatgcaagctaggaaggtagtcatacctcacaagatatatgtatgtgtgtttaagtagcgaaaataccttggatatgcatgtatgtaatttaggtggcaaaaaaaatacctcaaaatatatatgtgtgtgtgtgtgtgtgtgtgtgtgtgtgtgtgtgtatgtttaagtagtaagataccttggatatgcatgtatatagcaaaaatacctcacaaaacatatatatgtatgtttaggtagcaagataccttggatacacatgtatatagcagaaatacctcaaataaatatacacatgtttaggtagcaaaatacctcatgaaaaaaaaaaacacaagcggacgagaacaaanaatatatctttcggctgaaaagccagcacacttttgaaagaaataacttccagcttttctttganaaagattcaccgatcataacaccagcttttgaaaaaaatgtgtatgcacctgaaggg

SEQ ID NO: 6678 - DNA, 350 bp, Glycine max
aaagcatttctttcaaggataaaaacaaggtccatgtaaattaagaatagctatccacaatcactaaggcataatagttccctcctatactcatagttctaaaaggaccaaacaagtctaaatctaagagttcaagcaatctagaggttgaaatcatatttttagatttaaaagaaattctagattgctttcccttttgacatgcatcacacaagtcatccttcccaaacttaaacttaggaagtcccttaaccaacttattgcctctaagaaactctgagatcaatacatttatcttcccgtgtttgattaccactaagcattgatataaaactaagtctaaaacaaaa

SEQ ID NO: 6679 - DNA, 595 bp, Glycine max
  unsure at all n locations
agcagatcgcctcatactaaacacatgtgctcaaatnantcgtaaatntcctctcntntntttnnnnnaaggcggcgcgcgatganacgagaccaagnannaccngacacnaannanacngaagcccacnggcacnnccataccaactacgcgggccctttacacttcatcaaaaagaggccatcaacagacgaggcataccatccaaacccaagaaacagcatacgcatgcacccatataaaagaacgtatgaaccggataaaacgaaactgtgattcacaaacgtcacagccctgagctcaagttgctcccccgcgctatctaactcccttgaggtaacatacacgcacacacacacatatccaactatttcgaggcgcacatcacgataacgctactaaattaacatggacaaccgtcggagaagccaagcaaacaacacagcaggcacaccgtgaacggatcagacgaggggctgcagcgtgctaagcaaacagaacctcagagagacatgaaggaacacggaacactcgagcacagacgtatgagcgttgnctgcaactagccctcgcacggggagaaataacaacgaag

SEQ ID NO: 6680 - DNA, 462 bp, Glycine max
  unsure at all n locations
agctnttcgattcattctatgtacccgtagtggtccacattgtgtttcgtgcatttttattctcgttttgtttactttttataccccctgttgacgtgcttaagccattttacttaagtcatttctcgcttaacttaaaaataaaataaatttccaccgaacgtttgaattgtattatctgttaacttcggttaaaataaattctgaccgttcggtcgtgccgtaaccacgttggaaatcaaaaagaggtaaaaaataatataataatcaaaaaacatctttaggtaaaataaagcggaaaatcaatcggacgttttctctttgggatttctcattcttaatcgaattgattaataactaaaagtgaaactaaggctaaaatcaactcgcctagtcaagctcgtccataaaaataagctcttgaagtttgcatttcattatctcactaagtaaaatggatca

SEQ ID NO: 6681 - DNA, 473 bp, Glycine max
  unsure at all n locations
tcanaccacagcaacacanaatctaggtgtccaaaacccctcaattcaatgggttttctaggtttgaaaagtgaaattgagaatgaggtaaatttgaagcaaactctcacctcacaccagtccataacatctattgagacttgttcaaactggttttacacctaaaatctcaccgaatcaaaatttgactcttcaacacccaaattttgtcttagaaatagctctttgttcactttggtcatttgtttttctctctagcacagtccaagctttctcataagtcctaaatgacatttcaagctaagatttactcactctaacctctaaatactaccaattccagatttggccttccagccctcaaaaattcactctntttccacttctaacaccacattcttactttctaaccctaggttagttctacccttcatctctaacagtttttcataagcaatttcagcatataaaca

SEQ ID NO: 6682 - DNA, 487 bp, Glycine max
  unsure at all n locations
ggatctctaagtcacctgcggcatgcaagctntggttaatcaagattcaacttccctaatgtgaataactcacattatgttgatattatgtacacattccaaacaaatcatggatctgtttagaatatcaaccttcaattttttttttctccaactactaaaattatttactttatccttactcactttagaagatctaaatctggttaacaaagttatttgacataaaaaaaatcaatacactacagttaaaaacagtcaagtagtgatgatctttcactactcagctgtaaattaccactcatacacccgtaatcacatgtattattatattctgattctgaactaagttaataaataaacgatcccaactcattttagagggtaaaataagtaattccgattgtttgataaanaaaccaatacaatgattacttactttaatcaacccacatcaccaaaacgataacttcataaacaaataaat

SEQ ID NO: 6683 - DNA, 426 bp, Glycine max
  unsure at all n locations
gacacttgaaactaagcttctaaggaggtgaacttagttnttagatgggtgtgtgtagcttagttctagcttctcaaggaagttntctcaaagaagcttctcaaggaagttttcttaagaaagcttctcaaggaagctacctagtctataaatagaagcatgtgtaacacttgttgtaactttgatgaatgaaagtcttatgagatacacttcaaagttccacttctttccctcttttattccttcaatttcgtgctccccccttctctctttcttttcctccattaaagcatcctcttcaagcttcttatccaaggcaattcttggtggtgaagctccttcttccttggcttattccctagtggatggtgcctcccctctcctcttctcctttgccttccgctgcatctccatggtgaaaaatca

SEQ ID NO: 6684 - DNA, 454 bp, Glycine max
agctagttacatttgtattagagctggatggtatctgagcttgatctatccagcttgttacataatttgttggatggtattagagctacataaacatccagttattggatcacccgtatttatctacactctagatgtctattcctaagcgtgaggggtggtgttgtttggccaccaacaatttttccacgttccaaatgtccaatcctggaagtgaaggggtatattgtgttcccacattgactagagatatgaccaatgtggtccttataaggcttggacagtcctcaccttacaagtcggttttgtagggttgagtgatgccttaagtatgaattctaagaatccccttcattctcttactctactttttctattctacattcctatctcaccatcccacttctaggttttcttattcacttttcgggccctagcattatgatctgacttg

SEQ ID NO: 6685 - DNA, 414 bp, Glycine max
tatgagaccaaaacatgacagagaatgtttccaacaatcttactatataatattatccaaaacacaaatgaattatatagaaatacttctcacaacatggggagtaaaatccctcacacaatttcacataatcatattaaaatcataggttcaaaaacacaaaaacacaaagagcattcaattttatcaaccagttcgcattaaggcatcaattaacccatcaaacataacaatctcatgattataatcataaaggcataattacaatacaataaacatcctaaaataaacctcaaatttgatcctctaaggatcgttacacatgtttattctaaccccaattgcgataaactcaacccttacctctaagcgggctcacgtgtgtagtccagcaacgatagcggcgtctctaat

SEQ ID NO: 6686 - DNA, 425 bp, Glycine max
  unsure at all n locations
agctngccaaaggtcgaanaggagcttgtccgatcaattgagcaagaccaaagaaaacatgtgggccatcatcgaccaatacaaggaaaagttaagcctagcggtaactcacaaacaaaggctagaggacgagtacgtgaaggtataagtcctgcaagtggaaagggaagcaagggaaagggtgatcgattcattacacagagaagcaatgatgtggatggataggttctcctttactgaaattctgatactggggacagatgtcgtacaggatgtcacgacatcgcgcttcagaacatgcagcttgtatatgaccgtatgaacagattanacaagtaaataacacaagagaattgtaacccagttcggtgcaacgtcacctacatctgggggctaccaagccagagaggaaatccactaaaata

SEQ ID NO: 6687 - DNA, 470 bp, Glycine max
  unsure at all n locations
tgaccaggaattatntgtatgggttggatgttgaattctggttgttcctggtgcggagatgatggtacagagggtgaaccangagctgaagtttcttttggtgaggtagccatggaaaagcaaagcgtttggaatgatttcgtaaatttctgagagctgttggggaatgcagaaaacgagattaacacgagaatataagtttgaatgaggaatgtagagggacgtgtgaagcaacggtcgaatttgctttggttcagtagtgaacgtgctattaatgttaagtgattcgtttgggcacgttcagatatcagtagttgctacaattcctctagcagacaaatgcccagcttgcccctcagtttttcaaactgttttgcatccaatgcctttgtgaaaatatctgctatttgttcctcagtgtcaacatgctccagtgtgataactttatcatcaacaagctctctaatata

SEQ ID NO: 6688 - DNA, 473 bp, Glycine max
  unsure at all n locations
agcttaactaactccaaggcatcacctgctgctttatactccgaatcggtagttctcacctaccagaagttccagaatccagtacagacttctatttcagcttatgtgtgagtaaaatattgctcaaataataaatcatgttgatgttgctattcaggaaaaataacaaaataccaataaattatgttaataataaaggggttggtatgtgttgatggtaaattatggagctacttatttacctgcaacaactccccgcaccctaagctcttttgataacttttcaacaaattgtcggggattgagatgtcgaacgcttgaaaattcaacctcaaactcttctgggaccatgttacagcaataaggaacccaagatgaaagaattcgctttcggtcacatttagcaactataggagccctgttagggaaacatttaacaaaatagacgttattntacacatggagataacaat

SEQ ID NO: 6689 - DNA, 470 bp, Glycine max
  unsure at all n locations
tcaagatgtagttaagatacctgacaacttctgttcgtgtntgttgcttgatagaaacacagatgctagatataataatatgaggaaggctgcttctcgggcagattccggtgacaactatttatactgtccaagggttgtagatctacaggatgaggatntaaggcactttcagtggcattgggaaaagggggagcctgtcattgtcagcaatgtgctngcaaaaacatctggtttaagctgggaaccacttgtcatgtggcgtgcattccgtcagatgactaagaccaagcatgaacaacatttggatgtgaaggcaattgattgcttagattggtgtgaggtttgtttaatttctcaatcttgaacttcgagggaattttgcacaaattccattgctcatgttcattctcatgaagcttatgtttaaattgtgtaatgttggtacttattttaactggaaccactga

SEQ ID NO: 6690 - DNA, 445 bp, Glycine max
  unsure at all n locations
agcttcacaagtaaattaacctcctgcctgaagtcctgactgtattaaaaagtaatcagcagaaagaaaaggataagtggctgacaaaaggataagatataaaaaatagttctgaaattacacaagcttaaaccaagttgtctgtctattgctatgaagcaaggactctaacactaacaccggacacgacataaatacttcaacacggctaatgtctaaaatataggacatggggacaccgcatatacacacaaatagagagattctaattaaatgaaatatgagtaacatagtggatgttatggtgaggaggaagatcaattttatgtgcctacaagaaactaagtggacaagtgaaaaagcgaaagaattagacagctcgggatttaagctgtggtatacgggaaaaatcagatcaagaaatggngtagggattattgtggac

SEQ ID NO: 6691 - DNA, 81 bp, Glycine max
tacaagaatgaagctctgataccacttgttgaacaagtggcctcagatatcttaagaagagggggggggggtgtgaattag

SEQ ID NO: 6692 - DNA, 422 bp, Glycine max
  unsure at all n locations
agcttcccacccagctcgcccaggcgagctcatttcttttatgcgagcaaggttgcttcctccagaagcaacagccttctggaggaaggatctggaaggcccaagtgggccagattgctatttgtacccccctttttactaaatgcacccctcctatttttttggtaattctttttccgtaacgttacgaaactttacgaatttcgtaacgatacttattttccttccgcaaggttacgaatccttacggattatgtatttactttttattagcattcgaagaagttacggaaactcacgaattgcgcanaaacacctcttttcgatttctgcacattacggaatttcacggatcgcgcaagcctgcttccttttgatttctgagacgtctcgtgacttcatttattgtgcaacaaaggacg

SEQ ID NO: 6693 - DNA, 484 bp, Glycine max
aaactaagcttccaaacatccaagcaaaacaacattcaaacagcacaagctatcacagcctagcaaaacagagcaaaggcagaaaactctgctcaacacatcaaccaaaatcacaggttttctcacttaaagaccacagtaaaaattccttcgatccaattcgttaaccgttggatcgactccaaaattttactggaagtctatagtgcataagcctacattttgaccgttgggatctactagcaaacattgagaactcattctgcactagactttccacagccaaccacacacaagcatttttctgcacttgtgcaaaattctgctgcacaatttcacagcaaaaattctgcataagtgcagatttcgaaaatcacacttcctctcatccaatcttgcccaaatcaattcctacaagtcccaaatcatgtatcaatcatgtctaaaccaaattcaagctttaaagcacagcaacacagaatct

SEQ ID NO: 6694 - DNA, 451 bp, Glycine max
  unsure at all n locations
ntaagaagttgtcaaacattaatgaatagaaaacaacatattgtagttgctactgacaagaaatcaaacttggtgaaaagagaatataggattcatttgatggcaacaattgattgtattcatttctattgaagcaaagattgacatttcgtggtcatgatgaatcaatttattcacaaaatcaagataattctattgagcttctacatattcttgacaatcataatgaagatattgataacgttctaaaaaatgctcgtggaaatctcaaaccagtggcacctaatattaaaaggatattgtgatagctgccgcttgtgagaccaccaaaattattgttgatgatgttagagatgattnttttgccattctaattgatgaatctcgagatatatcaattaaggagcaaatattggttgtttttgttatgcagataanaatggaagtgtca

SEQ ID NO: 6695 - DNA, 488 bp, Glycine max
  unsure at all n locations
agtcgcctgctgcatgcaagcttccatagcaagaatataacaatgatatattattagtatatggaatgcatggtttcttttttctttagataactatgatagaatgaagagacactatcctaatactatcattaaaaagtttaccaaaggaatctctctagaaaaggctacccatcaaacaaaattttaggcccggttcgtttttactgaaagacagacgatgacagtggagacaaagacgaagaacgataaaagtatctattttcaccgttcatttgagtataaagtaaatagtcaatttggtacaaaatccacccaaataagtttgcatccaaaactgagcgaatttgtgaagaaagaagactgaaattgaggcgtttataaaaaattattcttgtgtganaaatatgaaacacaccgagagcttagattcaaatatgcaccccaatcatattcgaatatggaagacctagagaacaaccaacata

SEQ ID NO: 6696 - DNA, 455 bp, Glycine max
  unsure at all n locations
tattagttgttacaataattntagactcctcaacaatttacatacatcagtttcgcgtacaaggtagagaacattgtacccttttgtttccagaacatactgtgttacaaatagcttcaatctttcaaatcattgccttctcgaacaatatacacaacactntgtgtttcttcttcaattcgatctcttctttttactcttactttgaggtatatattcttaccttagttacaaacttgcaaccatgtcaatgcccttgctcacaaacttgcaacacattgagacactcctcaatgcaccaaaccccaccgttagtgcatccattaaaagatggcactctgcattcatggccatctattgttcccgagctattatgtcacactccactctcaagaaaccaaacaaaaccaaagcaaaagcctcaccttcaccaacaccaacaccaacaccatctt

SEQ ID NO: 6697 - DNA, 459 bp, Glycine max
  unsure at all n locations
agctataaataggctctgaatccgtgacgttgttcttatcgccaccctcacgcttagcgcgagtaagtggatttgagcttagcgccagtcttgcactgagcctggctgaagacaactgctgcgcataacacactgatctcgcccttagcgcgcagccttgatattgatgctcttccagattcttcggtcgtgctaagcacgctgaagctgtgcttagtggtggatgcgcgcttagcccactgaagagctaagctcaactgtcacttttagcatttcatgacttagcctctttttcacctagaattgcacatatttcatcattaaatccaatagaaatattctagagacaacattaacaataaaacaagatttatttacaaactactacgaaataaccataaattggagaaactatacaagttttggaaaatgctntatatacaaaagttagtcgtataa

SEQ ID NO: 6698 - DNA, 456 bp, Glycine max
cattatttcttatagagaatacttatagtgtataccataataattgccacaaattgttttttttttatgatttcaagttgttgtaaactaaatacagaaactcaattacaaaagttttacaaatcaaaaacttaattatattttttaatttaaagacttaattaaaaattctcaaataatttaaagagttaccaattagtttaacaaaaacaaatagtaacaagtgaggatccttaaactttttttttttagaacaaagtatctgaccagatataaatataagtaaaaaaatggtttcacgctaactaagtattactagttgttccatcgggatttggcttgagatttgcttattgaaaaccaacaatcaatgcattttttttacttatatttgaaaccaaactattactagttgttcctattgggattggctcgacaatggttatgacaatgatc

SEQ ID NO: 6699 - DNA, 282 bp, Glycine max
tctctactagggtttcctagcgttagagagaaagagaacggattggagcctccattttgttgtctctgtgcgagggacatttctctcacccaacatgttattccaaaaatcccaacggtgggaatgtgtggaactaagttccaaacctattgtacaagttttacaatgatccaactgttaacgagtccacagtcgtaattatatttggatagggatcggtgtatgccgcaaaaataaagttgtgtgcgatggacatttctcttatcacagacattaatcaca

SEQ ID NO: 6700 - DNA, 436 bp, Glycine max
  unsure at all n locations
tactatgtcccaacaatcctactagtagttcctgtggactcttgttgcataaacattcttgccaatccaaaatcagaaattnttgggttcatattctcatcaagtagtatgttactagctttcaagtctctgtgaatgatttttagtcttgagtacttatgaagatagagtattccttgagaaatcccttctattatgttgaagcgcttcttccagtctagtaacatgcttctagtgcaatcttgtcaattaaaacaaggcagtatgtgttagaatatatactatacaagagtaatacactgcaagacatacatagttatgcttaagataggaaagcataagtaaaggattaaaggaatcatccgtaacaattattgaaaaattcagtcagaanacttgaaatttcctcataagagcatcgatggtatatataatt

SEQ ID NO: 6701 - DNA, 431 bp, Glycine max
  unsure at all n locations
agctagaattggatatgaaccatgagaactatatttttgtcatatctaaccatcaatggtactattgacttattgtaaatgcataaaaaataatgctttagcactaagagctacaagtaaagaaaactgcatattaagtgactttattctttattaagatatttcaattcgggggccatgttataaatcctactttgcatgatcttatacaatctctaataaatttgttagagatgcagaagaagattatcagattcattacattaatataagatattgcattgctatagagatgctgatcatgctttaatgttcttatctacatgagcaacttatattttcatgggtatattcatagctctagatgatcatatagatcatattatgagagagctntatcatgaaatacaagttgcttgcttgttggaagc

SEQ ID NO: 6702 - DNA, 381 bp, Glycine max
  unsure at all n locations
taaatcttaataattagtaggatgttcttggcacttctcatgttaaattgttcacattatcttaatatttttaaactttctttcacaaaagtaacaaaataaattattttctataaaatacactgaactacatctaagcttaatcaactttagcaaagtatcattaaattttctcatagatgtatntattttataattaatttatagaaataactaattttcaaaaaaaaaatcatgaaattaacaaaataaactatttntacaaaatacaccgaactaaatatgaatttaataaactttagcaagctatcatttaatctttttcatanatggatttatcttatgatatcatctactcatgtatcaaaattaatttcatga

SEQ ID NO: 6703 - DNA, 456 bp, Glycine max
  unsure at all n locations
cgtcttgctggatatttatatgcatatttttctgatgatcaccgaggaacaattagggatcaacttgaaacttatgtgcnttaagtgagacgcacatgcttcttttttcanttgtgaagatgttcaaagtttggctatgaagatggttcacactgagaaacatttggtatttccattggtttataaacttattgagctagctntgatattgccggtgtcgacaacatccgttgaaagagctttttcagcaatgaagaatatcaagtctaaattgcgcaataagatcaacgatgtgtggttcaatgacttgatggtatgttacaccgagcgggagatattcaagtcacttgatgatattgatattattcgaacatctaccgcaaagaagtctcggaaaggacacttgcctcgtaatttatttaacccgctttgtaaattatgttatctctttattta

SEQ ID NO: 6704 - DNA, 450 bp, Glycine max
  unsure at all n locations
tgtgggtggaggacgcatgaacgaaaacacaatttatgggtcttcgtaaaagggttgaggatggagaattgcactaagcaatcactacgcacggttccaagctccagggtggaggacgcatgaacgaaaaagcaattcatggggctccgaaaaagggttgaggatggagaattgcactaagcaatcactacaaacggctccaaactcgtgggtgaaggacgcatgaaccaaaacgccattcatggggctcagaaaaagggttgaggatggagaattgcactaagcaatcactacgcatggctccaagctcctgtgtggaggacgcatgaacgaaaatgcaattcatggggctccgaanaagggttgaggatggagaattgcactaagcaatcactatgcatggctccaaactcgtgggtgaaggacgcatgaacgaaaaccccattcatg

SEQ ID NO: 6705 - DNA, 426 bp, Glycine max
  unsure at all n locations
agctagagcgtaaactanatgccttggtttacctgttaacctaactggccatgggataaaaatctgcacctttcgccacactctgtggtttatgctcctctaccgaccaccatacagacctttgcccttctatgcaacaatctgaagcaattgaacaacctgaagtttatgctgaaaacatctacaatagacctcctcaacctcagcaacaaaatcagccacaacagaacaactatgacctctccagcaataggtacaatctcgggtggaggaatcatcccgaccttagatggtcgaattcttcacaatagcaacaacaacaacaacagccttattattaaaatgctactgggccaagcagaccatacgttcctccaccaatccagcgacagctacaacaacgacacatcggacccgaaatagcaa

SEQ ID NO: 6706 - DNA, 380 bp, Glycine max
atgaatgagagtctcgtgagacacaactcaaagttcaacttctctcccccttttcctgtgtgagtttcgtgctccactctctctttctctctgtgtttacggccctccattgaagcatcctgtccaagcttcttatccaaggcacattcttggtggcgaagctgcttcttgcatggcttattccctagtggatggtgcctcttgtcacctctttgcctttgtcgtccgctgaatctccatggtgagaaatcaccattgaatgaaggtcacagatgcagccttcatagaagcttcacaagcgagcttccatgactgtggctccctctgcctccactcatcatctgctaccttcaagctcttacccatgggttactatgttg

SEQ ID NO: 6707 - DNA, 465 bp, Glycine max
  unsure at all n locations
atccttaagcgacgcggctgcagcttgctatgtntatgaattattttggtattcatctttctccacctggnagacgcctctcttcattatcgtcttatctcctaggttgttataggggttggatcacatatcttcaatgatcttgatggcatcagcaagaggttttaacatgatgttacctccacaagcaacatccaaacttgtcctgttgtgtgaggacactccaccatagaaaatatgaacttgcctctgtggggagaagccatgatgtgaacaacttttgatcatctcttgtaacttttttaggctttatgtagactctcttgttccctctacacaaagtttccaatatccgtgatgtactcatccgtcttcatgggagagaaataccttcttaagaaggcatttatgcactggttccatgtagtggtgtttttcgcaggtattgagcacaaccaatcccat

SEQ ID NO: 6708 - DNA, 460 bp, Glycine max
  unsure at all n locations
tcttatccaaggcaattcttggtggtgaagctcattctttcttgtcttattccctagtggatggtgcctcccatctcctcttctcctttgccttccgctgcatctccatggtgaaaaaatcaccattgaaggacctcattgaagctcaaagatccagcctccatagaagccccacaagcaagcttccatcaagttctcacttaaanatgaaaagatatatataattttctcaaataatattttactaaattctctctttataagaaattgagttttggctattgtaacatattatgaaatcgatgtaattgattacaggttgatgcaacaaattacaaaattaatgtaatcgattacagatcaatataacaaattacgaaatcgattaaaacttagcttagatcaataaaatagtccctaggaaggaattaatcatttacaaacctatgtaatcaattac

SEQ ID NO: 6709 - DNA, 466 bp, Glycine max
  unsure at all n locations
agcttataaagggatgctccttcaaagtagaatacttgaattanaaaaaaaacaaaattaatgtaattaaaaaagtaaaaatttgacaaataatcaatacttttttatatctaatatatacgagaatcaataagaatatgttttatagcattatttcataactttaattactcatcaatatatctttatagaatatttctctattaatatttcctaataatttaaaaagataaaaattactaacaagggttgagtctaacaaagaggtaaatctttcatgataggaatgacaacgtgggtcaatcatgtcgacaagttgacctgccaacaaaagtgtgtagagaaatacagccctttgataactgggcgggttgaccaacaaataaataaaatgacatgctatgaaatgatgagtttgttggttgataaagtaaacttccaaaaaatagagtgggtaggcataaca

SEQ ID NO: 6710 - DNA, 371 bp, Glycine max
  unsure at all n locations
tagtgtggctgactggcttaaggaanatgttctctagtctgatgactntagtgtcgactagattcaccttttggttatatggttctaatttttggaaaatttctttactttttgttatcaaactcaaaccaattattgactcaatcagggtactaaattactatgtcaagggtagattaagtgaattaatggttgactgacattgagtttaaaatattaaaaatntctaattaaaaattaaaatatcatcaaatctcagaagagttaacaaaacaacaaataaatatataaacgtctcaattatcattttctaaaatatcacaatngacccatcaccatcatgattgtcgttgtcaacatcataaccaccg

SEQ ID NO: 6711 - DNA, 409 bp, Glycine max
  unsure at all n locations
agctagctaacccatggaagctcctaatatctctcactctttntgnggtgggccatccttggatggccttgattttctcagggtccacttggaccccatttctaccaactacaaaacctaagaagactatattatctacacaaaaggtacacttctctatattttcatagagggtgttttcctaaggactggaagaacttgcctgagatgtcctaagtgatcatctaggctcctattgtccactaaaatatcatcaaaataaacaactacaaatctacctatgaaatcccttaagacatgatgcataagcctcataaaggtgcttggtgcattagtgagcccaaaaggcatcactagccattcatacaaaccaaacttggtcttgaaagcggttttccactcatcaccc

SEQ ID NO: 6712 - DNA, 492 bp, Glycine max
  unsure at all n locations
acactatagaaactaagcttaagctcaggaaaagcttgaagatgttttgattnttacatgcctaactttcttgagtggcatttgtattggttgttatctggtatgtttcatcttagtacatatgatattagtattgcatcattcatcatcatggttagtgtgaagaaaagtttcttcaagaggcaaaaactctctgttttaatcgattataggtctatcataatcgattacagcaagatgtttgaagcttaaagagttgagtctcgtatcattntaatcaattacagttgtttcaaaatcgattacgttgttgtttgagacaatgactaatttatttaggagtctctgctntaatcgattaccaagtggtttaatcgattacttctctctcgcttagttgttcaaaagtgaacaagaacacttgaattgattactttgagtatctaatcaattacattgttctttgagttattttagatgttagtaagaaca

SEQ ID NO: 6713 - DNA, 446 bp, Glycine max
  unsure at all n locations
agctntacgcggacaagcatcgtagggaagtctttttgtttttgggactgggctctggctcgacttcgttcttacaggcagccctctgccaaaggggatcactcaaccaatgtgaagttagctcgttgttattatggcccatttcaggtcacagttaagctcgggcccgtagcttatcgcgtggatttttcggcaggcgtttgcatccacctggtgtttcattgctcgaacctcaaaccttttcggggcgagacagactccaattcctcaattcctttgccacccaattttcacgagaatcaaccactcatatcccctcttgccattctggngtctcgtcgtgcaacctctgatcctcatagttcttggcaggttttggtgcagtggcagggtctcccaccggaggagacgtcgtgggaagattgtgaccagtctttgcaggacta

SEQ ID NO: 6714 - DNA, 466 bp, Glycine max
  unsure at all n locations
ngaatatcttcatttgagtaatgcaagcctatccaagcatttattgtctttgttaggtgcaagctgtattactgacttcgagggtcagttcctccagaaattcaagggagaaagggaagaattaacaaggtgaggaaaaggggatttcttattattctccctcagcttgttatttacatagtattatatagacattcccataacagaatttggacaattgctctcctacgaatattctagtaacagaatctctattgctattttgcccactaggaaataacgtgctgcaagcatgatttggtggagattctctaatttcccctttatccggtatcgccctcttcagctcagacataatctgcaaggtaggtgggttcacaattcttcttttgttcttggctcttctcccttatgacccctgatgctggtgtttctcttggtatggtctcttctcccttttgcaccc

SEQ ID NO: 6715 - DNA, 471 bp, Glycine max
  unsure at all n locations
agctntagaaaccctaattngaggaagaagaagtctgttaagaagaaaatatttgacaactttntatattttgcatcaaagtccagtctacgtgtcacaatctgggacaatttgccacgttggatagtctatgtgtcattaaaatttccaacaatgcacctcacttacggcgttacttttaaatttaacggcaaggactattttgcaaaacttatgcaaagatagagactattttttacatttcaaaaagatagggactaatttgcaaaagggatcaaaagtcagggaccaaaatgcctatttactggagaaaaaaaaattttgtcaatgtttgtggagtctaaaagtcccaagggatactcttcaagtatagagccatgtatccgtcaatgatctcaaattggtcggcttanagtctcatgggtgtcatatgttaatgcaacaactattgggtggtagcgattgcagtat

SEQ ID NO: 6716 - DNA, 444 bp, Glycine max
  unsure at all n locations
gctgagatgtttagaagtttggctttacttgttntagaaagaaaatattgggtattggtggtctacaatggaagacaaaattttggtttatatcattacatatattctggcaccaagatctagcaatcatgctcaagtcaccgatgacgacttgcatatcatatatgggccaaaattaggtattcaaatgatttgggtactattgattgttgaaaagtcgtcgactagtggattataaattttcatatgcaattntgacctcaagattcattgattatttcaatatcgatgtttctaatgggattgtagactttaccaaagcctctaatgagaaaactgaaaggcatctcaagaagcttggcatgtcatatgttgatcatgagtgggtcatggaaggacaacaacccgcaacaacaaacgttgatttgatggaagaagaatctg

SEQ ID NO: 6717 - DNA, 424 bp, Glycine max
  unsure at all n locations
ggatcttaagcactgagctgcagcttgagcaattaaacgatgataacttttttctcggatgtcggattgagtcccgtaatatatcgagacgctcgacattgataataaaaactctgtgaaaattcaaacaacgataactttttactcagatgtccgattgcgttccgcaatatatcgagatgctcgaaattgaaaatggaagctcgtagcacatgcaaaccacaataactttttactcggatggccaattgtgtcccgtaatatatcgcgatgctcaaaattgaatacaaaagctgtgagcacatacagacgatagtaactntntactcgaatgtccgattgcgtcccgaagtatatcgagacgctcaaaattcagagtagatgttgtgaccacaatctaacgacaataactctttactcggat

SEQ ID NO: 6718 - DNA, 441 bp, Glycine max
  unsure at all n locations
tatggtcgtnntgaattgcttagaccttatgttttcaatttctagcgccactatatagtacgggacacaatcggacatccgagtaaaaaggtatagttttttgaatttactgagagcttcagttttcaatttcgagtgtctcgatatattacaggactcaatcagacatccgagttaaaagttatggtcgtttgaatatgctacgagcttctgttttcaattgcgagcgtctagatatactaagggacacaatcgcacatccgagaaaaaagttaatgtcgtttgaatttgcacagagcttctgttttcaattttgagcgtctcgatatactacgggactcaatcggacatccgagttaaaagttattatggtttgaattngctaggagctactattttcaanttggagcatttcgattataacgggactcaatcggacat

SEQ ID NO: 6719 - DNA, 302 bp, Glycine max
atattcttcccttgcgtaggcataatgttcaattactgacaaggcttatggagcatccataactagatcaactatattcgaaacgacatttcagttggtaagactgcccaaatctctactctttactcagtcatcaatcaacacgaatggaatatttggctatcaatagctcggcaacattaaaaaggatctctactacggacatcggctgacgcaaataatccagagaagccctcttgataagctcggctaacagttctattcttgcttactcaaatgccatccaactcaagtgagcagag

SEQ ID NO: 6720 - DNA, 437 bp, Glycine max
  unsure at all n locations
ntatgcatcccttctcaattggatatccacaaccctataagaattgagcctatgaggcaaaacatttaagtatgtttgtaaggtctggctttacgcatctcttcttggtcaagcaatccacattcctctaagcactaagcttataaggcgaaagtgcttaagtatctagataaccatgttcacaataattccatcttttcataattggtgttatatttgttatatcttttatcttcttttgtttcagtttcatagcttatttgctattacatatattttgttgttgggattctagttaggccttgtggctaactaaatagggataaatcttttntttaacttcacatttatctcttgtttggaatgcactagtgtgatgttacctaattagaatatctttctaggagagcgtgaggatgacnatcaatggattctag

SEQ ID NO: 6721 - DNA, 297 bp, Glycine max
agctaagaagagtatggggtacccatctctatgtttatctatggtggcggccaggcgagggtgcacaacaagttctccacatccactatgcgcgcataaacacaccataccctgttgtccacctacaactgagctcacgtactcgcacgactcccatatactccatatatggagaccgggtaccgactgatccacttaagctgacacgacatacaagctcatctacgttcctactggacactctatcacagtcaagctaaaccacatcaaatgcagatatgactgctctatacacac

SEQ ID NO: 6722 - DNA, 427 bp, Glycine max
  unsure at all n locations
gcttctaaggaagtgttctcaagaaagcttctcaaggaagctacctattatataaataaaagcatgtgttacacttgttataactctgatgaatgagagtcttgtgagacacaactcanagttcaacttctgtcccttgttcttccttcaatttcatgctcccccctctctctttctctccctctttcttttcctccattgaagcatcctctccaagcttcttatccaaggctcatcttggtggtgaagctccttcttccatggcttattccctagtggatggcgcctcctctcacctcttctcctttgtcttccgctgcatctccatggtggaaaatcaccattaaaggacctcattgaagctcanagatccagcctccatagaagccccataagcaagcttccatcatgtggtaatcagagcaca

SEQ ID NO: 6723 - DNA, 352 bp, Glycine max
cttgagcttcgctcattacctgtcataagctatttttacaaagctcggctcggcttatataaaagtgtggctcggcccacgagcctatttaaaagtctgcctaacatcgcccttgattaaccaattatcttaaaacctagcgaacaacgaactataagaagaaccttagtcaaattcgtgtcagtactgtacaaatccaaaaataatggactaacataatcatagtgaattcaagcggcacaacacagcgtacatcatgagaaaataaaaagaacgtcattttatgagacgtatgaattagacatggtttgcacaacatgaattttatcttacgtgcacagtgtgtatgaac

SEQ ID NO: 6724 - DNA, 423 bp, Glycine max
  unsure at all n locations
gcttctacatcctatgacagtgttgcctcacttttgcttttttgactctagcaatagagacactatatagtggtacctgcactccaagaactttggatacaatcgccttactgattcaaactcggcaatcctntaaagcagctagatgagttttgggtcaatggtctatgggttgaataatgtgataaaaataacgcttcaatagtgtgatacatatacataagattattaacatataatgtataaaataaaaacacagcttatataagcctacatattctaatgtatgtgaaaaaaggatttaatcttatatattatatcttagaagataatctctaagagtataaaactatcgtaaagttaaaaggaataaaagttatattttgaaatatgttcgcataagacttatattaatattatatt

SEQ ID NO: 6725 - DNA, 402 bp, Glycine max
agctatgccacatgctgaacccatatcatgcatatattttacactcaataagaatctcagtacaaaatggcagaagcagacttttctcatgctatatgattgtacctgaggttaacctagacatagtttgattattgatttctgcattctttgattcttcatagctgagatgttatgccaaagaattagcagaatcatcaatgatcaattcacatagtcatagttaatgggtgaactgtactttattcgatcagtgaacaaagcttcttctttcagagtaagctctgcagtcagagaaaattctgcaagaataacatgtaatgggtttaataatgtggaactttaggtttaaaaatgaccaaacacatgtaatgggcaatgaagttggcattacaaatttac

SEQ ID NO: 6726 - DNA, 452 bp, Glycine max
  unsure at all n locations
tataagaaccaaaatgcctcaatcatttccaaatatgcatgttattttgaagcatcaacaagaatcaagccaaggctattgtgcaagcaatcaatggggcaaaacacaccaaatgattatgatgatggatggctcaaattctcacaaaggtaaactcatcactttcaaattgagctttcaaaactatcatgacatgtagaggagaatcaaagatttcaagtcacaaaatgtcaaaaacttttattttcaaaacaattacccatttcttgaacatatcctataattcaaagaaaaacatgcaaagtagtacatgcgcacggaattggcccaaaatattaaactaaaaatccgacgaaactaacaacattaacaaattaacacaactgacaaattaacaaaaccaacaaaactagcanaaccaaagaacactcccccccatacttaaacaacac

SEQ ID NO: 6727 - DNA, 447 bp, Glycine max
agtcacctgctgcatgcatagcttctaaaaagatctgatgacacttttccttacatggagtgtcttctcttactccaacttagctaccacacctcagatttgaatatgggcagagctaggttggtctatggcttggtaaccaacatggacacgaacattggagcccttatctcagatcagatttcttctattgctcagagtaactcctctaggcttggatttctagccttaatcactgccatatgtagagctagaggagttacctctaatagtctgatctatgagagcttgagctcgaccattaatttggcctacattaagaaaaattgttggaatgtggatgatctaatagttaactttaaaggggcaaggaaggcaagggttctaccaactgatgttccttcttcttttactttaccaactccttgcacttctactacgcctaca

SEQ ID NO: 6728 - DNA, 403 bp, Glycine max
cttgaatgctctattcaatggagttgacaagaatatcttcagactaatcaacacatgcacagtggccaaagatgcatgggagatcctgaaaaccactcatgaaggaacctccaaagtgaagatgtccaggttgcaactattggctacaaaattcgaaaatctgaagatgaaggaggaagagtgtattcatgacttccacatgaacattcttgaaattgccaatgcttgcactgccttgggagagaggataacagatgaaaagctggtgagaaagatcctcagatccttgcctaagagatttgacatgaaagtcactgcaatagaggaggcccaagacatttgcaacatgagagtggatgaactcattggttcccttcaaacctttgagctaggactctcggat

SEQ ID NO: 6729 - DNA, 545 bp, Glycine max
  unsure at all n locations
cgcgcattgttgctgcgatccnatcgacatccccgagatnctatatagncgacctcgaggcatgcgagcttgcctgtcgacgattatagttattttcttttagcacccaatgctggtgcaataatagttaacgatacgacacgatggatatgcactaatgctactcaaaggacttgcgtttgtatgacggattgattaaatctatgctgcttacacgcactccctcaacactcttaaaacaatagggaagcgacttgctaagccagaagcgcgaacttgattataatcttctaagaaaataagtaaatttgcgtctcgggcgactgtgactacgagctggtccatgtgaggtgaccaaggcatttctcagatcaccatccactgcacaaggtaatgatgacccaccactcatgagctatgtgcctgagcaacaccggtaatgtatttccataaatggttgtagggtacatcgctctaacattacgcaaccgcaccatcgcattctgtcgcagaggtacagacagagatgatcatcgtataggtcg

SEQ ID NO: 6730 - DNA, 503 bp, Glycine max
  unsure at all n locations
cttgtgctctaggacgctntgtgatatggtaccctctcatactgcatggatattgttgtactagggcgctatagtgctctcttggagtagtgactgaatggactcgtgacgtagaactcgacgctgtttattatgtggctcaccaaacacgattagtatgcttattaggatgcgatgagatcttagatggcatgtggtgatattaacaacggtcagattgacacagagtccactattcgtatttgactattctttactgggaatgcaagacctattgagacggacgggttgtgaaccctgcattctatcatgcacgttgcttagatcacgtgtggaggtccacgctaacggcacatggacattatgttatggatgtattctattatgcattaggacttgcgctgatcaaacatgcactccatgcttgagtcttatactagaggcgtggagcgtcagatacgtgcgtaaatatcatagacacagtcatgcgagggacttcatcn

SEQ ID NO: 6731 - DNA, 391 bp, Glycine max
agctttgttacgtatagtatatcaaattaatatttgttggcaaattaaaattatgatccaccggatgaaaaagcatctaactttatttacatatagtatatcaaatcaataattttttacaaatttgaaattcgatccagtgacgtactgaagtccaagtttcttttaaatatagtatatagatagataaatacgatatgcaacatatcatgtcaatatgtttggaaaaaaatttgttgaaccctaaaataagtaaactatttatatatcaataacattcataaaagtaatttcaagtttttaagggaagtagtataagacttcactacatttacatttgtataattgacttgagctaccggtagtaaaaaaacgtgagtgagttaatgac

SEQ ID NO: 6732 - DNA, 455 bp, Glycine max
  unsure at all n locations
ctaagctcggagatttatcattggttctactcgatgacaccagaatatatagttggaatcatcaagcttntctgaaatcgaaggaaaagattgatgtgaatgatgagaggaagtggacacagcaaaattgttttctgccattgatgaatccttctaagagattggacattagatcctccaagttctgagtctgtacgaaatgctgttggagttcttcaagagattggggcattgtcagttgatgaacaactcactcagctagggcagaagcttggctgtcttcctattcatccatcaacaggcagaatgcttattttttccatatagatgatatgtcttgatccagctctaactcttgcttgtgcattcgagtttaatgatccatntgtgcatcccactttacctgatgaatagaagagagcttcagctgctagatctgagcttggctctttgta

SEQ ID NO: 6733 - DNA, 465 bp, Glycine max
  unsure at all n locations
agcttaccgcctctgccgaccaatgaatagatttatgttcattgcgctcaagtatgcttctgtaataataattaaggatacaacaagaaaaagatgcaataattctagtcaaaggacataagtttttatttttccttgattaaatctatgtgaattacaatcaaatcacaacactcttagaaaaataattaattgattttaaaaacttgaagtaggaacttaattaaaatctcctaaaaaaataattaaaatagcatttcgttcacctgtgactacaactcgatccatttaacatttcaaagtaaattcccaaatcaaaatccacagtacagtataattatgacccagaacaatttgttaaatcactgagcaaaccaatattatttggcataaaaattgaagttagatgctntagttatgcaacagaacaagcatctattgaaaggccaaacaaatatgatcatg

SEQ ID NO: 6734 - DNA, 481 bp, Glycine max
  unsure at all n locations
ntaatatatcaaccaccaatattagatacaattaactaattatgtgtttacttcatctngtttgaattccaataagatacatatgtacagcttatgcactttgatttttgttatcgacatttatagtttgaaacaaaaatgcaaattggaataataaatcatggtagctagacaaatacaattttggttaatttttttaagagataaaactagtttatattcatatgggccgtcttgattaatttgaatttgaatttcaagcgagatttgtgtatttgttaattntggtcaaaaaaattattggttgacgaaattaattgatttaaaatttaaacaaaagttaaatatgttatgaacgaaaataaatatataagcacaattagaaacgctaaattaatctactgtcttagttaaaatcatgctggtgaacacaatctagaggttagtgacatataacgagtggagatcctcttgagtgcag

SEQ ID NO: 6735 - DNA, 392 bp, Glycine max
  unsure at all n locations
agctagttaaagaacttagaaaaaatcaagaacttgcttgttcgcacatcgttcgcgtgtatgacatccactccacaaggtttgaagtagaggagaccttcaatcctattacgcaacgtggcggacaaaagtgggcagttaacttgaacggtcattattgtcaatgcggaaggtattctgcgcttcactatccatgttcacatattattgcagcttgtgcgtacgtgagcctgaactactaccaatatatagatgttgtttatacaaatgagcacatcttaaaagcttactccgcacaatggtggcctcttgggaatgaagcggctattcctccttntaatgacgcatggacacttatccctgacccaactacaattcgtgcgaaaggtcgt

SEQ ID NO: 6736 - DNA, 467 bp, Glycine max
ctaagcttctaaagaggttagcttagttattagagaggtgtgtgtagttaagctctatcttctcaaggaagcttctcaaagaagcttctcaaggaagtttctcaagaaagcttctcaaggaagctacctaggctataaatagaagcatgtgtaacactttttgtacctttgatgaatgaaagtcttatgagacacacttcaaagttccacttttctccctcttttattccttcaatttcatgctccccccttctctctttcttttcctccattaaagcatcctcttcaagcttcttatccaaggcacattcttggtggtgaagttcgttcttccatggcttattccctagtggatggtgtctcccctctcctcttctcctttgcctttcgctgcatctccatggtggaaaatcaccattgaaggacttcattgaagctcaaagatccagcctctatagaagctccac

SEQ ID NO: 6737 - DNA, 454 bp, Glycine max
  unsure at all n locations
agctttgatcaataaacttttcttggaagagtatgtgttgatcaaaaacttttttaaaagatgaagagaaatgaatcagaaaaattctttagaaagatattgaaagattgattgaaagatgttgagagatgatgatgaaaaacgattgaaagatagattatagatgattgatgattataaagatgttgaaggatgattcanagaatcattgccatggtcacatatttataatcttttgatgactcaagtcaaagtttgtgactcttggaaatttctttaaaactagtcacttaaaaaagttgtgacttttgaaaaaatcttcagaaacaagtcacttgaagaattgtgacttttggaaatatatttttcgaaattagtcattggtaatcgattacacatcaacagatgtgactcttcattttgaatnttgaaaattaaaacatttagaagctct

SEQ ID NO: 6738 - DNA, 465 bp, Glycine max
  unsure at all n locations
ngaaggacatacacaaagtgtgactatatgatgtgacaatcggttgtagctagcatatactcacctccccctctaaaatntaattggattgggcttcccccaattcaattaaatttatttcccaatacatacatcaaatattcacttaatgcatgtgaaattacaaagcaacccataatacaaaaattagtctaggtatcctaaaatataaaggctgaaaaatcctatatttctagggtaccctacctacattatgaaaccctaaatacaaggcccanaaaaaaatgaaaccttaatataatatgtacaaagataagtgggctcatacttagtccatgggcccaaaatctaccctaaggccgatgagaaccctagagccttctcttgcatctctggtctaatcttcttggagtcatctatccaatggccttggagggtaggaatgcatcattcccttccccttga

SEQ ID NO: 6739 - DNA, 468 bp, Glycine max
  unsure at all n locations
agcttttcanatgggtaaaaggctcacattcactttcttctacatcatattcaaacttgtccaaataaataataaagtcatctcgactcaaagaaagtcatataagtctcatacaattaatatagaacctatatgctaatgtcacatcctatcagagcgtggtgttcccgtgtcctctagcatgaggttcttcatagtcatccacctattcatctgctcccccgaacacaagttcaagatcatcacaggatccaaacacaacaacacacagggagtgagttatcacattcctagctaatagagaaacaagacaattaaatatatatattatataaatgagataccacttgcttaaacatagctcacgtaacttcaccacttcgtcattcaaaattcacttttcaattatcaatcacattacacaagaatcccacacttcgatcaagatataataacacatcaattagc

SEQ ID NO: 6740 - DNA, 413 bp, Glycine max
  unsure at all n locations
tcagctctcagcccanactctnttctctaaatctgatttcatgcttaaatatgtgactntgttcgtgctcgtgcgcttagcgcacattagtgaattttggtttagcgcatgctcttctcgctcaacgaatgaactgaagcggtgcgcttaacgagatgaagcggtgcactcagtgaacctgtacaactcatcttcttcccgattcttcctcgcgcttagccaatgagtgttgcgcttagcaaatgcttgctaatccagcatattggcttagtgagaacgtgaaaaacaacacttcaaaacttgcctaattaacctgaaattgagagaaaatggttattaaatgcacaaaatagaattactaagtatttattatctatctntaactaanagaacttatnacactacaaaataac

SEQ ID NO: 6741 - DNA, 382 bp, Glycine max
cgcctgaatcggacttttctttgtaaagttatgaccatttgaatttctccagagctttcgttgttcaatttcgagcgtcccaatatattatgcgcctgaatcggacttccgtctgacaagttattaccatttgaatttctcgagagcatatggtgttcaatttcgagcgtctcgatatattatacacctgaatcgggcatccgtgtgacaagttatgaccatttgaatttcttcagagccttcgttgttcaatttcgagcgtcccaatatattatgcgcctgaatcggacttccgtgtgacaaagtattaccatttgaatatctcgagagcactcgctgttcaatttagagcgtttcgatatattatgcgcctgaatcggac

SEQ ID NO: 6742 - DNA, 424 bp, Glycine max
tctcgatatatgatgcgcctgaatcggacgtccatttgataagttatgactctttgaatttcctgagagcttgcgttgttcaatttcgagcgtctcggtatattatgcgtcagaatcggacttccgtgtgacaagttatgaccattttaatttctcaagagcattcgttgttcaatttcgagcgtctccatatattatgcgcctgaatcggacttccgtgtgataagttatgaccatttgaatttctcgagagcttgccgtgttcaattccaagcgtctcgatatattatgcacctgaatcagactttcgtatgacaagttatgaccgattgaatttctcgagaggcttcgctgttcaatttcaagcgtctcgatatattacgcgcctgaattgacttccgtgtgaaagttatgacaatttaat

SEQ ID NO: 6743 - DNA, 217 bp, Glycine max
gaccatcaatagggtcagggaatctatctgcgaggagacttgccatgacgaggctgatgatcacatggagaacttattttggtaaaacaccatgacagcataaatgacatattcacgcgccgcgcaacgctatttgaaaatcaatcctgcgttttttataccttcaagatagaacttcgtgaatttcttcagggacaatcttaccctcaactagaaa

SEQ ID NO: 6744 - DNA, 428 bp, Glycine max
actatgaatactaagcttcatggtctctggtataggctctgggactttccattgcaacttatgtggagggcaaagaaggccttcttctgggggccagagccataagtgagacaccactctagaagagttagacttctaaccttgtgtcaggacctatgggccaaggaatagtctcaggtactcaatttttacggaacgtctgttttgatttagctgtttgtagcacgtctcaatgcgctggttgaacgacatgcaatttttacccttacattgaaagggtttcgcattgaggggttttccacttcaaattgtgtctctgttttctttcatttctattatgtgctctatactttattggtactcctgacaggtactcgcaagggtgggaaaatatatgtacgttatctcgtcttactctgttatagatt

SEQ ID NO: 6745 - DNA, 144 bp, Glycine max
tctcgcctcaacacctgccaacagcagatgaccgatactcttggtgcgtctagcatggaagaatgagataggtctgtatgaattcctagggatgggaatatcacggtgtgtatgcactgacacgaaccatagggtttcaatgcg

SEQ ID NO: 6746 - DNA, 464 bp, Glycine max
  unsure at all n locations
agctatatgcaacttaagatgctacctgttattttgaccgtgtcattcaacttgatcggaggagctcgaggtcaggctaaatgacataataatatatttgtattattagtttaatatgattataattatttgtttcaattatgtgtatttatttttaatattgcaagatcttattgatttgtgtattaaatataatttataatatatacgttagataagtaacggtttgtctaaataatattgacaaacaagaacttattaagcatgaaatttgaaataactttattttacttgaagaaatctttaagtaaaatgttcaaacaactatgattgtatttttaatgttttaaatttaattctaaattctaagtcattaaattttacaatataagattaacatactcaaaattaatatacaagtataaattattaagcnacacccatccaagacacaggttatcgct

SEQ ID NO: 6747 - DNA, 475 bp, Glycine max
  unsure at all n locations
tatacgactnttcaatcagggctgtcctaagcataatgcggttcaagcccttgctnttagcacccnccaataaaagttatttagtattagtattgataaattatattaatatcttgtccagtgtagtggaaactaggagtgctttttatctcggtgaatggggtttgaaccctgttagaggaaaaaagcattttattttttgtatgattcctaatcttttctgtattctctctcacttaanaaaataattactcattaatttcaattaaataggctgtctcttaatatatcaactgtcaccaaatttggcccataaaacattgctagattggctatatccaaactcactctctttgtgcatcttcaatacatcgttgacacacatctaacatatttgttatcaaattactcatcacgcatctcaatatctcatcatcttccttgttagacaatngacaccagtattttttaaatt

SEQ ID NO: 6748 - DNA, 333 bp, Glycine max
ttaagtcacctgaggcatgcaagcttctagagaaaactacatgaagctgcctcgttatttatgctgcccagccttggttgaccgttgtgatcttcccgaaatttggattgtaacttcaaaagacaattgtacatgatctgaccgatgggatccttttgaaaatatatggagtgtgctagagagatccgttccctatagcatctattatttaaacattctctccttagctttcgtgtaacttaggaaggacatcatttgttcttctttctttctataaaagccatagataaagttccaagaactttctccttctctgacatcctccattatcca

SEQ ID NO: 6749 - DNA, 288 bp, Glycine max
agatctaggagagacgtcgcggaggaagggtcttgtgctgcccccgagtttgataaccaccattttcatatcgctgagcaccagcagcgcttcgaggccatcaaaggatagtcattccacagagagaagcgcgtccagctcatggaagatgagtatacagatttttacgaggatataactcgtatacattggacgtcactggttactcccatggctaagtatgaccctgaggtagtcctggagtattatgctaatgcttggcccacagaggagggagtgcgagacatg

SEQ ID NO: 6750 - DNA, 269 bp, Glycine max
aagctttaagttagtgaccaaacttccgtggcttcgtccaagctatctagaaaaaagtgtattaatagcttctcatctttagagtgtgcgcccatcttgcgatagtacatcttgagatggttcttgggacaagtcgtacctttatacttgttgaagaccggtactttgaacttcggggggataacaacatcgggtactaagcaaagatccgtcatgtgtgcgaacggatagtacccacatgcttccacggctctcaatctctcctcgag

SEQ ID NO: 6751 - DNA, 458 bp, Glycine max
  unsure at all n locations
tgtgcttagagagagcttagtctcttctttggttnttgactattaaccaaattgattcttatcaaggaagctattcctttgtgaagaatccttctttggcctatcaatttttcatggattgtggcgtcgttttgttcatcttcttcatcttatccatcttttattgtttttctgttcttgtgttctttgaaggtcaacaatggtgttcttgaatttgcatccgaaatgatttgaaccaagcgttctggcttggattgcatcacatggtatcagagcttgaatccggagagtagttcgaattatatccatcaattaggtgtagttnttagcattttggttnttcaatttttccaaaaaataagaagctaattttcgttcgattcttgtttgtttgtgtttaattgtatgattcttgtatgtttntgagttaatcttgcacgtgccttcgatttcctatc

SEQ ID NO: 6752 - DNA, 464 bp, Glycine max
  unsure at all n locations
agctnggaaagttaatatgtatgcaactgaattatattgtaatataaaatcaacgagatggattntaacccgaaagtaaaaacgattaggaggatcttaatgtttggagtttaagatagtgatgtgtaacaaattaagtccatgccgtgcttttttgtttcaaggacagaagaaaaaaaaattaagctaatttattaaagaatatgcaattagtcataactcanaagctaatatatcggtgaaaagaaaatataattaaagttccatattaattgatataattgaaaatatgtgcacacacatatatagcgtgtgtacatgtgtcatgcaattntagtagggggaatcaattagtagaagattagtcaagtttcctcaaccaatcataggtgaaaactgtacaaaactgaaattgattgtcaagaagttaactgccccttatattacaggtactaatatatcaa

SEQ ID NO: 6753 - DNA, 477 bp, Glycine max
  unsure at all n locations
tatgctntaggcccaccagcaaanannaaaaatgctattagtatttataaagtgaaaaagtctcatatgttgataaaaatgacacatgctagtaaaaagacccaactatttaaagtaaaaaatttcttttaaaatttactttaggcctcgtttatcattggaccaaccatgatacatgtaacattgtcttcacatatggttgttgatgtcattttctttcatgttgggctaaaatttatgcatcattagcttatatgcctattttggcttgtttcacatattgtcatggaattgttgtatcacctcatgtaaacttaagatatatcattatgaggatttgacaaacaacctctaaaataacaaagtacatgcttaaatgtcttcgtattgatgagataattatatttgctagtgaataagtgggaaatgatatatgaggctgtgtatgcatagtaagataccttggtatttcaataa

SEQ ID NO: 6754 - DNA, 362 bp, Glycine max
  unsure at all n locations
agctagagactntacatgaacacacacactccctgatggagagagagagaaaggaacctgctgaggaactccaagaggggaggcagtgatgtaagagacctcaaattcgtaggaaacgaatggatccgctgcagaagagagtgtgaggagcaaggagacgttgattagaaagaagaagaagaagaagactgctctagaagaagaagaagaagacattgtgtggaacttttcaggttttcctcaaaaaaagaaaggtttagagccaagtttttagtagctttttctttttctgtgattctacattatcaagggaattagaaagaaagaacttggtaagggtttctgtgtggtagagagaagag

SEQ ID NO: 6755 - DNA, 472 bp, Glycine max
  unsure at all n locations
tcttgtcccgattattcatttattggtttattgttntatcatattgcataaactgtaaagtgtggataaaatgaattttcatttattcttttttcatttatcataagaaatgttggagtatgagggtaagctgatattgatatcacactttgacaaaaactcttaagactntggatcagggtcgtggaaaccataaaagccaatgagaccttngtcttaagccctcaagagttttgttttttacatttttaatatttttttgtcaanttaaattattaagtgataagatttgttaagatatgaattattatttgtaatcattttttcattaataagactacataatcttaagttatgaattaatggttaaatcatttatctaaaattttaactttatttcanaatattaaagaaaaatatctcatatctatcttattcttaacctctcccttatctgaaaaaaatctattaa

SEQ ID NO: 6756 - DNA, 435 bp, Glycine max
  unsure at all n locations
agcttgcgattcagtccaaggtcaacttcagcttctctgattttcccgctcgngaggaaatactaattcattcataattcttcattaatgatttattcatcgtcctttcgaattgaggttcgaatttggttcgtgtgcacaacataagaaatcgcgtgtttccccaattcttgcattagctgtcaaatctaaacgtgttgatgatttaattgggcgcgctgatggcttgaagtaccttgctgaactttgcttgattaccatgtgaagatggacttgatatgtatattgcgactcaatgagcacccaccataggacttgagatcgtgcgcttctgtgactttgtagaagtatatctcattgaatgcattaggctaggttattgtgccatgcgtgtgagatgacgaccacacatgtgatgatatcgcaaagaaatgc

SEQ ID NO: 6757 - DNA, 517 bp, Glycine max
  unsure at all n locations
gcccgcggtttgattgtgactctctgacatctgaaactaagcttataaactggcactcattgcccaggcggagccccttgctatttttcattctaccatgggtgaatagcctccagatgcactacatggacacgtgtcgtactcatggtgccgaatagagtgcaaccgaccacgttgaggatataagctcaagcttgtatactacaccatcaggcctgccatcatctatgatagatatattgcacccatcatcagcgtacagttgccctacactcatgtgcattcttagctctagcctctntacccaagatctcgagcaactttatcaacaatactatccgctacttcacagcttgaggctcgatactatgcaaagttcccgtgatcggcagatggacgagtgactccacatcatatcatgtgatcgtggcttgcacatctgaacgtggaagctgtaggtttaactgtgcacacttacacatcttcagatataatgcccagatcgtccgttacgacn

SEQ ID NO: 6758 - DNA, 456 bp, Glycine max
  unsure at all n locations
agctagacacagaagaaaatgaaacacttcatcttgtttgggatctaaaaataccgccaaaggtggcaacttttcatgtggagattgatcctaaataggttgccatcgcgagataaacttcttcagcacaacatcatcactaatgtaactgatgtttgttggagcaaaataggagaaacaagaaacacaaaaatcaatctaaacacatgaactcgtgagagagaaagattggagggaaattctttttattctattgtatgtattctgttacacataatgatatgtctatatatagactaactcaactaactaaccaccataattactaacaaactagtaactggtttttgaattatccttaacaccctcctttgattcanaaacagtgaatcaacaacaagaacattacaacaacatttactgaacaaaacttcttaatccttcaaactctgaact

SEQ ID NO: 6759 - DNA, 487 bp, Glycine max
  unsure at all n locations
ngcttatctcttcaggatgctcaacacagtactgcatgtgctccttcaacttagacctacaacaagcaaatagacaagagcatataaatcttctcacaaatcacaacaaattcagcattagcaagttcacatgtcacaaattcaatacccgaattccttgttcaggctgttcgcagccacggttgctgcctttccgccgccgtatttggccacaaagtcatccttcacacgctccagaaaagccacaggcacctgtctcccaatcgattcatccgcaacaacacaataagctacaaaaaacaagtgtgtgagtcagacattcatttccaaaaacacagcaccgaacttcagataagcctataaacaaataataacaacacgaatttcatttcagttcattttcaaacacatcaccgaacttcanaatagcctctaaacagatcagaacaacacgaaattcatttcattttcaacacaacaccgaact

SEQ ID NO: 6760 - DNA, 468 bp, Glycine max
  unsure at all n locations
agctnggagaggatgcttcaacggagganaagattgatggttataaagagagagggggagcacgaaattgaaggaagataaagggagagaagttgaactttgagttgtgtctcacaagactctcattcatcaaagtttcaacaagtgttacacatgcttctatttatagactaggtagcttccttgagaagctttcttgagaaaacttccttgagaagcttctttgagaaaacttccttgagaagctagagcttagctacatacacccctctcataactaagctcacctccttgagaagcttccttaagaagattcctaaagaagctagagcttagctacacatacctctctaatagctaagctcacctccttgagatgagaagctagaacttagctacacacccgctataatagctaagctcaccctcatgacaaaaaacatgaaaatacaaaataaaattccttac

SEQ ID NO: 6761 - DNA, 451 bp, Glycine max
  unsure at all n locations
ntgagaagtgaanatgagaatggngtaaatctggagcaaactctcacctcacacaagtctataaccttaatctaaacttgctcaaactgccaccgaatcaaaatttgactcctcaacacccaatttaccctagaaatggctcttgtcttcactttggtcactcattttcctcctttgcacaacccaagctttctcacagtcctaaatgacatttcaaactangaataccttactctaaacctcattaccactaaatcagattggctttcaaatcctaaagcatacactttccactcatatcactacattctacttttaaccctaggtaactctaccctcatctttatagtttccatagccatttagcacacaagcatcatataaaaaccctaaacagaatggtaagctngactcnaccaaacatgacacattagcatgctntcataaattc

SEQ ID NO: 6762 - DNA, 462 bp, Glycine max
  unsure at all n locations
agctntgagcaaattcaaacgatgataactnttactctctgatgtcggattgagtcccgtaatatatcgagacgctcgacattgataataaaaactctgtgaaaattcaaacaacgataactttttactcagatgtccgattgtgttccgtaatatatcgagatgctcgaaattgaaaatggaagctcgtagcaaatgcaaaccacaataactttttactcggatgtccaattgtgtcccgtaatatatcgagatgctcaaaattgaatacaaaagctctgagcaaattcaaacgataataactttttactcgaatgtccgattgcgtcccgaagtatatcgagacgctcaaaattcagaataaatgttctgaccaaaatctaacgacaataactttttactcggatgtctgaatgaatcccgtaatatatcgagacactcgtaatctaaaactaaagctct

SEQ ID NO: 6763 - DNA, 375 bp, Glycine max
  unsure at all n locations
tattgtcgttnngaattgcttagaccttatgttntcaatttctagcgcttcgatatagtacgggacacaatcggacatccgagtaaaaaggtatagttttttgaatttactgagagcttcagttttcaatttcgagtgtctcgatatattacaggactcaatcagacattcgagttaaaagttatggtccgttgaatatgctacgagcttctgttttcaattgcgagcgtctagatatactaaggcacacaatcgatcatccgagaaaaaagttaatgtcgtttgaatttgctcagagcttcggttctcaattttgagcgtctcgatatcctacgggactcaatcggacatccgagtcaaaagttattatggttt

SEQ ID NO: 6764 - DNA, 394 bp, Glycine max
agcttcttctactcctgtattagattatgtttttactctatagatgtttcactctatgatgcagagcctccacagaggtcatgttaatatcatgccgagtcttcagagctgaggcctgccatttattatgagcacagatgagttcctgactcaggtggtttggccagtagaccagccttctccttctggagggggtgggatctccgtaacccaagagcctgagcaggcaacagaaaagccagttatagcataggatgagctcactcctctttagccctctttaattgctgcagatacatctatggctcacgaagaggaatcttcacaatatcccatgccggagccataccctccaacccattcttcatgatgcaccagctactccagcgctgga

SEQ ID NO: 6765 - DNA, 394 bp, Glycine max
tcttatccaaggctcatctaggtggagaagctccttcttccatggcttattccttaatggatggcgcctactctcacctcttttcctttgtcttccgctgcatctccatggtggaaaatcaccattaaaggacaccattgaagctcaaagatccagcctccatagaagccccacaagcaagcttccatcaagtggtaatcagagcacaagagcttcaagttggtgctccttaaacctccattaattctatgtgctttaccttctcttccattatagtttcttcattgttctccatgtatctcctcacatgtcttgtgctaaatgttgttaacatgattatttagagtttccaccgattaaacttgctataaaagctagatttgatgttcaatgg

SEQ ID NO: 6766 - DNA, 453 bp, Glycine max
agcttccaaacatccaagtaattcaacattcttatagcacatactatcacagccaagagaacagggcaaaggcagaaaactctgcccaaaacaccaaccaaaatcacagcttttctcacttaaagaccccaataataattcctttgttccagttcgttaaccgttggatcgactcgcaaattttactggaagtctctagtacataagcctacattttgaccgttgggatctgctagcaaacattcagaactcattctgcactaccctttccacaggcaaccacacacaagcatttttctgcacaaagccaaaatcctgctgcacctatttgacagcaaaattctgcataagtgcagatttcgaaaatcacacttcccctcatgcgatcttgcccaaatcaattcctacaagtcccaaatcatgtatcaatcatgtttaacccaaagtcaagct

SEQ ID NO: 6767 - DNA, 451 bp, Glycine max
ctaagcttctccaagtggtcttcggcatcacattcaaacttgatccgttgttgattagtacctttgcgacaacatggtccatacatctcaccgacacatgtaaagccttgttgtgtcctctcccctcaacgggaatctcttcttccgagaacgcaataaaattattggtggttatatgattaacgattccttcaaaaccctccactaagatatcatgggctacatgggcctcgttgaggacctttattaatagcgcacgatgaggctcagagtttatgagtagttcaagcaatgagatccttgctggagttttattcagttgctcgactaccttaaactcgcttttttggatgaggcgaaggaactcatgagcttcttccaaagccactatctttccttggagaccctctttcttttcagtcccttctactaccggaggaatcacttcttt

SEQ ID NO: 6768 - DNA, 479 bp, Glycine max
  unsure at all n locations
gtcacctgctgcatgcaagctttagactaaaggatatcatgaatatttctatagttagagatgagattaggtcaggtcagaccacgctaggctttatgtaaataggcctagattgttttataaaacaaagacctaagcttgacctattatctattagaggcttttttctttgtctagcctaacctttttaaaagtctagtatgacctattagcttatttaaaagctcattttatattctttccaaagtaaaactcacaccacatattagtttttcagcaaataagaaactaacaatcaacaacatatttgcatatttgatccattgatcacgtctttcaattggataaaattatctatgcatacatgctatgttccnttttagtattttgattcttcatctattaattaagtttatgtccagatcaaaaagaagagaaataaaacaacatttattccagaaacttaacctgcaataata

SEQ ID NO: 6769 - DNA, 459 bp, Glycine max
  unsure at all n locations
ngtcagatattccttctcaactactacacttctctcaatataatacgtagatgtgtaatgttagtagagctggatgctgatcaaataactaaaataaacaaaaagtttcaaaagctggaagatgtatgtcctgccatggaaaaaaaattactaagtgactaaagttcttctaagcagtgaaaaggagctccgtgaaaggcttgtgggttttagtttttctgctttccgaactagcatgtccaatcaagaagcanatcccanatctggttgttggtatcctgtnggactagcacagatggaacaattgattggtttagatcangaacatttacgtgaccagttgaaagtcattgcaccagaagttaagcatgagaaaaggtacttcttagatttagatcttgtttctttttctatgtctactgacaaatattttcatacttcgttatcacanaaactttt

SEQ ID NO: 6770 - DNA, 413 bp, Glycine max
aattgagctaagtctattcttcttgttgatgcaccttacttggtggattagcacgccctcttttttatgtgtaagcaagctgtctattgagcttggtggcttaatatatgatggactcaggcttaaatagcgccgtaattaataattattctttataactttattaggcatatgtttactcataatttacgatcctatttatcttctaattaatacaacataatgatcagtatcctgatttcttgcgattgatcaatccacacttcttatcgcatgactgagggttcttatatgcatatacactacgagtgactctgtctattctccatcgacgctagatttcagtagtgcaagcctatgatggcctttatttcattcttactcttctaaaaatgagagatgcgtctttgtca

SEQ ID NO: 6771 - DNA, 436 bp, Glycine max
  unsure at all n locations
gcttggagtttccagtgccaattcgtcttcttctttagtccagtcttcttctggcttcagttcattagagggctttccttctgtgtccagcatcttgggatgttcccagcctttgatgacagctttccaggttctgctatctagtgatttgaggaaggccaccattcttgctttccagtattcatagttggttccatcaagaaatggtggtctgttcactggtcctncttctntctncatgttcatcagaaattatcntcctagatctcactcagtgatttcgagtgcctgctctgantaccaatgaaattcttgatactgggacagatgtcgtaccggatgtcacgacatcatgcttcagaacatgcagatngtatgtgtccgtatgaacagatttaaacaagttaataacacaagagaattgttaacccagttc

SEQ ID NO: 6772 - DNA, 408 bp, Glycine max
  unsure at all n locations
agcttaatntcagccttcattacatccctccaacattgtntttgaagggctttctgataacttaaaggctcaatgtcagcagataaagacattaaataatgattatgcgaattagaaatagaagaataagacataacaaaatgtaatggatacaagcaatttgatgaagtttgagtaataagattgtagtaacagtcaacgaggttgatagggggtttatcgattcaaatggagcgacgtggagggacaagttgaggtagggctctatctaagggtgggtaagaaaatgaatcagaattaggatgaggcaaagtgtcattnttataaatcgagggtgagggcgatttggatgaggatgcacaagtgtgacttatacgaaggcaaattgggctcgctatntatggattc

SEQ ID NO: 6773 - DNA, 473 bp, Glycine max
  unsure at all n locations
tattaatatatgattaatataattaannaatatttgtaaaattagctgataaattagtttataaatgttaatagcataaaaatacatatttaattatttaattatatatgtatgtatttaatttgtttccaataacgtgtcatcataaaaactagggcaatattttttttaaaaaaaattgtattataaaactataaaatgtttgagttgtataaagcattaattttctactaatttttctcttttttgaacccaatttttttttttgatatttttgtaaaagttagggagctacatactnttaattgtatttccttcttaacatggcattccttcttaacgtgaattatctttatataaatggcttntttttttcattgactgaaaantttaaagatccgagtgcacaaatgacatatatgatagtaagttactgagcttttgttaaatttatacctgaatntcatacttaa

SEQ ID NO: 6774 - DNA, 189 bp, Glycine max
cgcggcagtgcagcgtttaattatactcgccgagcttgattgttatgtatgacagagttaagcctatgacagatattaagtccaactcacgcctgatgtgttcaactcaattcaagtttgggtcactcatttcctcccctcgtgaatgcccacactgacaagcttgactcctttcgtcatttgatgcat

SEQ ID NO: 6775 - DNA, 422 bp, Glycine max
  unsure at all n locations
tcgaacccgttagtgacgtataccttactgttcataacgcttgatacacgaatgttgacggagatgggcgccacttccagagatggaagataagtcacggtgacgccacaaggaatcaaccttgataagtcagaatttggttcaacagaaaccctgagagaagctttctcacgtatttgaaaagaatgtcaaaagtctctttcattcattctgaagaaaatatatatagttcaccaaaccctaaaaacaaaataaattggtgcaactaanaaggcataggtttcagccacaaccaccaattttatgtatttaattgcaaagattaaataataaaatagagataaaaattatggaaaacatgggccttcaatcatcatcaatggcagatatacaaatgaccagtcttcgctctattgacgtgt

SEQ ID NO: 6776 - DNA, 426 bp, Glycine max
agcttgtgcaaatcaagtcactcccgcattttatctctagcatgcattgtatgttggtctcgtcctttgtcacgggaagccggaaggtccatatcaccttcttaattgtacacatggggcactgcgcccccaaatgcacaagtaagaagagataattttccgggctctcgtgtccgtaaaatgcattcatatcatgcaccacataagcatctcttcataacatcataatggacatatcctgcatttgtccgttatcatattccagcctcacattttgcatgagtcatggcatcatcatgcatatgcgttcaacaaactttgtgatctgcaaaattgcataccatttgttatcatgtttgctcatccttgcggtttcctctacaaaacaaaaacaaaaaagggggaagcgtgagacttcacactaca

SEQ ID NO: 6777 - DNA, 336 bp, Glycine max
  unsure at all n locations
agcctcaaagaggtccaggaaggacaaggcagccgaaggaactagttccgctccggagtatgatagtcaccgctttaggagtgctgtacaccagcagcgcttcgaggccatcaagggatggtcgtttctccgggagcgacgcgtccagctcagggacgacgagtatactgatttccaggaggaaatagggcgccggcggtgggcatcactggttactcccatggccaagtttgatccagaaatagtacttgagttttatgccaatgcttggccaacagaggaaggcgtgcgtgacatgagatcctgngtaaggggtcagtggatcccgtttgatgc

SEQ ID NO: 6778 - DNA, 457 bp, Glycine max
  unsure at all n locations
agcttgtagaatggttagacatgatacatgtcatggcttggtttggttcaaggataaaagggatgccccacattatttccatgacacaaatgcaaaaaagatgatttggaaactttatgcaaaactggtcatgcatgcgcctatgcagacgctcaagtgtcaaatttttatggtcaggtgatgctagggttcaggattcatttcctctattttaaatcaacccaatgtttccaaaatatgttcttttatcaatttgtgcattcctccaagtccatttcgggcgtccggggaaattttcacagcattcacccttcaggtgtagacacgttttttcttcaaaaatctgttatgatcaatgaattttntttcaaagaaaaggtggaaatcatctcttttcaaaagcatgtcnggttttagctagacaacttattntctctttttccacctttatccttac

SEQ ID NO: 6779 - DNA, 489 bp, Glycine max
  unsure at all n locations
ntatcaaatggatgttaaaagtgctnttctaaatggcttaattcaagaagatgtatatgtagaataacccccaggttttgaaaactcagacaagcctaatcatgtttataaattgaaaaaggctctatatggattgaaacatgccccaagggcttggtatgagcgtctgagtaagtttttgttagataaaaacttttctagaggtaaagtggataccactctttttataaagagaaaattaaatgatattctactagttcaaatatatgttgatgatattatttttggatccactaatgattcactatgcaaggaattctctcatgacatgcaaagtgagtttgaaatgtctatgatgggagaactcaacttctttcttggattacaaataaagcanaccaaagaaggaatctttgtcaatcaatcgaaatactggaanggaataattcaaagatttggaatgcaaagtgctaagcacatggctacacn

SEQ ID NO: 6780 - DNA, 358 bp, Glycine max
agcttcaagttgcttgcatagcaactagttatattcctacaaagcgtcctgtgatgaaagatccaataggcttcttttggatgggatgtgtgctctatcacgcaagattgcatggtcactagcagccggattctcaattaatcccatggcttcttcaggggtcttaaattctatttctttccctgcagaagcatctaatagctgcttggcttgaggccgtaacccgtgaatgaaaatactgagtcggataggttctgagaatccatgagtaggcgtgtttcttagtaacccacgaaatctttccaacaccctcactcaaggactcgtctggaaattgatgaaaggatgagatgacagc

SEQ ID NO: 6781 - DNA, 364 bp, Glycine max
tcctagacataagaatgcgcatcacgtaacaacttcttctgatgatgccagataaggtcatgagggataatctcagctaccttgaagttagcagatggctaagtaaactctctgtttaggtggtagcaaagctcatatgtgcatcatttaggactttactggcatagtaaatagagcgaagcatcttatacgcctctgtcctagcactgcaccaacaacgtagtcactagcaccacacatcatttcagactctaggctgcaatttggggccacaatcactggagctgacaccagcctccctttcatggtgtgaaatgctagcatacattcttcatcgcacttatacacagcatctttgttcgat

SEQ ID NO: 6782 - DNA, 468 bp, Glycine max
  unsure at all n locations
agctnnttgaaaagactcatcccttcaaaccattttgaaaaggaacaaagggcttatatatatgtgtgtctaacttcgaaaagaaagagagagatattctaagagaaattaattgccaaatgctctctcaacaactcttgggaaaacacttgcaaatctattgagaattcatccaagaacttcaaattgtattatcatctctaaaagagagaaattcctttaggaacttcaatttgtatcgtccactctaaaggagagaaatctttctgttcatctcagaaagtcatttgtagtcaagagactggttgtctcttggattgtgagaattgtaatcaagagacgggttgtatcttggagaatctttgaacacaagggtgagggatcccaaggtatgttcaaagtctgtaaaggatttacagagatagtagaaaatctcaagtaggttgcttgagaactggacgtagacat

SEQ ID NO: 6783 - DNA, 419 bp, Glycine max
  unsure at all n locations
tctcccanaaaatggtgtcgtcagcaaatgggaggatattcactagaactcttgttcttccctaccaagaagctntggaagcaatcttttattgttgcttccctcatcattcctgtcaagccttcaacaaccaagtcaaacaatagaggggccaaaggatccccttngtctcaaatctcttgaggcttaaattcagaggttgagcttccattcactagaatagatatagaggctgatgtgaggcaccccttaatccatccaatccatctgtcatggaacctcattcttctcatcatatganaaaggaattgccaagacactaaatcataggctntttcgaaatccactttaaacaccatgcaggacctcatagacctcctangcctctcaagtacctcattagcaaccanaacaccatg

SEQ ID NO: 6784 - DNA, 449 bp, Glycine max
cagcataactgtagtgaattttatgtcgtatggaaccaagtgttgggcggcggcaaaaaagaataacctgaatttcactgtggtcatcactttgaaggattatgttgataacagcattaaaagagacatcatatattgctttcactacatcatcaggggcattctgtataaagcaacaacatactgagatgagaaaaccataaagataaaaaaatgtgctcagaggtcaaagatgacatgtttccaagtataattgccttcaataacattgttaccaaatctaatgatccagctaccaaaccatcagcctgctcttggggctataagaacatctacagaagtgtataagcaacaaaattattctaaaataactaaccagacactgtaataactcgaataagtcatactttattcaaaattgttccaatatatggcaaaattctagaaac

SEQ ID NO: 6785 - DNA, 294 bp, Glycine max
  unsure at all n locations
ggtacgaatgtaagagacatcttctacgaccttggtgatccttgactctatctcattgaatcgcatgtccactcgtaactccaaagtatcaaacctttcaccaacaaaggtttgaagaccatcgaacctgtccaaaatcttttgaagaagagaggaatcttctccaccatgtaaatgtccttcttcatcaatgggatgagcaccctttttcacccaagagccatcatgctctttacngtaaccaaacgatgcaatcacatcagcgcctattagaaagatctcttgatggaacat

SEQ ID NO: 6786 - DNA, 326 bp, Glycine max
actcagctgacacctgtgcagtgagcctgcatgtggaccctcaccttttgtttatgtaggtcacgaacgattggacatcaatccctttgaatgtaatcatacatgacgtcacctattgacattagtctgctatcttgatgaaaacaatgtcgtgttgagaaccgacattgctagattgctaagctaccaatctaccatctcctattagctcatgaatggattgacctataagaaccaatatcttgatctcttcggttacagaagagctagctgaaggccgagacacgattgccgttgtataggagacttcaccattgtgaatatat

SEQ ID NO: 6787 - DNA, 464 bp, Glycine max
agtcacctgctgcatgcaagctaatacacttgacagtagtcctaagacaactcttttgagcttattgtatgcacctcagaatgcatgcacacatctacttttcaaagatgtttaaactataagagtctatatgcaatgctgatcatgcctcaaattatgccatccttacaacatgcattgctaatggtttggcataactaagactaaggatgtatactctacacatgtctcaactctcaagttgtcgcatcattaaattctatcaacattaatcttctaatgagccctttatgtgcgtggctacacattgaagaagcgatgacgccaattgcagtcttacaatgaacccactttgtatgtggatgcataaggaagacaagatgttagacactgcaccattctaatgttgctaactcaaagtttcagaagaaccaactatgtttgtcactgcatatcgaacacat

SEQ ID NO: 6788 - DNA, 187 bp, Glycine max
acaaaccatcattgttctccattgaaaacccacactgagaggaacccttcaaccaaagcggaatcttccaacttggctggcggtttcggtagagaaggaaaacactaatctgacctttcgttatcttcgagaggcttctgtggaatcgaagagcaaggacaagaaggaatcttcaagtgacacgacg

SEQ ID NO: 6789 - DNA, 454 bp, Glycine max
agcttcatgctgaagtatgtatgacaaaactttattactgttattcaacacatacaagtgagcttgtaacaaatcttctacacttggagtgataacatgcagtccttttgaacccttaccgcccactctgtcgtcatggcgagactcaggaaggccaataggtttagccttttcaatgtactctgaataaaattcaatggcttcttctgcaatgtacctttcaacaatagatgcttccagacgatgtagattcttggtatacccttttaagatcttcatgtattgctcaaccaggtacatctaacgcaaataaataggaccacaacatttaatttctctgacctgatgaacaattaagtgaatcatggtgtcaaagaaagtaggaggaaaatacatctccagttgacacagtataattgtggcctcattttccaggccatcaaacttgacagga

SEQ ID NO: 6790 - DNA, 469 bp, Glycine max
  unsure at all n locations
tgaagaggatgctntaatggaggataagaaagagagaatgggtgatcacgaaattgaaggaataaaagagggagagaagtggaactttgaagtgtatctcataagactntcattcatcaaaggtacaacaagtgttacacatgcttctatttatagactatgtagcttccttgagaagctttcttaagaaaacttccttgagaagcttctttgagaaaacttccttgagaagctagagcttagctacacacacccctctaataactatgctcacctccttgagaagcttccttgaaaagattcctaaagaagctagagcttagctacacacacctctctaatatctaagcttaccttcttgagatgagaagctagaacttagctacacgcncnctataatagctaagctcaccccatgacaaaatacatgaaaatacaaanaaagtccctactacaaagacgtactcaa

SEQ ID NO: 6791 - DNA, 445 bp, Glycine max
  unsure at all n locations
agcttcatgtcttcattcattgtcgntgttttttatcttttataaggacatggttgtagagacccacattgttgttgttggacttatttatccatcttggtgtgggagtagagacccacattgttcttgtctacactcaactgcacccacagggtttgtggctagtctttggacttattttaatgatgccataaatatatcactgcgaactgggtttaattctattaaaagcaccttaggttgtatacacatatgcacctatcaaccctagccaacccaggttaatcataaaatgtatgttagagtgtgaggattctctatgctatagtacctttgatagatcaatgtagtataagcacctttctcacatgaatggatgcgtagtatatgcattctaataaccacaatgaagatgatttgtgggtatgatattctagcaaagaca

SEQ ID NO: 6792 - DNA, 435 bp, Glycine max
  unsure at all n locations
tataacanaatntaatccncataacacanatggtcttatatatttctaaaaatgagaaattgatttccagcagctcataacctttgtaaggtagaaaatacctttgtgtgttttttacttttaatattatgcatcatgatgatgaagtccctacattatatgcacttatcatatattttttgtatcattctgattttcaatcaatttcactctattagttttcttaattctggttgttctcttgggcacataaaccaggaaaaaaaaagctagtaataagatattgaaattcanaaacaactacatatgggtggaagtctgtgaaattcaaggacttgcacgccttgttagagtttatttcactttgaatanttgncgcagtggttagtttggggtttgatcttggtccatgtttgtggagtcatattgtggggc

SEQ ID NO: 6793 - DNA, 433 bp, Glycine max
  unsure at all n locations
cttaagtcacctgaggcatgcaagcnttgagccaaaatcctgactcaccatatactcttgttccanggtgagaatgtcaatccttaccctcggaagcaaaatagaatagaagggaaatttccaatcaaagaaaagagaaggaaaatttccaatgaaagaggaaaaagaaaagaatggaaattcccaatcaaagagtgggagaaggaaaaaagaaaaggaagacaattcccaaccaaagaatgggagaaagtaaaaaaggaaggaagctcctggtcaaagaaaccacaagaaatgtgcagagaggtctttggaccacacgatatctgaacagtacagaattgtcactaaatgaacaaaaaggaaggaaaggaaaccacgacctagaatggtcttctccctttaattaccaaccaaaatcccgtgcgctagcgac

SEQ ID NO: 6794 - DNA, 381 bp, Glycine max
  unsure at all n locations
tcaaaggtcgagatgttagacaagtggcctcagatatcttattattagggggttgaattaagatattccaaactacttccccaattaaaaatctatttcactttctttttaagttataaattcccttaacaatgaacttcttaaatattaattcaaataaaaaaattgagtatgaatataaagcaataataaacaaaggagattaacggaagagaaagtgcaaactcagaattatacttggtccgccacacccttgtgcctacgtncagtcctcagcaacccgcttgagagttcactatcttgtagatccttttacaagttctaacacacaaggacaatcctntctttgtgttagaattccttacaacaagagaccacagt

SEQ ID NO: 6795 - DNA, 363 bp, Glycine max
  unsure at all n locations
gtcacctgaggcatgcaagctatagactggacaagatgctcacatttttgttgtattttaaagcacaatctcaatacatcgaggaacaatcttttgaatatctgtgaacaatgagagggagagacaacacatcactgatacacagtggaatacgtttctaaccaataataagccaaatacgcatacatacaaccaaattatattgattacacgaatacatcctttgcaaatgaatccacaactatcatatatataaccctcccaaaccaagaatagaatngcagctccgccacatggacggctgaaaaaggccaacttggatcatgaaaagggctctactgtattagtcatttgagatagagc

SEQ ID NO: 6796 - DNA, 357 bp, Glycine max
  unsure at all n locations
tttatttatttatttattttgctaactagaccttctcctataatgagttcggtctctgaaatactaataataatacattctttaatattccgttttttttttacccactctcttgttaaaagaaaatttgttcgggcttcattaaatatgagaatctcattattctatatgtattcgcggagtcttatttctaaaatggtggaattaattcacataaatntcaagagagttggtacattaaatgtaacggagtttgtggtgtgattcggttcgattttcacataaatagtatttgaattaaacataaaataaatatgcgatttaatttgatttgatacgtttaaatacacactaaat

SEQ ID NO: 6797 - DNA, 321 bp, Glycine max
  unsure at all n locations
agctntataagcgcgggtctgggagtacgtatgttttgtggtcgcgatatactaagataatgttccgagtacattgtatttggtacgaccttgcccttctgattttcagctggggaattggccagtggaggaacgcccctacatttacacagcgagcataatgtacacctttacggttttataaagctatatagttgggcctaggctttagagttcttctcttggttaatgcttggcgtatcttgattttaaaaatataatacaaggaggtttattgatatgttcctacgcctctactcattctcatccatttgcgagtga

SEQ ID NO: 6798 - DNA, 477 bp, Glycine max
  unsure at all n locations
ctaacacttgcctcaaatgatccacatgaaccatctcatctttgctatagattagaatgtcatcaaaaaataccaaggcaaattgcctaaggaatggcctcaatacgtcattcataaagccttgaaaagttgatggagcattggtaagaccaaaatgcatgaccacaaactcataatgccccttatgagtcctaaaggctgttttctcaatatctgaatctttcattctgattaggtgatatccagccttcataatcaatttagtgaagatagtagctccaccaattncatccaaaggctcctctattattggaattggaaaattattacgtatggntatcttgtttaaagctcgataatccacacaaaatctccagcccccatctttctttctgacttagataatanggctagaataaggacttatgctangccttatgacccctaattncatcatntccctaaccatcctttcat

SEQ ID NO: 6799 - DNA, 462 bp, Glycine max
  unsure at all n locations
agctntgcggatttggtcttcgccagtgatttgatcgatgtgggtccgaaaagaggcaaatttgatcatcctactaggacgactgagaaaactggggcaaatgaagagggtgagaaagagggagaaacccatgctgtgactgccattcctatacggccaagtttcccaccaacccaacaatgtcattactcagccaataacaaacctcctccttacccaccacccagttatccacaaaggccatccctaaatcaaccacaaagtctgtctaccgcacttccaatgacgaagaccacctttagcacaaaccaaaaaaaaaaaaacaccaacaaaaaggaattttgcagcaaaaagcctgtagggttcaccccaaattccgtgtcatatgctaaacttgatcccatatctacttgataattcaatggtagccataaccctagccaaggttcatcaacctccatt

SEQ ID NO: 6800 - DNA, 436 bp, Glycine max
  unsure at all n locations
taatggatgaagggttaattggtgtatgtgttgcctaatcatatattgacagccctaagttggttttcgcttagtaaattaaaatagggttggattaagtggttaactgttagggacgaattctccataacctangacaagagagtggcttctgaataagaggaaacaacccatttttaatactattaattttgtattctagtttgcttgttctttatttcacaaaacaaacaacccccccctaatcgtactattaatgcaagtatattatgaacatttggttatcattgctcgttgggaaacgacctangatcacttcctagttattggcatttcatgtttattngattcgggttnggtctcaatcacatattcaactatttttgctacctaaattaacacataaatgaacanggcatttttctacctaaataac

SEQ ID NO: 6801 - DNA, 465 bp, Glycine max
  unsure at all n locations
agcttgtccataagctctntntcatagtaggatgtaatgtgtattttcctaagggcactcttaagatcattccaatactcaactggaggatccccatgaatccttcgttccctaacaagggaagtccaccaatagagggcatacccttgaaagctaagggtagccaatggaacttttctctcttcgctaatatgatagcaagaaaagagttgttcaaccttcatttcccaatctaagtaggcctcaacattatcttttccatggaaatatgggaggctaacgttaacctcttgatgccttctatccttttcttttctttaggagtgatgtttagtatgtgaactatggcgccctctataatagttgctaagttcttcacttaaatcttgcaagagtcatgactactataggaggcatgttnttctcttttcatttctttcattattnttcttctttcttcctctc

SEQ ID NO: 6802 - DNA, 376 bp, Glycine max
  unsure at all n locations
ngagtgaagttaagcattctaaacaataacaaaaaatagtgcttaattggtttgtacatatacattatctttaacattgccatgtagcttgcacaagatatatgaatccactttagttattttatagacttaaagtttaatgtctaagctattgaacttaattaaccttgttccattactttcttctacaatttataagaataattaaattaagacatgttaaaaacggcattggataatgatgtcttgcaaggggcacctanactgagaagacagggagggccaatcacaaaaaataaacacatccaatannatttttgctgaataatacattcaacaaaatataccattatttttatacaaaatattataattg

SEQ ID NO: 6803 - DNA, 408 bp, Glycine max
  unsure at all n locations
agcnttgtgtaatcgattacacatatttggtaatcgtttaccagtgttngtttctgaaaaatctaaagatgtaactcttcaaaaaggttttgactctttcaaatgggttttaagcttttctaaaagatataactcttctgaatggctttcttgaccagacatgaagagtctataaaagcaaggctttgttttgaattttgaatcaattattccaagtctttctaacaatctcttacaatcctttactagccttgaatctctttaaacttcttcttcttccttgtaccaaaagttttctgaagttttctggttttctaaaccttgaaaacttgtgctattcatccttttcattctcttctccctttgccagaaagaattcaccaaggactaatcgcctgaattcttttt

SEQ ID NO: 6804 - DNA, 262 bp, Glycine max
  unsure at all n locations
tatgcacatatttccttacgaacgttcacttgcacaagacattctattatctaagaaaaatgcacccatatacaatcaaggcagcttcgttacctagattatttacatgtacttccaaggtgtatttgttacttacatcacacacatctccttggctaaatttacatacatgcatactcaaagcattttggggtaccaaaaattgcacatgtgcacatcttggtatttctaatacctatacatacacanacttcatgatgaa

SEQ ID NO: 6805 - DNA, 425 bp, Glycine max
agctagcctgtccaatgcagcagtaatgatggtccgagttatgttgaggaacggctacaaacccagaatgggtttatgcaaagacaacgacgtgataactagcctgatatatgccaaaggaaatcgagggaagtatggttgatgctataaacccactcatgcagatataaagagaagcatcacgggaaggaagagcggtggtcaaagctcgcggttgagacaagaaagtgaagggagcccgccctggcacataagtagaagctttataagcgcaggtctgggacacgaaggtcaagtggtcgccatatacgaagatgatgttccgagtacatcggatttggtacggtcatgccctcctgatttctagctgggaaactggcgagcggaggaacgccccggcatttacgcaacgagcataatgtaaa

SEQ ID NO: 6806 - DNA, 463 bp, Glycine max
  unsure at all n locations
taagctcgatgattacatctccacctttctcaagcaaattcttcttgatatcatcataatcttcatgatttacattctccccctttatgatgatgacaaccacctgtaggttaggagcaacagcaaagaaaatatctatttgcatatagttttactcccccttggttttacattgattgcttatatgagacaaatgaagatttcatagttttcatatataataaagttgtctcataaaacaatagataacttcttcttactagtnaatcttatatctttctctcccgctttgtcaacatcataaacaaatcatgaatagagaggagagagatgttaccacttgttgcaatgtatgagaatcaagtgataccaaaaggcattataaacaatcattcaatattaatcaagcaaaaacacgtacaataacacatcagtcatacacaatcaaatacaatcaatcatc

SEQ ID NO: 6807 - DNA, 389 bp, Glycine max
  unsure at all n locations
aaaatcatggctaagagaaaaatagtgtagaacgaatcatttctttccctcaagcagacaatgttggacaagtggctctaataacttaagagagggtgaattatgttaaaatttcttgtttaattgacttctaaatctccttttaaatctatatgttaagactattgaagatgatgataaagatgatagttatatcaacataatacttcaagtgtgcaagataaataaaatatgcacgataaagtaatcaagatagggaagagaggaatgcaaactcagtctatccatcttggttcagtcacttcctgtgcctacgttcagtcctcaagcaacccacttgagaatttcactaactttgtaaaaatcctttntagaacttctgaacaccg

SEQ ID NO: 6808 - DNA, 447 bp, Glycine max
  unsure at all n locations
ctgatatggatattagattaaaggtaaaagctggcacatattatacattgtgtagggtaatgagtgcagaaagttgtactatgcctaagtgggtagcattaacaagatggccatttggtagcttaacactaatgggactaatttgacgatatgaataaaaatttgttaaagaagaagaaacatggtcagtggctcctgaatctaagatccaagaggtagagttggatttattcgtaagacaaaaccatacctgttggatcgttattggtgcaagacgaaatagaggcaacctgtggtttaatggacgctgaggttccggccgacggctgttgtattaaagctagaagtgctatgtactgctctgatgaanaacgaacctgttcttgtgattcttggggatagtattggtcatctgtggccttcccttcagttgccactacactatta

SEQ ID NO: 6809 - DNA, 434 bp, Glycine max
  unsure at all n locations
acgatgatgttaagaattaaatattataaagcaaatccgccaaaggcgagttaagaaaaaagagacaaaagatctccaaattttacaaggaaggcacaaaagtgcaataaagattaatgaataagacaaaaggagtagatcccaacccccctaaaaaaattgaaatgaataaaagtacaagcaagacactcaaggttcttactcaatataacccttaaatactctttgagtctctctgatcgtttctttcatagccctcttacccatgaccacgttgcaagcccaataaagcccatgtggatcaaggaatgacntaattttcttttaagtttagaatatggaatggaacgcgcacacacttgtgactatngaaaaaaaataaaanaataataataataaaggagaatcctcgagggtttgcactttcatatttg

SEQ ID NO: 6810 - DNA, 472 bp, Glycine max
  unsure at all n locations
cgcttgtggggcatctatggaggctggatctttaagcttcaatgaggtcttttaatggtgattttccaccatggagatgcagcgaaagacaaaggagaagaggtgagaggagacgccatccactagggaataagccatggaagaaggagcttcaccaccaagatgagccttggataagaagcttggagaggatgcttcaatggaggaaaagaaagagggagagaaagagagaggggggagcacgaaattgaaggaataaaagaggtagagaagtggaactttgaagtatgtctcacaagactctcattcatcanagttacaacaagtgttacacatgccttctattatagactangtagcttccttgagaagctntcttaagaaaacttccttgagaagcttctttgagaaaaacttcttgagaagctagagcttagctacacacacccatctaanaactaagctcaccttc

SEQ ID NO: 6811 - DNA, 322 bp, Glycine max
ctgctgcatgcaagcttcttatccaaggctcatctaggaggtgaatctccttcttccatggcttattccttaaaggatggcgcctcctttcacctctattcctttgtcttccgctacatctacctgggggaaaaccaccattaaaggaccccattggagctctaagagccaccctccatacaagccccactagcatgtttccatcacaatgtacacgtctttagagggctacacgcccatgcctttagaggactacacgctctctccttaggaggactacacatcctcacctttacaggactatacgtgaatccttggtttt

SEQ ID NO: 6812 - DNA, 294 bp, Glycine max
  unsure at all n locations
ttacaaagttgtagttctagtcgctaatcttangctcttaaatttagtacacgctcatgattttcttattcctataatctatacatcaacatatcagagatatttttatgtgtaattatctagtgttgctctgcttccaaattaatgtatttgataaaccatacggaatgatcatgtcattggccgataattagatgcttacggggctcatcaacaagtccattgganataagtatgggcttgcagatgttggtgactttgtgagaatgaagtgagtttgtgaaactagctaag

SEQ ID NO: 6813 - DNA, 354 bp, Glycine max
  unsure at all n locations
agcttagatcaggcatccgagtcaaacgtttgttgtctttaatatgcatgggcattncatatcaacttttaatcgtcatgagatattacgggcctcaatcggacatgcgagtcacaactttagcccgccagaattcacccgagtcttccatgttaaatattgagcgtctcgataggtgacttggcttattcgaagatccggaggagaagttatggtcgttcgtatttgcgatgggctttaatattatcctaagagcttctccatatattatgagctctaatcgggaatcctagccaaacgttatggctgttccacattgcgtggtcaggccattcatacttttcagggcgatga

SEQ ID NO: 6814 - DNA, 440 bp, Glycine max
  unsure at all n locations
acttagaaatcaagtgatcatgtattccgtatatatatgttgagaaaacggatgcacattctatctatatacagntgtttgctggttgcttgaatcttgatttcacgtattgtattgtcatcatcaaaaagggggagattgtagatgcaattggctctgatgttctgatgatgatcatgatgatgtgttgcaattgatgcaaatgggcttttcaagaataaaattcaagacaatacttctagattacaagtcacaacatccagatgatcactagaatattangaagggaatcctaattgaataacacaggttcgccaagtgattaaaataaaagtgtttttcaaaggtttactctctggtatcgattacanaggatgtatcgataccagtggcaaatacgtttataccactataaaattggatccaatttaaacctgaat

SEQ ID NO: 6815 - DNA, 457 bp, Glycine max
  unsure at all n locations
caagcttgagatattnttaagccatacaatgtctttntaatttgtacactntgtcttcctggccatcaacttgaaaacctagaggctgatcaaaaaacacatcttcttcaagaggaccatttagaaaagcagacttgacatccaattgatgcattggccaccttctcaaacttgcaattacaactacaagccttattgtatcaatccttgctactggagcaaaaatttcaccataatccacaccttctctttgcaagaaaccctatgctactagtcttgccttgtgcttgaccacctctcctttgggattcttcttcactttaaagacccatttaactacaatagctcttttccctttcgggagagtcacaagatcccaggtatggttcttcttaattgagcttaattcctccttcattgcttgaatccattgaggttcttgcaatgtttcctctac

SEQ ID NO: 6816 - DNA, 466 bp, Glycine max
  unsure at all n locations
ggctctgaaggaagggtccgtcaaaatttatctgatcataattatggaatctgatgtgtccacgcaaaatgtaaactaaactagtgtaattagttttggttgagtaggcggacattttgggataaaaatcgtgttacacttgattggtaagactaatataaggaggaggataacaaaatatactttcactaattgaatgtatatttttttcttaacatggaaaataaatatccaatccctttctctctttgttaagcaagaataaattaaattaaattatagtacatacttttcgttcttcacgtgtattttgaggctgatattgacaacactaggagtattgaatagtttgaattcattgctgccagtatggatcggcatanagtggaanaggaagagagnttgttcaatgcttctcaatactttgacaaaggatgacaggggtcagtcttcagttcattaaatg

SEQ ID NO: 6817 - DNA, 468 bp, Glycine max
  unsure at all n locations
agctagcctcanagaggtccaggaaggattaagctgccgaaggaactagttccgctcctgagtatgacagtcaccgctttaggagcgctatacaccagcagcgcttcgaggccatcaaaggatggtcgtttctccgggagcgacgcgtccagctcagggacgacgagtatacggatttccaggaggagataggtcgccggcggtgggcatcactagttacccccatggccaagttcgatccaaaaatagtcctcgaatttatgccaatgcttggccaacagaggagggcgtgcgtgacatgaggtcctgtgtaaggggtcagtggatcccgtttgatgccgatgctatcagccagctcctgtgatatccgttagtgctggaagagggccaacagtgcgagtatggccagaggaggaactggtctgatgggttccacgaggaggccatcggccagatgctatgtctacc

SEQ ID NO: 6818 - DNA, 446 bp, Glycine max
  unsure at all n locations
ngtagaatggccagacatgatacatgtcacggtttgatttggttcaagggtaaaagggatgccccacattatttccatgacacaaatgcaaaaatgacgatttggaaacttcatgcaaaactggtcatgcatgcacctatgtggacactcaagtgtcaaatttttatggtcatgtgatgctagggctcacgattcattccctctattttagtcaacccaatgtttccaaaatatgttcttttatccatttgtgcattcatccgagtccattttgggcgtctggggagaattcacagcgttcacccttcgggtgtacacacacatttttttttaaaaaaccagctatgatcggcgaatttcccaaagaagagttggaagtcatctcttttcaaaagcatgtcggtttttcagctaaataacttatttctcttttctttttcctcttt

SEQ ID NO: 6819 - DNA, 370 bp, Glycine max
  unsure at all n locations
agcttggacttnctgtgttctgggaacctctttttctttaagtgtacccaaacccaatcacctggttcaggcacgactatctttctgcttttgttggcttgccttgcatagctcgcatttttcttttcaatttgagccttcacttgctcatgcagcttcttcacatacttagctttagtctatacgtccttatgcttaaccataacaatgttaggcataggcaacaaatcaagaggagtntaaggattacccccatacactatctcaaatggtgaacaattacttgtgctatggataagccgattataagcaaactcaacatgaggcaaacatgcttcccaagatttaagatttttnttcaaacaatcct

SEQ ID NO: 6820 - DNA, 425 bp, Glycine max
  unsure at all n locations
tgtagccattagaatagaatgagcatgtgattgtaagtattactgaaaatgttagttagcttgtcagattgattatgaaggaatgcattaactgtatcctggtgagagtgtgatccttaaattttgagagaaacgactatcatttagtactgatttttgcatgaatctttgaagtatggactgaatgcatgaaattgaggatgatgaaggccatgtttgattgtgatagccacttagccaaaatgttgaccatgtgcttgaatgaattatcccttgtacccagtttgagctgaatgcattattgattgattgaaccctgagcctatacagtgttatcttctactaccttgacttcggttgtaggagagcatcatccacaggaagcatggttcanagcacaattgtcctaaatttggggagtatta

SEQ ID NO: 6821 - DNA, 388 bp, Glycine max
  unsure at all n locations
agcttctacataaagcttattaanaattgcttttagaacttatcggtgtgtcaaaactcataagccattattataagctcaaatatatcacatgcccgccaagagcatagtgttggtaatacaaacaattttcataatatgctctctctaaccactccgtaaacaacttaaatgcagattacagccaacttctgaagacacaagcgtggaaaatatattaaacagtgcgtgaactataaaactttgtgacagccaaggacaaatgtaccactaagaatatcttgcgtaagctatgcatacctcataataccctaacccagattacctctgaaatattaaccaatgaaagcatcgtgcctaatctataactagaagaaaatgcttatgg

SEQ ID NO: 6822 - DNA, 314 bp, Glycine max
tatcagaaggggaatggtaaaataccacctcatgctgatatttataaggtggcaaagtgtttctattgcaagatgcaaggacacatgaaaaagaattgccccgggttccaaatatggctttgcaagaacggtaaatcaatctcattaatatgttatgaatctaatatggttagtgttaatattaacacctggtggattgactctggatctactattcatattgcaaattctatacagggtatgcaaaacctaaggaaaccagtgggaagtgagcaaagcgatttatcaagctataagctatgctcacatgtgga

SEQ ID NO: 6823 - DNA, 443 bp, Glycine max
  unsure at all n locations
agcttagaataccttagctataaatgaagacatattaagttagcctttatattcacgatatgtttttatgctatctcttcctnccaaatacattcttcattctttctctctgagaagcctttctttttcccgcatacactcaaatctatcccaataaaactacgatcccgaactcgttgaccgttggataatcctaaaatatgaacaccaccttcgaaactcatttacacacatctgcaccattggaacttgcaaaataatgtatgcagatagataaatgatccttgcacaaagacagtgaaattgagggcttaatctcttctcctctctaacacttagaaatcctagcagaacaactagaggaaaaacgtgagaaatcttagagaactactagacacatcgatatcactgctagagtacacacgtgagcccgcatataagta

SEQ ID NO: 6824 - DNA, 388 bp, Glycine max
  unsure at all n locations
tcaacttaaccctttgagttgattatgtcacacttaataattcattgtctttcctccagattatgtctttcctccagattatatgtcatcccccacgaattcagagtgtgttctcaagtgagttataattattgaattcaataattttgtctttaaccataaaaaaaagggtcaaatagaataataataataataataataataataatagtagtaatgaacaagtcagattttgagtttggtacaataagagcacctttctttgttgtttttcaatncaaaaatcaaccccagaagatccgccagattcttgatgaaatctgtcggatcttgctgtccaaactgtcagatttccttggtggcatattgtatccttctcgactatgat

SEQ ID NO: 6825 - DNA, 465 bp, Glycine max
agctataacctcattgtctctcacagtctttagtatttgggatccaatccaatccttgtgttcggactctcagccacttatgatagccgccgatgatcccattactgcttcccctaagctctctgtcctttcttcacgtcgcatcccatgccttgcgaactccttggagtaccctcgcgttgtggtcactgaaaccccgtgtgatgaaaggcgtgatgcttttgtctgatggcactcctctcatggggtagccaagtggtcttatggcgaggacgggattataattaatacaaccccttgttcccatcaagggaacatttggacatccttcgcatgaagatagaatcctgattcttccttccttctagcgagggaaccaattaacagatgctccttctttgcttgctaagaagtgatcccaattcacccttcgtttctcagtgcatgaacggtggctttctaatg

SEQ ID NO: 6826 - DNA, 464 bp, Glycine max
  unsure at all n locations
ggctaagtcntatttgatgatgccaaagactcaagtcaagaatcaagagtcataacagtttcaagaatcaaagagtccttcaatcaagaatcaagattcaagtgaagattcaagagaagactcaagatatgcaagaacttcaagaaaagcatcaagataagtataaaaagattctttcaaatgaaaagattgaatagcataaacagaagcacaaacaattttataactgtttcacaaagtagtaattgattaccatgggcatgtaatcgattaccaatgtttttgaatgttggatttcaaatttcaagagtcacaacttgtgataaaacattttcatatttgtgtaatcgattacacaacatttgaaatcgattaccagtgtttctaaacattggtattcanatctaaacatgaagagtcacatctattgatgtgtaanntgatacactaaatggaaatcaata

SEQ ID NO: 6827 - DNA, 459 bp, Glycine max
  unsure at all n locations
agcttgcctgtccaatgcagcagtaatgatggtccgtgttatgttggggaacggttacgaacccagaatgggtttaggcaaagacaacgacggcataactagcctgataaatgccaaaggaaatcgtgggaagtatggtttaggctataaacccactcaggcagatataaagagaagcatcacgggaaggaagagcggtggtcaaagctcgcggttgagacaagaaagtgaagggagcccgccctgccacataagtagaagctntataagcgcaggtctgggagacgaaggtcaagtggtcgcgatatacgaagatgatgttccgagtacattggatttggtacggccatgccctcctgatttctagctgggaaattggcgagtggaggaacgccccggcatttacgcaacgagcataatgtagacctttacggttttaaaagctctatagttgggcct

SEQ ID NO: 6828 - DNA, 481 bp, Glycine max
  unsure at all n locations
ngcatgatntacatctccacctttctcaagcaaattcttcttgttatcattaaaatcttcatgatttacattctccctctttntgatgatgacaaccacctgtaggttaggagcaacagcaaagaaaatatctatttgcatatagttttactcccccttggttttacattgattgcttatatgagacaaatgaagatttcatatttttcatatataaaaagttgtctcataaaacaatagataatttttcttactatattatcttttatctttctctccccctttgtcaacatcaaaaacaaatcatgaatagagaggagaaagatgttaccacttgttgcaatgtatgagaatcaagtgataccaaaaggcattaaaaacaatcattcaatattaatcaagcaaaaacaagtacaataacacatcaatcaaacacaatcaaatacaatcaatcatcaaatagttcaaatcaaatttaata

SEQ ID NO: 6829 - DNA, 469 bp, Glycine max
  unsure at all n locations
agcttgtctcanagaggtccaggaaggacaaggtggtcgaaggaactagttccgctcctgagtatgacagtcaccgctttaggagcgctgtacaccagcagcgcttcgaggccatcaaggggtggtcgtttctccgggagcgacgcgtccagctcagggacgacgagtatactgatttcctggaggaaatagggcgccggcggtggacatcactggttactcccatggccaagttcgatccagaaatagtccttgagttttatgccaatgcttggccaacagaggagggcgtgcgtgacatgagatcctgngtaagggtttagtggatcccgtttgatgccgacactatcggccagctcctgagatatccgttagtgctggaagagggccaggagtgcgagtatggccagaggaggaaccggtctgatgggttcgatgaggaggccatcgcccagctgctatgtatacc

SEQ ID NO: 6830 - DNA, 466 bp, Glycine max
  unsure at all n locations
ntgcacgtatcagtcaagtgtatggaccatatcgtagccaatgtgctcatcgataatggttccagtttaaacgtgatgcctaagagcactttggagaaattaccattcaatgcttcccacctaaagccgagttcaatggtggttcgtgccttcgacggcacccgccgagaggttaggggagagatcgatctcccagtacagataggccctcacacctgtcaagttaccttccaaataatggatatttaacccccctacatctgtctgttgggccgtccgtggatccactcagtgggagttgttccctctacactccaccaaaagttgaaattcgtagtggaagggcatctggtcttcgtatcaagcgaggaagacatcttggtgagctgcccatcctctatgccttatgtggaggccgcagaggagtcattagaaaccgctttccagcctttcgaggtggtaagca

SEQ ID NO: 6831 - DNA, 471 bp, Glycine max
  unsure at all n locations
agcttagaatntaacttttgtcaccatttattcttcatataaaaaaaaatcagtaattgagtttcagttcttgatcttgacattatcatcattgttgttgttgcttgataaaaaagaatcaaaatgttttctctatagctttgtaccgagagagagacttggctggataggttagtctctaatatgactgattcaccttcttgtatctgtgttctacacataagatagggatatgggcacataagaggataagcccagcccattgcatgttaactgtcattttcaaatgagtgctacaaacatgtttggccctgcttaattgctatgttggtgaaaatgatttatttttatgtgtttcagtgattattttgtatacaaaattgcaatgatttgttttaaggcttaatgaattggcctcaacaaaaacaaatgagattaaaaaanaaatgagaattacaaaaaaatctttct

SEQ ID NO: 6832 - DNA, 486 bp, Glycine max
  unsure at all n locations
tataagaaccaaaatgcctcaatcaattccaaatatgcatgtgaattatgaagcatcaacaagaatcaagccaaggctattgagcaagcaatcaatggggcaaaacacaccaaatgattatgatgatggatggctcaaattctcacaaaggtaaactcatcactttcaaattgagctttcaaaactatcatgacatgtagaggagaatcaaggatttcaagtcacaaaatgtcaagaacttttattttcaaaacaattacccatttcttgaacatatcctataattcanagaaaaacatgcaaagtcgtacacgcacacaaaattgacccaaaatattaaactaaaaatccgacgaaactaacaacattaacaaaataacacaactaacaaattaacaaaaccaacaaaactagcaaaactgaagaacactcccccccccccccatacttaaacaacacattgtcctcaatgtagcacaaataaat

SEQ ID NO: 6833 - DNA, 365 bp, Glycine max
agctatagaatggctatttttccctccttatgttcttttccaatacttagaaagcaatattttgtaattcgtattaattatgtgcccatttttcttgaaatttactatcttgtaggggtgggcatggatttgattttcataagtccaatccagatccatttaaatggattggattttaaatccagatccatattttgtaaaaaaaacaatttggattgtttggatccatcttaaatccagttttaaaatcaaaaaccatttttgcctgaacttaatcgaggcaatttttggccgatgtcgggcgctgtactttttggtcgacattggtcagagctattttcagctgacatcagttaagatgacta

SEQ ID NO: 6834 - DNA, 434 bp, Glycine max
  unsure at all n locations
tgtgagatggtggaggcgaaaccctctgtatctctgaacattatcaccacgatgggagctaccttcatttcaacctctattctttctcttactactaaggtggaaaatagacttgtgttaatataaggcgtgtcatttcgattatttaagttgtgattgaaatgataaataattaaatacattttatttcatctcactttattatctaaaaatatacttttgttttgttttcaattacggaattctaatgtatattatttttattttttcccgctataattttattattttgatttcaattctcttacacatttaccggcatgttcattcaagtagagttagtctcatatcccttaaataatgtctcatatttgatccgtaagacatcttgaatgaaaatnttttaagcaactcatgttaaatttcttaaacac

SEQ ID NO: 6835 - DNA, 455 bp, Glycine max
agcttgtaagaatgatagatatcaaggaatgatctataaccaaagcctcacagtcattgtttcactcaagctcaagtgattaggctcattccattataaacaactaacacaagtcctaacctttgcatttcatctcataccatacagaaataaaaacacaaaatgaatccgaaggactttctaggcttgtaatgaggttaggctgccaacaaatcatggttgttctaggattcaaaagcttaggttctaggagagcatccatccatagataaaactttactttttcattcattcctaccccaatacttgctattttttaggcacttagcttacattgatttgatttgcagcacacacacttttatacattgttatttatacttacagtcttttttaacatatatatagaaatagtatgtgtatatacaagaatggtgagtggatgctatgtactt

SEQ ID NO: 6836 - DNA, 362 bp, Glycine max
  unsure at all n locations
tctagaagatgacgaggtttactccgttcttctttcattattttgtttaaaaaggagaaaaactttggtcttatcttactgaattgnggttctgcttatccttccactgtgttcgattgatcacatgatgaagcaatgcattcaggggtggatgtggaagccttccaagctgccctaaatagagatataggtanacagatgcncanacaantttataactgtttcacaaagtantaattgattaccatgggcatgtcatcgattaccaatgtctttgaatgttggatttcaaatttcaagagtcacaactcgtgataaaacatcttcatatttgtgtatttgattacacaacatctgaaatc

SEQ ID NO: 6837 - DNA, 461 bp, Glycine max
  unsure at all n locations
agctatatgctcctccaatgcctccttggttatttctatttttngattacactattttactctaatccatgtaggatgatggcttaaatcctaatccatgttgagcaaccaattcaaacttcttgtcaaattcttcactctttgtcacattgaagggaataacactgctttaaagtaatgaagaaatttcttgactagcttcctccctcaaattattgaaaatgttgttgatggtgtattgagtgctcactcctcttaccttaaaaatattgtcatgactcccacccacttattgctttgaatcctttctcaccatcttcctcattttctttgggccttggtcctccctcatctaccttaattttttcattaatctctcttgcaaggtcaagtttaccacattcgcttcctcacctcatcactgacagctttgaagctaaaacatccttctgtattcatgc

SEQ ID NO: 6838 - DNA, 400 bp, Glycine max
  unsure at all n locations
tttgaaccccaatggtcacatcatgaaatgggagcttatactctttagccttaaggtcagataagcaactaattacacttattacttctctgctattcgtctttggcncggatgttccacctagggaaaaaaaattatcttctcttgataaagacaagcaaaacttttcttcttagagacaatatatcagttacagaaaatgtcataaaaaacatacaagacattggtaatcggcacatataaggaattcttgaatttttttctcacaatataatcaatgtcattggtaaataaggactaaggacttaactgtccaacatattaaacaaatcaatgttgatgcataaatcattgatctaaagaatcaggaacaaaaaactaagtgtaagcaatcaacata

SEQ ID NO: 6839 - DNA, 409 bp, Glycine max
gtcacctgctgcatgcaagcttgaagtttgatgttggagataaatattatattctatttcctctccctttgatgttgcttggctagccatggagaggtaaccatttcttcttcctctctttgactccatttttgagtttcacatacagcatccatggaagctgataaaaaaaacataggtttcgggtttatgatcccattactggtaattcttacgtgatgcttttgtgatgagattgctattgtagtggaggaagcatatgctcggacccaaagctcattcctttatccttcttcttcacagagcgctcttcatgatcccatagaagtaagggaagttcaccctttttccttgctttatgatgagtctgggctgggtgactcgaatcatgggttgcgggtgggggatt

SEQ ID NO: 6840 - DNA, 400 bp, Glycine max
tgttcatcttgagctagtacgtcgtcatcctaatttgaagttgttggtgcaacatatttctttggcctaataggaactccaatattgatgcagcttctgatgttatgattggtttggccacaccttccacatgtaaagtcacgcaatactctctttaccctatgtcctttgacattgacttcatctgcatctctccttctatttttcttaggccttcctctctggaactttatatgtggtggaacacgttgtgcatactggtgttgggcccaatattgcggtccttggactggctgaataaaatggtgatatgtcttattataagcctctatggacagccagtcatgacacatgtcctcaggcttgcctcctttgtgacttaatactgtaatggtatgtc

SEQ ID NO: 6841 - DNA, 454 bp, Glycine max
  unsure at all n locations
agcttcaattcataagttgattntagcttatggtaaatgtgcaattcattttacaaagtgtttgtgcttggcttattcataagttaatcttaccatgcatgataatttttttattggatgatagtgtacaaaaatgtttgcgtcggcgtattctaattaaattctaaaatgaaatgggaaatttatggattgtttctattgttctgaatgtacagattcagtgccttggggctattttaaattgtgagatggatgatgatctccatgtacacatcanagacatgcatagtttaatttatgttcttgttatgggccttcaactgtcgaggtattattgtccatgtgtattggatgttgtggttagtgttaacttgccatactggtgactttcaaatgtgtttctcatgtggcgagtccttttctcccatggtgtagtgaggagattcatatggag

SEQ ID NO: 6842 - DNA, 461 bp, Glycine max
  unsure at all n locations
tcagtcatgctaaacttagtctcaggtttatatactatgtttttattcttttatataatatactaagagaatctctcaaaaaagaataataatcagttagtctgagttcagtgacaaaatcatgaatgcaaaattgccctgtcatgatcatgtcatatttagttctttccaaatttgctaatagccatcattaatcagttagtaaaactcttcattccctttcctttgatagcagctgccactgactcgccccaactcaccanaactgtcccagagaaggagctgtggtgatgctgccggcatatccccagaaatttctactcgaggacgtcgcagtgttggcaataaccacaaacatggtagccttctccctcccaaaaacagggtttggtgggtcatcagtgcaatggttagtgtgggactatgcaacggtcacattatnnaatatactnnatatatta

SEQ ID NO: 6843 - DNA, 463 bp, Glycine max
agcttggagaggatgcttcaatggtggtttagtattagagagagagaaagagagaggggggagcacgaaaatgaaggaagaaaagaggaagaaaagttgaactttgaagtttgtctcacaagactctcattcatccaagttacaacaagtgttacacatgcttctatttatagaataggtaacttccttgagaagctttcttgagaaaacttccttgagaagctagagcttagctacacacacccctctaataactaagctcacctcttgagaagattcctaaagaagctagagcttagttacacacacctctctaatagctaagctcacctccttgagatgagaagctatagcttggctgcacaccccctataataagctaagcccaccccattccaaaaatacataaaaatacacaaaaaaagtcgctactacaaagactattcaaaatgccctgaaatac

SEQ ID NO: 6844 - DNA, 465 bp, Glycine max
  unsure at all n locations
ntataagcacgggtctgggagacgaaggtcaagtggtcgcgatatacgaagatgatgttccgagtacattggatttggtacgaccatgccctcctgatttccggctgggaaattggcgagtggaggaacgccccgacatttacacagctagcttaatgtaaacctttatggttntaaaagctctatagttgggcctaggctttagagtttttcttttggttaaggctttgtgtattttgttttttaaatttataatacaaggatctttcttcatctgttcctacgcctctacccattctcantccattgcatgtttacttctttatttctgaaacgacaaatccgatgacgagtcccccgaaggtactaatacctgggacccgcctatcaacttcgagcaagaaacgaatcanacggaagatgaagggaacgangatgtgggacttcccccagaattagaaagga

SEQ ID NO: 6845 - DNA, 452 bp, Glycine max
  unsure at all n locations
agcttgtgctattgttgccaaaatttaagctgttttgngaatgccaaagttgccgatttaggaatttctccttaggattaattgtgttttcccaaatgatttgatccttcctctggttactaatagggaaaacacacaaggataagtgtaagaagaggcttcatgagcaccgaaaatcccctgaagaccttccaacccattgttctaagagattgcaatagtaaacccaaaactttagttctgtcgattccctagttcctttcccctcataatgggtggaggatttttctccaagaatttgaattcgtagaatatgattggtcatggtgacgtttctgttgtcgtccaagacatcatgggtaatgtcaaccccactcctaattgggtgtgctactccgagctgtacaccctgaaatatactaattataaatgatgttaatcgtattatatgt

SEQ ID NO: 6846 - DNA, 466 bp, Glycine max
  unsure at all n locations
tatagcttacttattatccacaaaaagcttcactccatcactttccttgattnttaattcttgtaataatgtgtccaacgagacagcttggcaagcactcattgtagctggaacatacttagcttcacatgttgataaagccactatggattgcttcttagaactccatgatattggtgttgcaccatacatgaatatgtaacctatagtactctttctgtcatctctgtctcctccccaatccgcatcagtatatcccactaattcctctgagttgttgttgtctttatttggaaatagaattccagtattgatggtcccttttatgaaccttagaatcctcttagcagttaggagatgaggaattctgggtcttttcgtatatgtacttaccagtccaatagcaaattccaaatcaggtctttgatgacacaagtacctgagagaaccaacaatatgtttgaac

SEQ ID NO: 6847 - DNA, 413 bp, Glycine max
  unsure at all n locations
tactaagcttccaaacatccaagcaaaacaacattcaaacttcacaagttatcacagccaagcaaaacagggcaaaggcagaaaactctgccaaaacaccaaccaaatcacagtttttctcacttaaagaccccagtaacaattccttcgatccaattcgttaaccgttggatcaactccaaaattntactggaagtctatagtacataagcctacattgtgaccgttgggatctactagaaaacatctagaactcattctgtactactctttccacagcctaccacacacaagcagttttctgcacaaagccaaaattctgctgcagcctatttgacagcaaaattctgcataagtgcagatttcgaanatcacactttctcttattcaatcttgcccagatcaattcctac

SEQ ID NO: 6848 - DNA, 284 bp, Glycine max
  unsure at all n locations
gagtacgacagtcatcgctttaggagcgttgtacaccagcagcgtttcgaagccatcaagggatggtcgtttctccgagagcgacgcgtccagctcagggaggacgagtatactgatttccaggaggaaatagggcgccggcggtgggcaccactggttactcccatggcccaagttgatccagaaatagtccttgagttttacgccaatgcttggccaacagaggaaggcgtgcgtgacatgagatcctgngttaggggtcagtggatcccgttcgatgctga

SEQ ID NO: 6849 - DNA, 408 bp, Glycine max
  unsure at all n locations
ctgcaatagatgccactnntactcaatttttaaatgatatgttgacaaggaaacacaagtatattcacaaggagaatattgttatggaaggaaattgcagtgctatgatacaaaaagatccttccacctaaccataaagaccctggaagtgtaaccattgcttgttcaattggtgaagccacccggggaaaggctttcattgatttgggagccagtattaacttaatgccactctccatgtgaagaacattgggagagttggagatcatgcccactagaatgactttacaacttggtgaccggctcattaccagaccatatggagtggatgaagatgtgttggttcgagtaaaacattntatcttcccagcaaactctatggtaatggatatctatgaagataatgac

SEQ ID NO: 6850 - DNA, 389 bp, Glycine max
  unsure at all n locations
agcttgagatgaggaagtgtagaagggtgaaacttccttgctttattcgttgaccatagagtggtacctggagatatgtcgcggnggtcatgagaccttggggacgtcaggtggggtgctattgcccaaaaccaagcttgaccaatcccgacccaacccgggcatagtcagtcagtgagaacctgtgatgtacctaaacaggcgagctcctggcagtacacagataaaacgaacaaagaccacaaagcanggaggcttgtgtggtggctggccaactgtgaactttgattatatgtgagatatggcctctggtaatcgattaccaagggtgggtaatcgattacaaggcttaaaaatgaagacaggaggctaagatggtctctggtaat

SEQ ID NO: 6851 - DNA, 476 bp, Glycine max
  unsure at all n locations
cggccccccggnatgactgtgactacggaccttgatactaagcttacagattatgttgtgcgaaggacaatggtttagaaaagcaaatttttatgctgttgatgatagaaagcctagggtaatggagaaaataaggaggagggagaaacccatgtgtgacagtcgttctacatgggcagatttccactagctcacaatattaatactcagnccaatatcaatccttctcatttaccaccaccttaccagccaagaacacccaatcatccacaaaagcccgcctaaatcagaacaaacccaccgctgcacatcaaagcaacacaccttatacgaccaaacaccaccaagaaggaatttctagaaaagaaacttgtagaattcaccctaactctggtggtgtatgctaacttactcccatatctactcaataatgcaatgggagccataaatcccagcaaagactccttatcctcatn

SEQ ID NO: 6852 - DNA, 436 bp, Glycine max
  unsure at all n locations
taacattctggtttgctgattgacatgtttggtaaaaaatcttgcatagagcagaaatatcaaagacanagtagtacacatgtttttgtatattggaaaaaaaataaatctgacattggctacagaaaagacaaagatagaatatataagtgagggacaattctcatcccctgagaatttttggggttgagttagtccaaactcacattctgaaagactgtaaaactgaatttttggcatttatgtacaactacaagagaaaagaattaataaaacaccttaaacaatcaatgtgagttgcagggagatctgagattcatcttgactggaagaggagactccgcatngctcttggttcccgcagaggacttgcatacttacatgagctttgcaaccctcccataantcacagagacgtgaagtcgactaatatatt

SEQ ID NO: 6853 - DNA, 369 bp, Glycine max
  unsure at all n locations
agctnttcaaagaagccacgaggaagcttcttgatgaagcctcttantgaagcttcttgaggaagctacatgagctgcctcggtaaaacgcttcccatncttagttaaacgttggctctttagggaaattggtatccagctttacaagacacttgtccacgatctgaccgttgggatcttcaagaagatgtctggagtgtgtgcgatgtttctgtgtccgagaccatttctcacttaagcgttttcagcctttgctctcgtgtagcttaggaaaaacaccatttcttcttccttctttcttcctaagccatttctaacgtcccaagcactttctccatcacccacagccaccgttagccaccacaaact

SEQ ID NO: 6854 - DNA, 433 bp, Glycine max
  unsure at all n locations
tccatcaagtggtaatcagagcacaagagcatcaagtaggtgcttcttaaaccttcattaattttttgctttaccttctcttncattggtggttcttcatttttctccatggatctcctcacatgtcttgggctaaatggttttaacatgattctttagaggtttcaccgattaaacttgctatagaagctagatttgaatttctatgggtcaaatttcttgttcttgttcttgaaccatgaattgtgttgaagttaagttcctttgagttctggcttgctattttttggggctgaaaactaaatcataaaattcttacaaaatcattaaagtagaagaaaaccttaaaaatctagagtgacttcgtcacctattgtagttttgttatagaagtcatgtctagtcatgaaacttgtcacataagatttcttat

SEQ ID NO: 6855 - DNA, 251 bp, Glycine max
  unsure at all n locations
agacttgtatgcaacattggagaggttaatgaatcaacgagatgatgcgctccatgagagggtggatcaaatggagaatagagatcataatgaagaagaaaggacgagaagagggaatgatggtgttcctagacaaaaccgaattgatggtattaaactcaacattccttcatttaaaggaaagaatgatccggaggcctacttggagtgggagatgaanatagagcatgttttctcatgcaacaactatg

SEQ ID NO: 6856 - DNA, 442 bp, Glycine max
  unsure at all n locations
tntatataagctgaaccattttatcaataaacacatgttgagttttattcagaanattagagtttatctcttttatcttagtgagagcgattctnctaaattcttgagtgattcaagaacaccttggctgtatcaaaggactttcacaacctttgtgtgttgccctcgctggaaagagtgattctttccttcctttcatcatcacccttgttctttcaaaccacaatttcagaaaatccacctctgcccagaattatctcgtgggcataacttccattttacgcactcaaattaagtgattcttgagcctaaatcgaatttcaaaacgagacctttcacctcgttctggaatcacctcatttggagccctgtagcttcagttattggcatttctatatttctgtccagccaccacttaacctaccgtttaccattccattca

SEQ ID NO: 6857 - DNA, 394 bp, Glycine max
  unsure at all n locations
agcttctttagaattgctgccagtaccatttcctaatctttcagagaagatatcagcatattcaactattcatatctattntaactttcttttgatgtcttggatgttgaagcttccacctatgtccaacaagtctgaagttacgggatgaatttgtaaatcatccatcatcacgtaagttttttcaccatatttcttctttggaaagaaaatgcccctccacatttggatagagaattttaattgagaaaagtaatttatcagaagaattgaatttctgtattggttggattntttttgtgaagaaattaaaattttggaattttaaataactaanaatctgaaatttcaattttcttctaaaatgtgagaaaatgaaattctattcttacag

SEQ ID NO: 6858 - DNA, 423 bp, Glycine max
  unsure at all n locations
gcaattaaacgaaataattttacgcacatgtcatattgagtcccgtatatatcgagacgctcgtattgaaaacgggagctcgttgcaatggcaaccgaaataacctttaactcggatgtncgatttgagtccgtaatatatcgagacgcttcaaattgaaaacagaagccttgagaaaattctaacgagaattattttttactcggatgtccgatggagttccgtaacatatcaagacnctcnaaattgaaaacggaagctcatagcaaattgaaacgaaagtaacttttaactcggatggtccgattgagtccgtaatatatcgacacgatcgtaattgaaacaaaagctcgtagcanacgcanacgacaataacattttgactcggatgtccgactggagtcccgtatatatcgagacgct

SEQ ID NO: 6859 - DNA, 312 bp, Glycine max
  unsure at all n locations
agcttgccataggagggaatgtgtttagtcattagacatntgtgtcttaagacaaatgaggacccttaattatttngattagatataaacaaatacaaaggttaaaagctgcatcttatgccctatcaaaacatgttttgcaaattctgtgtttgatgntttagacgatatcaagatgaaatcatgatctgatacaacattaaagatgaaatttaagacttcatttaatactttgtgtctgagatatattttgcaaagacattctcataggatctattgaatcctatgaagaataaatgaagtcaagttatg

SEQ ID NO: 6860 - DNA, 319 bp, Glycine max
  unsure at all n locations
tgattctgtanaanaaaacaaaactgaaaacttaatcccattctctcttcggttttcaaactctcttatatatagtcttttatttttatttttaatgtataatattatcttttgatttgttaagcttgacgaaattctcagtcattagagtgattgaatttaaatttaatgtttctaactttagagactaaaaaactgtcattcattaaagcacaaaatacgttaattacatgttaggtataagaaattatatattcttctaaaaaaaggaaattatatacaagaaattaaattccttctctgtaattgattgaagcca

SEQ ID NO: 6861 - DNA, 403 bp, Glycine max
  unsure at all n locations
agctttagaagaatatcggcttctgtttatcaactgncctacttgaatttccaagttcttgatagtagactctgtgctcttgtgattggacatagtaacctgcaagaactgaacacaagtctcttccaacttggttgttctctcataaaggctaggcgctcgtatttgaggcctgctggatgatcctacctggtctttattgaagtggttttcaggatgagacctccattgcccttgattctgattaaaattggaaccttgctggtaacctactaatcctctaacattaaatcctggccggtgctgatttcccgtataaatcacctcctttgcagcttcatcaagagatatacagcaaccagattcatgagctcttccatatatgctacatcctccaacctac

SEQ ID NO: 6862 - DNA, 394 bp, Glycine max
  unsure at all n locations
tgaccctggtaganaaatgaagataatgagcttactacgctttagctctatagcttgagctcaacctctgaataanaataaagaaaagactctagcaaaacttaagcattagagcttaagctcgagcctataattaaaagaagaaaaatcacttaccaggcttaactcgaggctcaaagaanaattaagaaaataggcttaagattgacccttgaagaaaaatgaagaanagactccgacaaaacctaagctttggagattaaactcgaccacacaagaatgaagaanatgaacttacaaggcttaagctttacaacttaagcttgaacttgaaagaaacatgaagaacagactntaacaaggcttaagctctatagcctaaagttgatccttg

SEQ ID NO: 6863 - DNA, 403 bp, Glycine max
  unsure at all n locations
agctttatataagctgaaccatnttatcaatatagacaagttgagttttattcagaaaattagagtttatctcttttatcttagtgagagtgattctcgtaagttcttgagtaattcaagaacaccctggctgtatcaaaggactttcacaacctttgtgtgttgccctcgccggaaagagtgattttttccttcctttcatcttcaaccttgttctttaaaaccacaattccagaaatccacttctgcccagaattatcttgatgaggacatgttcaagagcaagggcaaggatccacttgaaggacttggaggacctatgacaagggctagagcaaggaaagccaaggaagctcttcaacaagtgttgtccatactatttgaatacatgcccacgtttcaa

SEQ ID NO: 6864 - DNA, 314 bp, Glycine max
tatcgagcgtttcgatatattacatgactgtatcagacatccgagttaaacgctgctgtcgtttgaatttgcttagagctctggtattccatttcgagcgcctcgttatattacgggactcaatcagacactcgagtaaaaagctactgccgcttgaatttgctcagagctttcataataaatttcgagtgtctccatatattacgcgactcagtcagacaaccgagtaaaaagttatggtcgtttgaatttgctcaaagcttccgcattcaatctcgagcgcctccacatattacgggactcaatcacacatc

SEQ ID NO: 6865 - DNA, 328 bp, Glycine max
  unsure at all n locations
gggggggttgaattaaagatattccaaacttttctcctaataaaaatctatcttacttttacttaagtatgaatccctttatgacagtcttcttanatattaattcaaatgaagcaacttgaatatgaatataaagcaataataaataaaggagattaagggaagagaaaatgcaaacttcagtttatactggttcggccacacccttgtgcctacgtccagtccccaagcaacccgcttgagagttccactaacttgtaaatttcttttacaagttctaaacacacaaggacaacccttcctttgtgtttagagattctttacaaca

SEQ ID NO: 6866 - DNA, 263 bp, Glycine max
  unsure at all n locations
caatttaatttttcttaccagatgaacaattaagtgaaccatgatgtgaataaatgaacgaagaaaatacatctctaactgacacaagataatagcagccttccatcatatgagttgtctncacgtgtcatcggactcgattgtctttggatgacaaggtgagactaaagtagtctcggttgatagacattgagtcttcgacgaaaagaacagatgaccatatttgtctctgcgtgtcatcggacttgtcgtctctagatgac

SEQ ID NO: 6867 - DNA, 439 bp, Glycine max
  unsure at all n locations
agcttcggtgggctgccaaattcctcanaaccttttgttctcgaaatgaacactttaggggtcgacatgggcgccgtccttgtccaatatggacatccaatagccttctttagcaagacgttctgtctgaaactccaaaactcgtcgacctacattagggagctcgttgccattaccacgacagtcaaaaagtggtgccattacttattgggccatcacttcacgattctaacggatcatagaagtcttaaagagctaatgactcaggttgttcaaacacctgaacaacagatgtatttagctcgtctattgnngtacaactattcaatccagtatcggtcaggcaagaccaacactgccgctgacgccctatccagaatcacggaactagtagcgggacaatntctaatgctaacaataccctaacctttgttttttt

SEQ ID NO: 6868 - DNA, 453 bp, Glycine max
  unsure at all n locations
tgaagaactacaaagttcacttgaagcacatgagcaaagattaagagaaaggaatcctgagaagcacaatgatcaagccttacaagcccaaacaagcagaaaatttgacaagcaaggagacaaatccaaaaataaaaaaggaaagtggcatgatgagaagtggagaaagactgaagattcaaaatgtggtgattctggatcatcttcacagaaagctgtgtcaaatccaagaagccaattctcacggaaaaagaaatgggtcgacaagaagaaggtgcagtgttacaactgcaggaactttggccattntgcagctgattgtagattcagtagaggatttcaagtgaaaggtgaagaagcaaggttggcacaagaggagaatctagaagatgatcattatctgctgatggttaccaccaaaaatgatcttcagtgtgctaacttctggtacct

SEQ ID NO: 6869 - DNA, 328 bp, Glycine max
  unsure at all n locations
agctntaacctcatcgtccctcacagtctttagtattgggagccaatccaatccttgtgttcggactctcagccacttatgatagctgctgatgatcctattactgcttcccctaagctctntgtcctttcttcacgccgcatcccatgccttgcgaactccttggagtaccctcgcgttgtggtcactaaaaccccgtgcgatgaaaggcgtgatgctttcgtctaatggcgctcctctcatggngtagccaagctggtgcacaacaaacaattcttgcgccgctcttttcacatccccggtcgaacgtgtcatacatggccaaaat

SEQ ID NO: 6870 - DNA, 388 bp, Glycine max
  unsure at all n locations
agcaacacanaatctaggtatccaaaacccttatattaatggatnntcaatggttgagaaagtgaaattgagaaatgggataaatttgagcaaactctcacctcacacaagtctattacatcaatttaaacttgttcaaactggattttacgcctaaaattcaccgaatcaaaatttgactcccaacacccaaatttaccctagaaatggctctttgttcactttggtcatttgtttttctctctagcacagcccaaactttctcataagtcctaaatggcatttcaagctaggattaactcactctaacctccaaataccactaaatccagatttggccttccaactctcaaagtctcactcttttttcacttacaacaccatactc

SEQ ID NO: 6871 - DNA, 429 bp, Glycine max
  unsure at all n locations
agcttcgcacgtaagatcatcgcgtcagagaacttaaccatttataaaagaatggtgaanaatatatntgtaaacttatcgaatcaataaatgctatggagggtacctattttttatgattctgtagatcatgatcttgctcatgattatattttaaatgctttaagaatgaattctgattctattctttatccagaggtaattagttctctggttggtttatcacanagaaaaaataagaaatcagaattataactttcaaaatagcataatagactccttatagagtataaagatatataatcggaaataatattgggcataacctttttttcgcatgtctcttttatgttggcaattacatcattagaaatcattaattattaattcaatacaagatcatatttcatgtgtctctattatataaag

SEQ ID NO: 6872 - DNA, 302 bp, Glycine max
  unsure at all n locations
cttcactagagagatatgagaattggtgtgtctttttcttctgcttcctactccttttataggtctaaggtagcttatttttcatgttgacttcgcactaaacgcgcactcctgggcttaacgagaatggcggtttaatcacgtgctcaagacagtgtgcgcactaagcgcagccttgggcgttctcgtgggccttcttcgtgctaagctggtcgctaagcgagcacgcacgttgggcctgtctcgtgcgctaaaagagctgttcatntattttaacttttcttcaaggctttttcttttag

SEQ ID NO: 6873 - DNA, 189 bp, Glycine max
  unsure at all n locations
cgagtatgaaatgagtgaacgccatatatcttgcatatacattgcttgtatctttgattcaaaaattaaattgtcatcatacaaaagggggagattgtagaaacaagactttgcctttgatgtttgatgatgcatatgatcatgatgtttgatgccttataanatgccttctcaagntaattcaagaca

SEQ ID NO: 6874 - DNA, 461 bp, Glycine max
  unsure at all n locations
ctaagcttgatgcaccttataacatattgtttgattgcaattttgactgcatctttactatcaaattccatgccaacatataattcttggccaacattaaagttcgacggcatctccaaaccgcaaatgtccttctcatcaggataagtccagttgatattgttataatgtgaggcatcattccaaaatggattttcaattcgttgtgcacctaacagttcaaaataagataaaaaatccaataatacttatttagcattaaatacaattgtcatcaaataataaatgtattgtctaattnttttatacaacacattataccttctgctgggtgaacaattcttactggttganngaatgtggtgacttcatcgtctgtgtcagatatatcgtcaacactgtcatcttcgtctaaagactcttcaacatatgagttagacacaagaatatcatcatcatca

SEQ ID NO: 6875 - DNA, 95 bp, Glycine max
agcttggagagaagtgagatagtgttcgtctattacatgccatacgccgttgaggaacagagggatcgcaagatatcttgcgtgtacattgctag

SEQ ID NO: 6876 - DNA, 442 bp, Glycine max
  unsure at all n locations
agctgttagcattgaatttgtgctaccagcctatcactattcactataataaagtgtggtttaatctatagaatagatgttagatatagacaataatttaattatgactgacctgngtgtttttttggcagctaatcgaaaaagtactccctattgtgaagaagcaaaagccaccatgtatactccgtagggctcattccttgcaatggtagatcaaaattgctaggggtgcaagataggaattgaatattaaccacatctattgtgggacatgagcatattaatcatcatctcttaaaaatcatagttctcagcctaatggttactcctaccatgacaagctagtcacaattctcaaattattcattcattttttcaaaaactaaacctacgtagtttaaagtgtctactcgctcccctagccttaagaaacaatcctcat

SEQ ID NO: 6877 - DNA, 381 bp, Glycine max
  unsure at all n locations
agctgaccgctaaacgaggcgtcatgctggactttgtttgcacgctaaacgagatgcaattgncctccgaattcttgcatcaaattttgcattaatttaacttccaaacacttgcaatttcccttcttttgaatcctgttggtccagaattaaaatgatatcaaaatcctcattattctcttaaaaataaatagtaaagtcgaggaaatctagtcattcttgtttgattcgactatcaattaaacctaaatttcacagatatcatgatgaagttagagattctaatgagttagatactcgagatggaagtgacgatgaaagtaatccacaagtcaaatttctcgatttaacgtgtctgaaaatgatgaagatgtaagtttg

SEQ ID NO: 6878 - DNA, 406 bp, Glycine max
  unsure at all n locations
agcttcacaaacacccacgggacctttcattttgcagcatcttcaagctttttctgcacatttgcctcaattattttttcattccctacatcccattcaagtaagtgccatctccatctaattntacctttgccttgagatgtttggtgctttgtttgttgttatctttgtaatgtttgtgagatgagttgtgtgtaaacccatggtccaatgctttgattggtggctgtactagatggctctaggcctatctttgtttttttttttacagatttgcatgtcatgttgctccttatccctcatatatacatgcattaacatatgcacaccaactatntgatgaaataacacaattgctattctacgtgnntatttgatgcttgaaatgggtaatgatattacacat

SEQ ID NO: 6879 - DNA, 460 bp, Glycine max
  unsure at all n locations
ntctcccaagtcctanatgacatttcaagctagtattaactcactntaacctncatttaccacagaattcagacttaaccttncaaccctcaaagcctcactctttttccactcataacatcacattctcactttctaaccctaggttagttctacccttcatctctaacagttttccatcagcaatttcagcatataaacatcacaaacatcatcacaaaaaccctaaaacagaatgggtatgtttaactcatccaaacatggcaatttcaacaagctttcaacaagagtcttcacaaataactaccatgaagcagaaaactaacaaaactacccatcatatctnccaaaaccccatacccacgaaaatcaaaagagaaagaagtcacccacacctgaaaattcgaagtcccactcgtagacacgcacttcaagacttcgaaaatggctctctttcgcg

SEQ ID NO: 6880 - DNA, 444 bp, Glycine max
  unsure at all n locations
agcttaagggattgtttttccttttaatctatttatattaaacaaactactataagaattaagaaagatctgttntggaactttcccatataataaataatgcaaataacaccgccttcgatctatggaagctactccaattcccaacatatgaatacaaaaactaaagttacctcggccatggtgacgcacattttctgtctccattccaaatcttccatcaccatctctggacaattttcattttccactttcattttcaacacgcaaaagtaataccaattaatcttcttgttcttggtctcgagcattagtagtacctggaaccttctctgtcgtctaatatcatatttattcgattctagctttctagtactcttctcaatcaaccacgcactataagggtttctcttgataatttctgctgcttaatctcaatcatat

SEQ ID NO: 6881 - DNA, 222 bp, Glycine max
actctagcatgcactaaattggtgtggatgtctttattattcacgctggactaaagccaaactatgtggatgggtataagtattgaattcaccaatttcaaactttaatcatattgactcataaacactcctaattcttaggacttttttaactttattttggctttctttatacgaaaaaaaaatgctaacacataataacactatgtaacattttatttt

SEQ ID NO: 6882 - DNA, 372 bp, Glycine max
  unsure at all n locations
agcttctagaaatagatgtgtgtgtgtgggtgttattcagncccccanaacataccacaaacatactaggaagggactcagcactcacctgctggtgtgtcgcattaattatattgatcagttttggacggaatatggcaacattgatggtttctagtatgaaaataagactaaacagaacccatgctcgctctggagtacccgcaatgtgatgcatacaagtctgcacaactgaagccactttctaagcccatgtatcctcaattcttcacataatgaaatttgattaggcatggcattgcaacactggcgttatcagtatttcattatatctctatctgcatcatgctactcctttgaacaatgccagat

SEQ ID NO: 6883 - DNA, 376 bp, Glycine max
  unsure at all n locations
tcctagcgtacctctgattgctcaangacttgcgatccatttcttcggtgtatgtgtggtgccagggaggtggttttgggtttcttgatgccattttcgggactttttaagactggttgtatgcaattgctttctgcacctctttnttcctattgcagtccttagaagacaattcttatgcgcacttcattgcggctgtgacaattcacaccgtaccttattggtggcataagagccttacatgcaatctgccttgttatcttaaaaaatggcattcgcaaatttgattcaatcgcaatccaagatccgatgaaagggtattattaaactactataaaattttccctcaccagaagaatgattttaatgattcgat

SEQ ID NO: 6884 - DNA, 310 bp, Glycine max
  unsure at all n locations
agcttgggtgatgttgcgcgtactgatgggtaccatgaggtgtttgctgaggtttaacccatgcgggtgttgaagagacggcatgggcatctccttccttcctttntgcccctgttgccccgattcttttggcgttcacgtttgtggaggaaacgtaatcaaacttttctctcttcaatccaacctcgattctttccccggcaaacaccaaattcgcaaagctggacggcatgtaacccactatcttctcatagtacaacactggcagagtgtccaccatcatggtgacattctcttcttaaccatggga

SEQ ID NO: 6885 - DNA, 384 bp, Glycine max
  unsure at all n locations
ttctccccattntcctataaataggggaagaggtgaagggataaaatgttcagccctcctggtaattcgagaatcacttgaaattagtgaaaaaaattgtttccgtgaagaaaatccaagccgaggcgcttccgtaacatttccataacgtttccgtgggtgatttcgcgaagattttcaaccgttcctcaacgttcttcgttcgttcttcatcgttcttcggtcttcaaccggtaagtacccaaaatcgaacttttcaattcattntatgtacccttagtggtcctcatttgttttcacatgcttttatcttcatttcatttactttncgtatccccttttgacgtgctttagtcattttcttaagtcattctctcgcctaat

SEQ ID NO: 6886 - DNA, 474 bp, Glycine max
  unsure at all n locations
gtcttaagcactgagctgcagctataagaattggtcataaaatttaagtcctaatatgctgataanaacacnctttaatctttctttccttcctcaccgtntccttaacttgatgcctncattatttctttctcttgcatcgacgaagaccagtaccaaccatatgttaaataatggtagcatgtcggatgagtataaaatatatataatatcacatgatgtnctctaattaaaaattagacattgaatcattatactntcctctctctntctttntcaatgccccaccaattttttgctataaatacccaagaaatcatcccgttttctcacagacttcctttgctcanagccaaaccaaatnttctctctttcacttagttattgactccccaaaagcttttcanatatctctggtcctctctcacgtaccttctccctatctttcactccacttcttaacaccacaaaaca

SEQ ID NO: 6887 - DNA, 492 bp, Glycine max
  unsure at all n locations
cacgtttgaaccgtcacncnctganncccttgaataacgcgcactatgatactaagctctctaaatctacgnggtatttattgacttcatcgggttttgtatcccttgaatgggtgagatatatatgccttgtagaaacaccctggtatggaacatnctattatttttttcttgtgctgggggaatcatatagactatataaaattcgcccttttagaagatggaatatggaattttttttttttaatgggagaggaaataaatttgaaactttgtattaatattcttcaagtaaaaaattaaaaaaatattattgtggaaaacaagatttaaaaaactaccaaaataaattccttctaattgtggtcatcaaagtcaatagatgctttccgtgattgccgtcaagactaaatggagctgagtgactcaatagatgaccactcttggtatccccctttccacccaactcttctttcttaatgatacaaatcn

SEQ ID NO: 6888 - DNA, 466 bp, Glycine max
  unsure at all n locations
agctntgcttctacaatatccnncttttntgatgatgacagcttctggaatcaagaaacacacacacacactttntcctagtcgatctctcacataaaattccattcttccccttttggttntgaaatntatgctttctcttaaaattaaagtgattactcatgtgagttcttgatttaatccctatttctcttccnctttggtatcaacaaaaagccaaagtgcataacaattttgaagcattcaaatataactaagcatccatacaacattcatggaaaaatatcaaccaaatcatgaagcaagaaccatgaagcaacaatcatgaatagattaattataaaatccacatagtcaaataacatactntaatattgttcaaacaccatgcanataaagaaatagggaaatgttcanatatcataataatatagattatttggataagtcactgacatctattagt

SEQ ID NO: 6889 - DNA, 448 bp, Glycine max
  unsure at all n locations
ctccaaagttntctggttnttctaaaccttgaaaacttgtgctanttcattttttcatctcttctcctttgccaaaagaattcgccaaggactaaccgcctgaattctttntgtgtctctcttcttccttttccaaaagaacaaaggactaaccacctgaattcttttgtgtctcccttctcccttgtcaaagaattcaaaacgacacagtctaagaattcttttgattcttccctttcccttatacaaaagttttcaaaggactacccgcctgaaaattcttttgtatccccattcacaaagtatcaaaggtttaatcgcctgagatctttgtcttaacacattggagggtacatcctttgtggtacaagtagagggtacatctacttgcgttggtgattgagaacaagagagggtacatctcttgtggatcagttctagtggaggg

SEQ ID NO: 6890 - DNA, 341 bp, Glycine max
  unsure at all n locations
agcttagacccttatagctatgatgcagaagaaatgaagaaagtgataggcattgctttgctgtgcactcaagcattggctgcaatgaggccaaacatgtctgaagtagtagtcctacttagtagcaatgacttacttgagcatatgagaccttccatgcctatcattattgagtcgaatttaaggccccaaagagatatctcttcttcaactgcttcctctacgactaatgcaactatctccaattcaatagtacccgctcgatgattaaatatatgatgtaaaantnnatttttttgtccagttcattattaaggatgattattggtaaatcttactta

SEQ ID NO: 6891 - DNA, 330 bp, Glycine max
tactaagcttatgatgaatcaagaatgattctacgagtcttgatgataacttagatgatgacaaaaagctcaaaagtcaagatcacttcatgataacaaagatgatgacattcaagaatgagttcaagtttgagttcaagattgagtcaagaacacttcaaggatcaagagtcaatttgatttctagaatcaagattcaagaatgaaaaataatcaagatcaagattcaagactctaagattcaagaatcaagataagtattaagaagtttttcaaaacattgagtagtacaagaagtcttcacaaaatcattaccacagagttttactc

SEQ ID NO: 6892 - DNA, 332 bp, Glycine max
ctataaattctaatatcttcataccctacttttaacacacgatacatagaaacaaagtgcaggtgaatcacaaatttcgtcttcaaactattactctctccgctaaataaatgctaaagtaataacactattcaaggaatccctagagtattgaatattcatcaattgagtccctacgtggatgtattggtttactgtttaaggaatattgtgaggggtattctaatattaaagggaaaactttgtctaatttctaataattatacgactacttaagtagttcgttttactataaggatattttacttaaggtgtgggcaatcttcatcata

SEQ ID NO: 6893 - DNA, 375 bp, Glycine max
  unsure at all n locations
ctaagctattatctggggtacaactagatacgatacatggttttaatttacgactttattataactacggttacactcagggtctactttgagcccttatccttttaccttgatgttggatatgcttattaaacatatcccacagctagagctacaatgtgcgctttntacaaatggtatagctttagtgtgccagtggagatcgattattcgtacgattaccgtaaaaagatttggaagcacattacttctgattatgtatgaacaaaatgaagcatgtctaatggcagttcatgaagaccaacactattgccactgtatacgtgaacattgaaaatcacacccttccactggtctcaacacgtcttggatcta

SEQ ID NO: 6894 - DNA, 193 bp, Glycine max
tattacacaacgtggcggacaaaagtgggcagtttacttgaacggtcattattgtccatgcggaaggtattctgcgcttcactatccatgttcacatattattgcaacttgtggttacgtgagcctgtactactaccaatatatagatgtcgctatacaaatgagcacatcttacaagcttactccgcacaat

SEQ ID NO: 6895 - DNA, 349 bp, Glycine max
ctaagcttctaaagaggttagcttagttattagagacgcgcgcgtagtttagctctagcttctcaaggaagcttcttaaagaagcttctcaaggaaggttctcaagaaagcttttcaccgaagctacctacgctataaatagaagcatgtgtaacactttttgtacctttgatgaatgaaagtgttatgagacacacttcagagttccacttttctccctcttttattccttcaatttcatgctcccaccttctctctttcttttcctgcattaaagcatcctcttcaagcttcttatacaacgcacattcttggtggtgaagatcgctcttccataggctattcccta

SEQ ID NO: 6896 - DNA, 426 bp, Glycine max
  unsure at all n locations
ctaagctntctcgcggcttctttgagaagctttctcgagcagcttctatgagaagctaacgttctaactactaacacccttgttaataactaaacccacctccttgaaaataattacggataaaaataacacaacaaatataatcaaacatcaagcataattactaaatatatatagatatatatatatcagggtgttacactaagcgcgagatcagtgtgctaagtgcagtanttgtcttcaaccaggctcagcacacgactagtgctaagctcaaatccactcactcgcgctaagcgcgagggtggcgctaagcgcaacatcgtgaattcaaagcctatttaaagtctgtcttgtgaaaattacggtacaagttttataataaccagtgcacaaaattccacagcacaccacaatgcctatttc

SEQ ID NO: 6897 - DNA, 374 bp, Glycine max
ttacaacgtagtgactgggaaaaccctggcgttacccaaaataatagccttgcacgacattctcctatcgcgcgctgggcgtatatcgaatatgcccgcaccgatcgttcttctcaacagttgcgcaacctgaatggcgaatggcgcctgatgcggtattttctgcttacgcatctgtgcggtatttcacaccgcatatggtgcactctcagtacaatctgctctgatgccgaatagttaagccatcctcgacacccggcaacacctgctgatgcgaatcccttgagacaccaataacatcttgtgtcatatcgccaatttactgactcttctcttataaactcactctctccttagaccacgtcctgccctcg

SEQ ID NO: 6898 - DNA, 465 bp, Glycine max
  unsure at all n locations
agctngaggactatacctncgaccgtacaccgttgtggttctatctcggcctaagtttattgtgggctgtagcaccgggtccgcttacctagctgtattggaggcgcgcgccgtggcattatactctatagatctctgaagctctagcatggccttcgtgatagaagccatttgatctttaaaggtcgataggtcggccttcatctgttcttgcactccctcttcattatccattattctggatcgagtgttataggggtgcctctgcactttcttagttattgtgagttccctaaagaaacaaacaatggtgagtatgccaccaaaacatgaatatgctaatgaatgatcggaccacttggatccacctcaagattttagataacgtgatgagttcagaacttctcgtttataaaaggaacaagctttatctaccaagacatacaaagtgtacacagacctaca

SEQ ID NO: 6899 - DNA, 316 bp, Glycine max
  unsure at all n locations
gtctaggatctcaaattaagtcttggaagcaataaagatcaattgccattcaacatggaagggtttgtaacacaaaacatacatcagaatactaaaaaattattaaattcttactcgttactttttttgaaaagagaaacctaagcatacaaaaagcacatcatcctacccactangtgtggcttttgtgaatgagctaccggttaccacttagaactctctgtcctactttagacaccaaaataaaaatgtattatgtatagcccctctatacttaacacaaataccacaccacgactaaggttagtgtctggtc

SEQ ID NO: 6900 - DNA, 286 bp, Glycine max
agcttccacgtctaatatggaatttattttcttttttagtacgaaaaatatctataatgaatagagtaatatgttttaacactacatgtgtaatttggagcaaagcatcatgtgtatgaatctagaaaagaagagaatgtggatttcaattaccaacgcttgaaaatgaatcagataacccatgtcgtggacgcctgactctaaaaccgatcttccctttcagctatttgtttctttctaactttggacgccattgatgccatataatcttcttatgcagcaaaaa

SEQ ID NO: 6901 - DNA, 154 bp, Glycine max
tcttcttcttctaatgaccgcttctctttcttcactttcggttatggtaacaactaaagtgcaacactcaggtatcgccatcgtttaatctcacagagcctgcaagagtgaagttagataactatgatgatctagtcttggagctgaatgagcg

SEQ ID NO: 6902 - DNA, 459 bp, Glycine max
  unsure at all n locations
agcttcccaaccaatcttcgatatctttcaggatcagaataaggctccccatgattgggtagcaatttttgatttggatccataggagtatcaattggtctacaatctgacataccagtttctttaagtatgtctaacgcatacttccttagtctaaaaatgactaaataaatgttcttttagttgagcaatttttccttggtcatttcttatgatgactatatcatctatatagaccaccaagtaaaaacatctactcgatgaggtatgacaataaaaaactgaatggtctgcttcacttcgttttatcccaaaagcctgaacaactgagctgaattttccaaaccaagcacgtggggattgtttgagtccataaagagacctncaaaatttgcaaaccaagctagacttcctctgagcaacaaatcccggtggttgctcatataaatctctattcta

SEQ ID NO: 6903 - DNA, 443 bp, Glycine max
  unsure at all n locations
ctagcttctcaaggaagttntctcaatgaagcttctcaaggaagtttcctcaagaaagcttctcaaggaagctacctagtctataaatagaagcatgtgtaacacttggtggaactttgatgaatgagagtcttgtgagacatacttcaaagttccacttctttccctcttttattccttcaatttcgtgcttccccctctctctctctctccctctttcttttcctccattgaagcatcctttcaagcttcttatccaaggctcatcttggtggtgaagatccttcttccatggcttattccctagtggatggcgccttctctcacctcttctcctttgtcttccgctgcatctccatggtggaacatcaccattaacgaacctcattgaagctcacagatccagcctccatagaagcaccacaagcaagcttccgtcacat

SEQ ID NO: 6904 - DNA, 470 bp, Glycine max
  unsure at all n locations
agcttccttaatcacctcattaaggactagaacaccatgtaggatgtgtctgttntttatgaaagttgtctgcctctcatcaataagaccagatatcacttgtctcaatctatntgctaataacttagctatcaccttgtacatacatccaatcaaggagatgggtctgtagtcatcaaatgactggggatgtttaattttgggaatgagagctatgaaggaagcattactgcctctagggaaactgccatgtacatggaattcatcaacaaatcttctgaagtcagctttcagcatatcccanaattctttaatgaatttgaagttgaaaccatcangtccaggacatttgtccncatcacaactccatactgcttctntgatctccaaatctgaaaaaggaacaaccaaagactccctctgctcctgggttagtgaagagaaatgcactccatcaagagtgggtctac

SEQ ID NO: 6905 - DNA, 456 bp, Glycine max
  unsure at all n locations
tangctaaattangctaaactttcataagctgcttgagctgagtctagtcttacaagagggatctgtggacgaaatatagtttaagttaatctaaacctaagaaggttgtcttaattgggcatagtcgaacaaaaaggatctgaggacgaaacttggattgatttggtctaatgagggatcgagggttaataatttacgctacaacataaaacacaagagcatgattgattagagaaatatatttatatgcatcagcttgcttgttagaaagacccaacatttctacctactgttataacttttacttaccttgcattntatagtttttaacataaaggtttagtttaaattctgtttgaaattttcaatcatacatgttctcttaacaatgctttatttctanacttaactcacgctaacattagttccctgtgttcgatactcggattcattcg

SEQ ID NO: 6906 - DNA, 319 bp, Glycine max
aaatttccttttatgaatgatgctctcctacaacctaagacaaggtagaaggagataaactgtacaagctcaaggtttaatcaaacaatcatactttcagctcacaatgggtgcaagggataaaccaatcatgccccaggtaagctttctagctaagtggctatcttcaatcaaaacatgggcttcatcctcttcaaactcatgtgtattcattccatactcagagatttatgtaaaagccattacttactgctagtcgttctctcacaattaaagatcacactctcactgggttgcggctaatgcattccttcacaat

SEQ ID NO: 6907 - DNA, 299 bp, Glycine max
tcttactttattgacacgctctctttgagggctatacatctataattctttaaatggcttggttatgaaagctaggagtcacttactgacaaaacaatacttgaatgttcttacgttcaaggggaagctaagggttgtgttagtagtgacctaaagaattcttgtcagacaggagagggtatggtagaatatttaattgaatcacatcattgattagtggaaccatttactattttattaacgagaactacacatacgctagattgagtgaaataatataaactaagcgcttctactac

SEQ ID NO: 6908 - DNA, 363 bp, Glycine max
tgatcaaaacaaacatctaatcattccagtccactcaattcatacattctctcattcaagtcattcacaaacacttcattcataagaaatcacaccactgaatatcataattaataagttcactgttcaaacatgcttttgtacaagctatcaacactcaaacaaccaaaatttaaaagactaaaatttaaagactaataaagcataaacaaataattgacatgaactacataattgataaaagaaactattcataatttgcaaaattttaaaaactatgtagaatttaaaactcatgatcatcctactgctgatcttctgcatgctcgttcagatccagcattggagcagctggtggatcct

SEQ ID NO: 6909 - DNA, 299 bp, Glycine max
  unsure at all n locations
gcttgcnaagctcacataaatgagaaaagaatcataaaacgtaccttgcgttgatgtcggactccaacggaggatgctccacctcgcggcagtcacgaaccccaatggcagtcgtgaaccccagcaacaacgatggtgaggaggagatggtggtgacaggtcgcaaaaggcagtcacaggtagcataaaacgatgataggtcttgcgggtganagggagaagaggaaggcttcgtttgcaatactgagcgcgcgggagaaaaagtggttttgggttttaatttatgtataacacaacat

SEQ ID NO: 6910 - DNA, 443 bp, Glycine max
  unsure at all n locations
tatacaagtggattcaaactttctaacttgtttttctttttttaaaaatcaaacaggtcccttaagaacaaagcttaaccaagttttcaagttatacttctattggatctattaagcacataaaatgaatgaccaagaaagtcaaattacttggttttgcatctgcaaccatcgcggtccataataatcatattgttgtccatagcccgtatgtgctcaaggcaattacagaacacaacattgataattcaaccaacatttctgtacaaaagcaatntgaattggtacaaaagcaaggcaatatctaaacctacctctctgggcacaatattaacaaaatcaattcaccactataatattcatcaacatcaacatanagggtacacaataaaaaagaataagcacatgcacaattataatgacttgacaattacccgcggagc

SEQ ID NO: 6911 - DNA, 409 bp, Glycine max
  unsure at all n locations
agcttgttgcattntagtgaaagaacaccgagtactatttagtctcacaaatgcaagaactacgtaggtctgagttcctcatcacaaattgaggatacgtaggagcaaaagccccgcttttgtcgaccacctcgccttttgctatcgtgacctgtgagtccggtggcacgcggaaacacccgatggttatccgcgcacactntttgctatcccatgacctatgagtccggtggcacgcggagacacccgatggttatccgcgcacactctttgctatccaatgacccaagggtccggtagcatgcagagataccttcgggttatccgcacctttcgccagctagaggcaagcgagcccgttgacatgcagagatcaacgtggtcatctgcacctttcctggagatgtca

SEQ ID NO: 6912 - DNA, 458 bp, Glycine max
  unsure at all n locations
tggagaggatgcttaatggaggaaaagaaagacggagagaattagagaggggggagcacgaaattgaaggaataaaagaggtagagaagtggaactttgaagtatgtctcacaagactctcattcatcaaagttacaataagtgttacacatgcttctatttatagactaggtagcttccttgagaagctttcttgagaaaacttccttgagaagctttcttgagaaaactttcttgagaagcttctttgagaaaacttncttgagaagctagagcttatctacacatacccctctcataactaagctcaccttcttgagaagcttccttaagaagattccttgaaattctgatactggggacagatgtcgtacacgatgtcacgacatcacgctttagaacatgcagattatatttgacagtgtggtccgtttaaacaaatagataacacaagagaa

SEQ ID NO: 6913 - DNA, 442 bp, Glycine max
  unsure at all n locations
agcttctccncaattntctataaatagggggagaagtgaagtgaaaaagggttcagccccttaggcacttctctctctttcgaacttgcttggaaaaattgtttccgtgaagaanatctaagccgaggcggttccgtaacgtttccgtgaggaatttcgcaaaggtttcgaccgttcttcgacgttcttcattcgttcttcatcattcttcgatcttcaacgggtaagtacctcgaaccaagttnttcgattcattctatgtacccgtggtggtccacattatgtttcgtgtatttttattctcgtttcatttacattttatacccccttttgacgtgcttaagccattttatttaagtcatttctcgcttaacctaagaataaaataaatttccaccgatcgtttgaattgattatcccgtaacttcggttaaatgaattc

SEQ ID NO: 6914 - DNA, 389 bp, Glycine max
ctaagcttcttggaaacttcttgagaagcttctttagaaaactttcttgagaagctagagcttagttacgcatacccctctaataactaagctcacctccttgagaagcttccttgagaagattcctaaagaacgtagagcttagctacacacacctctctaatagctaagctcaccttcttgagatgagaagctagaacttagttacacaccccctataatagctaagctcacccccattccaaaatacatgaaaatactaaaaaaagtccctactacaaagactactcaaaatgccctgataggctaaaaccctatactactagaatggccaaaataccacgcccacaagaggaaaaacttattctaatatttacaaagctaaaata

SEQ ID NO: 6915 - DNA, 272 bp, Glycine max
  unsure at all n locations
ctcgacgacatcactattaacccacagatagaagatgccacaataatgttattgttggtgtagattcgcatcttcttttagtgcatgacaccgaggcatgcacttctcgacggtcctcaacaatggcgatgttgctgcaattatgtagatctactcttttcgaactgttgttttanggaggatgagaggtgaacgtggagcaatcattgagtgaggggcacatgaataaacaatgtataccacaactagggatttctaaagggtgaaactga

SEQ ID NO: 6916 - DNA, 379 bp, Glycine max
ctaagcttgtaataagaatacatagaatcgtatattaatgagataaaaaatatatttaaaccctcgatatgtgtgataatgacttttttcttacttttacgctaattatactacttttacatttaattatgtaaataataaccatcactcacctatatagttgttttcaagataaaagactaaatcttagacattttgatcattcgcctattgtgatttcagataaaagtctatgatgagtgacataaagtaagtgaaaaagaaggtgtaaagaaaaaaacctcgcgagaaatgcaacatttaactgtatatgcagcctaaggatacatccacgctctcttattacaaatatcatttgataacttcttattatacacac

SEQ ID NO: 6917 - DNA, 354 bp, Glycine max
  unsure at all n locations
agcttatgctgcanacatctacaatagacctnctcaacctcagcagcaaaatcaaccacagcaaaacaattatgacctcttcaacaacagatacaatcccggatggaggaatcaccctaatctcagatggtctagccctcaacaacaacaacaacagcctgctccttccttcaaaatgttgctggtccaagtagaccatacgttcctncttcagtgcaacaacaacaacagcaacagcaacatcaatagagacaacaatccactactaaggcccctcctcaaccttcattggaagaattagtgaggcaaatgacaatacagaacatgcagtttcagcaggagacaacctcaatt

SEQ ID NO: 6918 - DNA, 412 bp, Glycine max
  unsure at all n locations
tttggtacanaagaagaagaagaagaacttcanagagatttcaattgcttgttaaggattgattggaaaagcaaaagtattcaagattgttgctagaaagattgattgaaaatgcaaaacaaagccttgattttatagactcttcatgtctggtcaagaaggccattcagaagagttataactttttagaaaaacttaaaacccatttgaaaaagtcaaaacctttttgaagagttacatcttttgattnttcagaaacagtcactggtaatcgattaccaaataagtgtaatcgattacacaaagcttttgagtgaaaggatgtgactcttcacatttaaattttaatttcaacgttcaaggtgtcgcaacctacccttcggcgggagggcgacgcgtgactcgcgggatg

SEQ ID NO: 6919 - DNA, 417 bp, Glycine max
ttgattctagttgacagcatgatgcctatgcattatatttcgtgtataatataagggaaaaaatatttctctgtcgtgctttggtacaacttcatttggccatatatctggttacatggtttatcacttgctttgaactggtttctcttaaatgatctggcatttttaataaatctatacgttttaattgaaagatttgactttttcttgaacttcattcaagacttttgagttaagctgtatgctttcgtttgaaatattaactacttgtatacttaatttggtgtaatgcacttgtgtaataaatgagaagggttacattctaatgagtcatgattatcgattcttgtataaatttcggatttacgtaaaatatacaagctatgatgaaattgatgaagagaaaacgtggtggaa

SEQ ID NO: 6920 - DNA, 254 bp, Glycine max
caagtgggtctggtttctatttgcacacccttttttactaaatacaccccctttacttttttctgtgcatcttttttcgtaacgttacgaaactttacgaatctcgtaacgatacttattttcttttcgtacgttaccgaaccttacggatcatgaaaatactcttttttagctttcgaaaaagttacgaaaactcacggattgtgtaacaatactctcttttgatttctgtcacgttacggaatttcacggat

SEQ ID NO: 6921 - DNA, 422 bp, Glycine max
  unsure at all n locations
tctagtcgtccatagacctnctctgtggtacggtctagcanacgttgcatctgtgcattcatcgcatccactaacagacgttgagcgccgtncaactgatggtacttgtcaccaccaccacctgcttcaaccataattcaacaggaaaaaaaaaatgtgcaataaaaattattaaggtttcaggacctcacaacactctactcacgtctcttagatggtagtacactcgtgtttaatgctctcaataggctcttgtgtaatgtattccctcttgccttttaccactcgtgtttcctcttaagttcctggatggaccacattagacacacaaggtaatataaaataaaaggaaagacaatataatgatcacaaacagatttgatttgggataacaacttggacttgattnggataataatata

SEQ ID NO: 6922 - DNA, 484 bp, Glycine max
  unsure at all n locations
agcttgttggtggcaaagtcaaaatctaatagaatgtatacttgaatcaacctgtagctagctatttttgtattcattgtaactaacggagattctaaatttccacttaatatgtgaagatgtaccttttctgagaccttattgctactaccatttagtagctctggtgccatccaaggtagagttccacgaacaccaccagacaccaaggtatttcgcttaatctttgataggccaaaatcaccaacctggtgaaaagcaagtttcttagctttatcacaatgaagacaatgtaatagaatgaataatccacagcttgaaaagataccttgcatattggccgcatatgatccttcaagttcacgagcanatngtcacatttcaagtcanaatgcacaatatttttcgagtgtaaatattccactccaaaagcagcattcatgggcaatatcagtctcttgcggcgtcaagatacctggaataa

SEQ ID NO: 6923 - DNA, 462 bp, Glycine max
  unsure at all n locations
nntttgtacgacaccttgtacgcaaattgactgttaatcctctcttgaatcaatgaaatttttatcgatggatcttctctaatcatgcctgtcaatagaataacaaaatttaaatgacaattaaggcttaacaataacataatatgaacctaaaatacgtacctactacacaagtcacaattaaatctgaatcaagtttctcgtgatcttgggtcatggtcatattgagacatgtgtgtggtccaccccattgagtgactttccatgaatcagtctttttagatagaattgccctcatgtagaaaaggcaaggacaatctgcatttctattaagcaacanaccacatacttgtcccatttgctttcaaccactttgaaactttgatgcaccctcataacataattgtttgaccgcattctttgaccgcatctttactatcaaattccatgccaacatataat

SEQ ID NO: 6924 - DNA, 374 bp, Glycine max
  unsure at all n locations
agcttncatggctggcccttagcattcaaaactaaccccttgtggggaatacaaagcctagcttcaatctcttgaggattagtcctcaacctgcaaaatctagagtaaatgggtaaagattccccctcttccaataccactggcgtctgaaggaactcattcaggctgtctgcatctattttgatcaagtgtcctcgtactctggcttgcttgggtgcttcctcctctgtgctgtataaattagcataaaactccttcaccatagctacatctatacttccatcttggagattggcgaggcgtttgtgtagaatacgcctctccaattccactttaaactcgcaaactcagtatgataaattgcacatttctct

SEQ ID NO: 6925 - DNA, 361 bp, Glycine max
  unsure at all n locations
tcatgatgatgaatcatgtganttcaagtaatttgataatgacatagatgatgatcanaagccccaagaatgatttcagattgagtcaacaattcaagatccagtttaaattgatgtttcatgagaagaaatcaagaacgatcaacggataagagaagtttgattccaagattcaagagaagaagaattcacgattcctgagaagaaatcaagaagacttcacaagggaagtattgaaaagatttttcaaacaaacaaacatagcacaattttgtttttcaaaagagtttttctcataattttaagttaccagagtttttactctctggtaatcgaatacctgtttcctgtaatcgattac

SEQ ID NO: 6926 - DNA, 305 bp, Glycine max
  unsure at all n locations
tgacgcggtgaagganacgagtgatgagataagtanacagttttacgcgttacggctagaggttctggttctggactcgtaacgttgtcttcttctcttttagaacttaatatataatccatgttttggaaggaatctgttggttcatactcgtgtcgcgttcctccgaaatcacttgaacttgattcttcatctcttgcctcctaataaatactctaacagcttcgcttgatttcaaactccgacanagaacaaccttgtcgacacagcaaagcacagtaacatattacgagaagaagatgtgt

SEQ ID NO: 6927 - DNA, 431 bp, Glycine max
  unsure at all n locations
cagtcttccttacttttgttgttgaccacanagtggtacctggagatatgtcgcgggggtcaggagaccctgcggtcgtcaggtgggatgctatttgcccaaaccaagcttgaccacatccgacccaaacccggcatagtcagccagtgagaacctgtgacgaacctaacaggcgagcttcctgcagtcaaccaataaaagaacaaagatcacanagccaggaggcttgtgtggtggntggccatctatgatatctgagtgggatctggcatttggcctcttgtantcgattaccancggtgtgttatcggatacaaggcttaataatggagacaggaagtaataccgcctttggtatctactaccacggtgtcacatcgcttactcgctataatcgatactggtgctaggacggctcgttatccgctccn

SEQ ID NO: 6928 - DNA, 338 bp, Glycine max
  unsure at all n locations
tgagatgaggaagtgttgaacggtgaaacttcctgcttttattgctgaccacagagtggtacctggagatatgtcgtgggggtcaagagaccttggggacctcaagtggggtgctattgcccaaaaacaagcttgaccaatcccgacccaacccgggcatagtcggtcagtgagaacctgtgatgtacctaaacaggcgagctcctggcagtcaacagataaaagaaacaaagaccacaaagcaaggaggcttgtggtggctggccagctgtgaattntgtgtgatatgtggattatggcctctggtaatcgattaccaagggtgggtaatcgattac

SEQ ID NO: 6929 - DNA, 486 bp, Glycine max
  unsure at all n locations
gcttcagctctggccactcctgatagatntagacatgcccaacacaatagtccctatatgactgaagaagggacaaatcaattggacctcctccaaatggagggccaattatcctaccaagatgtggccctgactatggttgtggctccgacttttgctacagcttctagtgctgacatatcaacacaatcgctttgtgatgtctctctgcaccatctttcctttgtcgcgataggcctttatgggagggatcacgtntagcaacatatgatgactgttttgtgctagccatttgaaaaaaaatgaaaaaaaataagtgaacatattaaacaattatatttaaccaagacaataaaataatataaanaacattacatttgtctaaagtaattaaaataaaataaaaaaatacgataaaatcatgaatctggtgtacattatgatgaatcacacaacggaatngtgattcattgtatattttcatag

SEQ ID NO: 6930 - DNA, 413 bp, Glycine max
  unsure at all n locations
tgctgatggtgcctcagagagccttcatgttgaggactacaagtactgatcaatctaagtgcgggtaggaatcggtattttatgggtacaaccgaattttcttggtaatgagtattgtgcttcgactcttcccagaataataatcgtttggaattttgctttttgtttttcctagtgttccttcatatcaattttagtaattcggtgtattggtcaaacctgtgcaaacaggggaggggatgtaactttgttttcttgatagacaccaccaccttgctgttaacgaggctttgtgtttatcttgcaattatctttctttgggtttcatattatatgatgtgatatntctctaaatatttgtacaaaatttagataacgtgctgatagtttctaaaataattatgcaatataat

SEQ ID NO: 6931 - DNA, 320 bp, Glycine max
gtgcttatcgataatggttccagtttaaacgtgatgcctaagagcactttggagaaattaccattcaatgccttccacttaaagccgagttcaatggtggttcgtgccttcgacggcacccgccgagaggttaggggagagatcgatctcccagtacatataggccctcacacctgtcaagttactttccaaataatggatattaaccccccctacagctgtctggtggggcgcccgtggatccactcagtgggagttgttccctctacactccaccaaaagttgaaattcgtagtggaagggcatctggtcatcgtatc

SEQ ID NO: 6932 - DNA, 457 bp, Glycine max
  unsure at all n locations
tgtagactggctagacatgatacatgtcanggttnggtttggttcaatgataaaagggatgccccacattatttccatgacacaaatgcaaaaatgatgatttggaaactttatgcaaaactggtcatgcatgcacctatgtggacactcaagtgtcaaaattttttatggtcatgtgatgctaaagctcagaattcatttcctctattctaaatcaacccaatgtttccaaaatatgttcttttatcaatttgtgcattcatccgagtccatttcgggtgtccggngaaatttcacagcattcacccttcaggtgtagacacatttttaaaaattggttatgatcaatgaattttttcacagaaaagttggaaatcatctctcttcaaagaatgtcngtccttagctagacacctaatttcttttttccattttttctacttgcttctttttctat

SEQ ID NO: 6933 - DNA, 417 bp, Glycine max
  unsure at all n locations
agctnnttggagtagaaacatgggaccaactcattntatttcataaagttgtatctagtcaaggtctgagagaccatacaagtttcctagcgatttctaattatgtgggccattaagtctatcatatgctgacaatagccgagaagcccatgaatttcttcgggggcggagtaggtgtccgccatcgccttggccttggctaacaatcggngaagttcctgactcccgttcaaggtaagagcaaaccgatccatccacatggttgcctctagcctctttntccgcgtatacttgggcatactcgtccgcgatcctatgcccgtgggccgtggctagacctaactcttcttggtacttggcgatgatagctagcatgttggtctccgtctcgcataaacgctgagacaagcttctttt

SEQ ID NO: 6934 - DNA, 428 bp, Glycine max
ctaagctagacatacatatctcttcttgatacactaattcaaataatctatttcatggtctacccaatgaagacccttatgctcacttggccatctatatagagatatgcaatattatcaggttggtgggtgtgcctgcggatgcaatcaggttgagtctgttctcattttctttatctggagaagctaagagatggcttcattcttttaaaggaaacaatctgaagtcatgggatgaagtagtagaaaagttcttaaagaagtacttccttgaatcgaagactacagaaggcaaagctgccatatcttttttccaccagttaccagatgaattgttgagtgatgcacttgaaagattagaggtttattgagaagactccactcaaggtttttagaccaatacagctcaacatattatagatgggtga

SEQ ID NO: 6935 - DNA, 210 bp, Glycine max
  unsure at all n locations
tgctgattctttgacaccttagttaatatccacatctacttgacactcctttttnggatctatccttctctcttggggggacaacacatttatcaattacttatgtaataaattagaagcaaataataaacctaattaatatacttaatgaaataattaagtgagttttaataattatttatgaattcgataaatagtataaattcatat

SEQ ID NO: 6936 - DNA, 511 bp, Glycine max
  unsure at all n locations
cgggcccccgcgggtgaggctgtgacntcgngaactctgaatacttaagcataaatgcctntaatgacgcgattccattaggcaattctatattttaagaattcacgccagtcaagaacctcaagtgctttganggttttcaaaatgggagacgtcacctaattcataacctttcaagcgcagagtatgaagatttctgtacgacgtcattgattgtggcagagaccacgagagataccatgtaccacatgcctgtgtcaattcacgcctaatgaaagtatagctagatggcgtggtcaattcacgcctacaccaattatagctagatgttcctatcgcaggattctaatcacttatagcctttctgaacaagtatatgatacatggaagtccacctcaggagaacgatacacgataatttaagtgattgacatttccatgatgctaatcagaagctgccatttttatatccacgagatattactccttatctttatggtgcatctctacg

SEQ ID NO: 6937 - DNA, 118 bp, Glycine max
  unsure at all n locations
agcttgtgggctgctgttctcgtagttcccgtgagcttggtgttgttntgaagtgaaagggaagagttttgggtgaagaaaatgttccccctccacccctatatattttcgtacaggg

SEQ ID NO: 6938 - DNA, 414 bp, Glycine max
  unsure at all n locations
cagctcgcccaggcgagcacggttgcttccttcagaagcaacaaccttctggaggaaggatcttgaaggcctaagtgggccagattgctattcgtaccccccctttntactaaatgcaccctcatttatttttttggtaattctttttctgtaacgttacgaaactttacgaatttcgtaacgatacttattttccttccgcaagggtacgaatccttacggattatgtatttactcttttttggctttcgaagaagttacggaaactcacggattgcgcaaaaacacctcttttcgatttccgccacattacggaatttcacggatcgcgcaagcctgcttgcttttgatttctgacacgtctcgggtcttcatttattgtgcaacacaggacgccaagtatctcaaagcagc

SEQ ID NO: 6939 - DNA, 180 bp, Glycine max
  unsure at all n locations
ttttcatgtcacttttgatcacaacaatctctctttaggtcacatttggcacaccctttgacttctcctgaatctaagactcttaagtatctgttaacactaagtcactcttggctntcacaaacaaatatgtttgaatgaacacaccaattcaatcactccatagagtagataaacact

SEQ ID NO: 6940 - DNA, 446 bp, Glycine max
  unsure at all n locations
agcttatgtngtcttatgagaggtatttattagcttgcacagcttgctatttaatataaatacatacatacttacacacacataacactgttaggttgtcttatgggatgtgtccttataatttattaatgttaaactgacgcgtcctctactctgactggtcatttacctaattttatacttgattctttgcatactataggctagacacggtgctcttctccttaatattctttcaaaatactgcgatggtacttagtcatcccttatatacggcttcttatctcttcaactattacatctgttattcaattncattagtttcatattcatttatggggatatcttatataactaccttgcaaagatgatcatgtgattataactatatgatttttcatattcatgtttctcatattcattcattggaattccttaatattctt

SEQ ID NO: 6941 - DNA, 453 bp, Glycine max
  unsure at all n locations
tactcattgngaatccatgggaacctaaatgctcgaagtctttgtgcaatagnaaattccacaaaggcattttaatgcttaagttaatgaaaaaaatgcattgtccagtatgtcacgattttggatcatcctacttgaacgtgtgtccctttatatacattgatatcttacattcaaatatgaaaagttgtatcctttattgaaataagtaaagttagaaaataaaatgattttatctataaaaggataaaatcatgattttatcttggtatagaattaaagacaataaaggtagttaagccatgatctttagagatatggggatataactaatatgattntggaatcaatcttgattgagaattcatcaatgattatcgacccttcatctcttcattgaagacatatgaagtgacagttgacctgcacaaaacaatatgggtagatgacatc

SEQ ID NO: 6942 - DNA, 343 bp, Glycine max
  unsure at all n locations
agctntgaattcattctatgtacccttatgggtccattcttgctttgtatgccttcatcttcattattctaccgttgatattctttttctttgttttaagagagtttcaaccaatcatttaagccgtaatctcacttaatcaatgttaaaatgaatttcaactgatcatttgtgttgtaatcttgtttaatcacctttaaaataaaattcaaccaatcgtttatgttgtaacatcggttaatcatcacaaaggtaagtttcaaccggtcatttactttgaaagttctcttttatgagttgaaaataaccaagtgaaaccaaagctaatatcaactcacaaatc

SEQ ID NO: 6943 - DNA, 301 bp, Glycine max
catataaaacaataacatataggtatttctttctaatactgattatataagaattttattaaaatggccacttgattggtttgaagacttgataacaaaattattagaaattttatttaaggttctattttattacattggattccttagactattacatatggtagaagtaataaatggggactatcaggtataacactaagactgcaacaatggtcctccacgacatttttctgccccaaaaagtttgaaggaatagactcagcatgtttggtttaccgtcagagctcttgcatatgct

SEQ ID NO: 6944 - DNA, 430 bp, Glycine max
  unsure at all n locations
agcttgcttctacaaaaagaatacacacacatgacctctatttatagcctaagtgtcacaganaattggaggggaaattgaatnttctattcaaatttcacttgaattagaaattgaatttatggagccaaatttcggagccaaaatttcactaattatgattcgtgaattttagctatggttcaacccactagtccaagatcaagtccaagattctccactaagtgtgcttaggtgtcataagacatgtaaagcatgaagtatatgcacaaagtgtgactatatgatgtggcaatggagtgtagcanacaaatgctcacctccccgtctaanattaattagattgggcttcncaaattcaattaatttatttccaacaacacataaatattcattaatgatgtganatacaaactaccctaaacaaact

SEQ ID NO: 6945 - DNA, 336 bp, Glycine max
  unsure at all n locations
gatgttcaaaatcacccataacagaatgcacagattcaccaataatggaatgctcaagatgatcaaaaggtataaaatgatgcctaactaatctatgaaatgtcctatctatctcaggatcaaagggttgtaagtcagatggattgcctctagtcatacactacattcagcatgcacaactagttgccttgtcatgtaaataaaggtgcaggtttgaactacagctaccctcaagtgatatccaaatgactttgaaatttgtgagcaaccttataaaatgatgagaagatagcacancaaaaattagacaaaaattcaaagtctaactatgaaagc

SEQ ID NO: 6946 - DNA, 356 bp, Glycine max
  unsure at all n locations
agcttcatgagagtgtgaagaacatctagaagaattttgattctgctcttgtattcgaagagaacggtgaatccagcaatgaaggtaattaattccagtacttcctagtacttctctttngtttctgaatggattactctgatgtgctgtgcgtggattactatatgatcgagggaggtagatgcacagttcattaactgctgtgagataatatgagtcttgaattgttggatgggatgtgtgttctctatgtgggcaattttcagatttgacactgattggagccatgtgctttttcttgctgtatttcagaagcccgatcatggcctatacctgctgacaggaaaaccctatta

SEQ ID NO: 6947 - DNA, 399 bp, Glycine max
  unsure at all n locations
agaatctacctctcaaatgtatttatcttgctctctatntgctaaaattccccgagccctcactacacactctctacctttgtttatatacaactttcctttcaattctgttatgacagaatattctcccttggccctccttttcttcctattatagacattcttctattaagagtattatatgcatttctaataagacgtctaacccacatgggtgaaagtgatacaaaaaaataattctcttacaatcggtagagggacaacagaaaagagtgcgctctgataatatacgctgaaaagcacaattgtgcatgttangagttctaaaaagttttgacttgagattcatgtgccaccaccatgtacgaagtgagatacaattacacaaatcttattgct

SEQ ID NO: 6948 - DNA, 310 bp, Glycine max
catattacatgtcatatacggtatttggtattttaaaacttagtgcaatgaagtactttcgaaggtaaggagaatggacatccacctcaatggattgaaccaaaggtatgtcgttattcccgtattgaatgaaatttcaaataaataccatgtgttacctacaaatgacaaagcttaattgggtattttcatattgcacgtagagtcatgtacaagccggagggtatgagtgtggatattatgtcatgcattggatgtggtgcatagtcagcgacggactgaagaatgaatggaacactgtatgcatact

SEQ ID NO: 6949 - DNA, 440 bp, Glycine max
  unsure at all n locations
tgctctaacgagctactgtttggattgcagtatgcccacttagctttcctttattcacttgatctctcaaaaatgaaattgtgtcttaatgtgcttactcctttcataagccacaagattctttgcttaatttacaaagatgactcaaatgtaaatcatcaattgtatttggccatcattcttcaagtgtagctcctctaataatgcttcaagccacaaagctggacaatctccataagagtttgcaatgaactatgcttcatangacgagagtgaaaccatgacgccaaagccttgcctaacataaaaacatatcctcttgggctctttctgtctttnntatcttcaaactaatcaaaatcaaataccttctattntgtctatccgcatcatcttgaatgtttggaaacaatagaccataatcaagcgtggtctttatg

SEQ ID NO: 6950 - DNA, 372 bp, Glycine max
  unsure at all n locations
gtcacctgcggctgcagcttacccttacttgcaagaaccacttctcataacaacaacacacacttctcttgctatgtccacaacagtctccttagtccataagaaattcataatactgttgtatctagttcttttaaactttggcatcanagactaggccatcctaacaaggatgcactagaaattgactaaataaatgtaatataccctttatcaataaaactaacaggggatttttgtaattcttgctctatagccaaatctcacaaactaccctcttctccctctttcactggttatactgcacctcttgaatagtattctttgatgtttggggccctcttcagtagagtcatcttatgggatcttata

SEQ ID NO: 6951 - DNA, 402 bp, Glycine max
  unsure at all n locations
ctgaaggtgtgntaacccaccattttttcatagtagaacacctgtcacgtgtctactatcattgtgataatctctttctctcgttttgggggtgctacttgagttgccaagcctcttcatctttgggcgtgttctttgaaagatccgtccccccttttgcacacgttctgtagttgcatcctatccgaagccatatcagaattgtactgacaccgcctaacgaaggcaaccattaggtccttccaagaatggactcaagaaggttcctaagttagtataccaggcgacagttgtcctagtaagactttctcagcagtttctcatcttttgcgtatgcccccatcttccgacagtacatctttagatggttctcggagcgagtagtcccctcgtactcgtcga

SEQ ID NO: 6952 - DNA, 297 bp, Glycine max
  unsure at all n locations
agcttatgtgaggcagtgagcctcgacctgcattacacacagttcaccatcaatatacatgtngtacccattttcggcgccaatgtngctttangaagtcagtggctaaaaatccttgggtcttgatatcatcgactataacaccctttgcataccaattttctatgatggttgtcttgtacaacttcagggcgacaaagatttcactctgaccccggntacgtcatctcaatttcgcccggtgtcacggatgaagacagtangattatactggcatatctccctcctcgcggagga

SEQ ID NO: 6953 - DNA, 250 bp, Glycine max
actagtactttggtttctagccgtgtatttggctatattatgacatttgaaccatttaatgatgcaatccttcctaggaagggaccaatcactagaaccatgagccagaggctccaagaagattgggctagagctgctgaagaaggccctatggttctcatgaaccttatgatagatttctgagcccatgggccaaggttgggtccaattatctttgtacatattagactaggatgtcattatatttggt

SEQ ID NO: 6954 - DNA, 342 bp, Glycine max
  unsure at all n locations
gcgtttatgcgagacggagactctcatgctatctatcatcgccaagtaccaagaagagttaggtctagccacggcccacgagcataaaatcgcagatgagtatgctcaagtatatgcggaacaagaggctagaggaagggtgatcgactctttacaccaagaggcaacaatgtggatggaccggcttgctcttaccttgaacgggagtcaagaacttcccttgttgntagccaaggccaaggcgatggcagacacctactccacccccgaagagaatcatgggcttctcggctatcgtcagcatatgatagactttatggcccacataattagaaaatcgta

SEQ ID NO: 6955 - DNA, 467 bp, Glycine max
  unsure at all n locations
gcttaagctccttcaactgcacaaggctcttaatatttgaagagtattcttgtggaaccttcacctgacgaagacacttgacaaaacttatctnctccttcttggacaaagtatggcaagctgggggcaagtaacttttcttcccatcagaccttggatgcaactgtgatcttatacccatatcagctagatcttgacgggtattcaagccatccttcgtcttgccttgaatggtaaggagcgtcccaatcacactgtcacaaacatttttctccacatgcataacatcaatacaatgtctaacgtcaagatcacaccagtacggaagatcaaagaaaatggacctcttcttccatatgcaactctgacttttatccttcttttgggtcttcccaaatacagtgttcaggtgttgaacccgctgatatacctgctcaccagtcaacggtatcgacgcaatatcatgc

SEQ ID NO: 6956 - DNA, 208 bp, Glycine max
ttccagcatctcgttatattactggactcaatccgacatcccagtaataattattgccgcttgaataggctcagagggtcaacattcatctatgagcgtctcgatatattatgggactcaatcacacatcccagtaaaaagttatcgtcgtttaaattggcacataggttcaacattcaatttcgaccgtctcgatatattacgggac

SEQ ID NO: 6957 - DNA, 417 bp, Glycine max
  unsure at all n locations
ttctaacgacaataactgtntactcggatgtnctgattgagtctagtaatatatcgactcgctcgaaattgaatgttgaagctctaagccctattcaacaacaataacggtttactcggatgtccgattcagtgacgtaatatatcgggatgctcgaaattgaatgttgaaccttctgacccactcaaacgacaataacgttttactcagatgtctgattgaatcccganatatatcgagacgctcgaaatngaatgttgaagctctgagccaattcaaacgacaataactttttactccgatgtctgattgacgtccgcaatatatcgagacgctcgaaattgaatgttgaacctatgagcctattcaaacgacaataactttttactctgatgtctgattcgagtccgtaatata

SEQ ID NO: 6958 - DNA, 324 bp, Glycine max
  unsure at all n locations
agcttggactntctgtngtctgggaacctctnctttctcangtgtacccaaacccaatcaccttgttcaagcacgactttctttttgcttttgttggcttgccttgcatagctcacaattttcttttcaatttgagccttcacttgctcatgcaacttcttcacatactcagctntagcctgtgcatcattatgcttaaacatagcaatgttaggcataggcaacanaatcaagaggagtcaaaggaataaatccatatactatctcaaatggtgaacaattagttgtgctatggacagctcgattataagcaaactcaacatg

SEQ ID NO: 6959 - DNA, 453 bp, Glycine max
  unsure at all n locations
tcaggctgttcaattgcttcagattggtgcacagaagggcaaatgtctgtgtggtggtcggcagaggagcataaaccacagagtctagcgacaagtgcatattttttattcatggcccagtgggttactaaggtaaccaaggcatctaatttaccttcaagcttcttagtctcagctgatgaaaatgaattcgtggctacttcatgcactcctctaatgacaatagcatcatttctggcactaaattgctgggagtttgaagccatcttctcaattaaatttctggcttcagcaagggtcatgtctccaagggctccaccactggcagcaccaatcatacttctcttcatgttactgagtccttcataaaaatattggagaagaagctgctcaaaaatctggtggtgacgggcactggcacatangtttttacatctcttccagtattcatat

SEQ ID NO: 6960 - DNA, 351 bp, Glycine max
  unsure at all n locations
agcttgcttgtggngcttctatggaggctggatctttgtgcttcaatgaggtcctttaatggtgattctccaccatggagatgcagcggaagacaaaggagaagaggtgagaagaggcttcatccactaaggaataagccatggaagaatgagcttcaccaccaagatgagccttggataagaagcttggagaggatgcttcaatggaggaaaagaaagagggagagaaagagagaggggggagcacgaaattgaatgaagaaaaagggagagaagttgaacttngagttgtgtctcacaagactctcattcatcaaagttacaacaagtgttacacatgcttctatttat

SEQ ID NO: 6961 - DNA, 401 bp, Glycine max
  unsure at all n locations
ttattttcaagtgttattcacttatttttcttaacctaccaattntagatttgatagttagactntgaatttttgtatgaaattttttgtgctatcttctcattattttataaaggtgctcacaaaatttcaagtcatttggatatcatttgagggtagctgtagttcaaacctacacctttatttacatgacaaggcaactagttgtgtgcatgctgaatgtagtgtatgactagaggcaatccatctgacttacaaccctttgatcctgagatagataggacatttcacagattagttaggcatcattttataccttttgatcattctgagcattccataactggtgaatctgtgcattctgttattggtgattntgaacatcctgatcttgagcatta

SEQ ID NO: 6962 - DNA, 452 bp, Glycine max
  unsure at all n locations
agcttgtattcatttgatgtatcatattgagcatcatagagttgctcatcaacatcagacattggcctatgacaaataacagtagctctaggatctgtctcaatgatatcctcgttggcttccacaagagatgcttcaatgattgactgaagcatggcttcttcaaaagcttccctttcaggagggccatgtctttaggagtagcggcaacttctatctttgcttgtctttaagcaagatctagaaaaaagaattgtgctgcaagtcttgcttcaaattgagctcactctagttcttccatctaagcattcttcatctctggtttaaattatgcatgtattgattcaacaatgacagattttggcactaccttcaatatataagacatcgtctgtggaggctaaaaaggggatatcaattntacctattncattaatctttcccttacccat

SEQ ID NO: 6963 - DNA, 410 bp, Glycine max
  unsure at all n locations
ngaatctgtacaagttcatcanggatggtctttgttttagaaacagaaggctnctttacttcggcagctttagttttcttagttaaccttgcatggagatctcgcacagaagtacccctggctactttctccaatagttcattccgagctgcttcatattccttctaacataattaatacgagtaaaatatatcaagctaatgtcgaattccggcttaataggagtgggaaggatcctagaatcaacttagatgcggattatgagtgggaatatcaataaacctagagaatacatacacatagcattaataggagattgcaaagactaaactttttcagaggtagttatggcaagcataatcaagaaacattaccctcgatacattcagaanaatagaattgatatattc

SEQ ID NO: 6964 - DNA, 424 bp, Glycine max
  unsure at all n locations
agctngatcaaaacaattatctaatcattccaatccactcaaatcatacaattgttcattcaaatcattctcaaacactcatttcatacaaaacaatccattgcatatcattntcaatcatttcattgttcaaacaagctttttggtacaagcaaacaactcanagtgttgaaatttaaataactggaatttaaagaattgaaatgtaaaaactgaaattaaaatgactgaacataaatcataaaataattgaaaataaaataaactaaaaatgttcaagatgcactaatttatatgtcctgctcttggtggtggtcttgtgcatgctcattaaggtccaacacctgagcaattggtgaatcctgagagataggctgtcctaacttagatgctggtgcagatggtatggcatcatcaggtatgg

SEQ ID NO: 6965 - DNA, 355 bp, Glycine max
  unsure at all n locations
ctaagctatcctatgctngcctccgacttacccccgtgcacctcgaagattaagcagcccctactttcagggcactccacttatgacactaatccggcagacatgaggaagaatactatttggcccctgctcacctaaaaatcgtcccccatgaactacccaccgacataatcgcatatccggtttaccacactgtaaagaatttgtccttccagagataagggaagatgagcgcttgagagaggtaagacagtcggggccttggaattacccatcttcgatttggcgattatctctatgccaacatcgcatccttccaagtcaagtccagacttgatagtacaaggacacatgt

SEQ ID NO: 6966 - DNA, 286 bp, Glycine max
  unsure at all n locations
agcnttttctcctgccacacacggttattattattttctctctactcgatgagaaagaaaaaacaagagctaaacattaataaatacccaacactgcatgttcttatttattctcaagatcgaccctcgttcatgcgatcatgtctgttcttcatttatatttttcttttccattgccatgctttctctctttatatattatttgtctgcttatttataatttttgcagcgtcttagaaactttagatatcgcgcaggtttcaatgttagtattctggtgagatct

SEQ ID NO: 6967 - DNA, 360 bp, Glycine max
  unsure at all n locations
ntaaaagctggcttgtaagcagccatttcatagatacaacattctgtcaaatgttatgtcaaaccaaatgacaaatacagttaaaaagatattgtaatagaacgaaacaaaaagaagtattaagttttcgcaatctctagaatacaaaagccatctatcctacccaaagaccagatatctgacttagagccatacggtatatcagcaagaagctctgggcacatataacttggagtgccaacaacctaagtttagagcaagaacaaatagctcattaattccccaaaaaatgttgaaacagtgtacataacagaactttggtaatatcactcaccgacgaagcaagatcatcagatgaca

SEQ ID NO: 6968 - DNA, 440 bp, Glycine max
ttatttagtaaccatgaccaactattgaagaacgtcgcagaacggttgaagcctttgcgaaattcttcacggataacgctacggaaacgtttcggaagcgcctcggcttagattctgctgactgacacaatttcttcctgctaactcgacagagagggaagcgcctaaggggcttgacccgtttatgcatcactctctgacctatctatagcaaaatacgggagacggttgctcgccggctcgaccaggcgagccacgtgctttcctcctttggaggaactttctggaaggtccaagagggcctggttgctattagccccctcatttacaacgaacaccccgtccgatattctttggagaatctttcttgaaacagcacgaagcttcgaattttaacaaactcgtttctcctgtttggtcacaagctgcgatacgtcacc

SEQ ID NO: 6969 - DNA, 362 bp, Glycine max
tctaaaccttgtacaagaatgaagctctgataccacttgttatataagtggcctcaaatatcctaagaacggcgggggttgcagtaagatattccaaactgtttcccctaatttaaaaattattttactttttactcaaggtattaatctcctcaatgacaatcgtcttaaatatgaactcaaaccaaaccaccttgatatgaatatatagcaaacataaataaacgagattaacggaaaagaaaatgcaaacctcagtttatactggttcggtcacacccttgtgcctacgtccagtctccaatgcaaccgcttgagaagtccactaacttgttaattccttttacaagttctacacacac

SEQ ID NO: 6970 - DNA, 368 bp, Glycine max
  unsure at all n locations
agcttccanataatttcgttaactctctataatacttctagaggaaagtgagatccataaattttcattgtttgggacttggatgcattagccgtgtttagtctaacatactaagtgaagtttatgaagaaatataagaaacgaatctaccataatgttgttaatgcatgttcttttatggccaaatggaaaattgctaatgcatgttatacgtactactaatggttctttagttctactctgttntgattctcattacctataagtgctatcatattatctgaattcaatttacctttctctgttatggtagggaattcccgttttcacagatccaatagctccatgtaacatcaggtttgatgact

SEQ ID NO: 6971 - DNA, 345 bp, Glycine max
tgtagagtgtccatgttatgttcctagaattcaaggactaggagacctccagaaaaaaggggattaaggagagcaaatttattgattgttattgcttgcatttctattacaatgattgtccatttataagcaccaaatacttattctagttccttctacaagtcctacgagggaggctaacaataatggattttggaaatatcctaatagaaagatatattccagcagacagaatatcctaattgtccatgttatgttccttttagtgcttgtctccttcttacctgctagcaattcttctgtgttgggtgcctcatcataacatttcttggcccatcaaaaaca

SEQ ID NO: 6972 - DNA, 406 bp, Glycine max
  unsure at all n locations
agcttattgatttgtcatgaattgaaccctgaactttaaatgagtatctnctaaataccttggttagattctaggagattatatgggtccaggaaaatttactctaaaattgggggaagaaagtcaattataatgaaaagaaaaaggttaagcatcaacacacacaacaaataagttgtatgttaaaaanaataagttgtgttgtacaaaaaggtcgaaagtaacttaagaaaagggaatagtgagaaggctatttgtacaaaacaagaaaagatcattgngattagtctaggacttgtgctctcttagaatctaaactttcgaatcctagaagaaccagtgaaaaattttgtagccacaacctcactacaagcctgagaaagccttctgatctattatatatttc

SEQ ID NO: 6973 - DNA, 451 bp, Glycine max
  unsure at all n locations
tcaggttgttcaattgcttcagattgttgcacagaagggcatatgtctttgtgatggttggtagaggagcataaaccacagagtctggcgacaggtgcatatttttgattcatggccagttgggttaccaggttaaccaagacatctagtttaccttcaagcttcttagtctcggctgatgaagatgaatttgtggctacgtcatgcacttctctaatgacaatagcatcacttttggcactaaattgctgggagtttaaagccatcttttcaattaaatntctggcttcagcaggggtcatgtctccaagggctccaccactggcagcatctatcatacttctcttcatgttactgagtccttcataaaaatattggaggagaaagcctgtcagaaattggtggtgaggacaacttgcacatagtttcttaaatctctcccagtattcat

SEQ ID NO: 6974 - DNA, 429 bp, Glycine max
  unsure at all n locations
ttaagcactgggctgcagctgatgattggctgagatgatcgtggttagtaatttaggctacaacatagaacacaagagcatgatngattagagaaatatatttatatgcatcaacttgtttgttagaaaagacccaacatttctacctactgctatcacttttacctaccttgcattntatattttagcataaagggttagtttaaaattttgtttgaaatatcaaccatacatgttctctcaacaatgctttatttatgaacttaactcangctaacattagttccctgtgtttgatactcggattcatccattttaattnttaaatacttgacgaaccggtgcgttttccggtaaacccccattcaaattctcttgaaacatatatgagcaaaaagtaactgcaatggngagtcaacacctaactta

SEQ ID NO: 6975 - DNA, 440 bp, Glycine max
  unsure at all n locations
tggactcanagagaaacttagaatggctctagagtagagtaaaataactataaaataaagactcaacaaacctctagctttggcactttgtttcacagtaattttcaattgaaatttcggaactaagattggtataacatangcaccaattataagaataaatttgagccaaaacaacaagcgcacttccctttcactttttttttcctggatactgatttttctgccaacttgtgtgatttttagtattttttcctgttatccaaatcacttggttctttttttataactcttttccagatgtctagcaaattcagtaaaactttcagctcanaattcgaagtaaccaattctcagtaattnttacaagtttgtatgttcaagctgccagcaccaacgattnttttttaagcatggtatattgattgccttgggcttac

SEQ ID NO: 6976 - DNA, 337 bp, Glycine max
  unsure at all n locations
agcttctacttatgtggcanggcgggcttcctttaccttcttgtctacaacgtgaactntgaccattgttcttccttcccgcgatgcttcttttcatgtacgcctgagtgggcttatagcctaaaccatacttgccacgatttccttgggtatttatcaggctagttatgccgccgttgttttttcctaaacccatcccgggttcataaccgttccccaacataactcgggccatcattaccgctgcatcggacagacaatgctgcccaaagagggagtccacggaggaaatgctgaccacctcaaaagactggaaagcagtttctgacgattcttc

SEQ ID NO: 6977 - DNA, 444 bp, Glycine max
  unsure at all n locations
agaggattgatggngacccngtgtngagagaaacgaagatatgggctacgtgggaatacgtgagcctaattggaggtgggccacnagggatggtgggtttattgcgcgcattgtggattgtggaaaagcttgtgtgcaccattcgccgaaccgcacctagtacgacatgtgatgggtaccccataatcctaccaacttgagatgaggaagtgttgaacggtgaaacttcctgcttttattgttgaccacaaaatggtacctggagatatgtcgcggcggtcatgatacctttnggacgtcatgtggggcgcttatcccacaaccaagcttaccaatccacaccaaccgggcatatttgtctattaaactcttactactctactaggcacttctgctttcactctataagtacccacccctctcgccgagtctgcgcgacgcccg

SEQ ID NO: 6978 - DNA, 313 bp, Glycine max
  unsure at all n locations
tacacttctttcagagaaaggagcttaacattttcttctcaaaaactgaaaataacactactaagtcttcaatctgtacttaatgatgctgaggagaaaaaaatcactaatcctgctatcaaggaatgggtggatgagctcacacacactctctatgacgctgatgagttgttagatgagatcaacaccgagacattgtgatgcaaagtggaagttgtgacctaaagtcaacccattggtgattaggcgccaaacgtgctttcttattctttcanaagggtttatggggtcatcaattatgagatacaaagct

SEQ ID NO: 6979 - DNA, 463 bp, Glycine max
  unsure at all n locations
taacaatcagtgtcatactatngatcaaaacanagcaggtattaatatgccatactagactcaaaatatgccacaaacactagacctaaatcagtgtcacagaaattggaagaaaatattttatccaagcacaaacttcaagccttattccatgtattggggggaagttatggctggccatatgggtagaggtgtcataaaggagcaagtatggaggaagggaccttggactgctgaagaggacaagttgcttgttgagtatgtcaggttgcatggtgaaggcagatggaactctgttgctangcttgcaagtaagaaacaccaaacttttttcactggtttgtttcttaatatatatgattcggatttgacatttataagtgacaatatagcacaaaaacaactgaaatngttttcaacttctactgttcatngtggctacattcatgttcacccgaagctc

SEQ ID NO: 6980 - DNA, 390 bp, Glycine max
  unsure at all n locations
agctntanaaagttngggtttctaagctggaattacatttgtgcacctatttngattttccatgcccgctncacatacataanacagccccacccatcccaatttttgcaaatcatgttcatataccatnggngcatttcatcgagcactcggtgggcgcacgtntagacaaaaattgcaagagaatgggagcaatgtggcatgccccattgtttcagaatacaacctangcctaaggccttttcattcatatcctcaattcaagaagacaagcaccaaagcaaaccaacactgccttacaaatataagcatgttctcacaattcgaggcaccaaaagatgaagaaagcacatcaatgganaacaaaaacatcaagtatgggacacttac

SEQ ID NO: 6981 - DNA, 450 bp, Glycine max
  unsure at all n locations
tctactaacttaagagatacatgcagggcacactgatcattatattattattagacttggttggcttaaaaaatagcatagaaaaattgactttttctcttctcattgagatgacctctctctcctagctaggggttccttccttggtagccttgtataagcttcttctacgtgtgaaacactattttttttttgtgtttttgtttggttcctccatggatcccctggcctacttgagaacttatccattgaagaaaacattctagagacactaattccagaagatgccattgcggatgatggtcccaatctatctctttatctcgttggacgttntttatgaaaagaaccatcagaagttcctcatatgaaggagaggatggttgaagtctagcacccaccattagagaggtagatcaagggatttttctctttgaattctctcatcat

SEQ ID NO: 6982 - DNA, 345 bp, Glycine max
agctaactaatcaaatgggacaattggctactcagttaaatcaacagcagccccagaattctgacagattaccttctcaatctgtctagaatcccaaaaatgggagttccattacattgagatcgggaaagcaatgtcaaagacctcaaccagcaacatcttcctcatctgcaaatgaacctgcccaacctcactctactccagaaaaagatgatgacaaaaatttaaagagtaagttacctaacaatttctatgaaggtgaatcttccacttgtaattctgatttacaaaagcagcatatccctcttccattcccttcaagaagcaattccaacaaaaaaatgg

SEQ ID NO: 6983 - DNA, 455 bp, Glycine max
  unsure at all n locations
ntcanaaatatttaaaagccatttaaaatcatttcagaaagctttntggtcactggtaatcgatggcagcctctggtaatcgattacgagagagtaaataaaatctcaaaaacttttgaaagattcctttggccaaaccttatgcatcacaatttagaaactctttctaagactctagagactagatccatcatttatcttagatttcttgaagtcttgtcttggatcaaacatgagaagcgcgtttctttggcatcatcaaaacttcatgacatatttgcttctacaataagtggttcgatagtaatataaaaaagatttcacataaaattggtaaaataaaaatgttgtcacataaaataaaaagataaacattgtctacacatttggctaanaaaatctaaatgtcttcatgcgtcttccatgagccgccttcatcgtgaccgacatataca

SEQ ID NO: 6984 - DNA, 331 bp, Glycine max
agcttctatgctatttttctttgtcgcgcgggttttattcattgatgtactggtgtatgtcaaagcatatgcacaaacaagtatgcttaacgctcacatcaataggcgtgtagataaagagtaagaatcacaatatatactctctaagataaaaccacttatgcatagtcaaagagaaaaaagtttacaaattatcaaattacacccacgtaatgtgtcgaatacataaatcataaatcaatgaaattctctcgagacttactctaaaatgagaaaaacgaatgtgatccatctagaatagaatccactctattatttaagtttccacttt

SEQ ID NO: 6985 - DNA, 442 bp, Glycine max
  unsure at all n locations
tgtttctccacctcatgatgattatgattatgacttctatagaaaacatggtgatattccaagccctggtgttggtcattaaggtgagtatcgatctattgatgatatttttgatagacctattgcttcttaattaattgacatatgtattttcataagatacagtttgttccctttttccttttagattttgtttcttcaatgttctgttggccattttgtgatactgttcttgttcttcgtagatttggctatgattgtgattatggttttggggaccaaaacttgcctattggtcaaataccgtgccgaagacgatgatgtgagagatgttntatatggatcgtgggcattttagttgttggttagtggttatatgacatacaaaattgaggataagataaatcgaatttataaagattcgtttatttatatagtgagg

SEQ ID NO: 6986 - DNA, 283 bp, Glycine max
gctgcaagatatgaccatttcatgttcacagcatctcaacatttcctaacactttcagttgcttccaagatttcgttgtatgcttcttttacttacccgaccaaaacttccctggttattcaattaaacaggtttaaagacaacttctttcgatgggaaaattgttgaaaatcattcatcatcaacttaatgatgcattgtaccaaagtatatggaaaatattaaagtctaattgtgctcacctgtctggcttgaaaactatgttcttatatacaaaccaact

SEQ ID NO: 6987 - DNA, 357 bp, Glycine max
  unsure at all n locations
ntgacagtttccncgtttattggggaaacaataatagacgcatagctatggtctaagaanaacgaactgtaagagctgtttgaaattaacacagccgcgacaacatttgcatcaatcagcttagcccgctgaacatcaatgatagttccattcttgtcttcacacaccacaatcttgcttttcaccttggctagttccttcacgttgtcgcacaagcccatgaaaacaattggaacattgctggaagagaagtttcatgatagagagacatgccagttatttggacaccattgccaagtgtaagagtaccatgaaattcacggtccaaggtgccagcagccacggttatgacccatg

SEQ ID NO: 6988 - DNA, 176 bp, Glycine max
  unsure at all n locations
agctntatacacaaaagttagtcatattcaccgactaacaactcncccaaatgtatagttgtggttgctctcaagcaaaaagagaacagttcacttcgcctctagtgacaacaacatgcattgactatgctcaaaagagtatgctacataagttcctgattgcatgatgagagaat

SEQ ID NO: 6989 - DNA, 373 bp, Glycine max
  unsure at all n locations
tgaccaatcccgacccaacccggcatagtcggtcagtgagaatcttgtgatgtacctaaacangcgaagctctggcaagtcacagatnanaaggaaaccagaccaccaagcaaggaggcttgtggtggctggccaactgtgaattttgtgtaatatgtggattggggcctctggtaatcgattaccaacggtgggtaatcgattacaaggcttaaaattgaggacaggaggctaagatggtctctggtaatcgattaccaangngtgtaatcgattaccaagcttgaaaacgaagtcaggaaacttatggagcctctggtaatctattaccancctgtgtaatctattacacagaagaatgggtcactggtaa

SEQ ID NO: 6990 - DNA, 344 bp, Glycine max
  unsure at all n locations
agctntgccacatgctgaacccatattatgcatattaattacactcaataagaatttcagtacaaaatggcaaaagcagacttttctcatgctatatgattgtacctgaggttaacctagacatagtttgattattgatttctgcattctttgattcttcatagctgagatgttatgccaaagaattagcagaatcataaatgatcaattcaaataatcatagttaatgggtgaactgtactttattcgatcagtgaacatagcttcttctttcagagtaagctctgcagtcagagaaaattctgcaagaataacatgtaatgggtttaataatgtggaacttt

SEQ ID NO: 6991 - DNA, 451 bp, Glycine max
  unsure at all n locations
tataagaacaaaattgcctcaatcattttcaaatatgcatgtgaattangaagcatcaacaagaatcaagcccaggctattgtgcaagccatcaatggggcaaaacacaccaaatgattatgatgatggatggctcaaattctcacaaaggtaaactcatcactttcaaattgagctttcaaaactatcatgacatgtagaggagaatcaaagatttcaagtcacaaaatgtcaaaaacttttattttcaaaacaattacccatttcttgaacatatcctataattcaaagaaaaacatgcaaagtagtacatgcgccacggaatggcccaaaatattaaactaaaaatccgacgaaactaacaacattaacaaattaacacaactgacanattaacaaaaccaacaaaactagcaaaaccaaagaacactttcccccatacttaaacaac

SEQ ID NO: 6992 - DNA, 524 bp, Glycine max
  unsure at all n locations
cgcgcgacacgcggggtcaanactgtgtaactcttgaancccttctgaattcgccgcctcttgacaactcagctctccatttattatataggaccagattgagagggtgtttatttgatcattgacatggctagaaaaaaccaaccccaacacgaagaagaagaaaaaggactacccttccttatattaattagacactacaagactaaaccacacagtatacaatcaacgagaaaattgaaagatagcacttacgtttgcgcctccacatgccatatcagctacttggtctcctcggagatacgcttatcttctcttcctttggctccatatgcttctcctttttcttcagaaccatctcccgctgctcgatccatgacgataacttcttctcctccaatacctacttctcctttgtaaccgcctcttcaccaaggcagggaccacagccgcttgtgctccactctagttatacctcttgtaaacgctaataattgatttcgaaacccaaataanccaaatct

SEQ ID NO: 6993 - DNA, 244 bp, Glycine max
agcttgaacattcatacattaaggagaagcatgatagaatccaagagaaataccactcagtgaaacacaatgctgatagagtctatcattttcttagccaaggtcttgtattgagtcttactttattagaaaagctctctttgaagtgtagaatctataattctttaaatgggttgcttatgaaagctaggagtcacttagtgacaaaacaatacttgaatgttcttaagttcaaggcgagtct

SEQ ID NO: 6994 - DNA, 370 bp, Glycine max
  unsure at all n locations
tgatcaanacanacatctaatcattccagtccactcaattcatacantttctcattcaagtcattcacaaacacttcattcataagaaatcacaccactgaatatcataatcaataagttcactgttcaaacatgcttttgtacaagctatcaacacttcaacaacaaaaatttaaaagactaaaatttaaagactaataaagcataaacaaataattgacatgaactaaataattgataaaagaaactattcataatttgcaaaattttaaaaactatgtagaatttaaaactcatgatcatcctactgctgatcttctgcatgctcgttcagatccagcattggagcagctggtggatcctgtgaact

SEQ ID NO: 6995 - DNA, 450 bp, Glycine max
  unsure at all n locations
agctttagttgtaagtgaagattcctgactagttntgttatgtaacaaaaaggaaactaaataacctcattcgagaaagattctagaanagttacttggggaatgtggaagggtacaatttcgtaagaaatgggatggttgcttggatacatgacatagcttatagctatgaaggagttaagggaatataagggctattaagccttgtacataaagaagcatgatctggtgggtgatagaaataaatatcttttaccagtttctagtgcctaattctcannatatttaatcatcaaatcttaaatggctgagattcaatttattggtggatgaagttttctacttgaaacacaatacacaatttctactcactacttttagtacctgtctctagtaaatgagtaataggcaggagtactttagcacaatctaaggtgaatcataaactat

SEQ ID NO: 6996 - DNA, 441 bp, Glycine max
  unsure at all n locations
ttctcagaagctttcaggagctacctattataatagaagcatgtgtacacttgttctactttgatgaatgaaaagtttgtgaaacaccacttaaaggttcacttctcttcctttttctttcttcaatttcgtgcctcccctctctctttctcttcctctttctttttcttcattgaaagcatcctctcaagcttcttatccaacgctcatcttggtggtgaagctccttcttccattgcttattccttaatggatgggcgcctctctcacctcttttcctttgtcttcctctggcatctcatggtggaaaatcatcattaaaggaccccattgaagctcaaagatccagntctcatagaangcccacaagcaagttttcatcaccttgtgaaaagacagtgatgaggtcattttacttcattctcttatcatgcaatcagt

SEQ ID NO: 6997 - DNA, 433 bp, Glycine max
  unsure at all n locations
agcttaagagcaattnctttcttttcttatcattctcctcatgctgatcaatctcataaattccatttcatgttcctataactttctaaacaaagtagcaagagacatngctagataatctcgtgatttaataacggctgttaccttgggttgccattccctgcttaagcatctcttgacatcccagtgtgccttcatgggttacttgtaatgtatcccacatttcttttgcatttttacaatttgagaactctaaatattcatccatgccanatgcagaagtganntatattttggcctttanatngtattgaacctttcttatttcatcatcatcccattcttctctanggttttctatangtgcatttcccactaccattgtangaatgaagggaccaaattcaatggcttcccatatatttaaatctat

SEQ ID NO: 6998 - DNA, 443 bp, Glycine max
  unsure at all n locations
ttctctttctctattattntatttaagccatgccacatgtcttccgttgaagggagcaagaagggcccactttccctttttactgtgacccacactcaaccacaaaagtgagaaaaatctgacctttgaaacgctaaaatcatgcctcggtttgcgtgcccgttctctggttccagttcctcgcgtttctctgcgtccgtcggggccagttttcgaaagcaagcaatatatatatcaaaacgctcagaataaaaccctgagcgtggttcagaggttggttntgttaaattctaagtcgcacgcaaaacgatgatttttaactaattaattaagaaataacccantaacctccagttatggatttctcttncttaattagcctaacccgtgtattttgcccccactattcctacttctaccaagaacatataggcatatacact

SEQ ID NO: 6999 - DNA, 282 bp, Glycine max
  unsure at all n locations
agcttctagccaaatggacttaccttgaattaattcctttgatatgccctttgagccttgtttccctttccttgttntgaagctcactacaagccttaagtgaaaaaccatgatattaccatatccttaagggaatttggagctttggaattgttttgggaataagtgtggggggtttttgtttcattggacaacttgttttgttgactatgcttcatgatgtattttgcgccatacttgatgtacattgtatattggctaaatggtggacatgctgaatga

SEQ ID NO: 7000 - DNA, 469 bp, Glycine max
  unsure at all n locations
tgcctgggcgagctgngcggcaaccaccttccttcattntgctatnaaatggtgtgaggggctgangaaaaaaggttcaacatctttggcactcaggattcactaaaaataagtgaggaaaagaagaaagaaggaaaaaatcccagctgagacgctttcataatgaattcatgacattgttgtgatcaattacgctaatggtcttcaccattctttgcctttcttcgttcgntcttcatcgttcatcgatcttcaaccggttagttttcgatttcgaagctntgaattcattatatgcacccttaggggtccattcttgctttgtatgttttcatcttcatctcgtttactttcggtattcttttcttcgttntaaacgagtttcgactgatcgtntaagccgtaacctcaatgaatgataaaatgaatttcaattgatcatttgtgttggaatggttgttaatcatcg

SEQ ID NO: 7001 - DNA, 357 bp, Glycine max
  unsure at all n locations
agctngcttatggngcttctatggaggctggatctttgagcttcaatggngtcctttaatggtgattntccaccatggaggtgcaacggaagacaaaggaaaagaggtgagaggaggcgccatccattaaggaataagccatggaagaaggagcttcaccaccaagatgagccttggataagaagcttggagaggatgcttcaatggaggaaaagaaagagggagagaaagagagaggggggagcacgatattgaaggaataaaagagggagagaagtggaactttgaagtatgtctcacaagactctcattcatcatagttacaacaagtgttacacatgcttctatttataaact

SEQ ID NO: 7002 - DNA, 471 bp, Glycine max
  unsure at all n locations
cttcacctttggtcctcttcatagttggtgcatgagaaaacattctctattttcatctcccactccaagtaggcctccgaatcgttctttcctttaaagggaggaatgctgagtttaataccatcaattcggttttgtctaggaaaaccatcattccctcttctcctcctttcttcttcattatgatctctgttcaccatttgatccaacctctcatggagcgcatcatctcgttgtttcattaacctctccaaatgttgcatcaaagcttgcattaggaattgtgaaagcccccctccatcattangatttgttcctgtcatctcaaacaaacaaatcanatgtaacaagacaattatagttgttgtttgaataccttanacaaatcanacgtaacaagacaattatagttgttgttcgaatacctcacccactcaagtgtatcacacnaatatggcttttctctaatga

SEQ ID NO: 7003 - DNA, 361 bp, Glycine max
  unsure at all n locations
cgaaatgcagatattgtttcatttcggaagagtgcgcaaccaaaaagtacagtctttccatgactattcatacccacaaaaattccaaatggcacttcataagaattgaccttgtgtgtagtatcaaatacaacaacatcaccatattnttggtgcccatcagagctagaagtatgagaccaaaaaatatgctctcaccttctctcttcatcacgtggatatgcatactggaaattatagccacttctttttgcatcctcaccgtacttgagaagatcttggcatcatttctttcacttatttttggtttcacaaaaaatacgaatgccctttcataaatggaaataccatgcttacattt

SEQ ID NO: 7004 - DNA, 378 bp, Glycine max
  unsure at all n locations
ctgagaaacgctgatcatgttaaagggttcattttcaatcatatttttatcttctcttaacttagctctttcattttattttatttttaaaaaaactttggaaaactttacggtgtattattttattgctattcatggaagtggaagtatggtccctcatattttgtaatatgaatatgtccttaccttacctgaagaatatccacactgccatttccattatctctgaatgacttttatattgctccgttttctttccaagtaacgagtaaacatagctntgatgcataaatatgttgattgaattgactccaaagttccaaatttgaccatgaattgcaatgtacgtaatanggataaacttaaattaactaatcc

SEQ ID NO: 7005 - DNA, 423 bp, Glycine max
  unsure at all n locations
agcttattgattntgataatatcactatagaaaatacaacattaaaagtaatttaaacacaaaataatcaatctttatattgtgtntttcttgtcagatctcattccaagtgaatttatccatgttattacggatgcacatgtttaccacaatcatgtgaggccttngcaggagaagctccataaccagccaaaaccttttccagtatgtgtaatgtttagcacttcttttactttatattgtgactcttttacttgttgaccccctaatctacttcttgtagactttggagatcaatcccaaaatgagagatatagattcttttgtggctgttgatttcaagctcataggctatgatcctcaccagaagattgacatgaagctggctgtctaaaatctggggattctcactccttcgaactg

SEQ ID NO: 7006 - DNA, 448 bp, Glycine max
  unsure at all n locations
ntgattnntttanactntntacactanagagaaatcatatgacaattntgaagaagaacatcatagggcatatcctcttcatcgtctgatgaagtacaagaagtattagatttagaataagttttacctcgaccttatcatttgtatctgccatgagatagatgttggcttggtcatcatctgaactattacttttctcattgtttgagtcatctcaagtgatcatcacgcttttctttttcttgtccccaaaatatctcttttttagttggggacattcatccttcaagtgtccaggttttctatattcaaagcagatgatctcattgcttttctccttggtcttctttntgaatctagaatcctttcgtctgtagcagggttggaaattcccttcttctttgaattctgatactggggacagatgtcgacaggatgtcacgacatc

SEQ ID NO: 7007 - DNA, 289 bp, Glycine max
  unsure at all n locations
agctttcgagctnttcattggagtattttgatcttgctttggtgctctagattgtgggaatgtactcaaatacgtggggcaatattggtttgttttcttgcttggatgggttgaattgaggatttgtatgagatgaccctatgcctataatgcattttggagcaatggggcatgccgcattgtccccattctcttgctattaatgcctaaatgtgcgcccaccaagtgtttggtgaaatgcctcaatggcattngcgcatgattctgtanggatacaacctatgggaca

SEQ ID NO: 7008 - DNA, 405 bp, Glycine max
tttgctgattagttttcgccgatgaaaggatcgaagtgggtctaataagacgcaaatctgatcatcatgtttgataataccaaaaaacctaggccaatgaagatggtgagaattaaggagaaacccattgtgtgacttgcattcctatacaggccaagtttccaccaacccaacaatgtcattactcagcccataacaaaccttcttcttacccaccacccagttatccataaaggccaatcctaaatcaaccacaaagcctgtctaccgcactttcaatgacgaacaccacctttagcacaaaccaaaacaccaaccaagaaatgaattttgcagcgaaaaagcctgtagaattcaccgcaattccgtgtcctatgcttgacttgtcccatatctacttgataa

SEQ ID NO: 7009 - DNA, 363 bp, Glycine max
  unsure at all n locations
agcttaaaaccttgatgggataaactattataattataagaatcactaaacccagatacatatataaaagagaggttcatacaaaaagaaggaaaaccaaaaaccagaattgtacagcttgctgaaagcaacacagatcaatactctcttataactaacacgaagacaggaatacaccactaacataagataacaagcttgcaaactttntaacttttcagatacaacatataaataaaccctagatatgtaaacactcagaagagatcgagaaaagaaacccacatcaattaaggaaaatagtttacaaaaagagcatgcactaaaaagctattaataaagtagatcgactagtcaaattaa

SEQ ID NO: 7010 - DNA, 409 bp, Glycine max
  unsure at all n locations
tncgctnttggtgaataataagaaaaaagtcatctatccaaaattatcacactcctttcttcatccaacaatgaattggtctatttaaggaagatgatacacagcattattgcacatctctgtagaagcagccactatagtaaacaatcttctctatctaaaatggagtttgttctaaattacctaaatgccactgccattggagttctttctataaccctcttctttttgtttttgtataatcccttcaaatttgcattatgtaaaaaagaggctcccaaagttgcaggtgcatggccaatacttggtcacctaccactattgagtggttcagagacacctgatagggttttgggtgctttggctgataagtatggacccatattcaccatcaactatggtgtcaaaa

SEQ ID NO: 7011 - DNA, 341 bp, Glycine max
acggagattcatgcatcatgatacaatttcactgtaaagcgggtctcaattggattcctaattttcaacttacctatttggaagtgacatcatggcagctaggccccagcttttcattgtggattcagtcacaaaaccaacttcattatgttggactatctagcacggggagtttcgattctattcccacacagatgtgggaagcactttctcacgttttgagtgtaaacctctctcgtaatcatattcttggagagactgggactacattaaagaattcaatatctattccaactattgatctaagctcatatcacttgtgtggaaattaccctatcttt

SEQ ID NO: 7012 - DNA, 305 bp, Glycine max
taaggcaatgaaatatacaatatacctaaatatcctcttcttctacagctagttctcccttcttctctgaggagggtctggacctcgaaatccacaagctatcaatttattaccaatgaaagctgaacatgcagacaccccatatgaacatgttcatagtatgcgaaagctttgcacatttttaatgtttacaatatctcgttagaaaaggtctcactcgtaacatgcaacatgttgactcacaaatttctaaggaaacttaataccttcataactatcatcacatagatcagatctctcaagtg

SEQ ID NO: 7013 - DNA, 348 bp, Glycine max
  unsure at all n locations
agcttgagtttactagtantttgtttatgaaatcagttttcaaaaactcgaaagtgaatcaaacctgccctanaaaatctttggtttctctcttcttctatattcttcccattctactcattttttctcttctttccctatcacctacacttgacatggcagtataacaccccaaactttttaaccccatgttatagaatcatcaaatatacatatccaccaaagaagtacaaacatagacatcatactcaagcttacttctcattatgtaaccatggatttctttccctaaattaaagcaacccaatcaaatgactgcttgtagagcactagttattgaacatgaat

SEQ ID NO: 7014 - DNA, 340 bp, Glycine max
  unsure at all n locations
nggtggagtttaaagaaaaccgtggaaggttcgagctaggatataagcccacacatgccgacataaggaaaaacaccctaaaaagaagggaccgaagcatgcgcccgcagcaagaaccgcaagtggaagggacttccttatgtcatatcatttaaagcttcatcagcgtacgctggatgtgtgaaaggcggatcgccatgatcaacaatgaagtccctcaagagcaatcaaactcagtatggtcatgccctcctgagttcgagttgggaaactggcaaattatcgaacaacccaaaattntcatggcaaacataatggtaattgttagtccaaaccctat

SEQ ID NO: 7015 - DNA, 442 bp, Glycine max
  unsure at all n locations
tgacctttctgtggattgaagcaaagcttgttagagttagaccaaagcatgccctttgctgggccacgccgaaagaacactntaattgtgcccatcccctgaacatttggtcatgaggtttgtaactcatgttcccaagaagtattatctaatgttagtcacaaactcaacataacaatttgcataaaatttcttgattaatttgagcaagaacaaaatattgttgatggtaggagacataaaataacttaatgttgcacgacatacatggtcttgaaagcgaggctgaaatgcatctggctattgttggagaatagagagtgacaatgttacattccctttgttcgcaaggactcacgaatactataatattaattaatatttcttctggacgtatatgtaatgggtttcctaacttctataatctagaaaatgaacacct

SEQ ID NO: 7016 - DNA, 386 bp, Glycine max
  unsure at all n locations
ctctaggatcttcttgacttctcttgataaaacttcaacttgcccattggtctggggatggtaagggaagctaccttgtgtctgacactatagtgctggaggactntcttgagttggatgttacagaaatgagatcctncatcacttatcagtacccttggtgtgccaaaccttgagaagatgtttttcttgaggaagcgaataatagtctctgcatttgcatggttcacaactatttcttccacccatcttgttacatagtccacaaccaatataatgtattcatttgagtaaaatgattgcaatggaccaatgaaatccatcccccagcagtcaaaagcttcaaccctcagaatgttctatagtggcgattcattccttctgga

SEQ ID NO: 7017 - DNA, 360 bp, Glycine max
taccaaacaaatatcatacaataatcaataaaaacgaagagttatcgattaaaacaaagagaaaacacgaaacaacttagaaaaacttgtgatattcaagcaaactaatgagtatgcacatgaatcaacaaactaaggcacaaactaagcaaaaacaaatgatatgagtagcaatatgagtcacacactatgcaaacaaaaagtattttttgctagatgcatccaatatgcctagttcatttctaatgaaaaagaacctatctctagtaagcggtttagtgaaaatatctactagttgatgctcactatcaatgaactcaatgcagcagtcaccttttaacacatgatctttaagaaaat

SEQ ID NO: 7018 - DNA, 487 bp, Glycine max
  unsure at all n locations
gcaaaaagatgatattgataaccactcgtgtatttccgcccgncagcgtgactcataagtcagtatgacagatcttttgagcacggaagatgacgttaatcaccgcgtgtaaacgggcttgttggccgcaattgacgaatggcgcataatacgacagtagtgtctacgtgctatcanagctttcgtcttacagacagcaaaaagtttatacggataaccactcgggtattttcgcgcgtcagcgtgactcacaagtactatgacagatgatgtgagcgccgaagaatacgtatatcttcacgtgtcaacggagctgttngtcacgatttgcgaatggcgcataaaacgacgcttgtctctgctgggtggcgcccttttctgttacggactcacaaaagttataggataaccactccgtggtttcgcccgtcgcggactaaaagtcagatgaccatcttggagcgcggagatacataaatctctcttn

SEQ ID NO: 7019 - DNA, 350 bp, Glycine max
  unsure at all n locations
agcacgcagagactaacgtcgtcttctgtgccattcatctatcgcggncgacaagcccgttgacacgtggagatttacgttatcttccgcgctcacaagatctgtatactgacttttgagtcacgctgacgggcggaaatacccgagtggctatacatataaaatttttgctgtctgtaatacaaaaagcctgatagcacgcagagactaacgttgtcttctgcgaccttcatcaatcgcggccgacaagcccgttgacacatggagatttacgttatcttccgcgctcacaagatcagccatactgacttttgagtcacgctgacgggcggaaatacccgagtggttat

SEQ ID NO: 7020 - DNA, 224 bp, Glycine max
cactgcctcaagtagttcacgatctgcttccataggataacacgttgcctaacagttactatcaggtcaagagatcttacgcttgcactagccagtgatggaatgaatccacatggcaatttaagcactcaaaacagctcatggccagatctactattaatttacaatcttgctcctgagttgtgcatgaagagaaaatacatgacgttatcgatgatgatatc

SEQ ID NO: 7021 - DNA, 281 bp, Glycine max
  unsure at all n locations
gagcttcatcatgcgttgcttccatcacactgccgactctatagttattatgtcctatntgtttagttgatatggatatatctctacccctggattttggctcttattgctacgtacttttgtcacagcagccttagatggctaccaatatgaattggcctgagctcgggtactgatgactctgctctggatgattaacacctgtgaggttattctatgagattgaatcagtttatggaacaaatgtgctatgattgtaatgctgtgctacatcctttctc

SEQ ID NO: 7022 - DNA, 580 bp, Glycine max
  unsure at all n locations
actctccctctctttcntcttccacnnnntcctnnncnnnnnnnnnnnnnnnnnccgcgcgtgatgatgctttgatncatcagngaccgaganaaaccaaacttaanctacctcacttaaatctacgaaggctgtgtgattctatcctattgccataagaggaatatgacgacgatgctgggatctgattcctccaacgtgtgatagacgtttagaaatataagctccaacatacatcacactagcatgattgattagagaaacgtagatatatgcatgagctggtctgttagaaagacccaacaatactatctactgctcttaattttacttacttgcattcttactcgacctatcctaaacctacctgaagtatgttctaaatcagcagttattaatgcttgtttcagcaatgccttatttctaaatttaaccacccctcatactaatttacctcacttcgatattctacttcatctgttttaatctacaaatacttgaccatacgccgtgctctccgaaacacgagagtaacctcgaatatatttgtacgactagacagtggaacgcaagtaacccc

SEQ ID NO: 7023 - DNA, 344 bp, Glycine max
  unsure at all n locations
aattaagcaccctatcagtataaagatatttatgaagattacctcaggtcttctgtttcttctgcttcaaagattgaagttctgaagacacattgcttaaattctttagttggaggaaatgtttcttgctcattagactcagattccttgactatattttggacaacactgggttctacttcatgaatttccctgctttccttgtatttgcatcctccttcttcagaggaatacatccaacgaaacccacactctgttataaccacttcatcgttgttattttcggtttgaacaaagaatntaaatgtaagctttggatgatgagtggtgctcttatcattaat

SEQ ID NO: 7024 - DNA, 378 bp, Glycine max
  unsure at all n locations
acaaaaaggagttagtcaatactgggatggtattgatgagaagagtttaatttcgggtgttagccatggaacatctatcatgttcttgaaagatgcatgtgttccaaattatacggcgctggaggacaaagcaacaattgatggtgttagatgatattgacaagcttgcttctgccaatgactttgtcacaccattcgaagttgatcgatcaggatgcttgccacggaaattgnggaggttattatggccatggttccccctgtgattntgtgtccttatgatatcccagcctagaagcattataaagacgagttctttatagtagcatctacctacaatnntcttgtgggcaatgttgacaggtgtgatccactact

SEQ ID NO: 7025 - DNA, 457 bp, Glycine max
  unsure at all n locations
tatctaanactgcgattgtgagattgatgcttattcggaaaacctctaatcctgcccatttttagtctaatattagttcacacttgtaattctaaatctaatatggctgaaaaatagagaacattggtttccttttcttatacgtatttttcaatttttgttcctactttattatgtgtttatagacttgagtgaaatgaatacaaactcaacttttggatcatattatgaatcctagatcaattgtgcttcgtctatatatttcgtggcatcataaattatcttgtaaagcctttcatttgtctatatttataaatcataaatataaacaatatcatagatattctttgtgaaattcaatattaaatcttatatattcattgtttttctttctcaacaactctcatatctccatctatctagnttatctatngactnttatgcggatctacatata

SEQ ID NO: 7026 - DNA, 356 bp, Glycine max
  unsure at all n locations
agctngcttgtggagcttctatgaaggctggatctttgagcttcaatgaggtcctttaatggtggttttccaccatagagatgcagcggaagacaaaggagaagaggtgagaggaggcgccatccactatggaataagccatggaagaaggagcttcaccaccaagatgagccttggataagaagcttggagagaaggctccaatggaggaaaagaaagagggagagaaagagagaggggggagcacgaaatttaaggaagaaaaagggagagaagttgaactttgagtaatgtctcacgagactctcattcatcaaagttgcaacaagtgttacacatgcttctatttatagact

SEQ ID NO: 7027 - DNA, 464 bp, Glycine max
  unsure at all n locations
tgggctcttgcctcactcaccgcctctttggtttcatttctagctatcttatacttatcccaagtttcagaatttctacacctagaccactccttgaaacactccttttttactctaactntgctctgaacactttcattccaccaccacgattctttacccctaggtccaaaacctctagattcacccaacgtctctttagccactttaataatctcttgggacgtcttgttccacatatcatttgcacttccttgtgattgtccacatcatccctcccatatcttttgttggaagattccttatttctcacccttcaagtgccaccatttgatccttggtgctaccatangacttcttctctntgccctatctctaattcttacatccataaccaaaactctatgttgggtagtcaagctctcttccgggataactntacagttcaagcaatacttcctatc

SEQ ID NO: 7028 - DNA, 423 bp, Glycine max
  unsure at all n locations
agcnttgcagatttggtcttcgccagtgaaaggatcgatgtgggtccgaaaagaggcaaatttgatcatcctactaggacgactgagaaaactggggcaaatgaagagggtgagaaagagggagaaacccatgctgtgactgccattcctatacggccaagtttcccaccaaacccaacaatgtcattactcagtcaataacaaacctcctccttacccaccacccagttatccacgaaggccatccctaaatcaaccacaaagcctgtctaccgcacttccaatgacgaagaccacctttagcacaaaccanaaaaaaaacaccaaccaagaagtgaattntgcagcgagaaagcctgtagaattcaccccaattccagtgtcctatgctgacttgctcccatatctacttgataatcaatg

SEQ ID NO: 7029 - DNA, 410 bp, Glycine max
  unsure at all n locations
tgagatgaggaagtgttgaagggtgaaacttcctgcttttattgttgaccacatagtggnacctggagatatgtcacggnggtcaggagaccttgnggacntcaggtggggtgctattgcccaaaaccaagcttgaccaatcccgacccaccccgagcatagtcggtcagtgagaacctgtgatgtacctaaacaggcgagctcctggcagtcaacagataaaaggaacaaanancacaaagcaaggaggtttgtggtggctggccagctctgaaacttgattgatatgtgagatatggnntntcgtaatcgattaccaagggtgggtaatcgattacaaggcttaaaaatgaagataggaggctaagatggtctctggtaatcgattaccacggggtgtaatccattac

SEQ ID NO: 7030 - DNA, 351 bp, Glycine max
agcttctacttatgtggcagggcgggctttcttcaccttcttgtctccaacgcgaactttgaccattgttcttccttcccgcgatgcttcttttcatgtctgcctgagtgggcttatagcctaaaccatacttcccacgattaccttgggtatttatcagtctagttatgccgcgcgtgttttttcctaaacccatcccgggctcataaccgttccccaacataactcgggccatcattaccgctgcatcggacagactatgcttgccaaagagggagtccacggaggaaatgctgaccacctcaaaagactggaaagtagtttctaacgattcttctgcggcttccacat

SEQ ID NO: 7031 - DNA, 443 bp, Glycine max
  unsure at all n locations
tagtttaagttagtctaaacctaggagggctgtctaaattgagcctagtccaataagaggaatctgaggacgaagcttggattgattcagtccaacttgggatcgaggtttagtaatttaggctacaacatagaacacaaaagcatgattgattagagaaacatccttatatgcatcagctggtctgttagaaagacccaacacttctacctactgctcttaattttacttacttgcatttttactgtttttatcctagacctagtttaattatgttttaaatcatcaattatcaatgtttctttcaacaatgccttatttctgaatttaacccggtcttagactagtttccctgagtttgatactcgaattcatctgttttaattnttaaatacttgacgatccgcgtgtgctttccgaaaaccagatttcccttgaatata

SEQ ID NO: 7032 - DNA, 404 bp, Glycine max
  unsure at all n locations
cccatggaagctcctaatatctcccacactatntgggatgggccattcttggatggccttgattntctcaaggtccacttggaccccatttctgccaactacaaaccctaagaaaactatattatctacacaaaaagtacacttctctatatttgcatagagggtgtttttcctaaagactgaaagaacttgcctgagatgtcctaagtgataatctaggctcctactgtacactaaaatatcatcaaaataaacaactacaaatctacctatgaaatcccttaagacattatgcataagcctcataaaggtgcttggtgcattagtgagcccaaaaggcatcactagccattcatacaaaccagacttggtcttgaaagcgggtttccactcatcaccctttt

SEQ ID NO: 7033 - DNA, 436 bp, Glycine max
  unsure at all n locations
tctcaaggaaggtntcttaagaaagcttctcaaggaagctacctagtctatcaatagaagcatgtgtaacacttgttgtaactttgatgaatgagagtcttgtgagacacaactcanagttcaacttctctcccattttcttccttcaatttcgtgctcccccctctctctttctctccctctttgttttcctccattgaagcatcctctccaagcttcttatacaaggctcatcttggtggtgaagctccttcttccatggcttattccttagtggatggcacctgctctcacctcttctcctttgtctttcgctgcatctncatggtggaaaatcaccattaaaggacctcattgaagctcanagatccagccttcatagaagctccacaagcaagctttcatcaagtggtatcagagcacaagagcttcaagt

SEQ ID NO: 7034 - DNA, 477 bp, Glycine max
  unsure at all n locations
agcatttacatgcatgttcaaaccatatttactatacttcgatcaactgatgcaatctatntgattgaaaagataatttatattacacttctaatgtagtcgacaactaaaaaaaaatataacagagagtaatgcttaagccaatcaaatcaaatcatttagaatctcatcattactatcatgcatctcaaagagaaggagaatcaggcatcataatgtatagcacaacaaaacattaaaagaaaacatgccttctaaagccaaccaagggaaaaatgtatttatatttgtgaactttntcaaaattataacacatatataaccatatataaaaacatggttgaacaatctgaccacatgcacaacacattccacacattatttctgaaaatgagtggtaagggaatataataaagcattgttattaaaactgtatgtgcactaagataacaagggtgtcatgacaaaaggaacaca

SEQ ID NO: 7035 - DNA, 367 bp, Glycine max
tctgcacgtcaacaagcaacaccaaccaaatattatttttgcgttctcattaccacctcagctgatttttgtgtttccattccaactgcatgtagagcaacctcacctcatttctacatttccattatttgttctaggaagctcccttctccctctctctgtcgatcccactttgctgttgtgttgccaccgtcatgttgacttgatttgaatggcttaagcactattttctgtgagattaattctctaattgtagactacattacaagagtagtatggattatcttttcaatcaatagattgcattagttgatcggagtataccaaatatggcgcgcacatgcatctaaaagcttggagctgctat

SEQ ID NO: 7036 - DNA, 275 bp, Glycine max
ttgttggtgtcacatctgaatgagagcttcttttgttgaggtatgacttgccaattccatttgtaagctttgtggctatgaatgacatctttcaaaaggtaccaaatagccaacgtttacacggtgaatcctatggaagataccaccatgcttttatcagagtggctaggatattgctagtaatccttggttatatgaaagtatgggtctgactctcgacgttgttaggattttggaaaaaatacttgatgagctgaacattggggaacatgata

SEQ ID NO: 7037 - DNA, 423 bp, Glycine max
tctagccaaatggacttaccttgaattaattcctttgatagcccttttgagccttgtttccctttccttggtttgaagctcactacaagccttaagtgaaaaaccatgatatcaccatatccttaaggaattttggagctttggaattgttttgggaataagtgtggggggtttttgtttcattggacaatttgttttgttggctatgcttcatgatgtattttgggccatacttgatgtacattgtatattggttaaatgttggacatgctgaatgaaatgttgtttctcacaggctattcaaaaaaaaaaattcgaataaaaaagaatagctatatagttgagtgaataagatcttatatggcacacgaatgatgacactctcggttctactcttcatgtgtaaaatttatcttcacttca

SEQ ID NO: 7038 - DNA, 281 bp, Glycine max
  unsure at all n locations
ggtgggaatcctgnaacccagaccattcttgggaagggttcaagatcacaatctcccaaaggtatgaagcatctaacttgnggaatgcttttcaagcgttgctagcgctggaacatgaataaacagtgcgataattcataggcccattcgagaagcatgtcagaatggtgaaggtgttggaggaaccgattctggtggagatgtttctcatcgagctgaaagacgagatcaacactgaggtagcgctccatgaaccaaaacacttgatggaatctatggtc

SEQ ID NO: 7039 - DNA, 283 bp, Glycine max
  unsure at all n locations
tcttgaaattataacttcttggagtgcttgatacatacaactgttgggagtcgatgaaattataatagttgcatacgattgttaagtgtgagggatcattgaagtcaattcggatataccccttacggtttttctcatgagaatacgtgtctgcgatgtgtatgatactctcgcgcacgatacgaatatacttgagcgctgattgggtaaaggatcatcaactattcttcctatgcgcaagattctgtctaacagangcccattgaatggctataatttatat

SEQ ID NO: 7040 - DNA, 476 bp, Glycine max
  unsure at all n locations
tcattagttgtatatcttgcattgtatagttgcttcattattgtgcaactgttggcattgtgctccttcaaagtgagaataatattctttggtttgaccattgactttgtcatatcacgaataataatcttttcatcctcagtcagtcaaccaacatatggatgtccaacgaatgacttatccaatgcatgattatgagtctcacatattaacttcatcatccactcttcacctcccaacactggtttcgcaccctgcttaaagggacacccacattntcgactgtcaatcaccgttcatactagatctttctggatgttntggatttccacttttctcacaaccaataaaacaaatgagggtnttcctttcttttctgtatgtgtctgaccttattatcatagccacanaaccaatatcatacgcaacagtatgaaccccattgcatacgtctcacggtagcanatacctacaaa

SEQ ID NO: 7041 - DNA, 429 bp, Glycine max
  unsure at all n locations
agctnngggannaaattgaagatattntgtcttttaaatgcctaactcccttgagtgacatttgtattggttgttatcttgtgtgttgcgtcttagtacatatcgtatctattatgcatccttcatcatcataggaagtgtgaataaaagtttctatgttagaaaggtttcttcaagaggcaaaacttttgttttcatcgattacagggttgtcataatcgattacaacaagttgtttgaagcttggagagttgatcttatatcggtttaatcgattacagtagtctcataatcgattaccctgctgtttgagacaatgactgattgatttaggagtccctactttaattgattcccaagtggtttaattgattacttctctntcatttagtagtccagaagttaacaagaacactntaatctattaca

SEQ ID NO: 7042 - DNA, 435 bp, Glycine max
cacactcatcacggcggaaaacggagagttccgcgatacattctagagagaccggcccacagcacaaagacgaaaggcgcgaaccatccagatccgggcgcaaccccaaataccaatctaggcccccccggaacatactggaagaccggtcgcccatcgacgaagcccacgagcggtaagctcacccacgccgccgaaaaatggcccacgggcccccccgctgccgaacgcccccgcaaaccccgacactccgggaaaccaattgacctaccccggggaaaggcacacacccaataaacccccacgcacccacaccggacggctccccacctccccgacaggacacaagggcaacacaacactcgcgggccgcacacacccccgagacccaaggcagcacacctcctacacctaaacacggagggaccgcccccc

SEQ ID NO: 7043 - DNA, 410 bp, Glycine max
  unsure at all n locations
agcttcttgcgtagccgctcttggtgctcagaatatcctcaaaacaaatccctcttattactagctattntgaattctttagttcctaaatgtacaactttcaaattgttgctcgctcccctctttcttttctgcaaaaaagaaaatcaaatgctatcaaaacatggatgaagtcctaagaaaatcaatatcaaagaaaacatggatgaaatcacaattaaaaagcacaactacctatctttcagagtcctttggttaatatgtcttgtctccttatgtggtggggttntgtttaataatcttatacgtttgccttccaaaaaaaacttatcactaatcctcttttcattaatccaatnctgtatgttattgtataaaagatcatgggttctccacctggctgcactact

SEQ ID NO: 7044 - DNA, 464 bp, Glycine max
tgtcgctggagctgacccatcacctgccctaactctttcaaactggtgattcctaggctcttgaccttgacttgatagaacctctttttaagcgaaggcgcctgactcgatcctatgttttactaaagtgaaacaaaacccagtgcgaatcaaaactctaacatctatcatgggtggaatggatgaatgcatgaagaaatgcacatgacacagatgcaatttataaatacgggagcccgggaaattgtccccttcttagatacaacattcgggtagcatagcgcccgacgtatgcatttaagaaggcgacacggaccctccatcggtttaacaaagtaaggggatcaagacgcaatccgtgcatgatgcatatgtgaaaggcacaacacgaggatgtacatagtacgacaatatccacaaaaacatacaagcataggcgtacatgacatttaggactacatgca

SEQ ID NO: 7045 - DNA, 429 bp, Glycine max
  unsure at all n locations
ttttagttgaaattgtcatatttacacatgcaatcttaattctcaacacactttttggatgagtcttccaaggattgtgttgccttctctaacttttcttccttttccagcaataaggtaaagctacaaaattgagtctcccaatgtttgatataagttttgtaagaccatctttaatttgaacaagtggcttaaaggtgtaaatgcacagtccttccaagcgagcaactcanaggtgtaacaccatcttagaatttcgtatgagcatcttcattaaaaatggaagacttgaacgaaaatggttggcttgctcctcattgttctgggaatagataaggatctatataatgagcacaatgtatgaaggatggaaaaactccaatntatgtaatcccaggttaagacttgtagttcacactaatcaatgac

SEQ ID NO: 7046 - DNA, 450 bp, Glycine max
  unsure at all n locations
attggcttcctcatcatgtggcttatgatgtttacaattaaatgatcctttgctaccctgccatgagacacacacagatacacaaacacacacacatagagacagacacacgcagactcagacacagacacgcgcacacatgaggagggacacagacacactcgcagagtcacacacacataaagacacagacaaagacacaaacacactgagccacagacacacgcagagacccacacacgaagacacacacactgagtcataaacacacacatagacaaacacactcacaaacatggacagacacacacacacacataaagagacaaacacacacacacacagagtaagagacagacacaaacacacacactcacacacacacagataaagagacanacacacacacacacacacaaagacacacacactgaggtccagacacacaca

SEQ ID NO: 7047 - DNA, 465 bp, Glycine max
  unsure at all n locations
tgtggcttcaacttgctntacttttcntagttttccctcttcatcaataagttnttcttgaatatgattctcccacgtagacctttaaggctttagttctttaaagatatgcaatacgcgtgtagtgaaatgttgatggattggcaagtgcaccaattcgtcccaagtagtaaagttaaaatcgaagtccgagtgtcgaatccacagagactttgtttatacttaggtagatgattatttaattaagaaaaagatttanaaaggttgtagaaaacagtaaatcaaattgcttaaaattaaatcaaacaagaaaaagaattaaacatgaatntaaattaattaattaattaaagacaaaaaagatgagaaaatccacaatattgtagaacgaaaattataagatgggaactgtggaaactttggttatcagaagctactcttgatgtaatgttaatgaattttctc

SEQ ID NO: 7048 - DNA, 174 bp, Glycine max
tgcgcgccttcatgtctggaatatgagagtcgcatatatatctctagaaccttacgtgctctgctgatggcttaattccactcccagcttcaatacgagtcttggactttacagactcagtcggacatctgctgagtatgcaaacagcactgtatactgcttccacccagaatg

SEQ ID NO: 7049 - DNA, 432 bp, Glycine max
  unsure at all n locations
agcttctaaggtcaacatcaaatctcaactctgtccaaagataacatgggaaatccccaaaactgacccatccccagtgtatgttgcactaaatgtggcagaagcagaatatcacaacagaactataatgatgctatttatatgcctgaaatattgtatctcacctgcccacatgacaacaccaccagcattctcgattctcttccgctcatcacttctatttggtttatgatcctcagagagagcatttgctgccaaaataaaaaaaattaattcaagataccaatcttatttccaaaatgtattcaaatggaactgtaggagaaaatttatcatatgaccagacaaggactcttgtctgaaatgctgtatcttccacatgatctctgtatntacattatcaagcagcttttccccaacatcacatcatta

SEQ ID NO: 7050 - DNA, 358 bp, Glycine max
  unsure at all n locations
taacactcatcacggtggaatccgtagagtttcgtgagatttctgaaagagaacggccaaaaccacaaaaatgaaggggtgaacttatcaagataggggtgtaaatagaaattcgaatctaggcccttccgganacatttggaagttgggttgcttaaggaggaagcaactgggcggcaagctccttcacgttgttgaaaaatggtttccggggctttcatggcttctgtaatgcttccgtanaattccgaaaacctgggtaagcatatttactaaacattggtgaaagggaagagaaaaaaaataaaaatcaaatccaaaacactttcgtaaggctttcgtaacttttccgtaaagt

SEQ ID NO: 7051 - DNA, 471 bp, Glycine max
  unsure at all n locations
catgcangctttctgctcgatactcatctgggttgtgcgactaccatttccatcaacagacaactgatcgtagttgctcaaggaaacacacaaaatggccaattcaacattctcaaacatttctagccacttgcaattttctgctagccctctagcatgtattggaattagttgatacctgcaatcaatgagaacaaagcatatgacacagatcagcaactttttatagcagctctggcaatcggatcaatcatgactacctataaaatttctcacatgaaacaataggcgcaaatattttcacccacctaactaaagaatcatgtagatcggcagtgtcgacagtttcctcacgagctggccgaggaaatgaaaactctaccagaagccatcccattgtatgaagtaactccttcagcatagaggatatctaaatccgagggttcataatcagtcctcaatatctcaaca

SEQ ID NO: 7052 - DNA, 447 bp, Glycine max
tgtagagtctttcgtcaggactcgggcttgtgccctgttggtgccatggagatgatccaaaagtctctacctgaatctctaagaaagagtgtaaacaagtgtgacctcgcacaatccaacaagagcatataatggattccacacaactttacttttcgatatctcatacctaaggagcttgtaaaataattgcttggtagcccttttttcttactatgggagacaatctacttcaagttttaaacaacagttcacaacttcaattgtagctgcattagtcgtatctgtctgcaattttccaatcgagacaaaactgctactacaattgctactgcagtttataaccttgatgtgcgttgcttgctctatgatgtattattcttctgtacaaagatgacagggtagcaccaacagagaaatctaatattgcaatgtgtagcattgagt

SEQ ID NO: 7053 - DNA, 342 bp, Glycine max
  unsure at all n locations
gcttccagattagtgtaccagatgaccgcggctccagccaagctatcttggaanaagtgcatcaacaacttttcatccctagaatgcgcccacatcttgcgacaatacatcttgagatggttcttatgacaagtcgtccctttgtacctgtcgaaatcaggtaccttaaattttggatggatgacgatgtccggcactaatcaaagatccgccatgtncacgaacggatagtcgccaaagccttcaacatctctcaatctctctttgatagatcgagtttactttattcttccgctgctaggggtggtccttctgtggacaagaatatcggctatgctggga

SEQ ID NO: 7054 - DNA, 283 bp, Glycine max
  unsure at all n locations
tcccctcaattgatgcattnntaactaaagcttacatatttatcaatgcacgacataatgcanagatagaaacagaaaacacaaaacagaataaccattaatcaagatcaatttcattaataaataggatcatataaaagatatcaacaaataaataaataatcacatatcatgatcctacaaaaacttatctccttcctacaccaatctcttgtaatcttctctccatttgttgtcaagcaaaaaaccaaagggaggaacgaagggtatagaccaatcatgc

SEQ ID NO: 7055 - DNA, 307 bp, Glycine max
  unsure at all n locations
gctcattgactccagatcgntgtanagaaggacagagatctgtatcatgatttgtagaagaatatataccacaaactcttgcaacaggtgtagatgcagatttctgattcatggccagctgagttactaggatgaccaaggcatcaagttttccctcaagctttctattttctgcagacaatagcatcatctcttgcactgaattgttgggagatgaaagccatcttctcaatcaaattcctagcctcaacaggagtcatatcaccaagagctccaccactggcggcatcgatcatactcctctata

SEQ ID NO: 7056 - DNA, 412 bp, Glycine max
  unsure at all n locations
tctgatatatattcacttcctttaatatatgatatgatgccaggagttttctgacagacaaaaccagcaaactgttaaccgactctaacagctagtccctgtactgagtaaggttgcaaattcacaaaaactagtggaatgaagtcatacttgagacagtgaaagcaaatggacatattgtggccaaatttatgctacacctgaacactgaacatacattctgncaccacgggctatggaatgccctgcaatgtggccactacagactctatggaaacctccacgactacaaaaaggctggtagccgagatttgatgaccctgagtgaagtgattatgcaaaatgtgcatgaggaggatagtangaggataatacaccggctgataaggaagattctgaatgaaataccaat

SEQ ID NO: 7057 - DNA, 428 bp, Glycine max
  unsure at all n locations
agcttattagacttataacaccataataaacacattttatttgctgggttagaacatgtgtacttaaaatgcacccncacttacgttntgtcactaataagaacacgcctctggccaaattgaactgtgtctttatgagaaaagtagttccacacaaaatccataagaactcgatgaccctcattntgtctttcagtactgtttagcactctatcaccactactttctttatccacagtgtcacgaatccggataagagaagaacatggctttgcatcttggctacaactagcttgagcaacagcacgagacatatatctatccattggtccatgggtatttggtgctttcctcttccttgcatcattaattctcactagctcctttgcccctacacttgaactanggacagatagatagagtgattc

SEQ ID NO: 7058 - DNA, 430 bp, Glycine max
  unsure at all n locations
ntactggaatctaagaaggcacctattattgctgcttgaattgctgcgagaatgcatgctatcattgttccccaaaacctcagtggaaatattctaagcaacttcacctttttcaattgaaaatagctattcaagatgaatatataataataataataataataataatcacattgcatttttagagtgatcgagaagataattgttcattaacttttttaatttaacatttgttaactatattagatgcaacaatatatatagtagactaatactataaagaatgagatgcatacttgcgcaataaaccaggccgttaaagagaagcaactgcaaatcaaaaacaaagtgccacgaagcatgttggttntgtgtgctgcagtancagtttgagcgtgatgactatggtgaccaagataaaactccttcc

SEQ ID NO: 7059 - DNA, 441 bp, Glycine max
agcttattctatcccttgagataatcccaattaagtacttgattcatgtttggatttcaacaaggctcgccaaagcgcaagtcaatttctgaattcatctataagatgaccaatcaaataaaatcattaagtgcgaaaacagataaagaattcaagatgaaatattgaattgatagaattaaaggataacaagggtagttttttcttctcctaggcggaaggaatcacactcataataataatacaacgaaacctagagtgtctaaatggaataatggaggcatctagtaggtggaagtctaaaatataattctaagaactgctcaggatttctacacgttataatgaatgcctaccgtcttatttatagaattggagttgagtgtaattaatgagataattacatgaaattacaaacaaataatatctctaattatttca

SEQ ID NO: 7060 - DNA, 461 bp, Glycine max
  unsure at all n locations
tatttatagaccttcttcaacaaatgtttgttgtctctaaatatcaagatttcttttctttatcttgcggctgaagaatatggccattggagcatttaatgtttgcattaaatacacatacttcttcatactagaactcgactcttcttggatatcatgttgaacaccccagtaggaaatcgcttccttttgcgttaaagcagatttgcatagtagagtgcttcttttgatggaaattagcgaatttgaggacttggactttatatattcttcataggatttgacagatcctagagaatatctctgtaaaacaaatctcanacacagtgtattaaattaagtcttaaatatcattctttaatgttgtatcggatcataacttcagcttgctatcttctgaaacgtcggacacaaatgtgcaaagcatgttatgatatcatataagacacaacttgtaacct

SEQ ID NO: 7061 - DNA, 305 bp, Glycine max
aagatacattgatcattcgtttgtgttgaagctgctttacctttttgactcagaagaccaaagagagagggattacctgaagactatcctccaccgtatttatggaaagttcatggtgcatcggccattcattacaaaagccatcaacaatatcttttacaggttcatatttgagacagagaaacacagtgggattgcagagttgcttgaaatattgggcagcataattaatggtcttgctttgcctttgaaggaagaccataagctgtttcttgcccgtgcgttgatcccgcttcacaagccta

SEQ ID NO: 7062 - DNA, 412 bp, Glycine max
  unsure at all n locations
agcttagaacaatatacttggccttcttttaattgtctttgggcttgnggaccacaatcaacaaagtactttcggcacctactatatgttgacttgaccaatgctgttattggaatgttgcggcaatctttcaacaccttattcacacattctgatagggttgttgtcatgtgaccatatcttcatccagatgtatcgtaagccatgctccatttttcctttgaaatgcgatcaatccatgttgctatggctggactcaattgacgaaatttttctaagttttgatcaaacacatgcttgcaaggagtgtaccgctgcatcaaattgttaccatcaaaagttgtaggtagatatgaaactcanatttacttaatgtataaaataaaccttaagcaatttcttgaaacttctc

SEQ ID NO: 7063 - DNA, 466 bp, Glycine max
  unsure at all n locations
cctttatgaagtgcggacagaanaataacttgaaaaaaattttgttgtccactcgctaagcgcaccactcgcgctaagcgccatcttcttcacgcgctaactgagttctgctaagcgcgtgacctgtgcgctaagtgctattctcctttgtctgaataatttcgagaattgngctaagtgagagctcttgctaagcccaattccttctttgtttggaatagcactaagcgagacggatgcgctaagcatgggccactattgcatttaaggagcattttatttgctaagcatgaccttggcccactaagcgagagttgcaggaccaatcagagctacagaactcgctcagcgcgtatcttcgcgctaagcccaaaaacttctctagaatttcaaaattttgtattgggcttagcgagtagatccgttaagtgcatgaantttanaactaaaacgtcatgttgactcg

SEQ ID NO: 7064 - DNA, 440 bp, Glycine max
  unsure at all n locations
agcttatattaaatagagtataaggagtactctaatgtatatgtaaagtgatatccgntaatttgaataaatatatatgatctaataagatgaacaaaattaatataaaatatgtttagtctgttagattgtaaaatgaacacaatttgaaagacaaataagaggaagatacatgtttttgtctaaatatgattggatatttttctctttatagcgcttttctctctgaggtcttttactgagtttcataaaatgttgtattggaggatgaaatacctacaaagatactgtgacgcttaaataagattntggcctagagtaataaataaacatgttgtactaacctcaagtccacaagcatcgttataatcctcgtatccgagatattatgcacttatatgcctggtggccatcacggttttatccttgtaaatacaact

SEQ ID NO: 7065 - DNA, 440 bp, Glycine max
  unsure at all n locations
tgatttcggccagatcaatccccaagagctggcattgtttggtaatgaggctgatgggtgagaagatttcaaatcctgagaaatatagagatgaggagcccaagctggagtttgaagatcccactttgtatcattatgctatattctcagataatgtcatagctgtgtctgtggtggtgagatctgtggtgaagaatgcagtggaaccatggaagcatgttttccatgttgttacaaacaggatgaatgttggggcaatgaacgtttggtttaagatgaggcccattgaagggggtgcatctttagaggtgaaatcggtggaagaattcacattcttaaattcatcatatgtcccgatcttgaggcaacttgagtcagccaaaatgaagcagcggtacttggagagtcaagctgataatgccacanatgatgcanacatg

SEQ ID NO: 7066 - DNA, 360 bp, Glycine max
  unsure at all n locations
agctttggtacaagcaaacaactcanagtgctataatttaaataactaaaatntaaaagaattgaaatataaaaactgaaattaaaatgactgaacataaatcataaaataactgaaaataaactaaaatgttcaagatgcacaaatttaaatgtcctgctcctttggttgctcctgtgcatgctcattaaggtccaacacctaagcggctagtgaatcctaagggataggctgctctagctcaaatgctggtgcagatggtatggcatcatcaggtacaggtgtagaagatggctcatgaatgtggtctgtagaagtctcctcctcctgagccatgtatacacctgcatcacaataaaa

SEQ ID NO: 7067 - DNA, 425 bp, Glycine max
  unsure at all n locations
tttggttntggggtttactacttntttcttacttaccacttattccccattgctcctctatccctttcggttntagctactatcccatactttcatctaccttgtccttggtcccattacaaccttaaaagaccttttgatcctcatgtgcatgtgcttgcgatgtggttgtcaattttagagtcttgccaagtctatgtggtgtttgttttcatgggtgctctgagagtaaatagtagcctatacacttgagagatagagtgcatatcttgtgaggctctatcactcttcattcttgagctgattgactatctcgccatatctgagatgcttggaggattttcatgacggccttgattatttaactntctacgtgtcggatgttacccattcttttcattctttgagattcactgagaaatatg

SEQ ID NO: 7068 - DNA, 354 bp, Glycine max
ttaaagcgcgtgacttaatggttgccgcatgtcatcgggcccgccgcctctggatgacaaacagcacagaagacgatgttagtctctgcgtgctcctcttctccgaggcttatagatagcaaaaaggtgtaggaccaacaggctcccacatgtcatcgggccctgagtattatagatagcagaaatatctcaaaagtgcgggaccacatggttcccgcgtgtcatcgggcccgccgcctttggatgacaaaaggtgcataagacgacgttagtctctacgtgctatcatgctctgagtcttatagatagccaaagtatcttaaaagcgcgggaccacatggttcccgcatgtca

SEQ ID NO: 7069 - DNA, 359 bp, Glycine max
  unsure at all n locations
agctctngaagatagagagaagactcagttgttataatgtttagtttgacctctagatctataaattattagaggatagttgcataagtggagagagaaggtacgagaccacctacacaatgcataaacaaaaattacatcatctctacctttcataatccttctatgtgctaaaaggaagcaaatagagtgaagtatagccaaaacatcaatgaagatccaatcaatgagtgttgtatagttgtaaaaatccctcaaacagcttctccttgtatgtaatatatatgcatcccacattaaccatgtgggttaagtttggttatgagagaagtgattgggagatcccatggaatatgagt

SEQ ID NO: 7070 - DNA, 212 bp, Glycine max
gcttgcttgtggagcttctatggaggctgaatctatgagctttaattacgtcattcaatggcgattttccaccatggagatgcagcggaagaccaacgagaagacgtgagaggacgcgccatccactacggaataagccatggaacaacgagcgtcactaccaagaatgtgccttggataacaagcttgaaaacgatgcattaatggaggaa

SEQ ID NO: 7071 - DNA, 458 bp, Glycine max
  unsure at all n locations
agctngaaccttgaatcttgattcttgatatcttatttcctcttgaaccttgaagtgttcttgattcaatcttgagcatcttgaactcattctttgattcttgagatcatcatctttgttatcatgaagtattcttgatctttgagctttttgtcatcacctttgttatcatcaaaacttctttgaatcaatcttgattcatcatgaagcttgcttctacaatgaatgtggtgagtagtgcaaccctcttttgaaaatcacccatgcatccatcatcttcatgattcacatacatagggactcattacgtaggtttattcttattctttgtttcaatacaaacccagggtttcatatgggacaccttaggtttgtcatactnttnggtaggagtaatcaacatgaaaatataaaacaaaggtatattntattgcattactttccttanattcttaagt

SEQ ID NO: 7072 - DNA, 189 bp, Glycine max
tgttagacagacggcctcagttctcttaagaagggggtggttgttttacgataacaagaactctcgcgcaattcgcctttcactctctgctcttacatgaacgatgcaccctcaacatgaattactctaaagacaattctccatagactgctttaatggaagagagaactgcacactagattcatgctg

SEQ ID NO: 7073 - DNA, 406 bp, Glycine max
  unsure at all n locations
gcaagcttctacttatgtggcagggcgggctttcttcactgtcttgtctccaacgcgagctntgaccactgttcttccttcccgcgatgcttcttttcatgtccgcctgagtgggcttatagcctaaaccatacttcccacgatttccttgggtatttatcaggctagttatgccgccgttgtctttgcctaaacccatcccgggttcataaccgttccccaacataactcgggccatcattactgctgcaacggacagacaaggttgcccagagagggagtccacggaggaaatgctgaccacctcaaaagactggaaagcnggttctaacgattcttctgcggcttccacataaggcatagaggatgggcagcttaccaagatgtcttcctcgcctgacacgat

SEQ ID NO: 7074 - DNA, 433 bp, Glycine max
tgggtgatgttgcgcgtactgatgggtaccatgaggtgtttgttgtggtttgacccatgcgggcgttgaagagaccgcatgggcatctccttccttactttctgcccctgttgccccgattcttttggcgttcacgtttgtggaggaaacgtaatcaaactttcctctcttcaatcccacctcgattctttccccggcaaacaccagatccgcaaagctggacggcatgtaacccactagcttctcatagtaaaacactggcagagtgtctaccatcatggtgatcatctctctctcaaccatgggaggagctacttgtgccgccaaatccctccatcgctgcgcatattctttaaaggtttcaccctctctcttgaacatattctgcagttgagtacggtccggagccatatcagaaatgtactgatactgc

SEQ ID NO: 7075 - DNA, 198 bp, Glycine max
tcggagcgaacactggacatacttttggttttgcaagtgaggcctgacgtgttatgtgatgaaagcctccgtatttgagaactctggtatattctaaccattagagaatgcattaaagaaaaatattatgttttacccgttgattcaggtgtgtgcggggcattcacgacactcatgcatacgtgtcacttgtggagt

SEQ ID NO: 7076 - DNA, 404 bp, Glycine max
  unsure at all n locations
gcctgaaactgttcgatcatattgaaacatcatagtgctctacacagtaatagatattcaaatttgacaatatgctcagaaaattaatacaacgttcatgttttcacatctaaaaagtcctatattcgccaatgtntggaacttaattaggccctacatataacgaacttttttcctttaaattcctctcgaaataataattcattcgcgaaagtactatagattgcgtaccgagacaagcaactgaacattgaaaactgcccatcacaattaaagatttgataaatgtattgcgcgtttattttataaacagtcaatattttaaattatgatatgcactctcatttaatctcccatgcactgctgatatgtgaagtctcacaattaataacagatgcttgaaa

SEQ ID NO: 7077 - DNA, 397 bp, Glycine max
  unsure at all n locations
ttctcttttggaaccngaagcgccacgacatcatcttgagcctctttgacttatatcttgacttctgaaaagatcatactcgtcttcatgcaatctcttcgagcctcgagcttattgaacattccctagtttttctccaatattcttttaattaacttctaaatgtcatgaagcctgcttatacattgatgtcgcgcttttgcagtctttttttgacaacaccctcgttccacatctcatgattcatcctaagacccatacgccgcgcctatatttctgttcaacaacactcggtatatggaccctacggtgctaccttgcgcgctaccacctcaactaccaaggaattttaccatctcgctaattaaaggaaaaggctccacacctaaaataaact

SEQ ID NO: 7078 - DNA, 434 bp, Glycine max
  unsure at all n locations
cttagaaatttcaaaagtgatatcagatgcatccatttctaatatcaaatatatagcatgtacggcgttactaattgcagtattgtgagtagtatattaacaaataaatgaatgcatagcataaattagttnttgcctgttccataaattgtaagatgatacgcaagcccttcttgcatgtgtgtgcaaaagaagtagatcaattgcattgtgtattaatatattatagttggtaattttctttacggtctctatcatgaactaccgcgatttggtggttgcttaattctaagtagaaatattctattgttttaataaattgagcaatgtgaattaaattacgacacttgtagaatgtaattattttgaaagaaattcgtcttatttgagtggcatatctgtaataatagaacagatcntaaatgaaaaacgta

SEQ ID NO: 7079 - DNA, 427 bp, Glycine max
  unsure at all n locations
agctngttacgcaagacactctcnttggggngaagctcctccttccatggtttattccctagtggatgacgcctcctttcacctcttctcctttatcttccactgcatctccatggtggaaaatcaactttgaaggacctcattgaggctcaaagatccagcctccatagaagcttcttaagcaagcttccatcagagaaattcacctagaaacaccttatctggaagtacgacctcccatacaccattgtcacggacaacgacactcaattcaaggctcagacttacaaagaattcttggaaggctaggcatcaagcacttagtcacctctatcgaacatcatcaaacctacggacaggcagaggtagctaacanagtcatccttagggccttacgtactagactcaataagtctaaaggtctatg

SEQ ID NO: 7080 - DNA, 428 bp, Glycine max
  unsure at all n locations
actaagctntaatcaatctaacagggactggttattcaaaataagatgatgtggaaggtggnggatggagagaaagttagattctggacagataagtggattaatcaacaggagtcgctagcagaaaggtaccccaggctgtttattatatcctcacaacagaatcacaccattaggcagatgggaactcaaaatgacacgggctgggaatggaatttttcatggagaagactgctttttgacaatgaaattgatactgccatcagtttccttacggaggtagaaggacaaaccatacagcaacaacaaattgacatttgggagtggataggagattcatcagggatttacacaactcgtagcgcctacaatctgatatgggaggaaattgctggtggccaaaaggaggattggagtatggaactatg

SEQ ID NO: 7081 - DNA, 427 bp, Glycine max
  unsure at all n locations
attgtgggactgatttatatgtatgaggacagcacgtaaaggataaaataagtgcccgaatgcgattctaggcctatgaacccaagcttttaatttcaatacaaaggagcatgacttacgcctagaaatctaagttttggttttgaatgtaaaaggcatgaatattgggacatgtttgagaggtttttgatttgaatttaaattggctgcctcatgaggaataccttgcacctaggtagcatggaaaatacctttcaatggtatgtatatatgtgaatatatatagcatggaaatgccttgcaaagtgtgtgaatatatggcataaatatacctcgcaaaatgtgaatgtatagcaaataatgcatttcananatctgtatatgtaagataggtagcgtaaaaaatgcctttccaaatatgtatatt

SEQ ID NO: 7082 - DNA, 461 bp, Glycine max
ctctgaatcagcgacgttgcgcttagtgccaccctcgctcttagcgcgagttagtggatttgggcttggtgccagtcatgcgttgagcctggcaagagacaaatgtctcgcttagcaagctgatctcgcacttagcgtgcggcctagatccttgtgctcttctagattcccttgtcacgctaagcacgctgaagctatgcttagccgtggatgtgcgctgagcccacagggtccacttagcgcgactactccttttagcacttcaagattttagcctcttttgacctaaaattgaacagatttcatcattaaataaaatggaaaatattctagagacagctataacaatgaaacaagatttatttaccaatctctacaaaaataacaataaattggggaaactatacaagttttggaaaatgtcttctatacaaacagtagttgtataagatgactaacac

SEQ ID NO: 7083 - DNA, 443 bp, Glycine max
  unsure at all n locations
agcttgtanaaccaaaatcagcacatggttacattccaacacaccattttcttttcttaggccaaacttcttcttctagtgctccattaattaggagtntgattcctgaaaggtgcagacacacctgcaggctacccctgcaagccacctgctaatagaacattgatgactttgtgtacactaggttatagctgaagctgcaaatgtcataaacataatgaatgatgttgtgaccccagcttttgtggctagatcccatgtcttaattatttttttttgaactgcaaaaataatttatattaaaagataaagagtaccaggggtactatataaacacacaggagtaaagatctcctgaaaatgataacaaaaatacaacaacccaacaaaaacagccacanacccaaatctacacacccactctaattaaaagctatagacat

SEQ ID NO: 7084 - DNA, 404 bp, Glycine max
  unsure at all n locations
tattacgtgttgatgattatatgtatatcaattgttaaaatatattagaaattaatagttcaaataagaaaattaaattgaaggaaattaatatattaagattcaacgataaatactttcaatgcanttttagtttaattatttattagactcttttaattgaaaataatatagttcgatttaatatgtacatgttttgtgccatgtaaatattaatattgtgtgatgtctatatgattcatgagatgtgataacatgtttcattgagattataacattgtgattgaaaataaatataaatgtttgattaatacttgatgtgatattacttgtgttgtgacttatgaattggtgaatatacaataattcgactggtgtttactttgagaaaaatgtttatgtgc

SEQ ID NO: 7085 - DNA, 463 bp, Glycine max
  unsure at all n locations
agcttcaggttgctcattgactccaaattgctgcaaagaaggacaaagatctgtatggtgatttgcaaaagaacatagaccacagactcttggaacaggtgcagatgcaaatttcttattcatggcaagctgagttactaggttgaccaaggcatcaagttttgcttcaggctttttattttcagcagatgaagatgaatccgtggccacctcatggactcctctaaggacaatagcatcatttctcgcactgaattgttaggagttggaagccattttctcaatcaaattcctagccttaatagaagtcatatcaccaagagctccaccactggcagcatcaacaatacttctctccatgttgttaagtccctcatagaaatactgcagaaggagtngctcagaaatctggtggtgatgacagcttacacacaatttcttgaatcttttccagtactcatac

SEQ ID NO: 7086 - DNA, 463 bp, Glycine max
  unsure at all n locations
tccttgngaagctagagcttagctacacacacccatctaanatctaagctcacctccttgacaaaatacatgaaaatacaaaaaaaacgtccctactacaaagactactcaaaatgccctaaaatacaaggctaaaatcctatactaatagaatggccaaaatacaaggcccaaaagaaggaaaaatctattataatattttcaaagaagagaggacccaaccttggtccatgggctcagaaatctacccttggattcatgagaacccccaggccttctttagcagctctagcccaatcctcttggagtcttctatccaatacccttgcggngtaggattgcatcatccttgctcttccattgaactcgacgaggtggacggctcgaacttcctccattgctctctctgtctctgagttngggagggtgaactcaccananaanaaagatattttaatacact

SEQ ID NO: 7087 - DNA, 459 bp, Glycine max
  unsure at all n locations
tcttagttntagatgatgcagatgagtntgtagatacctcatgcactcctctaatgactatagcatcatttctggtgctaaactgttgggagttggaagccatcttctcaattaaatttttggcttcagtaggagtcatgtctctaagggctccaccactggcagcatctatcatacttctctccatattactgagtccttcataaaaatattggagaagaagctgctccgaaatctgatggtgagggcaactggcacatagttttttaaatctctcccagtattcgtataggctctctccactgagttgtctaatacttgagatatccttcctgatggtcgtggtccaggaagcagganattntttttctaagaatactttcttaaggtcatcccagctcgtgatggaccttggagcaaggtaatacagccagtcctttgccactctctctaaagaat

SEQ ID NO: 7088 - DNA, 414 bp, Glycine max
  unsure at all n locations
agcttcttgcggctgtccttctcgagagtaagactagtacacgatgtttatgaattntaaattggatgagagtctgttatgagtagaggtaggggagaaagattaagctacttgatttcgaggaccaagacctcttcacaagctaagtatcaaaattcttctctgccttattcattgattggtattgcttttatacacaactatggaagtgcatatgtaacagaatcctaacaatctttaacagaatgataatcgcttctaacaacctgaatattgntataactattatttgaactcctatggcagattcctatgacagagcactcgtgtgatcaaacgaaatccctcaagtgactangccttgtactgatcttcttgggcctactgctgcatcttcttcctatcanagtcatg

SEQ ID NO: 7089 - DNA, 474 bp, Glycine max
  unsure at all n locations
taattcttagagggngaaggccctttcangggcggtgcatgatgtgtttttaaaagttgtagctaaaacagttccaaattattgtatgagcatttatcattttccaaaatctttagctaatgaacttcataagatgatgagctccttttgttggggtgccaaaaggagtggtcatagagggattcactggatggattggcacaagctgggcagttcacaaggaacatggcggaataggttttaaagacatatatggatttaacctcgctttacaagggaaacaagggtggaatctattgaaaaacccaactgctttggtttcaaagattttcaaagctagatattatcctaaagcggatttcttggtggccattgagcataaataatccttcatactcttggagaagcatatgcaattcttgggttctattaagggaagactatagatggaaagttggaaatgggtcatcaatc

SEQ ID NO: 7090 - DNA, 441 bp, Glycine max
  unsure at all n locations
ntctcttccaagaaaagttctttgtttaaaaacttgtgctatttatcttttcattctcttcttcctttgccaaaaagaattcgtcaaggactaaccgcctgaattctttttgtatctctcttctaccttttccaaaagaacgaaggattaactgcctaaattcttttgtgtctcccttctcccttgtcaaagaattcaaaacgacaatctaagaattcttttgattcttccctttcccataaacaaaagttttcaaaggactaaccgcctgagaattcttttgtttccccattcacaaagtttcaaaggactaatcgcctgagaactttgtcttaacacattggagggtatatcctttgtggtacaagtagatgatacatctacttggtttattgtgactgagaacaagagagggtacatctcttgtggattcagtctagt

SEQ ID NO: 7091 - DNA, 391 bp, Glycine max
  unsure at all n locations
ttaagtcacctgcggcatgcaagcttcttatacaaggctcatcttggtggtgaatctgcttcttacatggcttattccctagtggatggcgccacctcttacctcttcttctttgtcttccgctgcatctccatggtggaaaatcaccattaaaggacctcattaaagctcaaagatccagcctccatagaagctccacaagcaagctctcatcaagtggtatcagagcataagagcttcaagtaggtgctccttaaacctccattaattatttgctttaccttctctttcattgttgcttcttcattcttctccatgtatctactcacatgtcttgtgctaaatgttgttaacatgattctttagagtttccnccgattaaacttgctat

SEQ ID NO: 7092 - DNA, 445 bp, Glycine max
  unsure at all n locations
agctntgcagacccgttntgctccgtcacaataataagacccaacaggtgccttatttaagctaacgtagaaaggatcagtgagtcaatacctgtcagagtttgaagacctcgcgaatcgaattatcgggctgccatctcctttcctcctaagttgcttcatctccggccttacttcggagattcgcagggaggtccaagccaaccaacctctcactttggttcaggccgcgggcctcgcaaaactccaggaagaaaagctcaccgatagccggaaccctccgcgagctagagcgccaccactagctctaaatctcattcgcgccaacaacccaactgctgacgtttgcgcccttgttccgccgttactaccagctccgcctcgcccaccacaacctgtgatgaagcgtctcaccccggaggagataacctcacgccaagaacat

SEQ ID NO: 7093 - DNA, 355 bp, Glycine max
tggcgtgacacttgatcacacgctccatatatatacattacgtccttcttgacatatttcacgcctacacaggcaaaccgaatatgatggcagaaacgctcggaaataccatgactttaagggggtgttcgattactgaagagagaatcgaaatacgaagaccattatgtgagcttcatgtggatgtcaaacattctatattcaactctcattcacaaaattatttcttattattcttttatcctttacatcaaacctgccttaactgttcgaagatctttttttctttaaatgagcacgaccgtgaaattaaacgtccaattattaaaaggaaactgatataattagcacagac

SEQ ID NO: 7094 - DNA, 417 bp, Glycine max
agcttgaaggtaaactagatgccatggttaacctgttaacccaactggccatgaatcaaaaatctgcacctgtcgccagactatgtggtttatgctcctctgtcgaccaccacacagacctttgcccttctgtgcaacaatctgaagaaattgaatagcctgaagcttatgctgcagacatccacaacagacctcctcaacctcaacagcaaaatcagccacaacagaataattatgacctctccaacaacaggtacaatcccggatggaggaatcatcccaaccttagatggtcgaatccttcacaacagcaacagcaacaacaacagacttattttcaaaatgctgctggcccaagcagaccatacgttgctccaccaatccagcagcaacagcaacaacagccccagaaataac

SEQ ID NO: 7095 - DNA, 473 bp, Glycine max
  unsure at all n locations
tagttctttgcggctagaactggggttcatgaagctaagcaccagtcatggcggctaagctgaattccttgcggcactgtaagcgctaagtgagtccttatcagctaagcgcatacttctctatactcaagatgcatcattttagctaagctggcccagaacccggcttagcaacagttgcatcttttctaatctgcagacctcgctaagcggacttatccgcacgctaagtcaagcctgtgtgctaaaaaaaaaacttgaatttcaaagttaggctaagcgcacggtgccgcanagcgagcatcttcgaaaaaccaaacgtcacttcgagaaagcaaaatggcttatgtgagtgtaacggcaactactctcacatttgttggaaactgatgtattgcctgcatcttctctcttgcactcattctccttcattntcgccttcttctgcatcanagcatcaacaatacaagtaa

SEQ ID NO: 7096 - DNA, 410 bp, Glycine max
  unsure at all n locations
agcttcttgatgtagaaaagacaaaagttatattctttaaatatttaatttctcaaatagaactttgggtttcctatgtatttcatctcaaattatttcttcaatcaatctatagcttttggaagctcttcaaaagttccaataatatatacgtcatctacataagcaatgattatgaaaatatatttttagattttcctgaaaaatgacaaataagatcattttaatatccttcctttaacaagtactcactaagtctattatacaacatgcgacttgatggctttagtccatacaaagtattcttcttgagaatatgcattattggacaaactatttcctttaaggagttntatgcanatgccattataaatagagttatataagtaagatgtaacaatatccattat

SEQ ID NO: 7097 - DNA, 392 bp, Glycine max
tgtaacaaatatatcttttaaatataatatgggtcacaccagacatggatgaaatgattatcatcctagagatctgggtagaatattgcattacgaagaacagagaattcatcagctcatggttcattgagacaggagaaatcaccattggtgttaaagtattgtgtatgctagtcatctcatctgtgctattgtacagcttgtttagctaaagttatttactgttgtaaagctttcagtgcaagctagctctagcctctagtatataaactgattactgatctgatctatcagattgtaaaggtctcagtgccagcttactatgatttaagcttataacagatataccttttaaatataatatgggtcacaccacacatggatgaaatgat

SEQ ID NO: 7098 - DNA, 380 bp, Glycine max
agcttctttggagaaacttccttgagaagctatagcttaggtgcacacacccctctcataactaagcgcacctccttgagaagcttgcttaagaagattcctaaagatgcttgagcttagctacacatacctctctaatagctaagctcacctccttgagaggagaagccagagcttagctacgcacgccctataataactaagctcacccctatgacaaagaacatgaaaatacaaaaaaaagtgcttactacatagactactcacaatgccccgaaatacaaggctcaaaccctatactactagaatggccaaaatacaacgcctacgaaggagatacctattctaatatttacaaagataagcgggctcatacttag

SEQ ID NO: 7099 - DNA, 439 bp, Glycine max
  unsure at all n locations
tctcaaggaagttntctcaagaaagcttctcaaggaagctacctagtctataaatagaagcatgtgtaacacttgttgtaactttgatgaatgagagtcttgtgagacatattcaaagttccacttctctccctcttttattccttcaatttcgtgctcccccctctctctttctcttcctctttcttttcctccattgaagcatccttccaagcttcttatccaaggctcatcttggtggtgaagctccttcttccatggcttactccctagtggatggcgcctcctctcacctcttctcctttgtcttctgctgcatctccatgatggaaaatcactattaaaggacctcattgaagctcatagatccagcctccatangaagcccacaagcaagcttccatcatatacatattattntctattactttnttttaat

SEQ ID NO: 7100 - DNA, 371 bp, Glycine max
  unsure at all n locations
agctntctttggaccttgaacaagcaatcaactcctctttcagaaccatgctatgtgctcgcgactggtccctttcttcccttcgcaacttgagttcattattgctaccccatagagctccgcgaaatttgttccggccatactcttccttgcgagccctcttggtctctttttcaagggctcttgcggtaattgcattctcttcccgtaacccggcgcactccttccgaacgtgtgtagcagccaacttgaacttctccttggcgagttttgcctttcctaactcgcttttgagagcttggacttcctcgtcctcttccggtgcttcaaaattctcttcgctgacgacttttaacttggcgagccaatct

SEQ ID NO: 7101 - DNA, 382 bp, Glycine max
  unsure at all n locations
nttcgcanagcttacggtaaaatctgggacctagccatggtataagtctccatagaggtcattgcctccctcgcccagtattatgatcagtcgttgaggtgcttcacctttggggacttccagctatcacctatggtagaagaatttgaagaaatcctaggatgtcctctagggggaaggaaaccatacctcttctcagggttatatccctcattagctagaatttccaagatagtccaaatctcggcacaggaattagaccacagaaagcaagtcgaaaatgaggtggttggaattccgagaaaatatttggaggcaaaagcaagaatctatgcaggtaaagacgagtgggccccgttcatagatattctcacactgttga

SEQ ID NO: 7102 - DNA, 457 bp, Glycine max
  unsure at all n locations
gagctngcttctacaaccaattgaataggaacatttgcctttggaggcatgggtaagggaaagattactagtataggtaaaatccgtgttcctttcttagcctccatagacaacgtcttatatgttgaaggtttgaagtataacttattgagcaaagttaagtttgcgacaatggttatattgtgtccttcaacaaagaccaatgtatagtcaagatacaagatgacaagtncttatttactactaaatgacacaacaatctgtatgagattgatctgataggtctaagtaaacaaaatataatgtgtctgctttgtagagaatatgagagatggatttggcacaaaatatttgggcatgtgaatctganacatatctcacaactttcttaaaaaggaattagtgaacagacttcctaagatttgttgaaactctcatcttctctgtgaagcatgtc

SEQ ID NO: 7103 - DNA, 479 bp, Glycine max
  unsure at all n locations
ngtcagaggttgaagaagaagttggtagaacaattgagcaaaatagattagaatatgttgataatcatttatcaatataaggagaaggtgaacctggctgctagtcatgggcagatgttggaagatgaataggcaaaggtattggctctgcaaattgaaagggaagcgagagagagagagggtgatggagttattgcatggggaagccatgaaatggatgaatagattcgctctcactctgaatgagagtcaagagtttccaaggttgttagccagagcctatgcagtggctgacacgcactcagctcccgacgaagtccatggtcttttcgattactgccaacacatggtcgaactaatgacccacataattaggagtcactaaggcatttgtgttgtatttatgctntgactctaacaagatgtgatgaaacatgttgttttaatgaaatanggattgatttgaccctatgttctat

SEQ ID NO: 7104 - DNA, 472 bp, Glycine max
  unsure at all n locations
cctataaaactaagcttttatccaggctcatcttggtggtgaagctacttcttccatggcttattctctagtggatggcgcctnctctcgcctcttctcctttgtcttccgctgcatctacatggtggaaaaccaccattaaaggacctcattgaagctcagagatccagcctccatagaagctccacaagcaagcttccatcatataccatgcaagaaaaacaaaatgacataattaaaactgagttgcctcccagaaagcgcttctttaatgtcattagcttgacgcttttacctcaatgggtgaatatccatttgtcctttaacttcaggacctccttaccaccctgcatcacttgcaagcagacattttgatatgacataggctngtcttcttcacatagatcanaattgatcttctgatcttcaaaacccatcttcaatgtctatcttcccatgtcaactacacagc

SEQ ID NO: 7105 - DNA, 470 bp, Glycine max
agctggcttctacagttacgatgtttcctacgatgacagttgtaaaccgatgtagtatgccccagataaccgatgtagaatcctgcttctctagtagtgataaattttttatcttagcttccatcttattatcaagtgtatattgttactaaaaaattaaatataaaatatgaaaatttaaaaatcttgcgtttggtgtgggaactttcaacctttggcgatcttgttgatatcgcaactcatgattacgatcttaatgatatcgtaactcgtgactataagtgcatttccataatttagaaattataatattcttcaatcattcaaatgacacttgtttatatgatttttgaaaataagagatcctttcaattggaaaacaaatagagtttaataattagaatatttatttttattggaaattagcaattagatattaacaaagaagaaaacacttattatataataac

SEQ ID NO: 7106 - DNA, 438 bp, Glycine max
  unsure at all n locations
nntgaaagacttattagttcttttcggtcttgctttggtcattgggtttcattcattacataagatatttgaagttagtggacctttgctggatcatatcactttcatttcgatttagtcctatagttttattttattttagttcttattgacaagtaatagtgttaactaataatgctacagtcattgacaatttattgaattgtcacatctcaagagtcagacaaggtagtcgtgtgtaattnttttttttgtaatctatacactnttaaattttcatttattcaaaatagtggatgacgttaaactagctagggaattttttattagtcgatgttagttgttagtttttttgttagtagaaggattcgaaccaacaacatcttcgtcatttctttctctcttcaccactaaaccaactttatgacgtccaattag

SEQ ID NO: 7107 - DNA, 357 bp, Glycine max
  unsure at all n locations
acagaataatccgaaaatgtcagagaattgngtgttgaattagcataacaagactttctgtgattggtttaaagatacaatctttgcagatgagaatgcttaagaaacattaagatagctatcagatgggcctaaaagaaatgttataacctggcaaagatacgacataaacaggtattcattttacacaaaagcacaagatgacaaaagtacgatgcagaacagtggggttaccctaagggctgaatctcaacactttgcaagtgtcaatgacgccaatccttgtgtagcttccatcccttactatgggttcatagatgaaatttgagagcttaactatgtgaaattacgtgatgt

SEQ ID NO: 7108 - DNA, 354 bp, Glycine max
  unsure at all n locations
tgatatattcgatggactcatggtcactatgaatgacaaattccttgngataaaggtagtgttgccatgtttttgatgaggacatgaccaagagcaagggcaaggatccacttgaaggacttggaggacctatgacaagggctagagcaaggaaagccaaggaagctcttcaacaagtgctgtccatactatntgaatacaagcccaagtttcaaggagaaaagtccaaggttgtgagttgtatcatggcccanatggaggaggactaaatgacaccactntgtctcaatttttagagtgtttagtttggctaaataatggcccaatccttgtaaagttggctgaccaaaaata

SEQ ID NO: 7109 - DNA, 320 bp, Glycine max
tatgaccattcgaatatctcaagagcttccgctggtctatgtctagcgtgtagatgaggtatgtccccgactctgacatgagcgtgaaaagatgtgaccattctattgtgtcgagagcttatgatgttcagtttagaacgtctcgatatattatgagacgcgcatctgacgtgaagtgagacaatccctgatctcttggatattttccagagcttccggagattactttcaagcgtatagatgagctatggacacgaaccgcacattccagtgaaaacttgtgacggttcgaatttctcgagagctttcggtggccaatt

SEQ ID NO: 7110 - DNA, 467 bp, Glycine max
tgttcacatgtgttagcaaggtatgccactcttgaactgactgctggtaattctctgccctcttttcctttcttactatggaaagcctgccttacaggcggcttcctaacacactcttaaccatgcaacacccattactggttgacaaagatgatacatatttaataagcataatgagcatcctatcctatataactggatattaataattacctaactcctctgccgtcattattccaaacccaatgttagaaaataaaatctcggagaccttctcagattatgatacacagcagcagcattattaaaattgttaccatctctatacatggcatgtattcccgtacgatatacaaaaaagatattgataacacatggtatatgctagtaacgtcccgttagtggtaacagagactctagtcactagagaacatcttggagaacacattaacacagagaactccatt

SEQ ID NO: 7111 - DNA, 475 bp, Glycine max
actaagcttacaagggaagataacacctcattcatatttggtcgatgttcaagatctgggagggtgcagcacaatgataacttaatgagctctggcaacacttcgtcatggtcaacatcccaggtaaacaaagggtctacaatattggcaagttgttttattccatttttaagggcttttgtcactacttcacgcaaagtgattggcaaaccatcctctttttagagtcctgtcggccttctttttgttagaaactccattactatgacaccgaagctgaacacatctgctttagtggttactttcctcatgtaggcaaattctgaaaattacacagcataaatatcttgtttagagagtgaaacttataaaaactctcgggtatacaatgttaataagataagaggattcgaaacatagtgacaaaataagacgttgtgtaattgtgccagtcttggtcatgctaccttctctg

SEQ ID NO: 7112 - DNA, 263 bp, Glycine max
agttttgaattgcaaaacgtagcagttgggctaagcacatctccaccgctaagcgtagtttcagcgcgcttagcgcaacggagaatctagcagagcattatcatcaaagccgcacgcttagcgcgagatcagtgcgctaagcgcagaaggttccttcagctatgctaaggtcgagactggtgctaagcccaatttcacttactcgcgctaatctcgagggtggcactcagcgcaacatcgcgatttcaagcctattaaagtct

SEQ ID NO: 7113 - DNA, 475 bp, Glycine max
  unsure at all n locations
gggagatgatgcttcaatggagganaagaaagagggagagatttagagagtgaggagcacgaaattgaaggaagaaaaacggagagaagttgaactttgagttgtgtttcacaagactctcatccatcaaagttacaacaagtgttacacatgtttctatttatagactaggtagcttccttgagaagctttcttgagaaaacttccttgagaagcttctttgagaaaacttccttgagaagctagagcttagctacacacacccctctaataactaagctcacctccttgagaagctctcttcagaagattcttaaagaagctagagcttagctacacacacctctctaatagctaagctcaccttcttgagatgagaagctagagcttagctacacancccctataatatctaagcttcacccatgacaaaatacatgaaaatacaaaaaagtccctactacaaagactactc

SEQ ID NO: 7114 - DNA, 264 bp, Glycine max
  unsure at all n locations
tttcaattgaataatgttatatgatacacacatgttaaagtagatgcattactatcagactctcttatacattaattggtttatatgaactgggagaatgattatataattagaaaaacattgtaggagtaaattttctatgagacatttaaaactaacatgaaagatgaacatagaaagcctgaccattgtgtcaattaatgtcattggtatattgcaatatgacttataataaatgaatatatgcttataattganatatga

SEQ ID NO: 7115 - DNA, 459 bp, Glycine max
  unsure at all n locations
ntgtaatacaccaaattcttttctttgtttatttgcggccacttgaattatttatttcaatttctatccttatacccatagtaagtattgacatttatccatattttatttttccattatcagctgacaaggttgaagctattctatctaattttttatagataattttcacacatcaatgaaaactcacataaaaataaataaaacccatgcacaatacaaaaccttatatttcttttgtattatattaattatataaaaataaatttgaattataattgaatatgtttgctgttttgagaaccccttgaatcactattaagatacttgattgaaaagtttaaatatatcaataaatatatgttttaacatatagtatgacacacatttattatctctctatacattaataatatattacattagaatggataaatgcatatgtatatatatatatat

SEQ ID NO: 7116 - DNA, 433 bp, Glycine max
  unsure at all n locations
agctnggtaatcgaccacacctcctcggtaatctattaccacaagccctcatggcttcctgacctcgttgtcaagcctggtaatcgattacaccccgtggtgatcgattaccagagaccatcttagcctcctgtcttcatctttaggccttgtaatcgattacccacccttggtaatcgattaccagaggccataacccatatatcacacaagattcacagctggccagccaccacacaagcctccttgctttgtggtccttgctccttctatctgtagactgccangagctcgcctgcttaggtacatcacaggttctcactgactgactatgcccgggttgggtcgggattggtcaagcttggttttgggcaatagcaccctacctgacgtacacaggtctcctgacccccgcgacatatctacaggtacc

SEQ ID NO: 7117 - DNA, 464 bp, Glycine max
  unsure at all n locations
cgtcactcanaacaactcattgtgcatgaacctattgaatctagctntcaacattgaaataaagatataacaattgaaattgtaacatctcattttcttaaaactaattttaagaaaatgttatttataaataaatagagttttagaaaaatgatgagatttttgtaattaaatgaataagaagaaataattgtattaaaataatggtttgagagaaaataaaaaggatacatttgataggaaataaaatagagtgtttgtttataaagtaataaaaaaatagagtagacaatagactaagagtatctaactatgaatagagacatgctaggtcatttntaactntctctccctctcagtttgcgtntctttctcctcctctaaacctntctattccgcatccaccaatttatcccagaaaatgtgatctcgactcattcatcgtggatcgcataatattaaca

SEQ ID NO: 7118 - DNA, 367 bp, Glycine max
  unsure at all n locations
actatgaatgacaaattccttgggataaaggtagtggtgccatgttttcaaagcccgtactaaggcatacaactccttatcataagttgaatagttaagggtaggaccacttaacttttcactgaaataagcaattggatggccttcttgcaacaacacagccccaatcccaacatttaaagcatcacactcgatttcaaaagatttttgaaagtttgcaacgcaagtatggnggcattagttagcttttgcttaagaatattgaaatcttcttcttgtttctctccccattagaaaccaacatttttcttgggcacttcattgagaggtgctgtcaatgtgctaaaatcattcacaaatcgtctat

SEQ ID NO: 7119 - DNA, 423 bp, Glycine max
  unsure at all n locations
tcaggctgctcaattgctccaggttgctgcatggaaaggcaaatgtctgtatggcggtcagcagaggagcacaaaccacaaacccttgcgacaggtacagatttctgattcaaggccagctgggttaccaagatgaccaacgcatccagtttgccttcaagcttcttagtttcagatgatgcagatgggtttgtagctacctcatgcactcctctaatgactatggcatcatttctggcgctaaactgctgggagttagaggccatcttctcaattaaatttctggcttcagcaggagtcatgtatncaagggctccaccactggcagcatctatcatacttctctccatattactgagtacttcataaaaatattggagaagaagctgttctatgatctgatggtgggggcaactggcacat

SEQ ID NO: 7120 - DNA, 395 bp, Glycine max
  unsure at all n locations
agcttgtatcaatatttaattataaatatgtcttgggttcttatattattcgactgcttctttntatttggaaaagaaaaactatcatcttctccttggatgacatagttntctcatgcaatttgagttaatgattagtctcggtcccttgtgtgctgctaactatgaaatgtgaatggataagcttgagatgttcacatatccctttcaagatctttggatttggagataatttttccttggtttgggttgtttattctacatcttttctcacggaagcctttcgggaaatctatattcttaaacatgctctttccttgttggttgaaatttattagaatttaccacaatttgagtgccaccccatgtttattaagtgattgggaattgggttt

SEQ ID NO: 7121 - DNA, 340 bp, Glycine max
  unsure at all n locations
tatcctgctactggtggacaaaacttanagacatttttttatattctattcgtatatacctatgctcgatatgcgatcattctaatctatgtgctcagatagaacaaaagtaacataggggtacttctctgaatgtagatcgaaagtgcctccaccacattcccaaacatgcattatattattctttaatataacataaatgttaccgcacaccatttgcacacaaatattccgcattaaatatcaagttaagttattgaagagaactctagttctcattagagaccaacgccacaaacactccaaaggatttgcatataagactattttttattctgta

SEQ ID NO: 7122 - DNA, 439 bp, Glycine max
  unsure at all n locations
agctngttngaaacanaatanaaaccactgtttacaccaccttgttttacacatggaactctcttgttttgggcctagcccaattntgttaagtcacaaaataaaaaccattatttaaacacccctcttttacacatgcaccttatctcgttgtaggcctagccctttttacacatgcaccatcttccattataggccttacccttttgggcctagcccatttttgttaagtctgaaataaataaatattgctagtcaagttccctcaattacacatacacctgctttcctttgggcctagcccatttttgttaattntgaaataaaataaaaaattctatttacaccttttcttttgtattttatacatgcacnctctttcattgtgggcctagcccatttttctttgtctgaaataaaataaatactactaactaca

SEQ ID NO: 7123 - DNA, 453 bp, Glycine max
  unsure at all n locations
ctaagcttcntagtctctaaagcaggttgtggtccccgatacaacatttaggaataatgagaactctaacaggttaaaacctaaagcaaggttgtggtcctcgatacaccaaatcagaaattgtattcttttctctccatctggcgagaaacctaaggtactaaaaggaaaatgatgatttggttgaggaagaatacaaaaccaacagttcctcagactcatcaattccgttgtttatcatggatccaagtattcttcacaacccctcttgataatctaacttaatgtgtttccgatgattattggtattttattaagatccctagaatatcatataattggtatcagagccaccattactgttagattatcgggaattaaagatatntgcgttgcgttatacctgtattatctcgttacatgaacccctattntattttgggattttatctt

SEQ ID NO: 7124 - DNA, 369 bp, Glycine max
gcttaagctccttcaactgcacaaggctcttaatattttaagagtatccttgtggaaccttgacccgacgaagacactgacagaaacttatcttctccttcttggacaaagtatgagatgctgggggcaagtaaattctcttcccatcagaccttggatgcgactgtgatcttatacctatatcagctagatcttgacgggtattcaagccatccttcgtcttgccgtgaatgttaaggagcgtcccaatcacactgtcacaaacattgttctccacatgcataacatcaatacaatgtctaacgtctagatcacaccagtacggaagatcaacgaaaatggacctcttcttccatatgcaactctgac

SEQ ID NO: 7125 - DNA, 468 bp, Glycine max
  unsure at all n locations
ntctccctatgttgctataaataggggaagaagtgaagaagattagggttcagccccttaggcacttctctctctttcgaatttgctgaggaaaattatttccgtgaagaaaatccaagccgaggcgctttcgtaacgtttccgtaacatttccgtgagtaattacgcgaagattctcgaccgttcttcaagatccatcgttctttcttcgttntcttcagtcttcaacgggtaagtacctcaaaccaagcttttcaattcattatatgtacccgtggtggtccacattgtgtttcatgtatttttattctcgatttcgtttactttttatacccacttttgacgtgcttaagccatttatttaagtcgtttctcgcctaatctaaaaataaaataaatttccaccgatcggttgaattgtgtcatccattaattttggttaaaatgaattccgaccattcggtcgtg

SEQ ID NO: 7126 - DNA, 264 bp, Glycine max
  unsure at all n locations
agcttagccccagaggggatggacctcttcatgttttggagaggatcaataacaatgcctataggttggacctcccagaagagtatagagtcaacatcacttttaacattnttgatttaattccttttgcacgttgagctgatattgaggaggaggaactaacatatttaaggtcaaatcctcttcaaggggaaggggatgatgcaatcctccctatgaagggaccggccacaagatctatgagcaagaggctccaagaggatt

SEQ ID NO: 7127 - DNA, 444 bp, Glycine max
tctatataagctgaaccagtttatcaataaacacaagttgagttgtattcagatcattagagtttatctcttttatcttagtgaaagtgattctcctaaattcttgagtgattcaagaacaccctggctgtatcaaaggactttcacaacctttgtgtgttgccctcgccggaaagagtgattctttgcttcccttcatcttcgaccttgttctttcaaaccacaattcaaaaaaaatccacttctgtctagaattatcttgtggccataactcccattttacgcactcaaattaagtgattcttgagcctaaattgaatttcaaaacgagacctttcaccttgttttggaatcacctcatttggagccctgtagctcgagttattgtcatttctatatctctgtccagccaccacttaaccgacgatttaccatcgcattcat

SEQ ID NO: 7128 - DNA, 486 bp, Glycine max
  unsure at all n locations
agcttctacattcaatttcgagctnttcgatatattactggactcaatcggacatccgagtaaaaagttattgtagtttgaatttgctcagggcttcggtattccatttcgagcgtctcgatatattacgggactcaatcggacatcagagtaaaaagttattgttgtttgaatttgctcagagcttcggtattccatttcgagcatctcgatatattacgggactcaatcagacatccgagtaaaaagttattgtagtttgaatttgctcagggcttctgtattccatttcgagcgtctcgatgtattacgggactcaatcagacatccgagtaaaaagttattgtcgtttgaatttgctcagagcttctacattcaatttcgagctgttcgatatattacgggactcaatcagacatccgagtaaaaagttattgtcgtctgaatttgtcagagcttcatattccatttcagcgtttgattata

SEQ ID NO: 7129 - DNA, 323 bp, Glycine max
ctgacaagattcaaacgacaataactacttactcggatgtctgtttgagtcccgcaatatgtcgaatcgctcgatgttgaatcccgaagcgctgatcagactcaaacgacaataactttttactcggatgtgtgactgagtcccgctctatatagtagagctcgaaactgaatgatcgagctctaagcaaattcgggcgacaagaactttttactgagatgtctgattgagtgccgtaatatatcttaacagctcaaagggagtgtcgaagctctgagcacattctggctacactaactatatactcggatgtgtgattgagt

SEQ ID NO: 7130 - DNA, 484 bp, Glycine max
  unsure at all n locations
agcttgcttctacaatatccnncttttgatgatgacatcttctgaaatcaagaagcacacacacactttttcctagtcgatcactcatataaattctcctcctttgtttttgaatttatgtttatcttaaaaataagttgattactcatgtgaattcttgatttaatcccatttctctccccctttggcatcaacaaaaagccaaagtgcgtatcaaacttaaggtatacaaatataacttaaacatctatacttaatattcatgaaaaaaatatcaaccaaatcatgaagcaagaagcaagaaccatgaaaaccatgaagcaacaaccatgaatagattaattttaaactccacatagtcaaataacatacttaatattggtccaaacataccatgcaaataaggaaatagtatattgttcaaatatcataataataatagagaaattatttgataagtcactaacatctattagtcctaact

SEQ ID NO: 7131 - DNA, 461 bp, Glycine max
ggaccccggttgaagagacaaccactttctagcttgtgcctatggaatgtcatgttactcaattggggaatcaactacccaaggatgacagcatctgaatacaagtcatccgagaacatgtcaacttattttgctagtccataatagacatgcccggtatcacccaagcttccattgtcttaagttggccatatgtgaagatgcctagcccattgcctagaggaagagaaagatggatgaaaggaggtgtcgagcagtgcggcaagaagtggccaagttgatggttgccaggtttaataagccaaacgagaagtggaggatgtgcaacaactagactgatttgaatcgagcgtgccccaaggacgcacatccacacttgaacatcgaccaactggtcgatgaagtggccggacacagagtgttaagttctctggatggttattctaactatgatcacgata

SEQ ID NO: 7132 - DNA, 286 bp, Glycine max
agcttcggaagaaagtgatgaggtacaagccctataggcagagcttgaaagagcccgggtagtcgaagagaagttcaagtccatagccatcaaagtctaaaaagagtatgatgaactaagggacgtcaatatggccacagttgaagccttggaacgagaaaccaagaaggcccgaaaggaagaacacgaccaaagcaaagttttgaggggctctatagggcagcaatagtgagctcaagctccgaagaggtgaaaggaatcatcacgggtcaaaggcatgatcttg

SEQ ID NO: 7133 - DNA, 417 bp, Glycine max
tcaggctgctcaattgctccaggttgctgcatggaatgtcaaatgtctgtatggtggtcagcagaggagcacaaaccacaaacccttgcaacaggtacagatttttgattcaaggccagttgggttaccaagttaaccaatgcatccagtttgccttcaagcttcttagtctcagatgatgcagctgagtttgtagctacctcatgcactcctctaatgactatggcatcatttctggcgctaaactgctgagagttggaagccatcttctcaattaaatttctagcttcagcaggagtcatgtctccaagggctccaccactggcagcatctatcatacttctctccatattactgagtccttcataaaaatattggagaagaagctgctctgaaatctgatggtgagggcaactg

SEQ ID NO: 7134 - DNA, 444 bp, Glycine max
  unsure at all n locations
agcttgctcatatccaataacacaactgaaaccatttaccaccatcatcttctcgaggacttagatatacaatgaattggattatttatccaataagtagataaaggatagatattcctttttcgaaaccgtagccggccgcttccatgataagtatgtcctcaaagatatatgaatatagcactgaagtttgttaatttgataagtaattttgctaactaaggtctgaaatgaataaatgacattttcattcaccaacaaaatgatatttaagaatatatattagtaaatttatatatatacttatataagtatttacaaatacatattatatatatgcttaaatatatattttttcatacctganaaataggtcattttcagatttacaatcttaaattacttacagtcaattacgtatctgaaaaaaaattatgtttcaac

SEQ ID NO: 7135 - DNA, 429 bp, Glycine max
  unsure at all n locations
cggagaggatgctntaatggagganaagaaagagggagagaattagggaggggggagcacgaaattgaaggaagaaaaagggagagaagttgaactttgagttgtgtctcacaagactctcattcatcaaagttacaacaagtgttacacatgcttctatttatagactaggtagcttccttgagaagctttcttgagaaaacttccttgagaagcttctttgagaaaacttccttgagaagctagagcttagctacacacacccctctcataactaagctcacctccttgagaagcttccttaagaagattcctaaagaagctagagcttagctacatatacctctctaatagctaagctcacctccttgagatgagaagctagaacttagctacacacccgctataatagctaagctcactcccatg

SEQ ID NO: 7136 - DNA, 465 bp, Glycine max
  unsure at all n locations
ctattatcatatgcaatagatgccacatgtctacatatgagaggagcaaaaagggcccacttttccttttgactgtgacccatactcaaccaccaaagtggggaaaatctgacctttgaaacgctaaaatccagcctcggtttgtgtgccgtttctttggtatcagttcctcgcgtttctctgcgtccgtcggggccagttttcgaaagccagcaatatatatatcaaaacgctcagaatagaaccccgagcgtggttcagaggttgggttcattaaattttaagtcgcacgcaaaacgatgacttttagactaattacttaagaattaacccataacctngccagtatggatttctctttcttaattagcctaacccgtgtatctggcccccactacttctatttctaccaataacatatatatgcatatacacttaataatacttatatatatatatatatat

SEQ ID NO: 7137 - DNA, 393 bp, Glycine max
  unsure at all n locations
ggccgccacggagttntccgactatgctcttgtgtggtggaacaagctacaaaaggagagagcacgaaatgaagagccaatggttgatacatggacggagatgaaaaagatcatgaggaagcggtatgtgccggctagttactcaagggacttgaaattcaagctccaaaaactaacccaaggcaacaagggggttgaggagtatttcaaggaaatggatgtgctcatgattcaagcaaatattgaagaagatgaggaggtaactatggctcgatttcttaatggtttgactaatgatatccgtgatattgttgagttgcacgagttngttgaaatggatgatttgcttcacaaagcaatccaagtggagcaacaattaanaaggaacggagt

SEQ ID NO: 7138 - DNA, 294 bp, Glycine max
tttgcttttattggataaacgtggactttcaaaagcctagagtcaacatgtaactttgtcactactttcaaaaaccaagagatcattaatgggccaatgccttaatgtttccctcccttcaaaagaatcaaaaggtctgtcaaatggtccaactccttaaacgaatttagcttaatcaaaatatatcttggcaaacacaaaaacaacttaactaacgttcagatctcgaagaactacgtaggtctgatttccttatcacaatctaggaatacgtaggaacaacggaaacaccct

SEQ ID NO: 7139 - DNA, 447 bp, Glycine max
tgcaggtgctgctactggtggaggcacttgaatttgcttgccagaccacaaggtgatggcactcacatttttcggattctgcacagtttgtgaaggcaatttgtcaaaaatttgggactgagcttggttcaactgagtagccatctgccccatctgatttgttagactctgaatagaggctcttgtctcttgctgaaattgcatattctggatagtcatttgcctcactaactcttctaaggaaggttgaggaggggcctcagttgcttgttgtctttgctgttgctactgctgtattggaggaggaacatgtggcttgcttggaccatcaacattctggaagggagggacaagctgttgttgttgtggacgacttgcccatctcaaaattggatgattcctccaacctggattgtatctgttgcttgaaagatcataattattctg

SEQ ID NO: 7140 - DNA, 222 bp, Glycine max
agcttgtacactgcatgggacctctctcttatctctttatgatactgtataatgtgcatccgttcatttctcagccatttccccatatctatatacgccagtgagagacagacatttactatccttgtgccattaccggttggtacccatattcacaagaaatatgttacttggaacgccttctgcttgatttatctaagcagattagaacatacatttcta

SEQ ID NO: 7141 - DNA, 418 bp, Glycine max
  unsure at all n locations
ggagcattccaacgacgacgttaacgtgggcttccccaaaattaactcttttggcgatttagggcacgccattgttggccctcttggcaagctattcgttgatgtcatgatcgtgttttctcattgcggtttctgcgtcagctaccttattttcatttccaccacgttggcctatctcgccggtgatgatgacacctcatcagcatcatggtcctccttgttttggggtttcgccacgccaaaggtgttgtttctgtggggatgttgtccctttcaattacggctgaatgctatcccaacattgacccatttggctcctttgagcattattgctgattttgttgacattgtagccaagagtgtggtgatggtggatgatgtctntgtgttcatgaagaatatgcctcctttgaaagcc

SEQ ID NO: 7142 - DNA, 415 bp, Glycine max
agcttgatagataagtgtaaactctctaactgatgtacaagaatatctaccataaatcgtgacaggcattgcactttactaaaattcaactgaagtaccacaatgtcaaccataaattgtgaaacatctttctcatcagaagtagagaaggaatgtcatacaagaaacaccaacgagtgtttgtaacaaaatcattgaaaaacaacacaaaatgagtgtgtaacagagattattaatttgcaagtcacattgtcagaaataaatatcatgaataataggggaacctttatatgttcctcaactgatgtgtagacttatatatctctccaatgtgcacaatgctcctaaagttcagctctactctatatgtgattgtactatttcttcgaattatcatttcttagaaatgtatgat

SEQ ID NO: 7143 - DNA, 411 bp, Glycine max
  unsure at all n locations
tgaagtggatgctntaatggagganaagaaagacatattggggagcacgaaattgaaggaataaaagagggagagaagttgaactttgagttgtgtctcacaagactctcattcatcaaagttacaataagtgttacaaatgcttctatttatagactaggtagcttccttgagaagctttcttgagaaaacttccttgagaagctttcttgagaaaacttccttgagaagcttctttgagaaaacttccttgataagctagagcttagctacacatatccctctcataactaagctcacctccttgagaagcttccttaagaagattcctaaagaagctaaagcttagctacacacacctctctaatagctaaatcgacctccttgagatgagaagctagagcttaacta

SEQ ID NO: 7144 - DNA, 402 bp, Glycine max
agcttatatctaggacagccatcatgcttgttgcaagcatttgttagaggtaaagagtgaaggacaaaggtttctacatttaaatatacactgagctgctgttctcgctacttagattgggattgcttatgctattgcattgtaagtagtgttcacaacatcgtaaggtaattgtcagagttgttttgaattttattttccactgtttcttttggttcacattacaccacacaactaggattaaacttccctaatagcaagaatctctatattcgtagtgttcaaatcccttgaaccctacttctcttataacatattgagtgcctaggttataccccacggcttgtatccaacataacaatattccatttatactgccataatttctcggattactgctca

SEQ ID NO: 7145 - DNA, 454 bp, Glycine max
  unsure at all n locations
tctcggctcatactgggaatacctctagttcaacacccgtgctacctaaggcacccacccagagggaagctccccaagttccaactccgaacacgactcgaccggccggtaattccaacacgacaaggaacttccctccgaggccatttccggaattcaccccactcccaatgacgtacgaagatcttctgccatccctcatcgccaatcatttggccgtggtaactcccggaagggtcctcgaaccccctttcccgaagtggtatgaccctaacgcaacttgcaagtaccatgggggtgtcccggngcattccgtcgaaaaatgcttggcccttaaatacaaggtccaacatttaatggatgctggatggctgactttccaagaggatcggcccaatgtgagaaccaacctgctcgccaatcatggagggggagcagttaatggcagtgaatc

SEQ ID NO: 7146 - DNA, 416 bp, Glycine max
  unsure at all n locations
atcctgactcaccatanaccttgacccagggtgagaatgtcaatccttaccctcggaagcaaaaaaagaatagaggggaaatttccaatcaaagaacaagagaaggaaaatttccaatgaaagcaaaaaaagaaaagaaggaaaattccccaatcaaagagtgggagaaagcaaaaaaagaaaagaaggaaaattccccaatcaaagagtgggagagagccaaaagaaaagaaaggaaaattcccaatcaaagaatgagagaaagtaaaaaaggaagaagaagaaggaaagaaagctcctgatcagggatcgaaggataaacagaagaaatgtgcagagaggtctctggaccggacaatatatgaacaatacagaattgtcaccaaatgaacaaaaaagaaggaaaggaaaccacg

SEQ ID NO: 7147 - DNA, 459 bp, Glycine max
  unsure at all n locations
ctaagcttcttataagttgaaccattntatcaataaacacaagttgagttttattcagagaattagagtttatctcttttatcttagtgagagtgattctcctaaattcttgagtgattcaagaacaccctggctgtatcaaaggactttcacaacctttgtgtgttgccctcgctggaaagagtgattctttccttcctttcatcttcacccttgttctttcaaaccacaattccagaaaatccacctctgcccagaattatctcgtggccataactcccattttacgcactcaaattaagtgattcttgagcctaaattgactntcaaaacgagacctttcacctcgttttggaatcacctcatttggagccctgtagcttcagttattgccatttctatatttctgtccagccaccacttaacctacattntaccatcccattcatgcattttatg

SEQ ID NO: 7148 - DNA, 430 bp, Glycine max
  unsure at all n locations
agctttaaaaattgaattaaaacgttcaataactgctggtaatcgattaccatatatgtataatcgattacacaatgcaaattntgaattcaaattttaatagctgttgtaaatcacttttgaccactggtaatcgattacatcctctggtaatcgattaccagagagtaaatctcttgaaaaagactcttttgtgaatgtatgtatacatgattctgatgatgtcaaagaagaatctaacaaggctgcttcaaatgataagcattntcttcaagaataattcaagattgcttcaacaaacaaagccttgtttcaagattcactaaagaccaagccttgccttaaaacaatgtgctttcaagacatgcaaggctctggtaatcgattaccaggaagtgtaatcgattaccagaagacagggttgagaaat

SEQ ID NO: 7149 - DNA, 446 bp, Glycine max
  unsure at all n locations
tctataagacacgtgtaattgattacggatagttgagaatctattattacaaagagtttatgcattgaagaagtttctaactgtagaaacaatcttactatctctacatgatgatgggtgatgaacatatgaatagattgagactaaggtgcaacaataaatacaaatgtcactcaataagttgggcatgtaaaatgacaaaactctttaaacttcaaaagcttaatctttatgttactccccctatctctaacaagttacagttccaccatgcatggnggtcaggcattgaaacatacacctttctcctatcttgtttcgttagtagccactatctacgtatgataggtatttctttcctattgtcaaagacatctgcaataggaataattgtgtgcttaggtacccaaacttatttaggtcctctcatgttagtactaaacgca

SEQ ID NO: 7150 - DNA, 465 bp, Glycine max
  unsure at all n locations
gcttcaacatcagaccacttccagggtgctggtactacttcacatggacttgatggggcctatgcaagttgaaagccttggaggaaacacgcctgcctatgttgttgtggatgatttctccagatttacctgtgtcaactttatcagagagaaatcagaaacctttgaagtattcaaagagttgagtctaagacttcaaagagaataggattgtgtcatctagagaatcaggagtgaccatggcagagaatttgaaaacagcaggttcactgaattctgcacatctgaaggcatcactcatgagttctctgcagccattacaccacaacagaatggcatagttgaaaggaaaaacaggactctgcaagaggctgctanggtcatgcttcatgccaaagaacttacctataatctctgggctgaagccatgaacacagtatgctacattctacacagagtcacact

SEQ ID NO: 7151 - DNA, 265 bp, Glycine max
aatcggtggtctgattgtgtcccataggatatcgagatgctcgtagttgataacggaagttctgatacaaatcaaacgacaataactgttaactcggatgtactattgagccctgtaatatgtcgagacgctcataactgacaacggaagctcttagaaaagtgaaacgacaataactattgactcggatgtgcgatatcgacctcgaagatatggagacgctcgtaattgaacatagaggctcttagcaaactcaaacgacaat

SEQ ID NO: 7152 - DNA, 104 bp, Glycine max
attatttaatattgttgggtgcaccaccaatgttgctgggtgcacctacaaaagacccaactgcaatgggagatgttggactaagaggaaggaacgggcctgaa

SEQ ID NO: 7153 - DNA, 276 bp, Glycine max
ttcctcagatctgtaacaagctatgaacagttataatttagtcttgatttaactgtctttgggcttggcggccacgctcaacaaagtactttcgacacctactgtacgttgatttcaccaatgctgttatgggaatgttgcgacaatccttataaaccttattgatacattctgagaagacacgtgtcatgaggccatatcgacaggcttacctatagaaaccatcttccatatttcctttgagatgcgatctatccatgttgctatagctggact

SEQ ID NO: 7154 - DNA, 431 bp, Glycine max
  unsure at all n locations
agctcatgctttttccccaagctgtacagtttattattttaaggactgttggcaagtgatagtatgatgtagtaaagaaacatgcataatgagattaaagtagtggttactagtggtaattacagtatatatggttgataactggagagtaataaacctagcgaggtgtaatatatcaagtgtgatagaaaatgtgttactagcatttcacatatactaattacagaaaactacttatgtttttattcaagttaattagctattactttgtatgtggcagttctttcttctgtgtatgttgagtggctgtagcatatgttggttcaacacagtatgttntgttctctgcattaggaatttcccagttaacagaccccttgcattatcactcactgtgagtgtcaatggtgtgagtgcagcactctacacac

SEQ ID NO: 7155 - DNA, 467 bp, Glycine max
tatagttgagaccatatcaattgtctacacaccccacactgtgtcttattcaccatatggaatagaattctttgcagtgtacctcagatcatgtcagacattaacacagaagatgttgtccttgattgttttaatttaagttgaaattaagaagcatagagatggtacagacatgatcacaaaagatgcacccagtagcatggcaaaatctaatatactaaccactaaggaatcgaggacacaacacatcatatacaaatagagatatgtaggtgtgtgcatatgtacatgtgtgtgaagtgaactgtgaaggtcaatcttatgtggaaatgaatagaatttacattatcagatttgtcataatggacaagactaatacatcaagtcatattacattttagaatgctcatacacaacgacttgatgttttaatctggaagctcatcatgtgtacacgtctaacaatt

SEQ ID NO: 7156 - DNA, 450 bp, Glycine max
  unsure at all n locations
ntgagggtgtgtagcccaccatcttttcatagtagagtatcgataatgtgtctaccatcacgatcatcgtctccctttccatcattgggggtaccacctgngccgccagatccctccaccttttgggcgtgttctttgaaagatctgtccccctttttgcaaatgttctgtagttgcatcctatccggaaccatatcaaaattgtactgatactgcctaacaaaggaaaccattangtccttccaagaatggactcgggaagattccaagttagtgtaccaggtaacagctaccccagtaagactttcttggaaggaatgtatcagcaattcctcatcttttgcgtattcccccatcttctgacaatacatctttagatggttcttgngacaagtagtccccttgtacttgtcaaggtccagcaccttgaacttgggaggggtgatgata

SEQ ID NO: 7157 - DNA, 416 bp, Glycine max
  unsure at all n locations
tgngaggatngatggngacctggtgttgagagaaacgatgatatgagctacgtgggagtacgtgagctcagttggaggtgggcaacaggggatggtgggtttatgcgcgcattgtggatgtggaaaacttattgtgcaccatcgcccgaccgccacctagtaccatatgtgatgggtaccccataatcctacaagcttgagatgaggaagtgttgaacggtgaaacttcctgcttttattgttgaccacagagtggtacctggagatatgtcgcggnggtcaggagaccttgtggacgtcaggtggggtgctattgcccaaaaccaagcttgaccaatcccgacccaacccgggcatagtcggtcaatgagaacctgtgatgtacctaagcacgcgagctccctgcagtcaacaga

SEQ ID NO: 7158 - DNA, 335 bp, Glycine max
  unsure at all n locations
agcttcacatcataccacttccagcgtgctggatctacttcacatggacttgatggggcctatgcaagttgaaagccttggaggatagaggtatgcctatgttgttgtggatgatttctccacatctacctgtgtnaactttatcagagagaaatcagatacctttgaagtattcaaagagttgagtcttagacttcaaagagaaaaggattgcgtcatcaagagaatcatgagtgaccatggcagacaatgtgaaaacagccgggtcactgaattctgcacatctgaaggcatcactcatgagttctctgcagtcattacaccacaacagaatg

SEQ ID NO: 7159 - DNA, 460 bp, Glycine max
  unsure at all n locations
tgccnanataaagaaagggaatagattgaatctagtaagatgcattaaggatgaagaaggaaaagtattggtcagagatcaagatatcaaagaaagatgggagaaacattttataagcttttcaattatggacaaaggatcagcttggaagtgaagacagagcatatgcattgcaattttagcaagaggcaagaggagtatgacttggaagtgaagatgggagaagatgtcataccacatgttactaagtttaaatatatgggatcaataatataatacaatatcatgaggaaattaatgaggatgtcacacatagaatacaagcaaggtggttaaaatggagaaaggcgtcaagggttatttgtgattgcaaaataccaactttaaatgcaagttttgttgtacagcaatagtttgactatactctatggtagtgaatggttggtttagagggacaata

SEQ ID NO: 7160 - DNA, 261 bp, Glycine max
agcttgacaatattctctattggcatgcattcaaacaactggatatcccagaaagctagattgagtcattcttggagcaactcatatgcttcttgagtgagacaactaaaatgatgggacacaccaacttgttaaccacttaagttccaagaccatcatgatcaagtatcaatactctcacttcttataatatattaatgtggtgacttgcacttagctccctaaaataatagatatgagactagaagggggggggggggg

SEQ ID NO: 7161 - DNA, 478 bp, Glycine max
  unsure at all n locations
gggagaggatgcttcaatggaggaaaagaaagagggagagatttagggagggggagcacgaaattgaaggaagaaaaagggagagaagttgaactttgagttgtgtctcacaagactctcattcatcaaagttacaacaagtgttacacatgcttctatttatagactaggtagcttccttgagaagctttcttgagaaaacttccttgagaagcttctttgagaaaacctccttgagaagctagagcttaggtacacacacccctctcataactaagctcacctccttgagaagcttccttaagaagattcctaaagaagctagagcttagctacacatacctctctaatagctaagctcacctccttgagatgagaagctagaacttagctacacancccctataataactaagctcacccncatgacananaacatgaaaatacatanaaaaaagtccttactacaaagactact

SEQ ID NO: 7162 - DNA, 456 bp, Glycine max
  unsure at all n locations
agcttgactggcccacttacatcaaccagtatattagcacacttgatatccctttaaaatagaataattgaatcgaaatgttcagaatgtagcaaatcaatgcaaattcaagatatttaagaagtcaatttccaagcactgcgtccaactttcatcttttgtaatgattgaaagtcaaacatttttcactgtctgaataaaatctgttaaagcaaaactctgcttcccaagcggagaatcatactcagtatctggttgctcacctatgttctcaatataaatatatgtgcacatagagctataacatatcctctaatatatgaacataaatacaataactatgggtaacacatgactagaatgctaacttgcaagagagagaagtctatgataggaactaatgcactatctactcctgatactatgaaaantnnttacaaaatatgtgtctataaa

SEQ ID NO: 7163 - DNA, 330 bp, Glycine max
aatctgaccttcttgattttcttcgaggtaaccatgatttttagcttgctccttgggagtttaagcttatctttgcatcttttctgactctggaacacatcattgtacggtttacgcttccttcgaaaaaacttagagaaaaagactttgttaaagttatctctttatgaaatggatgttatattcgtgaccttcactgaactctggtcacattggcatgatcgaaatttcaaaatgatattccttttcctgagatgcgaaacaaccctcatccctttcatgtagggacatgagtatttgactcagagtattgtgatagctctatttctg

SEQ ID NO: 7164 - DNA, 433 bp, Glycine max
  unsure at all n locations
agcttaagctccttcaactgcacaaggctcttaatatttgaagagtatccttgtggaaccttcacccgacgaagacactgacaaaaaattatcttctccttcttggacaaagtatggcaggctgggggcaagtaaattttcttcccatcagaccttggatgcaactgtgctcttatacccatatcaactagatcttgacgggtattcaagccatccttcgtcttgccttgaatgttaaggagcgtcccaatcacactgtcacaaacatttttctccacatgcataacatcaatacaatgtctaatgtcaagatcacaccagtacggaagatcaaagaanatggacctcttcttccatatgcaactctgacttttatccttcttttgggtcttcccaaatacagtggtcagggtgtgaacccgctgatatacct

SEQ ID NO: 7165 - DNA, 424 bp, Glycine max
tattacgagctttcatccttctattatcattatgatggagactcatcgtttgttcaagactattgcaaggttatgtaacattttgggttatgaaatatgtcacttacttgaagccaatggccatgctagaggtatttgggttttggtggagataaaatagggacttttctatcactaatgtccattctttgtcccaagccctgacagttcatatgtctacgaattctcaatcttggatctgcacgacactgtatgaaaatcctcacacgcttctatgttgccttatgggatcatattgctgatgtcaaacaatctatacatcttctctagtgttctgttgatgaacggactgagatttttcattttgatgagcacggaggtagcttctgtggatgatgcttctacgctcatggatatgatcgac

SEQ ID NO: 7166 - DNA, 414 bp, Glycine max
agcttgaccaatcctgacccaacccgggcatagtcagtcagtgagaacctgtgatgtacctaaacaggcgagctcctggcagtcaaccgataaaagaacaaagaccacaaagcacggaggtttgtgtggtggctggccagctatggatcttgagtgatatttgggatatggcctctggtaatcgattaccaagggtgggtaatcaattacaaggcttaatagtgaagacagacagttaagatggtctctggtaatcgattacaaaggaggtgtaatcgattactacgcctacaaaggggaccaggaagtcaagatggcttatggtaatcgattaccaaaggggtgtaatcgattaccacgcttagaagtggaactggaatattgagggggcctctggtaatcgattaccaatgc

SEQ ID NO: 7167 - DNA, 423 bp, Glycine max
  unsure at all n locations
tgaagctcaaggaacaaggaaaagnttgaagaagctctataatatgttntggcttttacatgcctaactcatttgagtggcatttgtattggttgttaactctgattgttgcatcttagcacatttgatatttgtttcgcattgtgcatcatcatagtgtgtgtgaaggaaattttctaagttagaaaactttcttcaaaggcaaaaactctttgtattaatcgattatagagttgtcgtaatcaattacaacaggctgtctgaagcttgtagagttaagtctcgtactggtttaatctattacggtagtaatttaatcgattacattgttggttgagacaatgattngatttttcaagagtctctactntaattgattaccaagtagaataatcgattacttctctcttgtttaagttgttc

SEQ ID NO: 7168 - DNA, 387 bp, Glycine max
  unsure at all n locations
tgcgcatatgactctacgaacgctcacttgcacaagacattctattaaccgatataatgcacccatatacaatcaaggcagctgtgttacctaaattatttacacgtactgccaaggtgtattcggtacttacatcacacacatctccttggctaaattcacatacatgcatactccaagcattttggggtaccaaaaattgcacatgtgcacatcttggtatttctaatacctatacatacacaaacttcatgatgaatcttgactatctacacaataaggtgctacatttcatgccctttttcaagcttttgctacctaaagccgcatgcagaatgcagcatattggtcttcgctgactaanatagtattcaaattatatatata

SEQ ID NO: 7169 - DNA, 440 bp, Glycine max
  unsure at all n locations
tatgcagattcataaacagcattctcttccacctacatctaaatgctagttctttatcttttgagaagagagtaatgaggttataaaatagttctaatttacaggaacatcatacacatgtgagataataatggatttacttagcattcatgaagctatcattaaagctgttatcatatgaacagaataactttatgtatgacataatattgtttaagaaatggaagacaaagtcttaacttacacatttttcaagcccaactaggaccaagggatcacattgtataatgccatacttcttcgaaaacttttgcctacaagcacaaaacagttttttggaattacaattgataaacaagtgtgataaaggaacttccatgaatcccttgcatacctactctatcaaaatatatcatcggtcacatntttaaacatctacc

SEQ ID NO: 7170 - DNA, 151 bp, Glycine max
cctgtctcctatggcgattagtcatcagtgtacatatcttctattcgtatttacgagttgtcgtctctgtccgttcaaagattgatctgataatctcatgtcttcccacacggagattaacatcatcaatccttctgtgtctggataggct

SEQ ID NO: 7171 - DNA, 469 bp, Glycine max
taatcgtaaaagtaaaagctaaagaagattcaactaatttagactccaattaactcttatttctattaatttgaacataaattgaacaagtaatggtatatgtaaactgaaattctcataatagaatttgtcttttgtcatttcagactatcagcaactctttattcttgttccctaattactagcaccaaatccttgcagcatttccatttcattgacacgagtgcagggcttcagaccttcagacgaagtcttttaggtacgtgggactcacaatcctctttttagttttactcactaattgcacctctttgtttggttggtgtacccctgttgttgctacagtagcatcttcttgttgacttgctatgttatcccctgtatttcatgagctgtcacttgccatattctcgtagtagttgtaatgattgactgcattataaaaaactagaaagcaactgtgtgtctt

SEQ ID NO: 7172 - DNA, 446 bp, Glycine max
agcttaggttaaattagtctaaactttgttaagctatttaagctgagtctagtccaacaagagggatctgaggacaaaacttagtgtaagttagtctaaacctaggagggttgtctaaattgagcctagtccaacaagagggatctgaggacgaagcttggattgattcattctaactagggatcaagatttagtaatcgaggctataacatagaacacacaagcatgattgattagagaaacatctttatatacatcagctattttgttagatagacccaacacctttacctactgctgtcaatcttacatacattgcattttactattcttagcctatacttagtttaatattgttctaaatcatcaattatcaatgcttctttcaataatgccttgttgctgaatttaatcctatctaatactagttccctgagttccatact

SEQ ID NO: 7173 - DNA, 226 bp, Glycine max
aagcacgttaagaactctattccagtagaaacgttgtttctacttcaaaaccctttgaactacttcacatagacttatctggtgcctctagaactatgagtttgggtgcgacttactacggcttaggtatagtacacgatgacctccgattacatggactgtggttttgaacaccaatgatgaagcttttgacggggcctgcactcttgcccttgctcttctatat

SEQ ID NO: 7174 - DNA, 494 bp, Glycine max
  unsure at all n locations
aagtcacctgccgcatgcaagctctaagcaagcatataggacttgatttccctctnttttctcttctctntcaccaatattaagtcaaataggcttactcaaagttttaggaattntaaggaagcattacgaaagcctcggaagctccggaaaccattttccaacaaaacgtggaggatcttgataagttcacccccccccccctttgctaaatgcactcatttttatttacacaccccattttgctaaatacactcccctttgcccttgttttgctgattctttttccataacattacggaactttacgaattacataacgatacttgttttcttttcgcaatgtcacgaaactttacggattatgcaaccatcccctctntgacttttggaatgttacggaactctacggattgtgcaataatgcttactttcgactcccgacatgtcgcggaacttcatagaatgcctaacgatgggtgtcacgttcctcg

SEQ ID NO: 7175 - DNA, 411 bp, Glycine max
atttcaattctgcctgacaaataataaattatgttttattgttagtaaattataaattttggctactaaacaaaatcaaagaagaaaactaacatacctgaatatcctcctatatcaaattcttgcatcccggatacaaaggcttctttgaatcactctgcaatccttcatacataggggcatgtgcttgctaaaaagactcttgtccaaggtcacgaatcatatcctccaagcgatctcctatatgtacatcaaacggttcagattgcgacccactttgcatgtgtattaattcaccatgccatatccacgtcgagtaattcttcttaatcccatcacacaatagatgctcccacatgccgcccagtaattgttgtcttacattcaaacaattgatgcaaagacaataat

SEQ ID NO: 7176 - DNA, 448 bp, Glycine max
  unsure at all n locations
agcttgttcaaccgaccgaggtagcatgagatggcagcaaagagggagaacaattttatggtgattcatacataagtgagaatgaaatttcaggtaatcataaagaggaagaggtcacggaaacgaatgcggatgcaagaggttttacaggcaaacaacgcttgttggtggtagctaacangttgcctgtgtctgctgttagggagggtgtggagtcatatcgccttgatatcagtgtaggagggctagtcagtgcacttctaggcaagaaaaattttgtcaccttgcattaattgttttttttggtgtgttttgttaatttgtttcttggtgaagttgtaattgtaactcagctatgctaattagttatcttnaattgttgatgatctcaccatagaggtcacaacaatgatagttatctaatcttcgcaacattctaataataatc

SEQ ID NO: 7177 - DNA, 448 bp, Glycine max
  unsure at all n locations
tgttcttgagaaatgctggaaagccagatacaccgagattaataatgaaatcacagcaccttcttttgtatacctgaggaagaaagatgttgaagcattttattttactttttgaaaaaggtataaagaggctgacagcccaaagtcccaaaaagatggacttgcttaccttaatttcatagcctcgtagggagctaccatcagcaagagcaatgccagaaatggcaactcaagttcacctagaaatgaaaaagacccagaagaaaatgtttctttccttcaatgttcaatcattatccaacaagtacgaaaaacaaaaaacacaacttattgttcttattacactccagaatcaggattttctttctcatgtttcgcagtttatacaaagagaagatatagagcccagcctgaggttcctagagaaatgctntgantacaccaattc

SEQ ID NO: 7178 - DNA, 472 bp, Glycine max
  unsure at all n locations
agctngtaggactnntggcaagcgtaccaattgtcgttgtaggtttcacatttataaaaaagagttcgtctccacagggacttgagtttacttaattcattcggataaaggttatcagttcaacagttatgtacaaatttaattaaatatcattagttttgttttgactaactaaagacaacttaaagtaaaagaatagtgaaaataacggaatcacggaataacagaaatacggaaaatatggaaatacgaaaataacaaaattcagtgtctcgaaaatatgtaaattacataaataataattacgacttanattaattcaagaaaacataggattggatttcatcgttcatacccttagtatcctagtaagattaacatctatgaatcattttccaatattactgatgcacacattaagttatcctaagtcaatccctcacacttggaacctaagaatatntactaaaca

SEQ ID NO: 7179 - DNA, 475 bp, Glycine max
  unsure at all n locations
ntgttcaataatcagggcatttgttgacaaaaaataatatttgttaattgaagtaaaagtatgatatatcctaattcgaaaacagtaaacgcaagcaattaaaagtgacaacagtggtttaaaagcgttgggtcttcctaataaacgagttgatgcatataaagatatttctctaatttagaatgttcttgtgttctatgccgaagactaaagtactaaacctcgatccctcacaagtttagactaatttaagccaaacttcgttctcagatccctcttgttgaactaggtttaattcaaacagcattatactcacagcataagacaaactaaaaccctgcactctatccctagtaatgcagntatctagccctgctctatcaagttctaaggaaacagtacacttcccagtgctaaagttccctaacaatacacactagtgggtgaatagacaaaggcatgcaacaataaagca

SEQ ID NO: 7180 - DNA, 416 bp, Glycine max
  unsure at all n locations
agctntgaacaatatacttgtccttcatttaattgtctttgggcttggcggccacgctcaacaaagtactttcgacacctactgtacgttgatttgaccaatgctgttatgagaatgttgcgacaatccttcaaaaccttattgatacattctgagaggctggttgtcatgtggccatatcgacatccttctctatcataagccatcgtccatttttcctttgaaatccaatcaatccatgttgctatggctggacttagatgacgaaatntttctaaattttgaaaaaaaatgtgcttgcaaggagtgtaggctgcataaaattagttatgaataacaattttaagtatatatganagttaaataaacgtgaccatcatatatgaaatcttacccaatttcttcaacatttcttt

SEQ ID NO: 7181 - DNA, 471 bp, Glycine max
  unsure at all n locations
taagcctaatagcaagctaatgagagagttaactcanatggtgccttaagtttcaaacacatgacacaaaacaacttgtatgtacacttccaaaatgagttattctacctgctccattgaaataaaagcatcatttccttactttattttcaaaatgattgcacacttccaacaccctatgctagtacaaatcaataatagtttattctacctatattttaaattctattgaatatggatagatgtaaaatgtaacaagtgcatccatgaattataaaataaaaaaagtgcatcaatgattgaatagagtccacatggatgtgaataagtattgtggggatcctagttgaaacacccatttactgaacaacaaccactagaataaagcagcacaataattgattatntggtatcactgtacgccaatcaaccctcaaaaattcatcatgaaataagaaacaagactcactc

SEQ ID NO: 7182 - DNA, 382 bp, Glycine max
  unsure at all n locations
agctntaacttgtatttctttaagtcctttttgacacactntatcacacgagtgtttttcaaaaatcttctaagataactgtgttttatcactcactggacaataatccactattttaacaaaaaatgtatttttaatcattggacgacacactagttttaatcattttaacagaaaactctgttttatcataccgcttgttatcttgtgaaaaacttctatttgtgaaaaactttatatctttggttaacacaccactcaatctcccttctagtgtgatttgacaccaccaccactattcatcatcaaatcgttctcccaacaccatcaaccatcctccgcacacgatagtgcagatctggctagtgacgacacacagtga

SEQ ID NO: 7183 - DNA, 475 bp, Glycine max
  unsure at all n locations
tgtctcagcgtctatgcgagacagagaccaacatgttagctatcatcgccaagtaccaagaagagttgggtctagccacggcccacgagcatagaatcgcggatgagtatgcccaagtatatgcggaaaaagaggctagaggaagggtgatcgactctttacaccaagaggcaaccatgtggatggatcggtttgctcttaccttgaacgggagtcaagaacttccccggttgttagccaaggccaaggcgatggcagacacctactccacccccgaagagattcatgggcttctcggctattgtcagcatatgatagacttaatggcccacataattagaaatcgttaggaaacttgtatggtctctcagaccttgactagatatgacttcctttntgaaataaaatgagttggtcccaggtttctacttcaaaaagcttgtgcaaatcaaatcactcctacatctcatctcta

SEQ ID NO: 7184 - DNA, 467 bp, Glycine max
  unsure at all n locations
agctngagcaggttggaattggaaagcaacaaattaactggagaaataccctcctcccttggtaatcttaaaaggcttcaattcttgtaagtatggcattctgtttgctaggctctacatatatataatgagtcttaggccttagcatgtattttttgtgcaatgtttaaaagtgtctgtttcttgtcctgctaccagaacattgagccaaaacaatctcagtgggactattcctgaatcacttgccagtcttccaatcttaatcaatgtgtatgtaaaataatggtttctagaactctgccattnttttaaagtatatttcattaatttagtatctgattgattattcaaacttctcttttgcagtctgctagattcaaataatctgagtggccaaatcccagagcagttatttaaggttcctatatacaagtatggatggtacaaccataaaattagtatatgat

SEQ ID NO: 7185 - DNA, 477 bp, Glycine max
tatgacatgcttggattagcgaaagagagtttattggatgctattttatttataaatgagtgctctcagtcaaatgatcctgatctctcactgaggcaaaataaagttccagattatgccgagcgtttagttaagaagcagatgcgtgctgcttggttatttcgagaggcagctattaagcatggtggggtccatagtcagggtgatggcggtgatatgtatggcccacagactgatgattctgaatgggagacagctagtgaaagtgatatatgaaatgatggacgggatgacatgggcgaagacgacgatggtgattggaataatgatgatgagaggaaaaattatgacaaaccctcgatgaaaggtattttcactataaatttcctatctatatgctctattaataatctgcattattatgtgatcctacttcgtgcttgtgattatgcatgtctgatatggggagtcgggact

SEQ ID NO: 7186 - DNA, 361 bp, Glycine max
  unsure at all n locations
agctggcacactcaaagggacatctcttctatatctttatgaaaaactattatgtacagttgtccattacacaaaaataacaccatctaagcaaacttaactgagtagagactagtactctccttcttccataccaatatgtcctcctcactcagaatcaaattaatacttctaaagtcataacctttntttatctaagcaaattagtatatttatttctgctaatgatatagagatttctccattcccatctccacattcaatttccctccctacggtcacctaaacctgacaccctggcctttatggctactacaagggtgtataatctagtatacttcctaaatgtgaaaataaagca

SEQ ID NO: 7187 - DNA, 408 bp, Glycine max
  unsure at all n locations
tctcgtagtagaacataggcaacgtatctaccataatcgtgatcatctccctctcagtcatgggcgggatgacttgggctgctaggtctctccacctttgagcatattctttaatggactcatgttctcgcttggtcatgctctgaagatggttccgatcaggagccatatccgcgttgtattggtactgcctaatgaaggcagtttccaagtctttccatgaccggatctgagaagcttccagattggtataccacgccactgctgctccggctaagctgtcttgaaagaagtgcgtcaacagctctttgtccagagaatatgcccccatccttcggcaatacatccaaagatgacctcttggacacgtcttccctttgatntatcaaaatctggtattttaaactt

SEQ ID NO: 7188 - DNA, 374 bp, Glycine max
  unsure at all n locations
agcttgcccttgttcttcaccctaaagtgtatataaattaggaacaaaccttttgtagaagcttgctcacccctagaagctcctaatatctcctatactttntggggagggccattcttggatggccttgattttcttagggctcacttggaccccatttctaccaactacaaattctaagaaactatattatctacataaaaggtacacttctctatattagcatagagagtatttttcctaagaactgaaagaactttccttagatgtcctaagtgatcatttaggctcttactgtacactaaaatttcatcaaaataaatgactacgaatctacctatgaaatcccttaagacatgatgcataagcctcat

SEQ ID NO: 7189 - DNA, 464 bp, Glycine max
  unsure at all n locations
taagctccttcaactgcacaaggctcttaatatttgaagagtatccttgtggaaccttcacctgacgaagacactgacaaaaacttatcttctccttcttggacaaagtatggcaggctgggggcaagtaaattttcttcccatcagaccttggatgcaactatgctcttatacccatatcagctagatcttgacgggtattcaagccatccttcgtcttgccttgaatgttaaggagcatcccaatcacactgtcacaaacatttttctccacatgcataacatcaatataatgtctaacgtcaagatcacaccagtacggaagatcaaagagaatggacctcttcttccatatgcaactctaactgntatccttcttttgggtattcccaaatacagtgttcaggtgttgaacccgctgatatacctgctcaccagtcaacggtatcggcgcaatatcatgc

SEQ ID NO: 7190 - DNA, 420 bp, Glycine max
  unsure at all n locations
agctngaagggtgagcgaatgagatgtgatgggatgtgtagagggttcaatggaacctagtatttataggagtggagcgtgaccgttggtcattgtttgtagggactattatagcccttgcagataatttccgagttgtagatactagtcgggagcttatagataatgttaagagataaacatatgcttatagataaaaggtataagataatcgtaccttttagataatgtgtggacttataaataattaatatctgtcaatagataagatattgggatatattcaaatatgagtaggttagagataacctgttggttggggagtctgactgctaagggccaagcatctgcgctcctatagcagggctgatgtggagggtggacacgtgcctcacagtaccatataacatgtcacatgta

SEQ ID NO: 7191 - DNA, 436 bp, Glycine max
  unsure at all n locations
cgcatgattatgtatgatggcaattatggtgatgctccaccactgacttggccccaagatgaccccattgaggtgcactccatcatcaaaaggtatgagagcataaagaatgagaaacttcccaagaacttcgatctcaataatttttttgagattaggaagaacatggttgacaatgatatttccaaagtccaaaaagagaccctcaagatcaaatatccaacttggcatccaagcttcaacaacctaggtgtagaggagctgaggaatttcatcgctaggttggacattaagcttgaagcttgtaatcaacgaaacgaaatgtcgaaacacaaccatcaaaatgaagccaacttcaatttcatgcaaagcatggttcaatcagacagtgttgctccaaacccaagccaactcaatttcatgcangaaatctctc

SEQ ID NO: 7192 - DNA, 476 bp, Glycine max
  unsure at all n locations
agcttccatcaattggtactagtgagtcataacctttggtcactcttatcataactcanacctttctttattttcatttaattgctttatcataaaaaccaaaattacaaaaatatttaaactctctttttaatcaattctattgttagtttaaataattaggaatacagctagtcctttgggtttgaaatctaaactttcaagtccattggtactatggcataggatctagtctacaatagagcatggagttgcactcatatctctatatgctattgaaaaataagcaaagctgtagatcgacattgatactaaagatatggagcctaaagagattacaagatatgaagaggctatgctatagtttatcactaaagcatctctcanagatcacaaggatgacatagttgtgacaaatcctagtgcaaatcgtgtgtatccaaaactagtggttggtgatgatgatcaactaattg

SEQ ID NO: 7193 - DNA, 406 bp, Glycine max
  unsure at all n locations
catgcaagcttcttaatgttatagaattcaatagctcaaggaagcgaatgtcagtgatagtgaaagatgaagaagggaaaanttttctactctgtaaaggtgctgacaggtctgtgataaaataatttatagccttcaacttctagcctgcgcatttaacctatggacttgcctaacttattttttcatgcagtgtcatgttggaaaggcttgcaaacaattggaggaagtttgaaaggaaaactgtggaacatgtgcgtgaatatgctgacacaggtctaaggaccctagtacttgcctattgcgaacttgatgaacaagaatacaaggagttcgatgataaattctctgaagtaaaaaattctgtccgcgcagatcaggaaactctgattgaagaagtatcgga

SEQ ID NO: 7194 - DNA, 107 bp, Glycine max
agcttaatatatcattcaatctatataactattagtaggattctctcctaaggaacattactttcttagctaattaaggaatattacttccggcgcaccctactatc

SEQ ID NO: 7195 - DNA, 452 bp, Glycine max
  unsure at all n locations
agctngttactatgataagagcatacctgttgtttcctgaagtccaagtacaagactttntgtcaataatatcaccaaaaactatcacattaacaaaatcacagcctctaagatttcgacaaattattaggtagccttgaagcattatgtttttatgattctaatctaccattctctttatatataatacataactatattttttaatttgtaattaattataatanntcaatatgttatgtaaaaaaatagttaaaataattaacattataatgattntagactatctaataatttctagtaagaatttaatgtataacaaacctggaagcacagaaggctaccacataatccgtcccagaacaagtgaaaatactatgtggatcatcataagcatagctgtaagaaagtggacatgcctncttaaacttcttcgaataaaacgtgggatt

SEQ ID NO: 7196 - DNA, 424 bp, Glycine max
aggaagaagaagaggaagttcttagagactcagaaatcaatgtggaaaaactgcttgtgtaaagaatgaattggacaagatagatgtgtagaatgattgattgaaatgaatgattgaatgcataacacaaccttgcttttatagactcttcatgtctggtcaagaaaaccattagaagagttatgactttagaaaaccttacaacctatatgaaaaagtcaaaaactatttggtaaacaggttttgagacaaatccatgtgctactcagttactgaataaactttttcaaaaattatcattggtaatcgattaccaaatcagggtaatctattacacatagctttcttgagaaagaatgtgactcttcacatttgaatctgaatttcaacgttcaagcacactggtaatcgattaccacaacat

SEQ ID NO: 7197 - DNA, 212 bp, Glycine max
  unsure at all n locations
agcttgagtataattgattctttgtgttatgagcctacatcaaacagttggattattgatgtttctgtcacaatcaagcgattgttgatgtctccatatgtgtgtacactgtgatcatgttttcgtttctagaattcatttgaaatgtctgttgntaattctgaatgagtgatccttcttgatttaaaaaatatcgtctcctaatcaattga

SEQ ID NO: 7198 - DNA, 190 bp, Glycine max
tctcagagtcatctagaggcacgtgcacgcagtgcatgcttctgaatgagctaagatcactgtgctgatattagttaaagagagaagaggagaatagtgcttacaatagttactcacaccttcaaatctttggactgtgaagatctttcgtgataagtgaggcgtgtcactttcttgagttcagaaaaac

SEQ ID NO: 7199 - DNA, 184 bp, Glycine max
  unsure at all n locations
agctagagaagcctatcgattttatttcctgcattaattaatatactatagnnngccttatatatccgctagaaatgtatgagcaactttgaacagctctgactacaactttgttcaagtaagaaaacaaaggcaaccgatgattaccaactattaagatgggaaaaaatggctatgttggatg

SEQ ID NO: 7200 - DNA, 470 bp, Glycine max
  unsure at all n locations
agcttaggctaaattagtctaaactttcgtaagctatttaagctgagtctagtccaacaagagggatctgaggatgaagcttagtttaagttagtctaaacctaggaaggctgtctaaattaagcctagtccaacaagagggatctgaggatgaagcttggattaattcagtctaactagggatcgaggtttagtaatttaggctacaacatagaacacanaagcatgnatgattagagaaacatcattatatacatcaactggtttgttagaaagacccaatacctttacctactgctgtcaatcttgcattnttattgtttttagcctagacttagtttatttctgttctaaatcatcaatgtttctttcaacaatgccttatttatgaatttaatcctgtctaagactagttccctgagttcgatactcggattcatccgttttaattntaaatacttgatgatctg

SEQ ID NO: 7201 - DNA, 299 bp, Glycine max
agcttctcggctcatgctgagaacgcctctagttcaacacccgtgcagcctaaggcacccacccagagggaagctgcccaagttccaactccgaacacgactcgaccggacggtaattccaacacgacaaggaacttccctccgaggccattgccggaattcaccccgctcccaatgacgtacgaagatctcctaccatccctcatcgccaaacattttggccgtggtaacttccagaagggtccttgaaccccctttcccgaagtggtatgaccctaacgcaacttgcaagtaccatg

SEQ ID NO: 7202 - DNA, 221 bp, Glycine max
  unsure at all n locations
agcttgtcaatcactttgaatgtgtacgtacgtttagatctcgcaaagaaaatttaacaaggtggagtgaagatccgagccacctacactaccctttaggaggtctaggtgcctaaacaaggaactttaatttcaatggaaattttgaaacaccctntacccaaatactcttccagtcttactaaaatattgggatctactgtttcttagcttcttacgat

SEQ ID NO: 7203 - DNA, 454 bp, Glycine max
  unsure at all n locations
agcttatatatcctctcaggtgaagataatagaccttgtgctctgctgttaaaatgtatgtttatgcattagttcttaacaaattttctcattgtttccttgtttccttgttttctcattgtcacaatttgacattggcttctcatggacgagaaaatatcaagttgaggagttccatcattgaagtaccttgtttccttgttagctatatatataccagaacaaggttattattattattattattattattattattattattattattattattatatatactgcaaatgtatgattatataattntttgatattttaaaccatttatatttttctttaaatttaatttatatctcagaattctcttaacattctaatttgtggtctaattctttaattctcaattataacaatatattcatcaaatacatcttaatggtaattgatgtta

SEQ ID NO: 7204 - DNA, 311 bp, Glycine max
  unsure at all n locations
agctntgactgagcaatgtcacagtatggatagcttattcttatactctataaccttaactcttaggcattcattagataaacttttccaccataaaggagagtaacagtgctacagtatgtcattgatattgaaaaattaataaaatgcaggtataaagagctcgtcatatgctcataacaagagaagctactggaaaggagctggcaatacacttgacatattggattggaacctaacagaactactgccagctaatacatggacgattcagttacaagctacaactacataactaactctatattatc

SEQ ID NO: 7205 - DNA, 202 bp, Glycine max
acttagagcacctgaggcatgctgctatacattcaattccgagcgtttcgttatattactagactcaatcattacatccgagtaatatgctatcgtcgcatgaattgccttacagcttaaacatttaactttgagcgtctcgttatattacaggactcaatcagacatccgagtaaaaagtcattgctcgttgaattggctc

SEQ ID NO: 7206 - DNA, 476 bp, Glycine max
  unsure at all n locations
agcttctccctattgtgctataaatagggggagaagtgaagaagataagggttcaaccccttaggcacttctctctctttcgaatttgctgaggaaaattatttccgtgaagaaaatccaagccgagacccttccgtaacatttccgtgagtaattacgcgaagattctcgaccgttattcaagatccatcgttcgttcttcgttntcttcagtcttcaacgggtaagtacctcaaaccaagcttttcaattcattatatgtacccgtgttggtccacattgtgtttcatgtattttcattctcgttttcatttactttttatacccccttttgacgtgcttaagccatttatntaagtcatttctcacctaatctaanaataaaataaatttccaccgatcggttgaattgtataatccgttaattgtggttaaaatgaattccgactgttcgggcgtgccgcaaccacgttgga

SEQ ID NO: 7207 - DNA, 133 bp, Glycine max
  unsure at all n locations
agctcgtgaggattgatggngaccctgtgttgatagaaacgaggatatgggctacgtgggagtacgtgagctcagttggaggtgggcaacaggggatggtgggtttatgcgcgctctgtggttgtctaaaaat

SEQ ID NO: 7208 - DNA, 164 bp, Glycine max
  unsure at all n locations
agcttatacatggagcaaggtaaattctcattatatcatattgcttaagcacaagaaacatcatattgcgaggtaaatgttaaggcagataaacaatcaaaactcctatctaatatctaccactctatgtctcttctatntgcagggnaaagcaatccttgcta

SEQ ID NO: 7209 - DNA, 528 bp, Glycine max
  unsure at all n locations
attgaacccttgagncctngatctctagagtcatctagaggcatctgaggcatgcaagcttcgactaatgttcggctcgatctgtagcgatagagcgttgccgcaggcaacgacccgaagggcgaagcgcgcagcgctgagtaatccttcctccaccaccatcactttcaaaagcctcggaattctcaaacgaatccgcaatcaaatattctgcccaagcggngaaggatgagaagcttgtagaacttccccaggcaaatatgctattggagcanagtgggtgttcagacacaagctcgatgaaatatgtaaggttgtgagtggaacaaagctaggcttgtggccaagggttattcacaacaagaaggtatagattacactgaaactattgctcatgttgctcgtctagaagcaatgcacattttaatatcctttgctgcccatcatggtatgatgttgtatcacatggatgtaaaatgtgtgcttcttcatggacttaatatcgacgcgtctatgttgaacaacccg

SEQ ID NO: 7210 - DNA, 220 bp, Glycine max
  unsure at all n locations
agtcttgttgacaagtgctgcatatgttcatttataaagtcttcacttttccaagcacaccaggaacctcccaccagcaagcagggctattttgctatctggtccagcaggtatacttagcaagaatttaacctgtcctgcagaaaccttttttaattntaagttggctcgactaatactatctacttatatatctcgaagaaccttaccagctcatgct

SEQ ID NO: 7211 - DNA, 169 bp, Glycine max
  unsure at all n locations
agcttgcactttttggaaccatacatgaattnttgacataaataatacaaaagaaattattatttatctaaatgatataagtcaattattatttatatttatgatacaaactattgatcataggtgagaaattgattctccccaaaccaacttctcacatctcttttat

SEQ ID NO: 7212 - DNA, 239 bp, Glycine max
agcttgtgcaaatcaaatcactcctacatctcatctctagcatgcattatctttctttacccactcctcacgtttggctgtttagggaaaacactataactaaacgcgccgcaagggatccctatcgcaccagatccaaatctagaacgatgggtgatcaagaggagacacaggaacagatgatagccgacatgtcggctctgaaagaacaaatggcctccatgatggaggccatgtta

SEQ ID NO: 7213 - DNA, 458 bp, Glycine max
  unsure at all n locations
agcttagcgcgcggccttgatgctgacgctctgtcagattctccttggcgctaagcacactgaagctgcgcttagcggtggatgcacgcttagaccaactgctactcnttgcacttcaaaacttagcctctttttcatctgaaattgcatatatctcatcattaaatttaatggacatattctagagactgctgtaaccataaaacaagatttttttacaagaattactcaaaataaccataaattggggaactatacaagctttggaaaatgatttctataaaaaagttattcgtataaggcgactaacaactctcccaaatttacaattttgcttgtcctcaagcaaagaaagaacagctcactagtccttaagcgacaaagatagtggtcagtcaaaagaaaatggtgtctgattataaaggaatcaaccattgaactgaatatatgaaatctta

SEQ ID NO: 7214 - DNA, 123 bp, Glycine max
aaacttaagcgttttgtgtaaataaaatggaggctgctattgtaaatttctgaggttctaacttctaatataataacttcatcttatctcttcccatccatccactcgcaacaaccccccata

SEQ ID NO: 7215 - DNA, 352 bp, Glycine max
gatctctaagtcacctgagctgcaagcttaaagcgcgggtctgggagacgaaggtcatagtggtctcgatatacgaagatgatgttccgagtacattggatttggtacgaccatgccctcctgatttccagctgggaaattggcgagtggaggaacgccccggcatttacgcaacgagcataatgtaaacctttacggttttaaaagctctatagttgggcctaggctttagagtctttcctattgttaaggctttgtgtctttcgtttttgaattcataatacaaggatctttcttcatctgttcctacgtctctacccattctcattcatttgcatgtttacttcttttt

SEQ ID NO: 7216 - DNA, 465 bp, Glycine max
tcagagtcacctgcggcatgcaagcttctcttggaccttgaacaagcaactcactctctctttcataaccctgctatgtgctcgcgactgggccctttcttcccttcgcaacttgagttcattattgctaccccatagagctccgcgaaatttgttccggccatactcttccttgcgagccctcttggtctcttgttcaagggctcttgcgcgaattgcattctcttccctgaacccggcacactccttccgaacgtgtgtaccacccaacttgaacttctccttggcgagttttgcctttcctaactctgctttgagagcatggacttcttcgtactctctcggtgcttcaaaactctcttcgctgacgactcttaacttggcgagccaatctaaaccttgtatgcgaactttcagccattcgtggtacccaccagtgatgccattacgaatgcctctaagctc

SEQ ID NO: 7217 - DNA, 192 bp, Glycine max
  unsure at all n locations
agcttaacatcagaccacttccagggtgctggatactacttcacatggacttgatggngcctatgcaagttgaaagccttggaggaaagaggtatgcctatgttgctgtggatgatttctccagatttacctgngtcaactttatcagagagaaatcagaaacctttgaagtatttaaagagttgagtctaa

SEQ ID NO: 7218 - DNA, 475 bp, Glycine max
  unsure at all n locations
catgcgagcttctaagacgatgattaattgacctaatattatagcttatctttcatggctaagnttgtaatcttgtgcagatcgtgtttgtatacaatcaatttaaaatataatataatgattataatgagtaattaattttaatatcaatataagctcaatacatttatgcgcataatggcaatgaagaataaattaaactatctgcacaatttattcttgtataataagtgacactaattgaaatgtagcataacgacaactaacaacaatgttttattaaatgcaatgtacatggcaagggaattaatttagtttaatctaaaacgagtgcattttcttagccaatatttaaataatgctaatataagcttgcgttcaccctacatattacttatntctttacgtacatgcttatcatctaaattcctaatatataatgtacaattctataatgagaaacgctatataacaa

SEQ ID NO: 7219 - DNA, 229 bp, Glycine max
  unsure at all n locations
atctctaagtcatctgaggcatctgccgcatgcaagcttgaatacaatgaaactcgccttttaacattggtatgactaacatgaatgntctcaggacaccgtagttcagtggactgacaacgccacaatactagttgggatagtgtcaaaagagacgatcgcccttgcggccaccttaatacgagcatgttcacgctttatatagactttacagctttcatgtgctgag

SEQ ID NO: 7220 - DNA, 375 bp, Glycine max
  unsure at all n locations
agctntcatcttctactcaatcatcaactggattacaattactcacttttgtttgtgtcaatgctcacttttatagtggtcttgcatcaaatttcataattgaacattccattgatcctctgccccttcacttaaatctgtgcaataaacattaggttccatttactaacaatagccaaagattgtatgtgaaaagtttctattctataagataataccaaactgatgaaatcaactaaaaagttcccatgtgaaaaataaataatgttaaaagtgtcataaatttaaaattaaaataagacataacaaaacatacccaataatgtcattttgacattcgatcaaacacataacttgcaaccaataaatcagtct

SEQ ID NO: 7221 - DNA, 428 bp, Glycine max
  unsure at all n locations
agctttcaacactggcaactgcaagatanttgtaagttctggcatatatgggattaggccaaatggaaaaattacaaatgtcaaaagactaaccggtagggccatgactaacacaaggccaataaagcaacggccttaagcctcttttcaattattgaaattntatatatttttaaaatacttctaaattaatagataataaattttattatattatttgtatttaacttgtttctaaaataattagtaaaatttattctctctaaatataaaatagaataactatattgaatgagaatatttttaagaattattgtgtttgataagaacaagtaaaaaaattctctanaaaaaatatctttggattctttttgctaatattttctcttactatatttttcataatgcacaatgaacaagatagattc

SEQ ID NO: 7222 - DNA, 459 bp, Glycine max
  unsure at all n locations
agctntntggagtagatacatgggaccaactcattntatttcaaaaaaggaagtcgtatctagtcaaggtctgagagaccatacaagtttcctaatgatttctaattatgtgggccattaagtctatcatatgctgacaatagccgagaagcccatgaatctcttcgggggcggagtaggtgtctgccatcgccttggccttggctaacaatcggngaagttcttgactcccgttcaaggtaagagcaaaccgatccatccacatggttgcctcttggtgtaaagagtcgatcacccttcctctagcctctttttccgcatatacttgggcatactcatccgcgattctatactcgtgggccgtggctagacccaactcttcttggtacttggcgatgatagctaacatgttggtttctgtctcgcatagacgctgagacaagctctctttggaccttg

SEQ ID NO: 7223 - DNA, 468 bp, Glycine max
  unsure at all n locations
cgcttgtgtaatcgattacaggctttannaattgaatcataatgttcagtaactactggtaatcgattaccatccatgtgtaattgattacatagtgtaaagtttaaattcaaatttgtaatggctgttgtaaatcattttttaccactagtaatcgattacatcctctggtaatcgattaccagagagtaaatcgcttgaaaaagtctttttacttatatttctttggcaaacctgttgctatttcaatttggaattcccttcctaaaatactagagatcttcttgatgttgtatcttgtattcttggattgttgtcttgaattaaactagagaagcacattttcataagacatcaaatcatcatgatcatatggcatcatcaaaacatcaaatgcaaagtatttgcttctacaatctcaaagtctttgcttctacattaccaaatactgtaatcgantacaacgca

SEQ ID NO: 7224 - DNA, 379 bp, Glycine max
agcttatataattgaacttaaatgttcaataactgctggtaatcgactactatatatgtgtaatcgattacacagtgcaaattttgaattcaaattttaatagctgttgtaaataatttttggccactggtaatcgattacatcctctggtaatcgattaccagagaataaatctcttgaaaaagactttctaatttaaatttcttggccaaaacctttgctacttcaataaggaattcccttactatttaatatacccttcctatgactctagagactatcttgatcatccatcttgaatatctttaatttctttgtcttgaataaagctttgacaagcatgtgatcctttggcatcatcaaaacattcagcttgatc

SEQ ID NO: 7225 - DNA, 380 bp, Glycine max
  unsure at all n locations
agcttcaaggttcanagttggatcaaaagcggcttgagggacttttccatttcccgagcatcagttgagtggcgcattcctgttcctgatgacaagacccagactatatatgtatggtttgatgctttactagggtaaggatatgtatcttatagcttgtgcgtgctcctctagcttcccttgactctattctataatcttataggtcctgtctatcatactcaccgactatcatcttgtttattgttcgaaatacatagctaaatgcatgaaagttcacattatgcatgatcatttgtacagaatcacgataaagaacagcttggacttctgctattttgctgaatattctctattacatgtgtcgctaatcaccttcc

SEQ ID NO: 7226 - DNA, 456 bp, Glycine max
  unsure at all n locations
agctntanaacctgtnnttgatgctaaaatttactcaaatgacaaggtgaattataagtcataaccctgtcaaatccttctcaagcccttgttaattcctcaagcatcacaaatgaggcatgccactttttgtttcctttttttttcgattactcacatattgtttcaattatattatatattatatataggaaaccattagttgagttgtaagtgtaactgtaattaagacaactcaaattcaatcaatcttctcaaatttaacccagtgtgtggtggtccaagatacaatacaacacagattttattctcatggcagaagaaaaacattttatcacacaaaaaggaagacaactctagtactaactgagaaaataaaaaacgatcgcttgcttactcttagagtaatgatacatatatgcatacacttaatactcttattctactttatctctc

SEQ ID NO: 7227 - DNA, 521 bp, Glycine max
  unsure at all n locations
attgaaacccgtttatctcctgacctccagnagtgctctagagacgaccacgaggcatgcaagcttaacttagtcactgacctatctgcctaattatcataacaaccgagacacgangaacatgcaagtgtgctacgaaacatactgatcaagctcaaatcccaattgcacacggctgcctgcaatcattctttaccatcagtcatcgactacaacctctggcaacccatcaccagataccatatccctagaacacgctcctctactctaaaatacatgcgcccacctttagctataccaattaggacattccttcctaaaacccaacagatctctcgatgtcctattctcgtattccgagacgccgtcttgaataaccactagacaaccacatctctctatatagatcctattaccccgatcatctggcttactgaacacatcacagcctgtatcgcttctcaatctcaacgttccgatcaacttcccctatcgcacgcattacttactccttacccccg

SEQ ID NO: 7228 - DNA, 421 bp, Glycine max
  unsure at all n locations
agctggcttcctttgattntcggcatgtctcgggacttcacatatcgngcaacaaagggtgccaagtatctcgaagcggccaatcaaaggttgtatatcatcaaataataatccccggacgaaattagggtatgacagggtcgaagcggcttcctataccaatgtcacgaggagtgtggtggtcagattcataaagagggagttgnattgtcagtacgaactccctaggaagatcattactgacaatggcacanatctgaataacaaaatgatgcaggatatgtgcatggatttcaaaatctagcatcacaattccacgccctaccgaccaaagatgaacggagccgtggaagcagccaataagaatattaagaatattattcagaagatgacagtgtcgcacaaagattggcatgagatg

SEQ ID NO: 7229 - DNA, 273 bp, Glycine max
  unsure at all n locations
atgcttatgatgatgatcaagttgttcaagtttgtttgatgatgacacagacgatgacaaaaagcccanagaaatgatttcaagattgagtcaacaagttcaagatcaagaataacttccaggttcatgagaagaaatcaagaagattccagaatcctgagaaggtctgtttccagattcaagagaagatgaattcttgattctcgagatgaaatctagcatacctcccagggaagttttgacagattcttcaaaaacaaacatagcaccgct

SEQ ID NO: 7230 - DNA, 131 bp, Glycine max
agctttgctgatgataatgcttctattacattattatcgctatcagatgagcctaacagaagtgtaataacttgtcatggatactacacaacatcggtgatttaaatcaccgacgttgttatcctatatta

SEQ ID NO: 7231 - DNA, 196 bp, Glycine max
agcttgtaactcggctttcatcgctttaagccaacaaccatgttgagatgctttagcatatgtcttatgctcagtagatgtagaaatggaaagaacaaaatgtctgtgggatgatgatagacgcgaataagatagtacagaatcgagaggatgacacactatagctgaataatcgagaggatggctcactgaagct

SEQ ID NO: 7232 - DNA, 196 bp, Glycine max
ggcttgtaagaattctaagatcattctccttgtctactcttcgaaaaagatcgccatgattatgaagagacgactctctatagatgttcctgagaggacaatttagagagtgatcaaagactcatcggatcgatttccactgcatctatctattgacagatcccgatatcttaatgttgaaagtcttccacctcat

SEQ ID NO: 7233 - DNA, 459 bp, Glycine max
  unsure at all n locations
agcttccgttcncaagatcatccnttatttaagtatttcagcctttgctttcttgtagcttaggaaaaatgccattcttcttctttctttcttccaaatccatttctaaagttccaagtactttctccatcacccacatccaccattagccaccacaaaccatcattgttctccattgaaaacccacaccgagaggaacccttcaaccgaagcagaatcttcaacttgctcgcgtgtttggtaaagaacgaaaaccctaatctgatctttcgttttctttcgaggtaaccatgcgtctatgctcgtttcttgctagcttcatcttgtctttgcatcttttctaactctgcaaccgccattgcatgtcttatgcttcctttgacaaaccttagagaaagagacttttgaaacattatcctttcatgaaatgcatggtatattcgtaacctacacttgacc

SEQ ID NO: 7234 - DNA, 465 bp, Glycine max
  unsure at all n locations
agctntgtcagtagaaaggtcattngaaaccgtttaaaggtccaatgccttaaacggtcgcgaaagaactacgtatgtctgatttcctcatcacaattgaggatacgtaggagcaaaatccccacttttgtccaacccatgagatcattaaaggtccaacaccttaatgtttctcacccaaaagagattgttcaaggtctaacgccttaatggttctcaccttcccaaagagatcgttcaaggtccaacgccttaatgtttctctcctttcaaaagagatcgttcaaggtccaaacgccttaacatttctcacccaaaagagatcgttcaaaggtccaacgccttaacggttctcttccttcaaaaccgagaggtcgtttcaaggccaacgtcttaaacaaatctcaagggctgaaaaatngtatatttctaggataccctacctacattatggagccctaaata

SEQ ID NO: 7235 - DNA, 400 bp, Glycine max
  unsure at all n locations
agctcggcttggatagatccaagtataanaaatattttgaatcatatgatgagtaagtgatgcttctgaaatttcctttagttcttgggttcagtttcatatcagcttaatctctaacaattacagttaactaaagcatgttaaaaaaccaaactcaatagaacgaatcttaaggagagagagaaagtgtttggcagatcactaaccttttcatactcaaagtagcaagtgtggtagcctgatctcatgtgaagtgaaatatatagttacatctatggtagctcgtccagctttgcggctggaaactctatcgaaggagctaaacctgcaaactaaactaatgagaatgctgattgacaaagagtcaacaattgacttggctaaatatcctattgcacat

SEQ ID NO: 7236 - DNA, 416 bp, Glycine max
agctttttttaaagcctattaaattaaatagaccaagcttatgcttattaaaaagccttataagcctgataggtcggcctatatatatgtatatatacttatattatttttttgggtaccaatatatacttatattattttttaggtacaattaatatttttttttgaaactagaagactttgattacacattactgctccacaactttcattcctataatcaagtaagactttaattacaatttaggtgtgattcatgtgcccctttatattcctcattatttttattggctttcctattcctgttaacgtttccttttcctattaggtttacttttccttttaacttttctattacgttcctattctagagcaaaggaatattaaagagatttaatgtgaagaaggcttttaaa

SEQ ID NO: 7237 - DNA, 495 bp, Glycine max
  unsure at all n locations
agtcatctgaggcatgcaagctagtaatgtggtccggctaacaaagaaatcattatntnttcttggattcaaagcttaggttctacgagagcattcattctccattttcttgacaaaccataactaattttttcacagccgcaaccttattgttttgctacacttaataacacacatactattctttgcacatggctgcttctagctctcattccacaaaataaacaagcactgntttttacaagaatgaacattcaacattaatactggactggagcaatttactgtatactacaactcacattagcttgcgttgctattaaggttccagcaacaaaagtttatcgataacactcccccatatttgagacaaatttgtcctgatccatgagtgctctcctacaacctaagatagggttgttactcagtatcaatactattcggctcggatttcaaattaagcttaatagggtgcaatggacattcactattaac

SEQ ID NO: 7238 - DNA, 347 bp, Glycine max
  unsure at all n locations
agctngcctcanagaggtccaggaaggacaaggcggccaaaggaactagttccgctcctgagtatgacagtcaccgctttaggagcgctgtacaccagcagcgcttcgaggccatcaagggatggtcatttctccgggagcgacgcgtccagctcagggacgacgagtatactgatttccaggaggaaatagggcgccggcggtggacatcactgggtactcccatggccaagtttgatccagaaatagtccttgagttttatgccaatgcttggccaacagaggagggcgtgcgtgacatgagatcctgcgtaaggggtcagtggatcccgtctgatgccgtccct

SEQ ID NO: 7239 - DNA, 384 bp, Glycine max
  unsure at all n locations
tggcttatgtaagattgtatgaatatggagaaaccatcacatagtgttactaggaggccgtcagacgattgagcacaacangtatatatatgtcaatatgctcgcattatctcatcaggcactgatgtacacctacaactagaacttacggacaattaatagcctatattgaaactagaagactttgatacacattactgctccacaagcttccattcctataatccaggacgactttaatcacattaggtgtgatcatgcccccttatattctcatattttattggctacctatcctgtaaccgttccttttcctattaggtctacttttccttctaacttttctattacgtccctattctagagcaaaggaatattacagag

SEQ ID NO: 7240 - DNA, 51 bp, Glycine max
ttagaggcacctgaggatgcaagctcgacgccagctagcccacgcgagcaa

SEQ ID NO: 7241 - DNA, 432 bp, Glycine max
  unsure at all n locations
agcttcaagaaaaagatggcctcagtatattccttatttccagaagggaattccatcaatagacctccaatctttaatggagagggttaccactactggaaaacccgaatgcaaatttttattgaggcaatagatctacatatttgggaagccatagaaatagggccttatatacccaccacaggagaaagagttacaatagatggtagttcatcaagtgaaagcataactatagagaaacctatagatagatggtctgaagaggatagaaaacgagtacaatacaacttaaaagccaaaaacataataacatctgccctgtgaatggatgagtatttcacggcttcaaattggaagagtgctaaggaaatgtgggacactnttcgattaacacatgaaggaactacagatgttaaaagatctatgataaat

SEQ ID NO: 7242 - DNA, 509 bp, Glycine max
  unsure at all n locations
tttgaccnccgtgaanatcgancccccttcgagnnactgaggatgctctacagtcgacactgcatgcatgcaagctagaagctgggggatacactcgaagacattttgtcttttaactgcctatctccctcgagcgacatttgtataggatgctatctcgtgtgatgcgtctgtagacatataggatgtatgatgcatccgttcatcatgacatcgaatgtgtgagtacaaagcatttatgcttttaacggtggcttcaagaggcaccacttctgattcatctgttcctgcgttgcactaatttactcactcacatgtcttgtgctacagtcccctctctcccacattgttatccctcgctaactattatcttctctgtcctctcgtccttacttccgcaaatttctcttctcctccttgattctcctttctcgccctcattcttttctctccctactccactctcccactatccctctcttgttttccccctctcttcctcttctccc

SEQ ID NO: 7243 - DNA, 179 bp, Glycine max
agcttatgtaggaacaattcaagataagtatgatgtgagaattgaagttcttccttggacttcaaatcaagcaaacagacaaaggcatatacatacatcaaaccaagtacgtgaaggaacttctgaagaagtttaagacggacgatgtaaagcaaattaataccctaatgcatccaacc

SEQ ID NO: 7244 - DNA, 248 bp, Glycine max
  unsure at all n locations
agcnttcacccttcccttttaaaagttgtatcagacacgctcgccctgtcgagctaaccctgtccttttctttnttgcaaaaacttaaactatttctttccattttatcattttgttaactcctatggtgaaggacctagggctacaaggacatcgatgtgtggtaaaggaaatttgtcctttggactggctcggttanatcctgatagtctacgcacattcgctcttttccattcttcttatggact

SEQ ID NO: 7245 - DNA, 129 bp, Glycine max
agcttgttctggttattaaaggagttcttgcttgttgaaacacatagcggctatgatattgaaggaggaggagacaaaggtgatgttatctatgcaattctcttactccttctcgaaggagatttcata

SEQ ID NO: 7246 - DNA, 476 bp, Glycine max
  unsure at all n locations
agcttgtagtgaggcttggctacaaaaaatcattgtttnttctataattctaaggcttagattctaagagagcacaaatactatatttatccaaatattctttccaatacaattagcttactcactagcctttcactttaatttgtctttgaccttattacaacaacacacattttctttgattgctctttctcttttaacacacaacttattttttgtgagtgctgatgctttaccttttactttacatcccaatcaactcccccaaattcggtgtaacttgccttgaactatctgctctcctagaatctaaacatggtatcttggagatattcattcaagtttacggttcaatctttgaaatgtaacttagctcacatagggtgcaaaggatacaattataattcacggtaagctctttggccaatagagttggctatacaataatgggcgtcatcatgtgctcattcatacat

SEQ ID NO: 7247 - DNA, 193 bp, Glycine max
  unsure at all n locations
agcttgtagggttcaccccanattccgtcgtcatatgctaaacttgatcccatatctacttgataattcaatggtagccataaccctagccaaggttcatcaacctccatttctccgagaatacgactcgaacacaacgtgtgcttgtcacgaagaagccccggtgcgttccattgagcattggagggctctg

SEQ ID NO: 7248 - DNA, 301 bp, Glycine max
agctcgtatttatttgacatgttttctttcaaatcattgacaaatacgaactctgtacagaccttaatagagcattatttagacacattgttaattctgattgaaaaactcgcgtgtttgtctctgcttttgtatatggcatgtaacatcctaaaattctataatatttattgctattagtcttatcataaaaattattagtataacagttcatcctaattaaactgattatgatgatctatctatatacatatatatatatatatatatatatatatatatatatatattatcactgatt

SEQ ID NO: 7249 - DNA, 464 bp, Glycine max
  unsure at all n locations
agctnntggaaatgatntctatacaaaagttagtcgtataaagtgactaacacacttaggctataaatagaggtcatgtgtgtgcatttcttcaactttgatcattttagaattacgcttcaaagttcagacctcttttgaggcacaaattttcgtgctccttctcctaccttcaggctcttatccatggattcctatggtggtgagcttcttcttgactcatcttctccttgaagtggtgtctctaatcaactttcttccttattcatttcgctaccattaaacttcaagaagaaaagcactccattgttgaagaagatccaaggcctacaagttccacatggagctacattagtattgccctttctcctacgtatccttagatgcgatgaggaacttagacctacgtagttctttaagtctgaatggttgttgtgctacatngattttatcttaattttaaa

SEQ ID NO: 7250 - DNA, 117 bp, Glycine max
  unsure at all n locations
agcttgcgaggattgatggngactctgtgttgttagaaacgaggatatggcctacgtgggagtacctgagctcagcttgaggtgggcaatacgggatggttgtttcatacactacta

SEQ ID NO: 7251 - DNA, 198 bp, Glycine max
tctagaggcatctgacgcatgcaagctatgtgaatatcacatctgatatataggggttatatcctctcgatagtaccctttgacaactaaggatcacattataaataaaggatctacatctgattaagtcactgtatacaagactaatctaatcagaagatcctctcatagtatagtagaaagtgatctagtgatgat

SEQ ID NO: 7252 - DNA, 192 bp, Glycine max
  unsure at all n locations
gagcttgagcatattcanacgacaataactntntactcggatgtccgaattaatccagtaatatatcgagacactcgtaattgaaaatggaagctctgagcaaattctaacgataataactttnttctcggatgtcggaatgagtcctcgtatatatcaagacgctcaaaattgaaaacaaaagctctgagc

SEQ ID NO: 7253 - DNA, 208 bp, Glycine max
  unsure at all n locations
agcattgtgacattgtttattgactatggccattatggncgaccactgtcatggngaaattaccacaccattcgataggttgttaacgctgttctatagggtagctatcactctattgcggatgggctatttaccacgatcgtgatctaatgtatagtcttcacatcttgataatatcgagcactttccaacactttcacttaattga

SEQ ID NO: 7254 - DNA, 458 bp, Glycine max
  unsure at all n locations
agctngagctcgttactactgcccatagagcctctcggaacttgttcctactccattcttcctttctaggactntatgtttcctactctaacacttcaaccgtggtcaggttgacatctttcacctcatcatactctttcctgaccctagtgattgtcgtctttagcttcactttcaccactcttgtgttttttagctctactttcataacttgcacttcttcattttccttaagaatttcagcctttgttccacttagactttttaactgtgggagccaagctatcccttgcattctagacttcaaccacttgtgatagccgccgatgtcaccattgctacttcctttaagctccttatcttttcttcccactctattccacgctttacgaactttccgaagtatcttcagactatcttcattgaagcctcgcatgatgaaaggcatgatgacttcc

SEQ ID NO: 7255 - DNA, 422 bp, Glycine max
  unsure at all n locations
atctctagagtcacctcaggcngcaagcttcataacctctcttatcaatgtccagttatatatactctacggtgcaggccataaaccaacatagcaagaagcaaaaaaataaacaaaaattatatcataaacaaaatatggctactcgaccaaaattcaaaacgaagctccactcataattttaaagctgcaagttctttagtcaaagccatattactttcttttaatctaaaacactccacagtcgacttctcatgcttctaattcaatataaatctttacaacgttaatctaggctgtcaatagttaacttgtcccaaataacacagaacgctacagagtatttcacctctgatttcatttgaagctgcgaatgatgcttttctattcaaaacctcattctttaaagctgtctctatctt

SEQ ID NO: 7256 - DNA, 330 bp, Glycine max
  unsure at all n locations
agctnngatccatcatacaattttaactgtatcatctatttaaagcctacacaaatgttgagttgcaatgaagttgtaattgcaagttgagagatagactaagcaacaacgagttagtgatatacaaatgctaatatatcaattatggtcaattattcatctttagtcctttaaaagtgaaaatactataatatagcagatgtatcttgctgtctcttaatctatacaaatcaaaatgatcctaactggctaattctcgctggtttctaaactttatttacgtttgcgtgtgcattcagagaggaattctgtaagttgtacttactgact

SEQ ID NO: 7257 - DNA, 471 bp, Glycine max
  unsure at all n locations
gctntgaggctatatatggaccatcgaccactaataatattgcagatgtacaagcgggtctaaagtaaaggaaagtgctacaagctactgtagaacctatcagattgtcaactctcttttggaaattttgatcgacatctgacaaggaaggatcaataacaagctactgagtggctacttccttcaaggtcactacctccatgtanttcctcaaagaatattcctgttgaaccaaatgtgaatgtcatattctaccttaactntagaggacatcaaatcttggaatggaaaacctgtaacaaagtctggagaaacaaagttgatattgggacttgggtacttgatcatgagatgcaaaagttagagcaggaaaagctaaatctccttaagctctaaaaggatagcactnggtgggaaaacatcatagttagtttgaagaaagtagaatctaaggtggagctcttatgtcta

SEQ ID NO: 7258 - DNA, 212 bp, Glycine max
tcactgaatttgtgatagcaaacaagtgttcctagatacatcactgtcaccatcttctaaccatagttgcaaaatgtctacttacccataaaactactgcacctatatattgctcctggcggaggccaatggagcataatgctatgaaaaccacctgttatgttaggttactacttactctctagaggtagccctattcgtcaggagcacct

SEQ ID NO: 7259 - DNA, 411 bp, Glycine max
  unsure at all n locations
atatatatatatatatatatatatatatatatatatatatatatatatatatatatatatatatgataggcttgaaaagaagaattataaacatacatgcacaaataacaaaacacagagttttctttgttctcctaagttgtaatattggtcagggtgttacactttttatcggccaacacttgctgcctgttgattaataaaaagtaatttcgatcgctccctttatatgaaaaatataattatgtcatttcttatcaatagccgatgtagcgcgggcagaacaaaaatattttgtgggaattaacttactcatttgtggtactgcatgtaatctacttaatgttaaaatttattacaattaatttgattttctagaactacccataaaattgggtgtacaagaaattn

SEQ ID NO: 7260 - DNA, 121 bp, Glycine max
agcttgaaccgccagtgccaatggtctgaaggtgtgtaccgctagtcacagttgcgggacatgtgctgaccacgagagaggggtgaggctgtgccactgtcgcctgctgtcgggagaggat

SEQ ID NO: 7261 - DNA, 300 bp, Glycine max
  unsure at all n locations
cgcttgntgagtgaatgaaatggctatgaagtgtaacggtctagacactaacaaaaggaaccactaaattcatctcgtggatgcattatatagaaagccaaatgtaatgaagtgttccctataacatttgtggaaagagtcacatcaatatttatgaattgccaaatgacatccaaccatgatatagaattaaagttgtacactaataaccaattcattaaattcattgtctcatgctcatctatacctgtctatggcggtttgaagcancaccttacagagacttcttggcactgaata

SEQ ID NO: 7262 - DNA, 445 bp, Glycine max
  unsure at all n locations
agctntatgactctcctacgagagtgcaaaaacaacagagaaatttatttaagttgagtttacatagttattttgagaacaaagcttcttattctacacttagtacaaaagttcaaaatttgattttttgtaccctgaaactgaaatcactttgatttcagagtgagaaaagaaaaagtctcataacaagtcctagcttccttagttaatcagttcccgcatctaagttaatgaatttctttataattcccatcatttctcccccagggaaacgccccagacatccctttgcagctgccacttcattcagctcataaaccgaatcaccactataagcttcacagcatttgtctctctcttctgtttccagatcatcaagcaagtcttcacccgacttaacacttggaataggaaatgggtcaagagaagatttggaaatagtgga

SEQ ID NO: 7263 - DNA, 213 bp, Glycine max
agctctacatcagattttagtaatgacccactattctagaattaaaataacttaatgccattaacctatgtaattaaaagaacttaatgtctgagtgtaactgaaattgtggctacaaaaagtcaccctcaatagccaacatgtcagccaccatttgatctcccataacgctgatgcctaggatgacaattgggtccttattacatacttgac

SEQ ID NO: 7264 - DNA, 475 bp, Glycine max
  unsure at all n locations
tctgagtcacctgaggcatgcaagctggttgactcttacctgagtcagnggtccctaccactttatttcattaaacagcaccctcaaatcctgtcaaaattctggccttattttgttatctgtgtaacattactcatgttgaaattactgttaagtaaattatttgatagtgtacaattttagggtaaccagctcaattctaagtctctatcaggaatagaaataaaagcaagtcattgatgaataatccttatccttactactctaaacatgacagcaacacaagacaagattcattgaccactacttttactagaaatcaaagccttgtattctggaggtacaaaagccgaaaaatcaatgcttcatattaagttttttgctgtcaccaccaagggtagaataacatctactcatgaatataattaaaataatgaataagtaacagccaaaattagtggagcacttacatgta

SEQ ID NO: 7265 - DNA, 195 bp, Glycine max
  unsure at all n locations
agcttgtagcanatgcaaacggcaataacgttttattcggatgttcgattgagtcacgttatacatcgaaacgctcgaaattgaaaacagaagctctgtgcaaatttaaacgacaatacattttaactcggatgtccgattgagtcccgctatatatcatgacactcgaaactgagaataaaagctgtgaacatc

SEQ ID NO: 7266 - DNA, 304 bp, Glycine max
atgcttttagatgctcactaaagtatgaaactttcagtactttagttgatgacctactcataggatacggacataatctctctctgacatataatgtggcatatagatctccagtgtgagccatgttcattaacacgatgagactgctcatagcatgacgtgtatgcacctgttactgatagctaactacgatgtatataaatcaagtcactgtccttaattgataattacatacatatgccttccgcataacacagatcagtactatccacacaaacctctgatctagtcatggactgatcca

SEQ ID NO: 7267 - DNA, 475 bp, Glycine max
agcttgtaggcctaggatcttcttcatcaatggattcctttgcttcttggaaaatgaatggcagcggaatggagaaggaagagagagagagagaggagacgccacttcaaggagaagatgagtctagaagaagctcaccaccataagaggccatggataagagcttgggggaagaaggagatgaatgaagggagagggagagaagagcactgaaatttgtgctccaaatgagctttgaaatctgaattttaatattcaaatgatcaaagttgaaaaaaatgcacacacatgacctctatttatagcctaagtgtcacacaaaattggagggaaattcaaatttcacttgaattggtggagccaaactttggagccaaaatttcactaattatgattagtgaattctagttatggttcagcccactaatccaagatcaattccaagattctccactaagtgtgcttaggtgtcatg

SEQ ID NO: 7268 - DNA, 180 bp, Glycine max
agcttctattctgaatttcgagcgtctcgatatatttcgggagacaatcggacattctagttacaagttatcggcgtcagctatagctcagtgcttatattgttaatattgaacgtcttgatatacctcgagagaccattcgtcagccgatgaaaaatgtcctgtcgaatgcctatgctc

SEQ ID NO: 7269 - DNA, 344 bp, Glycine max
  unsure at all n locations
agctctaacatcagaccacttccattgtgctggatctacttcacatggactcgaaggggcctatgccagttgaaagccatggaggaaagaggcatgcctatgctgatgtggatgattcctcgagatatacctgggtcaactgtatcagataaaaatcacacatcctngaagtattcaatgagctgagtctaagacttcacctagacatagactgtgtcatcaagagactcatgagtgaccatggcaaagagtacgaaaacagattgtttactgaattctgctcatttgaacgcatcactcatgagttgtatgagccattacaccacatcagagcgacatatatg

SEQ ID NO: 7270 - DNA, 446 bp, Glycine max
  unsure at all n locations
agctntaatggtcttgatacaattaaagaagaatagaacaatccaatcatggagagagagagagagtagagagagaaacagtgggtgggagagagttaggactaggaaagagaggagagctagagtcagatttcgagagtcagagggttcccatctgaccatcgaagggttagccacaggacagcgtcaatcctacacgcgagcgaactggagagaccataaggacgttatatccctttactttacgaggttcccggaagacgcaacagcaaaggatttgtggttccattttaaacagcaaggagacgtgagagaggttttcatacccagganaagaaacaaccaaggaaggagatatggttttgtgaggtataagggggtgagagatgtgcatcaacttcagcagcatttggacaatatgctcttcggaggaatgaagatgaatg

SEQ ID NO: 7271 - DNA, 361 bp, Glycine max
  unsure at all n locations
agctntatgcanantcaaacgacaataactttttattcggatgtctgactgagccccgcaatatatcaagacgctcgacattgaatgttgaacctatgagccaatgtacacgacaataactatttaatcggatgtttgattgagtcccgtattatattgagacgcttgaaattgaatgtagaagcttgaggcacattcaaacgacattacctctctactcggatgtctaattgagtcccgtaatatatcgatactctcgaaattgaatgttgaacctatgagccaatttaaacgacaataacttntctactcgtgatgtctgattgagtcccataatatatcatgacgctcgatattgaat

SEQ ID NO: 7272 - DNA, 327 bp, Glycine max
  unsure at all n locations
cgctntcaacaagagtcttcacatataaccatcatgaagcagataactaacagaactacccatcatatctgccataatctcatacccacgaaatttaatagagaaagaagtccacccaaacctgaaatttcgaagtcccactcgtatacacgcacattacgactccgaaaatgctctccttttacgatttggggcagaaatgatggctcaagggttgaagcttgtctggagcttcaatggagaatgaaggagaagagaatggctacgtgagggagagagagagctgtctgaatagtgtgggggctgactgaagagagagaaaagctt

SEQ ID NO: 7273 - DNA, 424 bp, Glycine max
  unsure at all n locations
agcttggagaggatgcttcaatggaggaaaagaaagagagagatagagaanaagagaggggagcacgaaattgaaggaggaaaaggggaagagaagttgaactttgagttgtgtctcacaagactctcattcatcaaagttacaaaaagtgttacacatgcttctatttatagcctaggtagcttccttgagaaacttccttgagaagctttcttgagaaacttccttgagaagcttctttgagaagcttccttgagaagctagagcttagctacacacacccctctaataactaagctcacctccttgagaagtttccttgagaagattcctagagaagttagagcttaactacacacccctctctaatagctaagctcacctccttgagatgagaagctagagcttagctacacacccccta

SEQ ID NO: 7274 - DNA, 404 bp, Glycine max
agcttttcgattcattctatgtacccgtagtggttcacattgtgtttcgcgcatttatattctcgttttgtttactatttataccctcctgttgacatgcttaagccattttgcttaagtcatttctcgcttaacttaaaaataaaataaatttccatcgaacgtttgaattatattatccgttaacttcggttaaaatcaattccgaccgttcggtcatgccgttaccacgtttgaaatcaagaagaggtaaaaaataatataatattcaaaaaattatctctttagtgaaataaagcggaaaatcaatcggacgtttcctctttgggattcctcactcttaatcgaattgactaatgactaaagtgaaactaatgttataacttactctcctagtatagctc

SEQ ID NO: 7275 - DNA, 456 bp, Glycine max
  unsure at all n locations
gagagtttggactgggattcaaagttttgcatgtctaggttttctagagagagaaaggtccaagttccagagagttttgagagattatgctgtgtgaagatttgcagagaccaaagcttgaagcaagagtcggtttgagagcttgagatgagtttgtgagtgattgtgagatcctagaggtgaaggagacatgctcaccacttgtatttttgcaatctttcatcttgttcttctctttgttgtaaagaaggcttcctggtatggaaagctaaatcctttgttggatcttctctgtaggtacctgatgtaaatatatttttatctatttaataattntttgtgtgttctctgtgctatctgcttttcactccagtatgcctttaccttgatcacgtagatgcatgctctgttagggtcattcaacagtggaaactggtctaactctaaagtccttga

SEQ ID NO: 7276 - DNA, 469 bp, Glycine max
  unsure at all n locations
atattcttagtgtgtatatatgtctaataattggtttatatttacatttatatcttttctgagttttatttaatgtgccactcaacaaaataaaaataaaataaacagcgcaaaaaaaatttcattgactagaaaaatgctgaaactagccttagcctatactaatttaataaatttagtatcggcttagcctacattaaaagaaaaaacttctcagtccttacttgactaatataattattaatgcttattgcttgaccgttgagagacattcacaaaagaaattataatgaatagagatagagtacaggcctatgtaattaaaaacatgaacatatnggtattttntctggtaaggtacagctcatcctcgtcttatccccataatataaataagtattaagtactgatgaacagcatgtgtgattactactcaattaatgtacgcataagttcaactatagtgatc

SEQ ID NO: 7277 - DNA, 481 bp, Glycine max
  unsure at all n locations
agcttcttttggaccttgaacaagcaatcaactcctctntcagaaccatgctatgtgctcgcgactggtccctttcttcccttcgcaacttgagttcattattgctaccccatagagctccgcgaaatttgttccggccatactcttccttgcgagccctcttggtttcttgttcaagggctcttgcggtaattgcattctcttcccgtaacccggcacactccttccgaacgtgtgtagcagccaacttgaacttctccttggcgagttttgcctttcctaactcgcttttgagagcttggacttcttcgtcctcttccggtgcttcaaaattctcttcgctgacgacttttaacttggcgagccaatctaaacctcgtatgcgaactctcagtcattcgtggtacccaccaatgatgccattacgaatgcctctaagctcttgatctttccttaacggggtntcccatgccttatggat

SEQ ID NO: 7278 - DNA, 343 bp, Glycine max
  unsure at all n locations
ctatgtacccgtagtggtccacattgngnttcgtgctttttattctcgngaagggtactatttataccccctgttgacgtgcttaaaccatcctacttaagtcattcctcgcttaacttaaaaataaaataaatttccaccgaacgtttgaattgtattatccgntaacttcggttaaaatgaatttcgaccgttcggtcgtgccgtaaccacgttggaaatcaaaaaagaggctaaaaataatataataatcaaaaaaacatcttttagtaaaataaagcggaaaatcaatctgacgttttctctttgggatttctcattcttaatccaattgagtaataac

SEQ ID NO: 7279 - DNA, 252 bp, Glycine max
aatctgatgtctctatgttacacactttgtattatatatactagtatttagcagcaattacttgggatcatcacatctccacctcccaatattaatcattcttattataatatcacatgagaagacgttataggctgattcactgcgtgacatacatgacatattgaacgtacgctcgtcatcgtattggggagacgtacaacaattgacgctctgttacaactaatcctgttcgtgacacgattgtacaaa

SEQ ID NO: 7280 - DNA, 446 bp, Glycine max
  unsure at all n locations
tactcaagccttctccctatnttgctataaatagggggagaagtgaataagataatggttcagccccttaggcacttctctctctctcgaaattgctgaggaaaattatttccgtgaagaaaatccaagccgaggcgctttcgtaacgtttccgtgagaaattgcacgaagattctcggccgttcttcaagattcatcgttcgttcttcgttttcttcagtcttcaacgggtaagtacctcaaaccaagcttttcaattcattctatgtacccgtggtggtccacattttggttcatgtatttgtattctcgttgtcatttactttctatacccccttttgacgtgcttaagccatttatttaagtcatttctcgcttaatctaaaaataagataaattactaccgatcgtttgaattgtatcatccgcgaatttcgggtaaaatg

SEQ ID NO: 7281 - DNA, 479 bp, Glycine max
  unsure at all n locations
aatactcaagccttggatagaggtattaattaanattcttaaaaatctatccactttaaataaatagaagtgaagtaacatggatttgtggtggtgcggacaacgaattaaattgtaacccccaacattaaaatgtaatgtgtcaaaatgaaaatgtgtttctaattctattagtgtaatgtgtttcggtgtttgtaacccccaacatattaaattgttaatattntattaaaagcactaaaggaaataacgcagtaccacaccttccctgattgtcaaattatttttttagtttttaatatatatatatatatatatatatatatatatatatatatatgtgtgtgtgtgtgtgtgtgtgtgtgtgtgtgtgtgtgcccatcgatccctaacaaaatttataccttactcaccgcgtcccagctggacaatcggatcttaaacttaccttcgcactcacccattctctatatattcca

SEQ ID NO: 7282 - DNA, 456 bp, Glycine max
  unsure at all n locations
aaggaaatgatcaaaatgataacagtatatatgttctggcagcatacacaacgccacacagaaacatagaacactacctgctgaggatgcaatccactccctacttacagtagacactcagagagacattctttctgctgccagttctagtgctacaatccacatagaacaatatctgaaccatattcttatccatattcttatcacacagctccatcagtagtcataggggctaacatagaaaagtccacaacatggaagttcacttttaacaagagacaaataagagagcaaaaaaaatcacaaataacaaatggctcactactgtacctgcttaaacacatacaatcattccaaagttagatacataatacattatcttaaagcatcaagagaaacttacgatacacttgaanaagataaataagttcattcccagttgacaaaacaatgtct

SEQ ID NO: 7283 - DNA, 442 bp, Glycine max
  unsure at all n locations
atatattatttagacactnnanaacacaactaaatttttgatttctctncatctttctctttgtatatgttactaattttctatccaccacatatccatcatatttatattcctcccctactatttctttatcttactgggtgccaaaaatagcatataagatgtacacaaataatttttgtaagcttaaactacagatgaaaaatcctacctagtcacctacttgccatcaccatattttagtccctgcaccttgatagtttgattaaagataaaaaaatgcaacccatatatgatatttggaggccatgcatgttttgtcaaacatataaaccgtgaaatttgactcacatgttggctcgcctaaccttctaatttctaatccatgctcatgaatcatgatataatggattaagctagcctagttgtacatacaccgatg

SEQ ID NO: 7284 - DNA, 453 bp, Glycine max
  unsure at all n locations
ttaggctgttcaattgcttcagattgctgcacaaaagggcaaatgtctgtgtggtggtcggtagaggagcataaaccacagaatttggtgacaggtgcaaatttttgattcatggccagttgggttaccgggttaactaaggcatctagtttaccttcaagcttcttagtctcagctgatgaagatgaattcatggctacttcatgcattcctctaatgacaatagcatcatttctagcactaaattgctaggagtttgaagccatcttctaaattaaatttcaggcttcagtanggttcatgtctccaaaggctccaccactggaaacatctatcatacttcgctccatgttactgagtccttcataanaatattggagaagaagctgctcagaaatctggtggtgagggcaactggcacatagtttcttacaatctctccagtattcatat

SEQ ID NO: 7285 - DNA, 203 bp, Glycine max
tatcgagacgctcgcaattgaataccgaagacgctaagcaaattccaacgacaagaacttcttactcggatgtctgattgagtcccctcatatatcgaaaagctccaatgtgaatgtcgaatctctgatcaaatttaaacaacaataactatttacttcgatgtctgattgaaggccctcatatattaaaatgctcgaaatgg

SEQ ID NO: 7286 - DNA, 471 bp, Glycine max
  unsure at all n locations
cttgtaaatatatgaattccatgaatntaaaatgacacanaaggatgccaaagtatgaacaatctataaaatatgaattccattaatttaaaatcacacaaaaatatgaattccatcaattccatgaatttaaaatccagaggtatagaagaaggaactgagtttcttcttgtcgactatgaatagaagaagccatccaaaccttgttttgtctaagctctagtctcagattttctatatcaattctacctttttccttgactcctaaatcttctattactaaatgaaaagcagtgatgagacaagattagcacagaggttgttttaatcatttatcagtactgagtgtggcaaaggtgttacctgtggcttgngttccaaaaagctttgcttgctagcagttgttttcatttctagcatcactttggttgtaggttntatgctangcacaagtgcttctggatagatatt

SEQ ID NO: 7287 - DNA, 456 bp, Glycine max
aagcttgagtcgaggaagtgtagaaaggtgaaacttcttgctgttattctttgtttccagagcggtacctggagatatgtcgcggcggtgaggagaccttgaggacgtcaggtggggtgctattgcccaaaaccaagcttgaccaatcccgacccaacccgggcatagtcggtcagtgagaacctgtgatgtacctaaacaggcgagctcctggcagtcaacagataaaaggaacaaagaccacaaagcaaggaggcttgtggtggctggccagctgtgaaacttgattgatatgtgagatatggtctctggtaatcgactaccaagggtgggtaatcgattacaaggcttaataatgaagacaggaggctaagatggtctctggtaatcgattaccaacgggtgtaatcgattaccaggcttgaaaacgaagtcaggaaactaagggagcctctg

SEQ ID NO: 7288 - DNA, 432 bp, Glycine max
  unsure at all n locations
tcgtgaggaatgccttgtgcttagatagcatgaattatcccttcgatnatatgtatgcgtgtaaatatgtagcatgaaatgccttgcaaaatgttgaatgaaatgccttgcaaaatgttgaataaaatgccttgcaaaatatgaatatatatagcatgaagtgccttacaaagtgtctggataggtagcgtaaaagtatttttcaaaatatgtgtatttgtgagtaggtagcaaaagaagccttccaataaaaaaatgtgtgtatatatataggatgtagcatgaagaggtttgtcaaaaaaatatgtacatggatgtgtgtcataaaatgcctctcaccaaactattatgtgtgcaaatgcatgtgtcataaaagaacacggccccaatatgattattttataaagagcatgttgacactcgcgccatatg

SEQ ID NO: 7289 - DNA, 212 bp, Glycine max
  unsure at all n locations
atgagtcatgacaacagctttcagaattgccccatgtatggtgttgcttgtcaatgttaggattcaacaagcgattcttctcanatttcagccagcccatatcaattagacttcacactttatgcttcggggtcatacaatgctcaatggaatgccccngggctcctncatgataagcacacgttgcgtttgagtcgtatccttagaaaaat

SEQ ID NO: 7290 - DNA, 420 bp, Glycine max
  unsure at all n locations
acattgatgtttgtatttatgggaggaggttgtacgccatttttgttttaagagtagtgtcccactggtaaaactaactttccaaatttttgccttcgcaggaaatggccccgaggaagcttgcctcaaagaggtccaggaaggacaaggcagccgaaggaactagttccgctccggagtatgacagtcaccgctttaggagcactgtacaccagcagcgcttcgaggccatcaagggatggtcgtttctccgggagcgacgcgtccagctcanggacgacgagtatactaatttccaggaggaaatagggcgccggcggtgggcatcactggttactcccatggccaagtttgatccagaaatagtccttgagttntatgccaatgcttggccaacagaggagggcgtgcgtgacatga

SEQ ID NO: 7291 - DNA, 468 bp, Glycine max
tactcaagcttagcagtttattcactcttttagtattgttgaatcattttattcattcaaacttttgtttgtgaaagtcaagagtgaattagtgttatggaatacttgggtggtcttagattcaaaaggagtggcaggacaaaatacttgtttgtaattaaagttttgattagtagaattctttacagtcacataaaggagaattgaacattgctttgtttaagtgaactagtataaaccaagtgttaccacatctttcttaattggttttattgagtattcttttaagcttatcttgacaccgtttctcaccaagtgtttacctgaaaaacctttgtggaaatattactttattattactggacgaccaaacttggttttcatcaaacttgttttgcttattagtggatgactccattgcatctatctttttggacgtggaataaaagcctctatttgaaaaatgtt

SEQ ID NO: 7292 - DNA, 482 bp, Glycine max
  unsure at all n locations
tactcagcttctaaggaagctacctagtctataaatagaagcatttgtaacacttgttgtaactttgatgaatgaaagtcttatgagacacactccaaagttccacttctccccctcttttattccttcaatttcgtgctccccccttctctctttctttttctccattaaagcatcctcttcaagcttcttatccaaggcacattcttggtggtgaagctccttcttccatggcttattccctagtggatggtgcctcccctctcttcttctcctttgccttccgctgcctccatagaagctccacaagcaagcttccatcaagtggtatcaaagcacaagagcttctagtaggtgctccttanacctacattaatgctttgctttaccttctcacatgtcttgtgctaaatgttgttaacatgattctttagagtttccaccgattaaacttgctatagaagctagatttgattntctat

SEQ ID NO: 7293 - DNA, 454 bp, Glycine max
  unsure at all n locations
ctacacaaatntaattcctaaatgactttatctctacagagctataaaggttcatatttattaatataattcaaacatttcatgcatgctttcagttgtgtgtttagatcaatgttctcatataatagtctttaaacctacaaattttgtatcttgtctgtaggggtttggatcccttagcccctctcttcttttcactgagtgatatgccttcaaatttatcagtgagatcctaaatcatattcaatctgtaatagtttaatgtgtgtatatatgtgtgcaactcttttattactacctctntgtttttgcctcttcacctttcaacccatccatttaatgttgcatgtactctgccttaaattggattatgcaatatgatatttatctatggtggatattgatatggagtctcttacctaccatatagaanacaaatgtctccataatttga

SEQ ID NO: 7294 - DNA, 455 bp, Glycine max
  unsure at all n locations
tactcaagcttgtccaanatgcaaacaataataattgtcaaacggatatcctattgagtattgtaatatatcgagacgcttgtaatggaaaacagaagctcgtagaaaatgcaaatcgcaataacttttaactcggatgatcgattgagtcccgtaatatatcgagacactcgaaattgaaagcagaagctctgagcaaattctaacgacaataacttttgactcggatatccgattgagtcatttaataattcgagacgctcaaaattgaatacagaagctctatgcaaattcaaatgacagtaactttcgactcggatgtccgattgagtcattttatgaattgagacgctcaaaattgaatgcacgagctcttaccagatccaaatgacaataactttntactcggatgtacgattgagtgccgtaatatatctagacgctcaatattgaaa

SEQ ID NO: 7295 - DNA, 479 bp, Glycine max
  unsure at all n locations
tactcaagctcttatccatggcttcctatggtggtgagcttcttctttactttcttctccttaaagtggcgtctccaatcatcattcttccatctccattccgctgtcattaatcttcaagaagcaaaggactccattgatgaagaagatccaaggcctacaagctccacaaggagctacatcattttgggtttgatatctagacttttagtccactattactattgtgtagggtacatttgtcctttgcaacaattaataagtataaattaacataaatatctcatcatcaatataatattctcaacaacaacatgataaattacaaacaaaaaattatagaccaacccacccatcataaatatgtatgactttaccattataacaattntatacttcatgtttaagggtatcaaaacccctcataagtctttgggtactatctccttcatcttttattatgtgcatatgaccttcat

SEQ ID NO: 7296 - DNA, 441 bp, Glycine max
  unsure at all n locations
tgatgctngagtgtccacatgggtgcatgcatgaccagttntgcataaaatttcctaatcatcattgttgcatgtgtttcatggaaataatgtaggacatcccctttatccccgaaccgctggccaaatcctgacatgtatcatgaccagccgttctacaagccttgagccaaaatcctaactcaccataatccttaccctcggaagaaaacacaaagagaaggaaaattcccaatccaagaaagggagaagacacaaaaaaaggaagagagaattcccaatccaagaaagggagaagacacaaaacagaaagaaaattcccgatgaaagagtgggagaaagcaaaataaaaaaagaaagaaaaattctcgatcaaggatcggaagaaaacagaagaaacatgcagaaaggtctttagaccagacaatatctgaacaatac

SEQ ID NO: 7297 - DNA, 399 bp, Glycine max
  unsure at all n locations
cggattctttttactctggaaacctcttctttctatgtgaacctcaacccaatctctgggttggtaaacaacctttttgcgacccttgtttgcttatctagcatagctctcattcctcttttcaatttgggccttgactctttcatggagctttttctcacagtccgctttggcttgtacttcctcatgcttaaaaactgaaatattaggcattggcaacaaatcaagaggagttagtggattgaaaccataaataacctcaaaaggagaacaactagtggtgctatgtatagccctattataagaaaattcaatatgaggtaagcaaacttcctaattnttaagattctttttcaaaatggtccttagcaagatacccaaagtcctattcatgacctc

SEQ ID NO: 7298 - DNA, 481 bp, Glycine max
  unsure at all n locations
ttagctaagatgcctgagacatgtcgaatgatggatgatggtcatatgatgaatggacaacgttgatgattcgacaatggacttatgacttgtgactgcaaccatgtaaggcttttatgagtttcatatgaattattttggtggtgtgctgacatttgccaatggatctcaatcccttgaggatttaggatactttcatctaaataaagctaatacaggaccactcaaccaaacgggatactcaaggcagatactgttcaactttcatgtctttttagttttgccatctatatgtgcaaatttatcactgctacaaactcagaaagtcagcaggctgatgcatgaaggaaacatacattgtttattcacacaaccagaaaatcaaaatgatacaagagttttatgtgatgaagatagtatgcataattagaaatctgtctcctaaccccgctctntatnttattccatatagatattatta

SEQ ID NO: 7299 - DNA, 397 bp, Glycine max
  unsure at all n locations
cttttttatacctaagatttttttgttatggttttcttcatctgtttatgtgtgtatatattatatagaaactttaagatgattcaaatttcttggtttagcatctactacggtgcccatagacatgatgtagaaaaatcatcattctacatcggttattagaacaaccgatgtagaatggtttatgatactattacaattttggcagcacgtgatgtagaaagtatgacattctgcatcggttataggcacaactgatgtagaatggtttagaaagattaacattctacaacggttcggcgttaataaccgatgtagaatgttcactattctacgacggctnttacaagacacccatcttcgaatgtgtggtattctacatcggtcagataatcat

SEQ ID NO: 7300 - DNA, 575 bp, Glycine max
  unsure at all n locations
ccacaccgttctgcatgactgccgcgatatttcgtggcgaattaccggcgctctacgcctgcacaatatgcctgctaactatcgcttcgtcacntttccggccctgannnnnnaaccgacggctcactgtcacagattgcacccaacaataccgaactcttttcttctctaggctatcagaagccctccctggaatgttggcatatcaagagctatccgcgcatgtcttgttaggaagcactcccctcactctctactattgaattgactcgcaacctgacctttggcgggggtgtgacaaggcctatcgaatgggccaacggagcatctgccgatgaaggaaaatgtgcggagtcaccatcagcgtttatgtgacgataacgtcctaccaaccaagatggaacaggccgagggtttgcgtgtctcgaaaatcaagatactacagttgtcgtcgcccaggaggtattaacaccatacacacccgacacaagcaatgcagatacaccaaagtgtataatatgactgaacacatacgttcctggtggctgatttacatcctgattacacctacgccc

SEQ ID NO: 7301 - DNA, 590 bp, Glycine max
  unsure at all n locations
ccacagctcgccgcccgacacccgtaagtttgcggacggataactagttgtgacacacctccgcgcgctcgctnntcgcgccgactatgcgctcgtaccgctctcccngccngannnnnnagcactctacgcgcaggtgtgggagacgaacgccaagcaggcccaatatactatgatgatgtgacgcacacagaggaccagagtccacctagccctactgaccaccaatgagggacatcccaaagggatgaacccaccggcattgacaaccacagaacactgtatacctatacagctggaaaggcactataagtgcgcctacgacaaaaagtagcaattgcggcaggcgcctagccaggtctgatcgagatagctataatgcaacgatcttgcctcatcagccagtaccacgctgaacatgcaaatccatacgcacgagtacgccttgtactcgaccgctacaagaaggacgacggccctgccagtacaacccctgaggacacctactacgggtgcctgacgcaatcgatgcgcacagaaaggacaacgatctgtagctccaccaaactagagggatggcacccacgcca

SEQ ID NO: 7302 - DNA, 480 bp, Glycine max
gcttccttgagaagctagagcttagctacacacccatataatagcttagctcacccccatgaaaaaaaaacatgaaaatacaaaaaaaaaatcgtactacaaagactactcaaaatgccctgaaatacaaggctaaaaccctatactactagaatggccaaaatacaaggcccaaaagaagaaaacaacctattctactatttacaaaaaagagtggacccaaccttggcccatgggctcaaaaatctaccctaaggttcatgagaaccctaaggccttctttatcaactctagcctaatcctcttggagcctcttgctcatggctctggtaactggtcctttcctagggaggattgcatcatcccctcccccttgaagaggatttgacctcaaatctgttggttcctcctcctctatatcagctccacctgcaaaaggaattagatcagaaatattaaaagtggtgctaacctcatact

SEQ ID NO: 7303 - DNA, 408 bp, Glycine max
aacacgacatggagactatctagcatagctaatagggaagacaacaactaaacattcccagatggtaagcgtgcaattataaatcccaattccactgcagtacatgatcacaattcctattaactgctattggcagtaaccaagttcataaagaacagtccacaactcaatgcggccggatctgcccgcaatatccctaaatcgacagccatgcgaccacaatctaaaaccttggtagtaacataagcatggggccaaatacatgaataagagaggctagttttactttacccctgagcaaatatgcgaccagcctcaagagcattgtgaccaacttcactattacccatgtcatcttctgttggaaagtctacagcggtaccatgagccctaaccaatctccatcgt

SEQ ID NO: 7304 - DNA, 465 bp, Glycine max
  unsure at all n locations
tactcagcttgtctaccatcgaactcggttntagacgtgacgcattaaatgtaagtttcttcaggtggtctttggcatcacatttaaacttgaaccattgtcgatgagtaccttanggatgacatggtccatgcatctgacagacacatgtagagctttgttatgctctctcccctcaactggaatctcttcttccgcgaacgcgatatagttattggtagttatgtgattaacaatgccttcaaaaccctcgactaagatgtcgtgtgctacgtgggcttcgttgaggacctttaccaatagtgcacgatgaggctcggagtttatgagcaattcgagcaaagagatccttgttggggttttattcaattgctcaactactntaaagtcactctgttggatgagacgaacgaactcatgagcctcttccaaggtcaccacctttccttgaagaccttctttctt

SEQ ID NO: 7305 - DNA, 470 bp, Glycine max
  unsure at all n locations
tactcaagcttctcatgctgagtaggaccccagtagtaccctntcaatcccactacattgggatgcctgatgtttgcaatttttttagcctctttggtaaattcttttctctttgttgccattccttctcttagccacttcactctcaataacaaaccatgctccagagttgccttgtaagatgtaccatgactgcttctccccaaaacttcagctggggctccagacagctcctcatgtgtcaatgttattgcatcatcaagaaaataaagttctccagtcaatttatctgctgatcttgcatatagtcttgcatgatttcctacagaaactgaatcactagatcctggtgatgaaaagtggctattttttgatggggagaaccttgttgcagctgccattttttcatcatggctgataatctcagatgacgaacctttctgtgaggtcacaaaatcctcggctgatac

SEQ ID NO: 7306 - DNA, 437 bp, Glycine max
  unsure at all n locations
tactcaagcttgtatctgtggattcactttcgatctcaactataccataaggtataacattattcaccacaaaaggaccaatccactttgacctcaacttaccactcatgagtccgagcctagagttatacaataaatttttttgtccaaccacaaagttcttcttagctatcaagctgtcatggaacttcttggtcttctcctagtagaatttggaattctcataggcttctaaacggatctcatctagctcacttagttgcaacttcctttcctctccagcctggtccataaagaagttgcaagtctttacagcccagtaggctttgtactctatctctacaggaagatggcatgtcttgccaaagacaacccgataaggagacgttcctatgggtgctntgtacgcagtcctatgcgcccaanaagcatcatct

SEQ ID NO: 7307 - DNA, 339 bp, Glycine max
tcaagctgtcgacatcgtccgcttatgaattactcttttggtttttttagaggaaaccttcaatcctagaacgcaatgtggcggacaaaagtggccaattaacttgaatgaccattattgtcaatgcacaaagtattctgcttttcactatccatgttcacacattattgctgttcatggttacgtgagcatgaattattatcaatatgtagacgttgcttacacatatgagcatatccttaaagcttattccgagcaatggcggcctcttgggaatgaagcggctattcctccttatcatgagccatggacacttataccatatccaagtacaattcg

SEQ ID NO: 7308 - DNA, 459 bp, Glycine max
  unsure at all n locations
ngatatgtaattatgtcttttcaagaatgacctttatcagttttacaattggcggcaatttgaattctaaggttaaatttgttgtgatgaagggttcaacactaatgaaacctactgctagtctgttggctaagcaaaatcagccccatccaattgttagctcaaggtgattattggagaaacttgtcctttgtcatggttcaaggcatgaattattagtgaaaatcaaacagtcttgcaacgcttgattagttggcaaacattttttgaattgaatcatgtcactgcattctaccataagatatttgtttgctccgcatggtgcattgatataaatgctttctttcttggatggttactctgttctttatgaaatcgtgaattgtattaagtaggattgccagagtattactgcatttattccctacttttctctttgtgctatgatgtttatggttg

SEQ ID NO: 7309 - DNA, 323 bp, Glycine max
  unsure at all n locations
cgngtgatgttgcgcgtactgatggataccatgatgtgtttgctgggctttgacccacgcgggtgttgaagagacagcatgggcatctcccttcttactttatgaccctgcagccccgattcttttggcattcgcgtttgtggaggaaacgttatccaactttgctactttcaaggctacctcgattctatactcggcaaacaccaaagccgctaagctggactgcatgtcacctactagcttctcatagcttaacactggcagcaggtcactcatatggtgatcatctctctctcaacatgggaggagctcttgtgcccccg

SEQ ID NO: 7310 - DNA, 462 bp, Glycine max
  unsure at all n locations
aaaaatagacagcttcagttntgaaacatgcaaattattattctctttttctatcataattttacatatatatttctttgttgtttttctccctttatttttgtcttcttattagcattgtgttgcgagtatgtttaacttgagggtaaatctaaacacgctcatgttaaaactttgagaaaacaaataaatttagttaagtcaatttgagtatttgtttttttgttaaaattatttttaatgtgctaaaataatgtttgttataccaatttttgttttttaaaatttttattttgaacaaaataactaaaaggtttaatataaattcagttataaataatttttgtgtcatgcagaagagatgttttgataaattatttatatagtcaatattttggaatatataactattaatattttatatgaaaattaatatatatntattaaattattcatgttgac

SEQ ID NO: 7311 - DNA, 466 bp, Glycine max
aagctttagcagcaggtattaataatcccttggaattcggccaacttgtcttactaacgaacaaagcacagggaattcgtgaatagattatgaaaattgaaaaagtcgtaccaagaaaaaataataaaaataaatcgcgtgacatggcaaaaaaataatcctaaatcctgaaatgaattaacggaaacgatgagtttaattcccataaaagcaagttctcgtaagtaaaggacaagttaatttacatattacatgttaatgtaaaaaaaaaaaaaaagctggagggagaaaagcagaccaatgcggcagcgaattattattcattcatttataaatagctagagaaagagaaatactgaattactgatcatataagtatgattcttcatggttaaactgggaattgtaccaagtgagggttccaatgagaatatagcccattagcattactgatggaagcaaaatt

SEQ ID NO: 7312 - DNA, 414 bp, Glycine max
  unsure at all n locations
caagatcatttgaactgggtacagccgtgcctttctgagttcgaattaaggaactgtaaagttgtcgagtgacctgcagtttccatggcgaacataatgtgctttgttagtcttaaccgtatagttgggcctatgatttatggttttgttcttgttagggcgtttgtcttttgctatcagatatataaaatacgatatcttcttcatttgttcttgcaccttcatacattctcattcatctgtatgtttatttctgtgaaggtactaataccgaggaccttgacgtcgattatgagcgaatagcaaaccaagctgaggatgaagaagataaagatgcggggtttcccctatagctagaaaggatggtcacacagganaaccgataaatgaagccacacgaagaagagacggaaa

SEQ ID NO: 7313 - DNA, 421 bp, Glycine max
  unsure at all n locations
gaatcaagccaaggctattgtgcaagcaatcaatggggcaaaacacaccaaatgattataatgatggatggctcaaattctcacaaaggtaaaatcatcactttcaaattgagctttcaaaactatcatgacatgtagagaagaatcaaggatttcaagtcacaaaatgtcaagaacttttattttcaaaacaattacccatttcttgaacatatcctataattcaaagaanaacatgcaaagtcgtacgtgcacacaaaattgacccaaaatattaaactgaaaatccgacgaaactaacaacattaacaaattaacacaactaacaaattaacaaaaccaacaaaactagcaaaaccaaagaacactcccncccccccccatacttaaacaacacattgtcctcaatgtagcacaatta

SEQ ID NO: 7314 - DNA, 390 bp, Glycine max
gaaagaaggttgtcttcgaacccggagattgggtttgggtgcacatgagaaaagaaaggtttccggaacagaggaaatcaaagcttcaacaatggggagatggaccatttcaagtgcttgaaagaatcaatgacaatgcttacaaagttgagctgcccggtgagtataatgttagttccaccttcaatgtctttgatttacctctttttgatgcagatgtagaatccgatttgaggacaaatccttctcaagagggagagaatgatgaggacatgaccaagagcaagggcaaggatccacttgaaggacttggaggacctatgacaagggctagagcaaggaaagccaaggaagctcttcaacaagtgctgtccatactatttgaataca

SEQ ID NO: 7315 - DNA, 600 bp, Glycine max
  unsure at all n locations
cccgccacgcntacgctggcagtgtctcaaacgaggcggcangcgcccgcgacaatctgacacgagcggatnnntngtacgtgnagacccgcgactgactcgtcccctgcaaagccgnnnnaaggcgggcgcgagggcaacaccccaaggagttcggncaacatctttcattatctacatcgcctcagggaacccagaaatacaatatgagaactgaggaggccaaaccactataaaagcgtcataataactcgagtgagatggcgaaaaagtaatactggaaggtgcaacgaaataacggcaacgacgagcggaagagaaaacaaagcacaatcttaaatgaaaggacatagcaacacacacacgacacgtaaacgtaaagaccccaaaacagcgcgagggagacaaccagaggcatgcggcagcgagtnattagtcaggcatggcgcactagctgcagaaagagaaatactgaagcactgctcctgtaaggcagcacctacatggccaaacagggaacagaccgacagacggctccaatgagaatccagcccatagcattaccgatggaagccgcaccgaaactaactcggagcccca

SEQ ID NO: 7316 - DNA, 463 bp, Glycine max
  unsure at all n locations
cagctcgcccaggcgagcaaggttgcttcctccagaataaacaaccttctggaggaatcttttggagggcccaagtggacctggttgctatttacacccccctttttactaaatgcacccccttatatatttttctgtaattctttttccgtaacgttacgaaactttacgaatttcgtaacgatacttattttcctttccgcaaggttacgaatccttacggatttatgtatttactctttttggctttcaaagaagttacggaaactcacggattgcgcaaaaacacctcttttcgatttccgccacattacggaatttcacggattacgcaagcctgcttccttttggatttctgagacgtctcgggacttcatttattgcatgtcatcaatttataatcctcggacgaaattaaggtatgacagttgcccctctntacttacctctcatcggagataag

SEQ ID NO: 7317 - DNA, 370 bp, Glycine max
tatttttttttaatccatgcttgagctttaagtgctcgaatcaactcaaatcgtttacacaaggtttctctaatacacacacaaatgcatataacttctaattataagaaaatttcaagtacagtataaaatatttatgaattagtatattaattacttaataattcaaagattggattgctaaatatcatgttctgttaaaagtttcctgattttcagtgtgtgaagttgattgagctgttcccatactccttacaaataataataagaaaatgaagtaaaaataaaaaaagacaactaaaggagttcccggaaacagacaataatagaaataactgacccaccaagaaggcatagtctaagaaccttc

SEQ ID NO: 7318 - DNA, 195 bp, Glycine max
gccctatagtgagtcgtattacaattcactggccgtcgttttacaacgtcgtgactgggaaaaccctggcgttacccaacttaatcgccttgcagcacatccccctttcgccagctggcgtaatagcgaagaggcccgcaccgatcgcccttcccaacagttgcgcaacctgaatggcgaatggcgcctgatgcg

SEQ ID NO: 7319 - DNA, 372 bp, Glycine max
tgaggaagtgttgaaaggtgaaacttcctgcttttattgttgaccacagagtggtacctggagatatgtcgcgggggtcaagagaccttggggacgtcaagtggggtgctattgcccaaaaccaagcttgactaatcccgacccaacccgggcatagtcggtcagtgagaacctgtgatgtacctaaataggcgagctcctggcagtcaacagatgaaaggaacaaagaccacatagcaaggaggcttgtggtggctggccagctgtgaactttgattgatatgtgggttatggcctctggtaatcgattaccaacggtgggtaatcgattacaaagcttaaaaatgaagacaggaggctaagatggtctct

SEQ ID NO: 7320 - DNA, 315 bp, Glycine max
  unsure at all n locations
ctaagcttggcaggccgattatgtcnttttgatcaacatgaagatgctattgngggatctctcaagcaaagcttggtatgctggttttggtcttgttattgccatattatgatttttgacttctgagaaataaaatctataaccatttcttgggtctaaatttatgcagctgttgtttaatgttgtaaccatagtttaatgtgcattctaatgtacattcacaatattgttgtaaatattttaattgtttgacaggatgtaatgttaaatgccgctacaatatttcattttctgcgtttatgatgcatgttgaaa

SEQ ID NO: 7321 - DNA, 409 bp, Glycine max
tgagcgcttgccatagcttctaactcaagccttctggcctcatatacttgggaagcctcttctgcagtgttgaaagtgcctaaccatatacgattgttctgaaatgggttatagatctcagaagcccatttaccccattttctctgcctgacacctctatatttaccaggagtcttcctcctcgctgatggggtatgagtcaaaaccctcttcttactttggggttgacctttagtgctaaccctcattgtatttattttgttattcaactcacaagaactagtttcaagagtggtgaatgtgtgaagaagacggagaagagagatctcacacatacttcttttaactattctcgggttctgaatcctcttggagtcatcatcggatgaatcagtagcatcaggatcgt

SEQ ID NO: 7322 - DNA, 321 bp, Glycine max
  unsure at all n locations
gcttcgccatatattacgggactcaatcggacatccaagttaaaagttattgtcgctngactcttctgagagcttccgctagcaattttgagcggctctagatcctatcttacacaataggacatccgactgaaatgatattgtcacttgaatatgcttatagcttcaattttcaacatacgagcgtctacagatgttacaggactcaatcggacatcccatttacatgtcatagatctgtgacaatatttaaatctttcgacctcaatttccagcgtatggtcttccacacggctcaatctgacatcctaattcaaagtt

SEQ ID NO: 7323 - DNA, 378 bp, Glycine max
attaaggcgaagaagtgggaacctgaagaaggtggtggaggaaggcgcttgcggaaaagcgaggagaagagagagtgagcgctgtaagtgatgagcctctgagcgggatccaccagcttcgacaaccaaccattgttgttcttcctgctagggtttctgagggacgttgggggccgatcgtacggcgtcgtttggatcctgctgcggaaggggcgtttccgaaacttccctcctgctcccccttcgtatcccttctctttctcttccgtcgccatcacactaacactgagggagagtgtatgtgtgtgcgtgtgtgcgtacgttctgtgaatcggtgcttccaagacggaaagagaacatccatagcactgcgatgta

SEQ ID NO: 7324 - DNA, 377 bp, Glycine max
  unsure at all n locations
tcagtgtcatactatngatcaaaacaaagcaggtataaatatgcaatactagactcaaaatatgcaacaaacactagacctaaatcagtgtcacagaaattggaagaaaatattttatccaagcacaaacttcaagccttattccatgtattggggggaagttatggctggccatatgggtagaggtgtcatagaggagcaggtatggaggaagggaccttggactgctgaagaggacangttgcttgttgagtatgtcaggttgcatggtgaacgtagatggaactctgttgctaggcttgcaagtaagaaacaccaaactgttatcactgtttcgctactaaaatatatgatcggattttcacatttacaaccga

SEQ ID NO: 7325 - DNA, 137 bp, Glycine max
  unsure at all n locations
gtctcacattatctgcctcaattcttggagtgcagcttatgtatctattgngtaacttcactcagtgtcaattgattttaagatgaaatctaacatggtatcagaacccataatctatcttggttctcgcctattct

SEQ ID NO: 7326 - DNA, 412 bp, Glycine max
  unsure at all n locations
tctaagttctttaacaagctatgaacaatatacnatcctcttcattaactgtctctgcgcttggcggccacgctcaacaaagtactttcgacacctactgtacgttgatttgaccaatgctgttatgggaatattgcgacaatctttcaaaaccttgttgatacattctgagaggttggttgtcatgtggccatatcaacgtgcttctctatcataagccatcgaccatttttcctttgaaatgcgatcaattcatgttgctatggctggactcaattcacgaaatatttctaaatgttgataaaaaatgtgcttggaagagtgtacgctgcctaaaattagatatcaataacgtggatgagtctctatgaaacgtaaataaaccggaccatcaaatatcaaatcttaccca

SEQ ID NO: 7327 - DNA, 152 bp, Glycine max
agaagtgaatatgattttcgttcatccctcctggtaattcaagaatcacttgaaattagtgaaaaaaattggtttcgtgaagaaaatccgagccgaggcgcttccgttacgttttcgtggggattatcgcgaagattctcaaccgttcttcc

SEQ ID NO: 7328 - DNA, 468 bp, Glycine max
tactcaagcttgtagattattgatttaaacattatttagtttattctttcttttatacataatatacatttatgtaaagtttactttcaccatttagtttgtcaaattatatcaaattcaagttagacaacattattttcaatatttgactcattgtattaagttgaatatgacaattctattattatttgtatctaaagataattattataaaattcaataaatttacattacattccctaaaaaaattataatacataatattttataatattttataatttgatgacaataataatgataaaatgcattaggctagttaactcaactgaaaccttttcaatgaaatttatgtctttaaaatataatatcatattaaatatgaataactttagtctcatgtaagtatgatataatatggacttaactcataaaattctgacttttacattactcaagctttattaa

SEQ ID NO: 7329 - DNA, 454 bp, Glycine max
tactcaagctctgatggtgttgagaagacatcacatgtttgtcatcatcaattatggggagaatgtgaatgtatgtatacatgattttgatgatgtcaaaagaagaatcaaacaagactcattttgcttcaagattaatacaagattgtttcaacaaacaaagccttgattcaagatttcttcaagatcaagccttgtctcacaatgaaaggtttcaagtcattcaaggcacatgtaatcgattaccaatacatgtaatcgattaccaatggtttgaaattgtgtaatcgattacacatcatatgtaatcgattaccagagactctgaatgttgggaattcaaattttaaatgaagggtcacaactgttcaagaaaaacaactatgtaatcgattacactaattctgtaatcaattaccagagaggattttaaggaatatcgccacagtcacat

SEQ ID NO: 7330 - DNA, 404 bp, Glycine max
ctcaagcttctcttcctctggatggttcagtttctcactctgatgatgatgacactttctgtagatcatctccatacatatcagatgatggtcaaagccctcgctctgactataattctgatcagtgggaatctgatgagactccggaaagcagtgaccaaggggtgcatgattctccttgcagaaggtcatcaactgaatctgtgtccaatgatgataccaatgcaaaaagtggacatggtacatgtactatgaatggtgtggaacattctctgtccaggcctttacttgattttccaagttacgataatgttaatcctgcacttgagaaagaaagtaaaaaacattccaaatgcaataatgctgttatgtcacatagtcatgcagagcctgcacaaccacca

SEQ ID NO: 7331 - DNA, 414 bp, Glycine max
  unsure at all n locations
tactcaagctccatgattgaatcaagagtgagtcatgaatctagattgattcatgatgatgaatcaagattgattcaagatgttttgatgataacaaagatgataacaaaaagtccaagagaatgacttcaagattgagtcaagaacaattcaagaatcaagaatcaagtttcaagtttcaagtttcaagtttcaagaatcaagaatcaagaatcaagaatcaagaatcaagaatcaagaatcaagagtaatcaagatcaagattcaagaatcaagacaagactcaatcaagataagtactaaaatgtttttcaaaacattgagtagcacatgaagttttcacaaaagctgttaccaaagagtgtttactctctggtaatcgattaccagtttactgtnatcgattaccagtag

SEQ ID NO: 7332 - DNA, 438 bp, Glycine max
  unsure at all n locations
ctttcttcacccttattgcagttctacatcatccgcaccaccttaaccctaaaaaccaacataaaacacatcaaaaccttgaaatagtacacctttatgaaacttctaaaagtgcctatggaagaaaacaaaaatggaggatgagaggggaaaaaaaagggtttcttacctctaaaatcaatccaaattcgaaaaatcctttgtgctaaggtttcaagtcactaaaaactaagtgtatgactcttcctctattttctatgcgcaccgcatagcttcctaagctcacttactccattctatatcactcaaggcccattcatcttagcccagacatcctanaacagactattcacacccaaacaaagttnttcgcatttgtaaacataacatacatacaagtaccacacattgtcatctcataataattaattaattaat

SEQ ID NO: 7333 - DNA, 422 bp, Glycine max
tgtaaggattgattgaataagtgtattatgtgtattgaaaagttaatcaaagccttgcttttatagactcttcatgtttggccaagaggaccatttagaagagttataacttttagaaaaacttaaaaccaatttgaaaaagtcaaaataccttttgatgagttacatcttttgatttattcagaaacaaacactggtaatcgattaccaaattagtgtaatcgattacacaaagcttttgtgtgaaaggatgtgactcttcacatttgaatttgaatttcaacgttcaaaggcactggtaatcgattaccaaaacattgtaatcgattacagctttttgaaattaattggaacgttgtaaattcaatttaaaaaccttttcaaatccattttgctactggtaatcgattacaacaatatgg

SEQ ID NO: 7334 - DNA, 448 bp, Glycine max
  unsure at all n locations
agcttctatcaccctggctgtgctagactcatgaatgggtgcgaaatcttgttgaatcaatccatgtnatctcgcacacagtggcaggcactgcacagagttgtcccacaggtgcaatgtgttcactaaattgcatccatgtatcatccctttcttcaatagagacagaagacacaacaggatgtgccataatagtttagatgtatccaaactgtcgtactaccctgttcggtcggcgaatgaccatcaaggggccccatgtgagatagtcccacaataatgagatgacctcaaattctctaaatgaacggtggtctctatactgaacctagtacaccacgtcaggggtcagtctgtccagacgcctgtgatacatggaaactggcagcgccttgccagaggtccatcagcatgtacgcaatctcctgtcatcataatactcaatatg

SEQ ID NO: 7335 - DNA, 287 bp, Glycine max
gttgacacactttgtggtagatttacggatggcctttgtggataactagtaggtgggtcacgatgaagttagtcatcggctgagttatcacattgatgggtcgcggggaaacttggacgcctttgaatcggcttcaccacatcagtgcttccctctttctcaccctcttcatctgccccagttgtctaagacctcttatcacgatgatgaaacttgtctcttttcagatccacttcgatcctttcacaggcgaagaccccattcgctaccttgaatgtgtgtcaccc

SEQ ID NO: 7336 - DNA, 458 bp, Glycine max
  unsure at all n locations
aagcttgttgacacgcggtgatttacgtcatcttccgcgctacaatatctgtttactgactttngagtcacgctgacgggcggaaatacccgagtggtatccgataaaattttgctgtctgtaagacgaaaagcctgataacacgcagagactaacgtcgtcttctgcgcccttcgtcaatcgcggccgacaagcccgttgacacgcggagaattacgtcatcttccgtgctcacaagatctgtcatactgacttttgagtcacgctgacgagcagaaatacccgagtggttatccgtataaactttttgcattctgtaagacgaaaagcctgataacacgcagagactaacgtcgtcttctgcgaccttcatcaatcgcggccgacaagcccgttgacacgtggagaattacgtcatcttccgcgctcacaagatctggcctattgactgttgagtc

SEQ ID NO: 7337 - DNA, 403 bp, Glycine max
  unsure at all n locations
gacataatacatggcggtgttagagctggctcaatgtattatggatgccccacattatttccatgacacaaatgcaaaaatgatgatttggaaattctatgcaaaactggtcatgcatgcacctatgcggacactcaagtgtcaaatctttatggtcatgtgatgctacggctcaagattcatttcctctatttttagtcaaccgaatgtttccaaaatatgttcttgtatcaatttgtgcattcatccgagtccattttgggcgtccgggaaaatnttcacagcattcacccttcatgtgtatacacatttttcagaaactagatatgatcagcgaattttttcaaagaaaagttggaagtcctctcttttcaaaagcatgttggattttcagctagacaac

SEQ ID NO: 7338 - DNA, 430 bp, Glycine max
  unsure at all n locations
aagcttctcccgcaattgtctataaatagggggaggagtgaagtgaattatggttcatccccttaggcagttttctctctttcgaatttgcttggaaaaattgtttccgtgaagaaaatctaagccgaggcgcttccgaaacgtttccgtaacgtttccgtaaggaatttcgcgaaggtttcgaccattcttcgacgttcttcatccgttcttcatcgttcttcgatcttcaacgggtaagtacctcgaaccaagcttttcgattcattctatgtacccgtggtggtccacattgtgtttcgtgtatttttattctcattttatttactttntatacccccttttgacgtgcttaagccattttatttaagtcatttctcgcttaacctataaataaaataaatttccaccaatcgtttgaattgtatta

SEQ ID NO: 7339 - DNA, 451 bp, Glycine max
ctcagcttttatccaggctcatcttggtggtgaagctccttcttccatggcttattccctagtggatggcacctcctctcacctcttctcatttgtcttccgctgcatctccatggtggaaaatcaccattaaaggacctcattgaagctcaaagatccagcctccatagaagccccacaagcaagcttccatcacaagataccttggacacgcatgtatatggcaaaatagctcacaaaatatacgtatgtttaggtagcaaaatacctcaaaaaaaaagagagagagcaaaaagagagcgagcacgacaagaataagataaaaataataataaaaagttgtctagctaaaaaacaacatgcttgtgaaaagagataatttccaacttttctttgaaagattatactgatcttaaccagtttttcgaaaaataaaaatgtgtgtacatat

SEQ ID NO: 7340 - DNA, 437 bp, Glycine max
  unsure at all n locations
tactcaagctntacatcagaatttagtaatgatccactaacctagaattaaaataacttaattccattaacctagggaattaaaagaacttaatggctgagtgtaattgaaattgtggcaaccaaaagtcacccccaacagccatcaagtcagccaccatttggtctcctaaaaggcttatgcctaggttgccaattaggcccttattacaacttgaactaaaccaaactaaagcccttgtagttgattgacccaaaacatatttttgatcagccaactttacaaggattgggccattatttagaaaaactaaacactctaaaattgagacaaagtggtgccatttagtcctcctccatttgggccatgatacaactcacaaccttggacttttctccttgaaacttgggcttgtattcaaatagtatggacaacac

SEQ ID NO: 7341 - DNA, 376 bp, Glycine max
gatcattgcaccggccggagattctatcactgactactgagaagaccttccctgtgcattcctgactctcggaggctctgctgcaattttaatcggctgcagtgctaactatgatgcccgctccgatccttctatactacatgacgcacattacttggaaggccacatggcactcacgtagcggagaaaaccatcctactcggttgtgcagtagatctcaccacgtatcgatcgcgatctgtactatcaggtctgataccgcatatgtcatgcaactccgaataccgtcctctcccgcatactcttccggtgcctagaccagatcctatagctgttaccatgcttacatcgggattgacaatctcaattgctctag

SEQ ID NO: 7342 - DNA, 335 bp, Glycine max
acaggatgacgcctactctcgcctatgactcggagtatgctactgcatacgcatggaggaaattcgccattgatagacctgatagaaactcttagaatcagactccatgaagctcacaccgagcgccataactttccttgaaccgcatagctcgtgccgtccgctgataatcactcacccacccctgtctatttacaaccgtcagccacgcaactagacaccagacgtttgagccatagtgtgccacactatcatcgctagactcaccatagtcctgtacatcctctgactgagcggaatcttttcctcactattatgaggcaagacacgaaata

SEQ ID NO: 7343 - DNA, 474 bp, Glycine max
  unsure at all n locations
tacttcaagctttcanaaagccccctttccataactctcaaggtgcatattccttaatgctacatgtctgtatatttcaatttgttttgatggtttgttgttcattcacatttcacaacattgaaaagaaaatgtattgtagttagttatagagcaataaaaattgataattaatgccttgttaatttcttttccaacaccttatgattttaatcatgttaatatacaacatttggactattatttgcaacttaaaaacccttgaaatataaatcttgattgaatgataagacaaccaatttttctatgttggatcgagtggcctcagaataattaagggggggttgaattaattattcctaaacctttacaaattaaaaattactctnttaaggctnttactaaattgttaagagaatgaggagtagaagagaaaacttaacagaaagtaaaagcgaaaattaaatgcacagc

SEQ ID NO: 7344 - DNA, 371 bp, Glycine max
  unsure at all n locations
ntgcacttgccaatngccatgatgtaatctccttcttgacagtctctcatcaagttggagtggtatcacagcattgaactaaggtgaacgttccaatgggatgatggttttgatcgctgcacataaagtgcgtgattgtgagtttctggtcccatgagttaaactataaagactaagaaaaatattgtctgtattttaacggcccaaaggataactaaacctttcattatttacattatgctttttaacaactggttatatatatgtagcagtttattctaaacaatggactacgtgtgagatctttgaattctatgtaacaaatgttgtttcacacttctcatcagacttcatgtcgaagatggcatgct

SEQ ID NO: 7345 - DNA, 458 bp, Glycine max
  unsure at all n locations
ntgcctttagcgcttgtacctcatcactttcttccgaagctttaacctcattgtctctcacagtctttagaattgggagccaatccaatccttgtgtccggactctcagccacttatgatagccgccgatgatcccattactgcttcccctaagctctctgtcctttcttcatgccgcatcccatgccttgcgaactccttggagtacccttgcgttgtggtcactgaaaccccgtgcgatgaaaggcgtgatgctttcgtctgatggcactcctctcatggggtagccatgctgtcttatggcgaggacgggattataattaatacaaccccttgttcccatcaagggaacatttggacatccttcgcatgaagatagaatcctgattcttccttccttctagcgagggaaccaattaacagacgcccctccatgctagccaagagttggtcccaat

SEQ ID NO: 7346 - DNA, 443 bp, Glycine max
ttatcgctaaccacagattaccatgctgaataatatggacaaattcgacatccttgtctctctcatgctctcacaatcacatcttggcttattcaacttccaccggaatgtgagtgtaagccattggtttgtttgcttaagcgacctgcgctcctgagttttttttttttacttccaagatcgttcaaattagagatttctcgtcctacacgttggtgagggtgcttgaaacaaccagttaagcataaaagttcaaaaagaaaaagaaaaaagcattcgattgactgtgttctcaagttaaaatatagacattcgtatgacctcattttatcattcctgataagcttgtctttctgacacacaactaaattatcaacaatatcactcatttgacttaatctatcaaactaaaagaatccttcatatgtttctcgataatcaac

SEQ ID NO: 7347 - DNA, 446 bp, Glycine max
agctttctctcacaattaatgtgtctactgactaacaattctaaatgcaagttcacattcttgtgccttctttgtctaacatacacacttgctcaaactcatgaaaagagacacaaattccatcaaaatcatgcactcaattcaaaataaagacatacacccatttttcacaaaaagataaaagtacttcactgccatatcattaaaactaagttaaactgttcaaaatgcttcataataagcaaacaaactacccataaacaaaactaacaaaaaggaattaatgtactaaaaccatgaccataataataataataatctaaaaggcaacaacaaaagaaacacaaaatcatcaggaatatcaacattcttgtcagtgtgagccacaatttcctcagcagtccatccagtcagaaaagtcataaccatcatctatgttgcaagat

SEQ ID NO: 7348 - DNA, 411 bp, Glycine max
catcaagtggtatctgagcacaagagcttctagtatgtgctccttaaacctccattaacctcaattgttgtttcttcatttttatccatgtatttcctcacatgtcttgtgtttaatgttgttaacatgattctttagaacttccattgattaaacttgctatagaagctagatttgattctctatggttcaaatttcttgttcttgttcttgaaccatgaattgtgttgagtttaggttcctttgagttttgtattcctatttttttgtgtggttgaaacctaaaccataaaattcttacaaaaacattaaagtagaggaaaatctaaaaaatttagagtgacttgttcacctattgtagttttgtcatagaagtcatgtctatgttgggtcgagtggcctcagaataat

SEQ ID NO: 7349 - DNA, 483 bp, Glycine max
aagcttgtccactcaatatttcttcaaatatagtaagtcatatacacgttcatgatatttcaagaacctcatgttttttagttgtacatccacccaataaagcatcaatttattttcttccctatttttttattttctgattagagaaaaaataagaaactataggagaatataataataataataataataataaaacaaagcacacaaaaagaaacttgatcgttgaaatatgatacaatgattcaacaattaattacgtgtatattaatatttaatgaattattatatatagtaatcaattattatatgttaataaatgtaatgaaagtcataatttcttgatgctgaatcattgtatgttaagatgatttgattggataacaattaaagtaattaaaaaaattcaattggaataatatgtctactattactattagcatcaacattgaataaattaaataaatattaattgattacatg

SEQ ID NO: 7350 - DNA, 471 bp, Glycine max
  unsure at all n locations
aagcttcgctcaatntgcaaagtgctggataatatccagtttaattaatgtacactcttagaggattaaaatgaatggctgagatcaactcatcaaaactcaccgtatcatttatctcattcttttttcctttgaacattcacttctggtgactctagtatagctctctgccttctatctaagcaaatgaaatctttcgattctcctcataacatctatctattttttgttgttatccctcgtccaaaaaaatgtcggacgcgtttcanaacaaaatacaacagaaaaacatgaacaaaatgataatctaacagaaagttaaaaaaatagaaatggtaggtttttaatgattttcttaaaaaactaatactaaacatcaaaatttaatattctcatttaagatttttgaaaaagttaagacatttccttatcaattatttctttaaataaaaagtgtattcacaattatta

SEQ ID NO: 7351 - DNA, 461 bp, Glycine max
  unsure at all n locations
taagcttaccaccaagatgagcctcggatagaagcttggatatgatgcttcaatggaggagaataaagagggagagaaagagagaggggggagcacgaaattgaaggaagaaaaagggagagaagctgaactttgagttgtgtctcacaagactctcattcatcaaagttacaacaagtgttacacatgcttctatttatagactatgtagcttccatgagaagctgtcttaagaaaacttccttgagaagcttctttgagaaaacttccttgagaagctagagcttagctacacacacccatctaaaaactaagctcacctccttgagaagcttccttgagaagctaaagcttagctacacacacccatctaaaaactaagctcgcctctttgacaaaatacacgaaaatacgaataanagtccttactacagagactactcagaatgccgctgaataca

SEQ ID NO: 7352 - DNA, 444 bp, Glycine max
ctcaagcgtggagaggatgcttcgatggatgaaacgaacgagggagagatttatagaggggggagcacgaaattgaaagacgaaaaaagggagagaagtggaactttgagttgtgtctcacaagactttcattcatcaaagttacaacaagtgttacacatgtttctatttatagactaggtagcttccttgagaagctctcttaagaaaacttccttgagaagcttctttgagaaaactttcttgagaagctagagcttagctacacacacccctctcataactaagctcacctccttgagaagatttctaaagaagctagagcttagctacacatacctctctaatagctaagctcacctgcttgagatgagaagctagagcttagctacacaccctctataatagctaagctcacccctatgccgaaaaacatgaaaatac

SEQ ID NO: 7353 - DNA, 451 bp, Glycine max
ctcaagcttgaagagatcttcaatggctacgaacaacaacgcatttcattttgcttcttctttccccaattacatatcacataaagtcgaagatacaagctttcttttatggcgtcaactagttaagcctattatcaaatcaaacaaacttcaatgattcattgctaatccgcaaattccactttgatttctctttaaagaagatcatgaaattggacgtgaaaatctagtttatgaggcatgggagtagcataattaggtgttattaatttggcttcaatgcattctttctacactgattttttctcatgtgatcggttataatcactcctatgaagtctaggagcacatccatgattacttccacaagcagagcatcgccacaacgcgtcagttgcacattcaacttcgagcaatgaaacctggaagcaagttgatgcaatagtttcta

SEQ ID NO: 7354 - DNA, 457 bp, Glycine max
  unsure at all n locations
actaagcttctaaggaagttttctcaagaaagcttctcaaggaagttacctagtctataaatagaagcatgtgtaacacttgttgtaactntgatgaatgagagtcttgtgagacacaactcaaagttcaacttctctccctttttcttccttcaatttcgtgctcccccctctctctttctctccgtctttcttttcctccattgaaacatcctctccaagcttcttatccaaggctcatcttggtggtgaagctccttcttccatggcttattccttagtggatgacgcctcctctcacctcttctcctttgtcttccgttgcatttccatggtggaaaatcaccattaaaggacctcattgaagctcanagatccagcctccatagaagccccacaagcaagctgtcatcacatggctccaatcacatccaaataaaagccttaacacttggga

SEQ ID NO: 7355 - DNA, 457 bp, Glycine max
tcttatccaagacacattcttggtggcgaagctccttcttccatggcttattccctagtggatgacgcctcctctcacctcttctcctttgtcttctactgcatctccatggtggaaaatcaccattgaaggacctcattgaagctcaaagatccagcctccatagaagctccacaagcaagcttccatcactttccctttgaaccgcaaaggctcgtgccgtcagcttcttaatcactcacccaaccctttcttcttcccagcgtcaacaatgtaactagatttcattcgctaaagccttcttgtgccgcactttcgtcgcttgtttcaccaaggtagtgtacattctcttcctgtttgattccatttcgtttcgaatttgattcaatatttgaaataaaagcttttggcttattcgattgttcataaaccacttgcatttagaatcgtgtaatac

SEQ ID NO: 7356 - DNA, 427 bp, Glycine max
  unsure at all n locations
aagcttaatggggctgatcttgagcttaataatgtccttcaatggtgattntcaaccatggagttgcagcggaagataaaggagaagaggtgagaggaggcgccatccactanggaataagccatggaagaagaagcttcaccaccaagagagtgtattgggtaagaagcttatagaggaagcttcaatggatgaagagaatgagagagagagatagaaaaaagtggtgtgggaatgaaggatagatacggagaaaagttaaactttgaagtgtgtctcacaagactctaactcatcacagttatgaccagtgttacacatgtttctatatatagctaggtcactaactaagataaagctatcttgagataccttcttgagaagctagagcttagctacacacactcctctaatagctaagctcacc

SEQ ID NO: 7357 - DNA, 302 bp, Glycine max
aaactaagcttgtaaagtgctggatgggcttttccttcgcaagttgacttgaagatgtacaacagttaccctgagctctctgatgccttgtgcaagatgtataactccttcaccattggtaactataattaatccataatttaccatacatcaacttttttttatatagaatttaatgactgatcataactcttacgtatcagtatctagattgttttctgtttaatataactacccaaaagatatggatcttaaatttgatcatgttgaaagctcactaatggtgtatgtgaatattaaat

SEQ ID NO: 7358 - DNA, 454 bp, Glycine max
cctgactgttacaacttacaagttgctttccatttcttatagttgttccccctcttattatgttgtttgttttgtgaatgtttcttggtttggttccttagaattaattctctctctctctctctcaatcttggatcacttatctactttgaactatttttcttgtatgcactgggacagcataacttatgcttgtatctcatgcttcagtctgagttcagtacaagttccatatctttttcattttataatttgcttttgggatgtgcactacacggctctcagtctcagagctaaatgtagcacaggcaaattttgataaatatgagcgtgtgtactggttgggatgtttctcacttatttattttgtcttcctcccccagatatcctgctatctctacttgttaacttaacgctctctcttgtagtgacaaactgcaaacgtaatatttga

SEQ ID NO: 7359 - DNA, 475 bp, Glycine max
  unsure at all n locations
gaagttagatatatgtgattatctattcgttatatatatatatatatatatatatatatatatatattttgcagtttgttaattaagacttaaaggcccatgtcagtgttatatatttattgttttgaattggttagtgcatgtatattacatagattttatactattattaattaattgatgttgaagatgttataatgttgttatgatatgatttttgaaaattagttgattcagtgtatgtgtatataggttgtgtcttgtaaatattgctatgaatgtataatatgatatatgagtataagtgaagtatgcgtgcttatgaatatatgtgaagacaatgtgtcatggtatgtgtgtgtgctgcgaaaaaatgtgagaagaatctactcccccgggataggaatctncaagagatnttgaaattaaaccatgtgcatattgtgtgtgaaccatgaatcatgttgtgcatatg

SEQ ID NO: 7360 - DNA, 325 bp, Glycine max
  unsure at all n locations
agcttctatatagctgaaccactttatcaataaacacaagttgagttttattcagaanattagagtttatctcttttatcttagtgagagtgattctcctaaattcttgagtgattcaagaacaccctggctgtatcaaaggactttcacaacctttgtgtgttgccctcgctggaaagagtgattcttttcatcctttcatcttcacccttgttctttcaaaccacaattccagaanatccacctctgcccagaattatctcgtggccataactcccattntacgcactcaaattaagtgattcttgaccctaaattgacttta

SEQ ID NO: 7361 - DNA, 474 bp, Glycine max
  unsure at all n locations
aagcttctgtttaacgaaatgggtacaggactgattatatcaaagtgaatatactgttgttttgtaatttgaagccacacaatacttcaaaagggtaaatgaataaagatttatcaccccttttgaatcactttcatcgtccctttttgaccttacatatttgctttgacttttacgtacgctgcagcctgttaacagttgctacttttaagcatgcatggctatggccaactaaatcaattcatttcagatatcattggaatgaatggcacgattatgtcaccatttactgtatttacaaggatatggcaaatgcaaaacaatggcactgtgtggccaaaggggaactcgttggatgggaaaaaacaggtttagtgactcttagttgaaaggttcaacatttatgactntctatgtagattctgtttgcatgttacagaataatggtatgctacgctcttgaaattgagtact

SEQ ID NO: 7362 - DNA, 436 bp, Glycine max
  unsure at all n locations
tatagagtagtagtagaatgacctttgtttatatatatattttggtcaaattattaattaataaaaattcttcaatatatccttctcacgttgaagataggacattttaaacagaaaatttactaacatcctgtagactcctttttcttataccatcctatagactcttatacaactttaaaacttagattttagccaaactcaacttacaaagtaccctattatccctaatatgtacatcctttaagtataaatttgctcttttaaagagagaagcatctcgaaaattagtcttctctcattattgatantcttattttaacttttacatttaatcttgtacgatcagcaacttaaggaatagtcataacaagcgagaagtacacgtgtntcttttcttttgttccgattctcactttcataaatttattgtatc

SEQ ID NO: 7363 - DNA, 401 bp, Glycine max
aatgaaaagtcaatggacgcagaagctttgggtgaaagggttcctcaaataatcaaagcagactctagtccttttgattgtgattctgacaaatccctttatgaggaagaagaagcccccaagtctggtcaacacgtggagtttaccttccacggttcacacacccctccttatggatattcagaagcccacaatcatattgggccttccactattaacaccccacaagcccatgtgaacgaaactcatcagcagcatcaggagatatcctagggtctacaagtgtatacaacaaagaagtggttcacaagaaagaagcccacaagactctctcacagagttgaactctgctctattacaaaaagaaaaagaagctattactgagagacagcgtgaacttc

SEQ ID NO: 7364 - DNA, 76 bp, Glycine max
cgagaagttccgacgtgccattgcccgcgtgcctatgattgctgaccaatattccgacctctacgcggaaagagat

SEQ ID NO: 7365 - DNA, 402 bp, Glycine max
  unsure at all n locations
atctaaagactgaagcataaacataaatctaaagactgaagcataaacataaaatctaaattataaaatgtactaagacattgatattattaaactggtcaaaacacaaggaattaaaaattcttattcttgccattaatcttttccaaagtttttggcttcttatttcaaatcacatccaggagtgcctgatgatgaatcctgaggaaggggtaggtctggcactggtgcagatgactcaggctgagaagaagacatgtccagcactgtagtggaaggctctggtgtcacttgtggggtagctgctactagataagtctaaaaaatgaaaggctcgggtggagtgggctctgaggcctctagaatgtcatcctcctantttggcagaggctcttgggatgt

SEQ ID NO: 7366 - DNA, 462 bp, Glycine max
  unsure at all n locations
tactcaagccttgaccaaacccncagcagcagttgtttccttagagacttgcctcgacaccttgtctctgagactgaggataattgcattgtgtgccttctgcagtagtgttttcttatccccatcagccatcatcttttcaagtttggcttctccatctagtgcttccaccaggccctgttggacaagaagagctctcatcttcaattgccatagcccgaaatcattttgccctgtgaatatttcaacctcgtacttgggcgagcccatttcttgaatcgaactcaaaaaatcgctccacgctcaccacaccaatttgttgtaccaagatcaaattttacttcacaaaagaatgagtttcttgtatgaacaagaataagcaaaatgcagaaaagaaaaaaaaatgaacgaacactgcactgtgctcacaacagccactctattcaatctctacataatttc

SEQ ID NO: 7367 - DNA, 382 bp, Glycine max
cttgacttgagtcatcaagagattatttatatgtgcccatggcatgagtttcataaatcatccttcaacatctttatcactatcaatcatctttgaatcatctatctttcaatcttttttaacatcatctctcaaacatctttcaatgaatctttcaatatctttctatagaattttttgattcatttctcttcatctttctaaaagttttttatcaacactttctcttccaagaaaagttctttgttaaaaaacttgtgttattcatctttttcattctcttctccctttgccaaaagaacgaaggactaaccgcctgaattcttttgtgtctctcttctcccttacaaaagattccacggactaaccgcctgagaattct

SEQ ID NO: 7368 - DNA, 326 bp, Glycine max
gtttcgcaatattggcggatgattagtataatagaggttatgatgatatttgttcaaatattaaccctgttgaaacttattgtttcattcaagcatatgcaaattgctagttctaaatgaacttgttcccttctctattgtctctgaatcaacgcctattttggacttatatcaccttgcatatggtggatgacgacatgatgctgagtcatcttgaaaatgggaattatccctttttatgtgagcttttctggttgatcacttatttttgtcttaatctctatttgtaacctcaaaatagattggtataaagcatatgcgtattt

SEQ ID NO: 7369 - DNA, 408 bp, Glycine max
  unsure at all n locations
acactataccactactcagcttagtgacatccgtgacttgatcttgagcgaagttgttcgcaatatagattcangagaatcttccagtcatgtttccaattcagcattgaatactgaaggcacgggaaggactacccataatggtcagaatggtcgacgcagatcaaagtcaagagggaaaggtcagagaaaatttcaaagtgacgttacttgttggaattgtgacaagagaggtcactgtagcaatcactgcaaggcaccaaagaagaacatgtcgcacaataacaagaagcgcgatgatgatgaatccgcaaatgcagcaactgatgaacttgatgatgcattaatctgcagnttggatagtcctgttgattcatggatcatggactcaggtgccgtcgtccacac

SEQ ID NO: 7370 - DNA, 115 bp, Glycine max
gctagcagagggatgtcatatatgtggatgaacacatgagtcagacttatgcatggttcaagatgacacacccaatgaagataactacatgggctgtcataatcatcaaggatct

SEQ ID NO: 7371 - DNA, 334 bp, Glycine max
cactattgatgctgcaattgagtgaagagatctggctattgcaagaacgagtttcgttattacagagagctatcacgatacacaacgagcccacgctgttgtttgttacttatatttaatatgttaaattacttatttattcttataatttcgttctttgtattttttaatttcaatagttaataatgtaattttcttaaatacttatagtttaaaaatatttttctaattctgaccatctgcattctaattcttttctacctcatatcgcttaaaattaatctttttaattcatataatttcgattttaatcatctttaatccctgtccaaaa

SEQ ID NO: 7372 - DNA, 134 bp, Glycine max
gcttagctgaattcagatcgaattgaagttacgctttgctcatctcttggccagcttagtagaccatatcattctcagatgcaagggttgcgcgctaaccgcttgagactcgtggcttagcgcatgaacagata

SEQ ID NO: 7373 - DNA, 443 bp, Glycine max
  unsure at all n locations
aagcttgtaatcttnttgcacttgtttgggctctgattnttgtattttgatcaagtgttttctttttcttacattaatacattagtcttttgctatcaggagacctcctgacattgttctttcttggaacaattattattgcttctctaaatcaatcacattcattagattatagtcggtatccttattttctttgaagaaaagacagcgtgcgcctttaggctttcaatgtgaacatattcaaaatgaattgaatgaatctttgtgtgattgatcaaagacatttccatatctaattaatcctttntgttttggtatgtataattgaaaatctaaccacgaaattaagaaaatggacaaataacatcacctaactgatgacaatcgtgcatgccatttcctactttatttcatatcactaagccccactccatatagacaaa

SEQ ID NO: 7374 - DNA, 431 bp, Glycine max
gcttgactatcaaaattatcttacgagcaagaaaactctcttctcaaacttgggaatatttaaaataataatgagcacaagaggtttactatgagaagctgcttctcaaaagtagtttgtaaatacacaggttctgatgtactacaaaaattgctactattcaagcccatatgaaactcaaaaatagaccaaattgaatagataaaaatccaaagagcatagaacgaagcatggtcaattggtcatgactcatcatgactatgtgatagtttatgaatccattctgttgagtaatgtaatgacccctccaatatcttggtcaacatatacacgaactttgaatttattgagcaggtgtccgagtcattatgaatctctcgataactggcttttgatgtctatataccaaacaaaaatatatagaacttttg

SEQ ID NO: 7375 - DNA, 429 bp, Glycine max
  unsure at all n locations
cttctttgagacaacttccttgagaagctagttcttatctacacacacccctctcataactaagctcacctccttgagaagcttccttaagaagattcctaaagaagctagagtttagctacacatacctctctaataactaagctcacctgcttgagaagctttcttaagaaaattcctaaagaagctagagcttagctacacatacctctctaatagctaagctcacctgcttgagatgagaagctagaacttagctacacaccctctataatagctaaggtcacccncatgacaaaaaacatganaatacaaaataaaagtgcttactacaaagactactcanaatgccccgaaatacaaggctaaaaccctatactactagaatggccaaaatacaagggctaaacaaaggaaaaacctattcta

SEQ ID NO: 7376 - DNA, 439 bp, Glycine max
gaggatataagacctttatcattggaaaggtggcgggttacatagagaaagtagcaccgatagttgctaaacgaaagaaaatgtaagtctatgaatatgaaagttaaatacctaaggccaattctcatgttaataaataatattataggcttgttaaaagacttgctctactattagagtatacattacttcctgaggtattcttgctttattcttagttagcgattgttatcactagtttgttaggactaactctaaggtagacttcattaacctcagtgcattaactacagttaagtgctaatgtgtaaaaatataattatagatcctcacctgagaacaattactctaatatatactgaagagtgtgttaaacttgcttgtaaccttacatcaatagtctctgaaaactacttgacattatagcgttgaaatcctg

SEQ ID NO: 7377 - DNA, 334 bp, Glycine max
gcatgcaagcttgccgcccagctcgcccaggtgagcaagtgttgcttcctccagaagcaacaaccttctggaggaatcttctggagggcccaagtgggcctggttgctatttacacccccctttttactatatgcacccgccttttctatatttttggaattctttttccgtaacgttacgtaactttacgaatttcgaaatgatacttattttccttccgcgaggatacgaatccttacggattatgtatttactctttgttggctatcaacaaactatccgaagctcacggattgctcagaaacacttcttttctattatgacaccttcctg

SEQ ID NO: 7378 - DNA, 196 bp, Glycine max
gcttaaagagggtgcttcaatgtttgacaagaaagagagaacggtttattacgaacatgtacgaactaaagagggagagaagtggaactctgaagtgcgtctcataagactgtcattcatcatagttacaacaagtggtacacatgcttctatttatagactaggtagcttcgttgagaaactttgttgagaaaac

SEQ ID NO: 7379 - DNA, 386 bp, Glycine max
  unsure at all n locations
gcatgcaagcttgcagactatacctccaaccgaacactgttgtgtttctatctcggcccaagtttattacgggctgtagcaccggtttcgcttccctagccgtattggaggcggtcaccgtggcattatcctctatagttttctggagttntagcatggcctccatgatagaagccatttgatcttttaaggctgataggtcggccttcatctgttcttgcacgccctcttcattatccatttttctggatcgagtgttataggggtgcctttgcgctttcttagttatggtgagttccctaaagaaacaaacaacggtgagtatgccatcaaaacatgaatatgcaaatgaatgatcggagcacttggatccacctcagggtttt

SEQ ID NO: 7380 - DNA, 432 bp, Glycine max
  unsure at all n locations
ntctaatgggcctaagtgggcccaagggttgaggaatgcccctaaattgaccattntgcccccatgttgtgtattttgcccctacagattgtgcgacaattggctttaagcagctcaactcagctagcaaaaatccacatgttgacaaacattcgttcccggacgaaattagggcatgacacccactaacccacataccacatcttcagtacgtgcccactccttgggtgacatgtatgcaagagtaacaagcgtgcgatgcacttgcctatgataaaaggcaaacgaaacgcttgtctncaatgtgttcttcaacggtcaaaaaagggcataatngtcaaatgcanggactccacccacttgacacgtctgactctacctgcanagcgaanaccgtatccacctggacaacttaatagaagtagcacggat

SEQ ID NO: 7381 - DNA, 269 bp, Glycine max
  unsure at all n locations
ctgcangcatgcaagcttgcttctacaatcaagaatgatatgaatgttctaattctgataataacaatcactgagtggataatgttattgattagaggaagctaattgaagccaccaggaaagaccattacccgcttcccttcatggatcaaatgcttgagagacttgcagggcaatctttctattattttttagatggatattcgggctataatcaaattgcagtggatccttaggaccaagataagatagctntcacatgccccttc

SEQ ID NO: 7382 - DNA, 279 bp, Glycine max
cttctatgactatgctctattctctctaactttggatacgtgattaataatctgattctgactgtcaacatttcaacatttcaatagttgaatgatcaattatgtttatcacgtgaaagacgtatcgtctatgcataaagatataacgatgaccctaacatcattgaaattccaacaacactagaccctactttgagaaagatatggcaagccacatttgctttgatccatagatatccaagacaggtataccaatgcgtctaacacatcttatgtacc

SEQ ID NO: 7383 - DNA, 462 bp, Glycine max
  unsure at all n locations
tgacgcatgcaagcttattaaggtgtagagatatgagatacgttnttgnttctcaaagcacaacactaattgtgtttataagaatactattaaatcttattgctatcatcgatagccagcagacatatgtatatttttggaaccatactcattgcttctctaagtccagcacatttcttacatcatcgtcggtatcctgatttcctttgcataaaagacagccggcgctctcaggctctcaatgtgaacatactcacatcgacttgaatgaaacgccgtgtgaccgatcaacgacanctccacatccacttaatcctcttcgcgaccgcatgtctcatcagccactatcaccactccaactctactggccacttcaacctctctcaccgaccgtccctctctcgctaatccaactctatccactcctctcccctcctgacacaacctgcgatgagtctctcc

SEQ ID NO: 7384 - DNA, 360 bp, Glycine max
gcatgcaagcttgtagaatggctagacatgatacacgtcatggtttggtttggttcaaggataaaagggatgccccacattatttccatgacacaaatgcaaaaatgatgatttggaaattttatgcaaaactggtcatgcatgcacctatgtggacactcaaatgtcaaatttttatggtcatgtgatgctaaggctcaagattcatttcctctattttaatcaacccaatgtttccaaaatatgttcttttatcaatttgtacattcatccgagtccatttcgggcgtccggggaaaacttcacagcattcacccttcaggtgtatacacatcttttcaaaaactagttatgatcagt

SEQ ID NO: 7385 - DNA, 435 bp, Glycine max
  unsure at all n locations
taagctgggagaaaagcttgaagatgtttcatcttttacattcccaactcttttgagtggcatttgtattggttgttatattgaatgttgcatcttagtccatatcatatattttgtgcatcatgcatcatcatgagtaagtgagaagaaactttctaaagttagaaaatttcttcagaaggcaaaactctgttttaatttgttatagccttatcataatcaattacataagttgtcttaagcttgcaaagttatgtctcatatgttggatcgagtggcctcagaataattaagaaatggcggttgaattaattattcctaacactttaccaattaaaaattactcttttaaggcttntactcttgctcgtaagagaatatggaatagacgagacacttaaccgaaagtaaagcgaaaattaaatgcacagcgga

SEQ ID NO: 7386 - DNA, 125 bp, Glycine max
  unsure at all n locations
gagaaagagttcttgggtcaagacatgagaagcaatcaagtataatgttacttccttcactaaagcggtgatccatcttcacacatattttatcaatagccacatanaaaatctctgcacggtaa

SEQ ID NO: 7387 - DNA, 401 bp, Glycine max
  unsure at all n locations
tctatggaggcttgatctttgagcttcaataaggtccttcaatggtgattttcagccatggagttatagcgaaagataaaggagaagaggtgagaggaggcaccatccactagagaataagccatggaagaagaagcttcaccaccaaaagagtgccttagataagaagcttagagaggaagcttcaatggaggaagagaatgagagagagagagagaaagagagagagtggcagagaaattgaaggagaataaggagagaagttgaactctgaagtgtgtctcataagtttctcattcaacaaagttgggacaagtgttacacatgtttctatntatagcctacgtcactaacgttgtgaatntcattttcatttcatgtgaacctacaagggatattcc

SEQ ID NO: 7388 - DNA, 324 bp, Glycine max
ctcagctttccttatcatgtacacggatcatttttaaggcccagcgccttaaaatgatcacctttcaagtaaaaagaatcgcttgattcacgcttaagacagaactacgtatgttctgattcctcatcgatggagggtacgtacgagcaaaagccccgcttttgtcgacctcaaaaaataaaaagagataaaagttaaggtagtacaatttccacaattctaaaaaataggttggcgtcctttgagacaaacgtgagaggtgctaatacctttctcaaacgtaaatacaactcccgaacttagaattctcattctgatcggctc

SEQ ID NO: 7389 - DNA, 296 bp, Glycine max
gaggtccaggaaggacaaggcagcagaaggaactatttccgctccggagtatgattgtcaccgctttaggagcgcggtacaccagcagcgcttcgaagccatcaaggggtggtcgtttctccgggagcgacgcgtccagctcagggacgacgagtatactgatttccaggaggaaatatggcgccggcggtgggcaccactggttactcccatggccaagtttgatccacaaatagtccttgagttttatgccaatgctcggccaacagaggacggcgtgcgtgacatgagatcct

SEQ ID NO: 7390 - DNA, 450 bp, Glycine max
aagctcgcttcttaccattccaagaaactaggtctttccgtatctattttgtagtaccacgagagttcttattatcagacttgaatcctgcccagtccttatctgagttacgcagaagagatatcgtaacacccctcaagtgccagacctcatcatccaaagtgatctgatgaccatataaataccgcaaaccgcgaccctgtaagaatagattgggagatgcacacatgcaaacggtccacttaatgataggtctactagcagtcaagggaagtatggaataaatgataccttgataccttgttggatcaatagattttcctattatattagcactaagtgtgcaataagcatcaaaatagttgctgcctgcttgatgtgtccttctcagacctttcataagatgattgtgtggacatgcgccgtcacactgtaaagggaattactctc

SEQ ID NO: 7391 - DNA, 314 bp, Glycine max
tacctcatgtactcctctaatgactatagctatatttctggcgctaaactgctgcgagatggtagccatcttctcaactaaatttctggcttcagcatgagtcatgtctccaagggctccatcactggcagtatgtatcatacttgtttccatattactgagtccttcatacaaatattgaccaagaaactactccgaaatctgatggtggcggcaactggcacatatgtttttaaatcgctcccagtactcatacaggctctgtccactgagttgtctaatacctgagacatctttcctgatggctgtggccc

SEQ ID NO: 7392 - DNA, 284 bp, Glycine max
tgaatggttcgttcagtctgaccatctgtttgaggatgataagctgaactaagcttcaactttgtccccaaggcttcatgtagactcgtccaaaatcgcgaagtgaacctcggatccctgtcagatacaatactagaaggaattccatgcaaccttactacttccttgatgtacaactccatgagtttctccattctatacttcatattcactgggataaaatgagcagatttggcgagtcgatctactatgacccacactgcatcatgtccacgactagtctt

SEQ ID NO: 7393 - DNA, 376 bp, Glycine max
tactaagcttcaggttgctcattgactccaaattgttgcaaagaaggacaattatctgtatggtgatctgcagaagaacatagaccacagactcttgcaacaggtgtagatttctgattcatggcaagctgggttactaggttgaccaaggcatcaagttttccttcaagctttttatttttagtagatgaagatgaatccgtggccacctcatggactcctctaagaacaatagcatcatttcttgaactgaattgttgggagttagaagccatcttctcaatcaaattcctagcttcagtacgggtcatatcaccaagagctccaccactggtagcatcaatcatactcctctccatgttgctaagtccctcat

SEQ ID NO: 7394 - DNA, 203 bp, Glycine max
aatgtgctttgttctaaaatctacttatcatctaacacatcatttcttggacaaatagctttatactcatgaaatgaaacatgaatccactcttcagttgtcattgttctcttattatacactctataagctctactatgcaaagaataaccaccgaaaattcctccatctgacttagcatgaaactaccctaagtatccttt

SEQ ID NO: 7395 - DNA, 422 bp, Glycine max
  unsure at all n locations
gactatggngtacccatcacatgtggtactaggtggctgtcgggcgatggtgcacaactttcttntccacatccacaatgcgcgcataatctcaccatcccctgttgcccacctacaactgagctcacgtactcccacgtagcccatatactcgtttctctcatcaccgggtgcccatcagtgctcccgagcttccacaacatccaagaaaaacaccattcacacagcacaagctatcacacccaagcaaaacagagcacacgcagaaaactctgcccaaacaccaaccaaaaatcacagcttttcccactcaaagaccccagtaacaattccttccatccaattcgtaaccgttggatcacccccaaatcttactggaagtctatagtgcataagcctacattttgaccgttgggatctac

SEQ ID NO: 7396 - DNA, 257 bp, Glycine max
  unsure at all n locations
acacgacgtacataagacggacgcgtgacaatgtatgctaccttcctttgacagaagacacggtggtgcgactgagatgcacgctagcactcgatggggggttgatagcataattctcagacaaacttggagatagcttgagcgaggtagccattatcacgcanaaggggcatatattgaagcttaatgttaacgttggtgggcgtgcacaaatgtctttgataatcacgatttctactacagtgattacaaataca

SEQ ID NO: 7397 - DNA, 395 bp, Glycine max
  unsure at all n locations
gcatgcaagcttgacaactttagcccagttaatctcaacattatttgctctataacccanatcatatgccatattcatatcaaatagaatgacccanagctcaacctttagaatattacaatgcataagtctccttgaaaacaatttcagaaaatcacctttactattctagagtgcaacacaacaagcagcaagggctgctaaggcaaggtaagagtcatcacaattaatttttgtagtactctgcagaggcttcttccacctttcaaatgcatcatggttgccatatcatcttttggtgctaatatcatatgagtgagtttgtttctacatatatcatatacaccactccaaacactcaacactagacccagagtgtatgtcacttattacta

SEQ ID NO: 7398 - DNA, 287 bp, Glycine max
tcaagagacagtgcctgagctgcttaaaaactccttgcttgttatgaagatgaggggtatactggcccagaggagtgccttgggtggtgatagtctgtgggaacttacatggctacacgtgaataacatttcaccatcattgcaacttgaggtattccctgagcaggattctgagcatttgcagcacaaacagggtgaatcaataagtttgctgcctgatgaaaagggtttcgtgccttcaagtgaaacaacaatctgcgaacatgctggcattcgttggtaactat

SEQ ID NO: 7399 - DNA, 406 bp, Glycine max
  unsure at all n locations
agcttcttatccaaggcaattcttggtggtgaatctctttcttccttggcttattccctagtggatggtgcctcccctctcctcttctcctttgccttccgctgcatctctatggtgaaaaatcaccattgaaggacctcattgatgctcaaagatccagcctccatagaagctccacaagcaagcttccatcagacccttcctttggtaattgcataaaaaaaattggacccattccaaaatatttctctcccttttaaatggtccttaaagtaagaaaattggataagtaatttttgaaatattaaaagtgaaaataagtagtcttctaagtattgaaaaatgtattaaattagtctatgcatgtaaagatggatgttcttttgcaacatanataatatgaata

SEQ ID NO: 7400 - DNA, 456 bp, Glycine max
  unsure at all n locations
gtctcataagtcctanattatatttcaagctagtattaacttactttaacctccatttaccacagaattcagacttagccttccaaccctcagagcctcactctttttttttcactcataacaccacattctcactttccaaccctaggttaactctatatttcatctctatcagttttncttcagcaactttagcatacaaacatcacacacatcatcacaaaaccctaaaacagaatgggtatgtctaactcacccaaacatggcaatttcaacaagctttcaacacaagtcttcacaaataatcatcacacagcagaaacctagcaagactacccatcatatctcccacaaccccatacccacgagatttaagagagagagaagtccacccaaacctgagatttcgaagtcccactcgtagccacgcacttcacgaccccgaaaattccctcc

SEQ ID NO: 7401 - DNA, 380 bp, Glycine max
caggcatgcaagcttcattcctttctcactcatgtgtccaagtttttgatgccacatggtcgaattattgatagcttcagtaactgctaccttatcctcatctgcaagcatgtaaagaagaccttgcatttttccacgagccacaacgagattgccttttgttaccttccaagctccatcaccaaaagtggtgtgatgtccctcattatccaactgctctatagatattaaatttatctttaaggcgggaatatgtctgacattgtgcaatgtccatagggattcactggaggtcttgatgttgatatcacctcttccgacaatgtcaagagactttccatctgcaaggtaaactttcccaaatcttccagaaatatagc

SEQ ID NO: 7402 - DNA, 454 bp, Glycine max
ttctgctgtgatcagcattttctcggtgtgtgtgatttttgatgacccacaggatgatgacacacgtgatgaactacaggctcatgtgaatctgagaacatttcgcgagaatcccgactcacgatcacgattcaggacttaggaatcacgactcaagatctcatgactccagatcaagattcccgacttaagatctcacgactcaagatcaagattcccgactctagatttctagaatgaatatacgactctatcctgatcagctagctttttgcggactttgaatagcgcatgacgttttgacccacgctttaccaaagagctcctactgcttgctaatcgataccacattgctgtcattgattacctcagctcacagaggttgcaccagttctcacactgaatctaccacgcttccgatatattacacaggtcggatcgtttccatgtttcg

SEQ ID NO: 7403 - DNA, 172 bp, Glycine max
tgttatggttgcgtgtctaagagatgaatgcttgggaggtgtatattcggctcgttatgctagcacctccatgaacgagtggatgctacatccagagtgagagtgagtctggggtacatggagcctgtgctgagacgaatcgggcgaccattaactgcctgtgatgagtata

SEQ ID NO: 7404 - DNA, 184 bp, Glycine max
tatcttaaacttttttgaccatgtatttacaggttattacgctctgagttcagcaagtcatcgtaaaactgatgatgatgatgataacttacacggagttcttgaggcgatgatttcgcgatcctagctaatttgattgtggtcacaaaaggattcatcacaagaggtaagacaaactcctatt

SEQ ID NO: 7405 - DNA, 499 bp, Glycine max
  unsure at all n locations
cgcgcaaccncgngacanctttgatccccttgcganancgcgactctatataatactcaagcttgtgaatgagtgtgaaacaatgcttaaccaccttttcccggttaacgatccttcgacttctggcgaggcaccctccacaagctgagggagggatgtgatgcttcaacttctaccagcaccaagagtattgatcatctgctgatgcctaatgatttagcacctcccaaccatcacattgatagcctttatatgaggagaaccactgtcacttagcctgtttggcacgatattctacagggaagctaaccatgtagcatgttttcattgccaccatcgcagataagtggcttggaagaacatggaccaaaatccctatcttggaacacaccgccaagtaatgtgctcgatacattggcgattgaaaaccacctacttttagtggcttgcgagcttcacctctactttatattttttactcttcacaaactaccgcccc

SEQ ID NO: 7406 - DNA, 484 bp, Glycine max
  unsure at all n locations
tgccagcgtacatntataatcgacctgcacgcatgcattgctatgcctttattatgcaactatgacatattatgtccgagaacaccattcctaattaccatgcattacggaccattgtcaattatctttgttttaagtgaaacgggttatgatcccaacatggtgtggcttgggtgcctaacacatgaaactaagaatgtagtgaagtttcaccttctccctctttggttttggtttgtataggaagaacgcattgaatgancaaaacatgaaaaacacatgggtgtgccaattttggcagcatcacaataggttgtgcttgaaccgcttattgcactgatggatgccaatgacttatagcataaatgtgaaggctggaatatgatatccggaccaatgcncgattaggtcaatcttgatgcaatgacgagatgcttaggcgaatcatgagtctgatgcctttcacggaccggatagcctgacg

SEQ ID NO: 7407 - DNA, 321 bp, Glycine max
ttatgcgcatatttccttacaaacgttctcttgcacaagacattctattaaccgaaaaaatgcacccatatacaatcaaggcagcttcgttacctagattatttacacgtacttccaaggtgtatttgttacttacatcacacacctccttggctaaactcacatacatgcatactcaaagcattttggggtaccaaaaattgcacatgtgcacatcttggtatttctaatacctatacatacacaaacttcatgatgaatcttaactatctacacaataaggtgctacattttatgctcttttcaagatttagctaccta

SEQ ID NO: 7408 - DNA, 276 bp, Glycine max
tgcgcaatccgtgaaattctgaatgtgtcggaaatcgaatttaggtgtttttgcgcaatgcgtgagtttccgtaacttcttcgaaagctaaaatagagtaaatacataatccgtaaggattcgtaaccttgcggaaggaaaataagtatcgttacggaattcgtaaagtttcgtaacgttacggaaaaagaattaccaaaaaaatagaaaggcgggtgcatttagtaaaaagggggggtacaaatagcaatctagcccacttgggccttccagatc

SEQ ID NO: 7409 - DNA, 430 bp, Glycine max
  unsure at all n locations
gacttttaagctgctctctctacctttataaatgtggttctaaaatatttcacaagtcatcacttactagatcttattaccaataaattttcaagacatacttgcatgccatgtttgcaactttgaataattttttggcatctgtttctgttactagttttctttcaatattaacacatggttgacatcaactagtagttgatgacaaaatattgcacaggaaagagataacatgtgaagaagttataaaagattgatgagccatgatgacgtcatctaaaagaagaacaagtcaaaacattcatcatccaccanagaaacaaaaaggaggtaaaacttacccttaacttgttcatcccagcatagcttagtagccaaagtggttttccccattccacccaaaccagtgagcagaacaactgacactcca

SEQ ID NO: 7410 - DNA, 450 bp, Glycine max
  unsure at all n locations
gaatagtgtaatcaattagattcttgatttaattgattaaagtgtttctgatcacttctgggaacactatcaagaagcattcccctatatgtctgcatcttgttgtaaccatctgtagtttcatcaaacttatggactccacctatgtctagaccagcaacttccttccacatggaaacatctgcgaccatatcgactccattaacaatatagaagaggttacgttcaaggtcaacatgtgcataagtgtagaatactttgactagttttatgttaaatgtctctttcatccgcaaaagctttgccagcccttgaacttccagtagattgggaaagttaaacccttgctgagaaaaccattccaagtccagatacttgcgaactttcatgtnttttacaacataatttaacttgtagtcgctcttctttccttaatctgtgaaccatgta

SEQ ID NO: 7411 - DNA, 265 bp, Glycine max
ctctctctttcgaatctgcttaggaaaatcgttttcgtgaacaaaatccaagccgaggcgcttccgtaacgtttccgtgagtgatttcgcgaaggttttcgaccgttcttcgacgttcttcattccgtcttcatcgttcttcactctttaacgggtaactaccttacaccaaccctttcaattcattttatgtactcgtggtggcccacatttggtttcatgtatttttattctccctttcatctactttctataccaccttttg

SEQ ID NO: 7412 - DNA, 346 bp, Glycine max
  unsure at all n locations
agcttagatgcagaacaagagaggttacatggatatataagagatctcgagcaaaataggtcgcgtatgatataatttaaaatgtaagtccaacattggttttcaatacaaaaccgatgttaacagaatgatgttaacgttaacatcggttttcttcaagaaaccaatgttaactggtcatacgttaacatcgattntcagaaaatcgatgttaacgaacataggttaacatcggttttcttcaaacccgatgttaacgaagagatattaacatcggntttggaaaaaccgatgttaacaaattaatgttaacataggttttacaagaaccgatgtaaacgtcact

SEQ ID NO: 7413 - DNA, 446 bp, Glycine max
  unsure at all n locations
cgcttgtggagcttctatggaggctggatctttgagcttcaatgaggtccttcaatggtgaattttcaccatggagatgcagcggaagacaaaggagaagaggtgagaggaggcgccatccattaaggaataagccatggaaaaaaagagcttcaccaccaagatgagccttggataagaagcttggaaggatgcttcaatggaggaaaagaaagagggagagacagagagaggggggagcacgaaattgaaggaagaaaaagggagagaagttgaactttgagttgtgtctcacaagactctcattcatcanagttacaacaagtgttacacatgcttctatttatagactacgtagcttccttgagaagctctcttganaaaactctcttgagaagcttctctgagaaaactctcttgagaagctagagcttagctacacacac

SEQ ID NO: 7414 - DNA, 419 bp, Glycine max
  unsure at all n locations
gaagtttgtttttacatgccgaaatatctttagtgtaacttgtattgagtgttatattgtgtgttgcatcttagtatctattatttcatatgtgcatcatgcctcatcatgtatgagtaagaagaaatgtttttgaagttagaataactcttttgaagttaaaactctttgttttaatagattacatgttgatcgtaatcacacaagtgtttgtagcttgcagaanagtccctcgtatcggtttaatcgattataggcttatagtaatcaattacatagttcttttttagaacaatgatgatttttcaagagtctctactttaatcgattaccagtgatataattgattactcctcttttaaaagtgtgttagaagtgatcaagagcactntaaccgattacatcaagaatctaattga

SEQ ID NO: 7415 - DNA, 360 bp, Glycine max
  unsure at all n locations
tttgattcttaattttggtgtacgcggagagcttgagttaaatggtgcggcccatcccaaatggataaaacctagaggcatactgacatttgagaatggtgaacttgatctatttgccacacaggtatgtgtaatgttttatttttacaactcctgtaaattgtaccctgtggcagtgcagtttctactaggttggntntcttttggttcgtcttgtgtatttcttgacacatgttgatgttgatacaaaccatttcaaaatgcangtgaggctaaaacgagagcatctaaacattgcaaagtttgagcctgaatatggactagatccaatgctttgattagctttggttggatctgagt

SEQ ID NO: 7416 - DNA, 449 bp, Glycine max
  unsure at all n locations
cgatgccaatgagatgacgaacggctgttgacaacattttgatatcacgaaaccagcaactggtacagtagagaagcttggtggctagagacctgcggacgtagcgagggtgctattgaccataatcaggcttgatcaatgcctgaccacccctggcttagtcggtcagggagaacgtgtgacgtacctaagcacgcgagctcctgttggtctacagattacaggaaaacacgaccacatagcaaggaggcttgtggtggctgagccactgtgaatcattgtgtatttgtggattgcgtgcctctgcaatcaaacaacaaggagggtgatattactctaacgtgttcatctcagatatgttggtaccaaggtggttgtactctttcatcaaatcagttatcacatcatctgctctttctctttagatctngaatcttacctactaacgc

SEQ ID NO: 7417 - DNA, 293 bp, Glycine max
  unsure at all n locations
catgcaagcttatgcgcatatntccttacgaacattctcatgcacaagatattctattaactatagaaaaatgcacccatatacaatcaaggcagcttcgttacctagattatttacacgtacttccaaggtgtatttgttacttacatcacacacatcgccttggctaaatttacatacatgcatactcaaagcattttggggtaccaaaaattgcacatgtgcacatcttggtatttctaatacctatacatacacaaacttcatgatgaatcttgactatctacacaata

SEQ ID NO: 7418 - DNA, 248 bp, Glycine max
cttctacttatgtggcagggctgtggcttcttcactttcttgtcttaaccgcgagctttgacccccactcttcctttccgcgatgcttctctttacatctgcctgagtgggcttatagcctaaaccatacttcccacgatttcctttggcatttatcacgctagttatgccgccgtctgctttgactacatccattacgggttcgaaaccgctccccaacataacttgcgccatcattactgctgcat

SEQ ID NO: 7419 - DNA, 429 bp, Glycine max
  unsure at all n locations
caggcatgcaagcttctagtctcaattntagcgtctcgatatattacccaattcaatcggacatccgagtaaaaagttattgtcngttgaatttcctacgagcttctgttttcaatttggagcgtctcgatatattaaaggactcaaccggacatccatgtataaagttattgtcaattcatatttcttagagcttcggattaaaattttgagcgtctcgatatattacgggactcaatcagacatccgagcaaaatgttattgtcgtttcaatttgatacgagcttctattttcaatttggagaatctctccatatattacaacactctgtcgggcatccgagtaaaaagttattgtcgtttgaattctctaagagtttccgttttcaatttggagcgtctcgatatattacgggactcaaccggaca

SEQ ID NO: 7420 - DNA, 460 bp, Glycine max
  unsure at all n locations
cgaaggcacactggatgtgttggtcaactcggtaacccagctgttcttgaatcagaaatctgtacctgtcgcaagggttaggggatagtgctgctctgctgaccacgatacagacctttgcccttccatgcagcaacctagagcaattgagcagcctgaagcttatgcaggacatatatacaatagacctcctcaacctcagcagcanaatcaaccacagcagagcaattatgacctttccagcaacagatacaactctggatggaggaattaccctaacctcagatggtccagccctcagcaacaacaacaacagcctgctccttccttccaaaatgcttctggcccaagcagaccatacattcctccaccaatacaacaacagcaacaacctcagagacagccaacagttgaggccccttcacaaccttncctcgaagaacttgtgaggccaatgact

SEQ ID NO: 7421 - DNA, 319 bp, Glycine max
gcaggcatgcaagcttttaataattggctcagcttcctccatgtgtataggctccccagtcatggtagtctttgaaagcaaaagctgacaacttctaatctttgagctaagctcccaggcaaggtgaagattatcgtgctctttggcaataatcacataagacctggccagaaccatttgctctgctaactgccgtgaaaaggatgttgcacttaacatttcctcagtaaaattatatctcttggcaaaatgttcaactctagcatttctctcctgcaaagtaagtaacttgctctgtaagtacccactacccagaggg

SEQ ID NO: 7422 - DNA, 198 bp, Glycine max
gcttatccttatggcctgccttctggacttacttctccgtgccaccccggaagatttaagccaagcccctacttttgaggggcaactcccactctatgaagactatcccgggcaagacgatggggaaggagatactccatcttgccccctgctccacctcaaagatccatccccgctagaactaccccagccgaacat

SEQ ID NO: 7423 - DNA, 468 bp, Glycine max
  unsure at all n locations
catgtagctntctctagaagcttcattaagaggctgtctctataagcttcctcgtggcttctttgagaagctttctcaagaggattctttgagaagctagatccttatctatccacacccctctattaactaaattaacttccttaaaaataattacggatgaaaataacgcaacaaataatcaaacatcaagcataattactaataatatatatatatatatatatatatatatatatatatatatatatatatatatatatatatatatatatcgccggggccgcactanacgcctaccatctactcgcttcacctattgactcctgaatctttaccaaacacccacgcctgacccacttccttctcgaactctccttcacctccccactctattcctcacccgtctccgactggccacctccgcgcgtgccctttgctcgtccctcagcgtgctgactctcctcc

SEQ ID NO: 7424 - DNA, 106 bp, Glycine max
  unsure at all n locations
cgcatattaagcatacccgaaactcgccaacaccccgtgactcctantcttgtctatcgtcgcatctcactctcttgcttgcctcctctcgatcctttaccctacc

SEQ ID NO: 7425 - DNA, 186 bp, Glycine max
aaggcttgtgtatgtacaatcatggccttcattatgttctcatttatacatttcattctaaaattcagagattgatgcaaagattattactccaagctagtcgttcactcacagagtaaggtcacactctcaccggttctgcgttaagcttttctctctcaatcactatgtatactgactaacaat

SEQ ID NO: 7426 - DNA, 335 bp, Glycine max
cgcgtctggaatgctgactcgagagatcttgacaacccactctatttcttttacgccatcacactcaatgcttgaggggtcgtacatcatacaaaatgggaatccccactataccgactcaagagacagcgacaactcaggcgtaagcatttatgccattaggctaaatgcttgaggggatatactccgtgcaagatgaatatcctagtaagaatgactcaggagacaaggaagactcacccttaagcattttatgcccaaggataaatgcctgaggggttgtacaccagaccgatatgagtattttggagatattgcctctagtgaggagatga

SEQ ID NO: 7427 - DNA, 279 bp, Glycine max
tctagccaaatggacttaccttgaattaattcctttgatatctcttttcgagccttgtttacctttccttggtttgaagctcactacaagccttatatgaaaaaccatgatatgaccatattcttaccgaattttggagctttggaattgttttgggaataagcgcggggggctttttgctctattggataactcgttctcgtggctatgctttatgatgtatcttgcgccatacttcatgtacattgtatattgcttaaatgttggacatgctgaatg

SEQ ID NO: 7428 - DNA, 120 bp, Glycine max
ctgtggatgcctttaaaatttaaggctgatgtcaagacattatgtggaaagcaaattaagatcgtgagatttgatcgatgtggagagtactatggcatatacatggacaatggacaagct

SEQ ID NO: 7429 - DNA, 162 bp, Glycine max
gactatacgaggtatcttccttgcgtatagcattatatctaagggctaccgtgtcttctacttgcgaactaagaaactcatcatcagtcgagatgttgaagctgatgagtacactctttggaattgggatgactcaacacgcccgaacaatattcttatccc

SEQ ID NO: 7430 - DNA, 238 bp, Glycine max
gaataataatcaaatattactaaaggttacattatcatttataagtcaaaaccaaatagaatccagtcataaaatactaagtgccaaataccaaaatataactaatagtcagagaatgataacttataaagcatagcccaatacacggcttaaaataaataataataataatctaaaactatgaaggtggtggaaggtcgagcaccgaccaaaataactcacatcctcttcaagctga

SEQ ID NO: 7431 - DNA, 348 bp, Glycine max
  unsure at all n locations
cgctacattgatgcatcttggctacggaatcttcgaattgggcacttannatttggaggcttaagtctgctatcaaaggagaagatggtaagaggactaccctatattaatcaccctgatcaactctgttaaggatgtttacttggcaagaaatttagaatgatttttccaaaggagtcaaactcaagagctaagaagccacccgagctaatacatgttaacgtctgtgggccaatcaagccccaagctcactacgtaaaaataaatatttcctctttctcattgattatntttcaagacaaacatgcgtctatttcttaaagcacaaatcataagtcttttccacct

SEQ ID NO: 7432 - DNA, 400 bp, Glycine max
  unsure at all n locations
atcttaagtcgactgcagctgcagctattatttcanaacgagttttgataatttatcattataagaacaaaatatatgcatgttgaaatttataagaatgaaatctaacattatatgatataaacatatctttaaggtttgatataatattcataataacctacttaaaaatatattttgaaataatacatttaaataagacataagcttattttttaataaacttaactataaaatttagtctaccgctttatataaatcaacatgattaacattttaaaaaataaatacatgtaagattttaatgtattatatcaaatttaatataataataacactaataatgaatatttatttatgaacttttaaataaatgatcttggtaagtctaaaaaagttt

SEQ ID NO: 7433 - DNA, 458 bp, Glycine max
  unsure at all n locations
ntcaacaacctccttctattctcttggagctcgagcacaatatttnttaagtactgtctattgttacaacagtatcattcgtctggtgcgtatccacctatattctaaagaaaggtactttcatgctaacaagctggcacattgttgtgcccataccacactttgttattctcggcgggattctatctcacctcttcgttaagcatgactctgttacgaatcaaattctctctcctgcgtacaagctttcgtatcttatcttgagggtcttgggctgatccttncatctcgctactgtcgtctctctcctcacacctcacacttcataccaaaccacgcacacacacgctcggttgcgctccccacgcaaaccgcgcactgtccttctccgcgcgcataactctcgtatcatcatgttcgcatccgcagcgatctgactctctcggcattctctaccg

SEQ ID NO: 7434 - DNA, 395 bp, Glycine max
agcttcatgcttaagtatgtatggttaaacttcattactattgttcaagacatactagtgagcttgtaataaatcttctagacttggagtgatcacatgcagtcctcttgaacccttaccacccactctgtcatcatgccgagactcaggaaggccaataggtttagccttctcaatgtattctgaacaaaatttaatggcttcttctgcaatgtacctctcaataatagatgcttctggacgataaagattctttatatacccttttaagatcttcatgtatcgctcaaccgggtacatccacctcaaataaacaggaccataacatttgatttctctgaccagatgcacaatcaagtgaatcatgatgtcaaagaaagcaaggggaaaataca

SEQ ID NO: 7435 - DNA, 358 bp, Glycine max
tcatcctcctcacgctttgtttaaccggcgaacacttaggatttagaggtaatctgtgttgtacgatgtccgaactcaaaccgggcatatcttggtatgaccaggcaaagatgtcttgatagttttttagcagggccatcatttcttcatggatgggtgcgatcatacccgtgcctatctttacttcctttttcccactattggttcctaagtccactagttccgtctcttcttgatgacggcccatctcttcgtcctatgggcaactatattcccaactctggggaagcccccaccccatcctcttactttcccccgacccgttcttgctcgcaccacggcggttccactataaccc

SEQ ID NO: 7436 - DNA, 421 bp, Glycine max
  unsure at all n locations
aggcatgcaagcttctacttcagtggaattagggtttgtgccatgtcaaagaagatgagacgcaggattggcaaaaggccatgcttgaaggattcgcgccttgngtgaatcatggtggttgggtcccttgccaatgaagatggcatgcacgacaaaggaggtcgaggagctaggagggggaaaagtctacggggaagaggtggtaggtggcggaaatggaagatgaaaggacggaggaggagaattctcaatgtttgatttatatatttatttactttaattgattctaacaattttttactgtcagagaatttaaatatgattttgaaacaaataccgacgaatttttaagctgtcacaaattgcgctatcaaatatttaatgaacacatcatcacttaacgtgacgacagaatctaaaa

SEQ ID NO: 7437 - DNA, 452 bp, Glycine max
tgaaatgcaaatttgtgttgagagtatggactgagattcatatctttgcatgtctacggtttctagagagagacaggtccaagttccagagagttttgagagatcttgctgtgtgaagatctgcagagaccagagcttgaagcaggagctggtttaagagcttgagatgagtctgtaagtgattgtgagatcctagaggtgaaggagacatcctcaccacttgtatttttgcaatctttcatcttgttcttctctttggtgctaagaaggcttcctggtatggaaagctaaatcctctattggatcttccctgtaggtacctaatgtaaatatatttctatctatttaatgatgtcttgtgtgttctctgtgctatctgcctttcattccagtatgtctatatcttgatcacgtagatgcatgcttttgtacggtcattcaacagtggaaac

SEQ ID NO: 7438 - DNA, 189 bp, Glycine max
catgcaagcttgtaattgataactgaagctctgagcacattcatacgacaataacttctatctctgatgtccgattgagccctttaatatatcgagacgcttgaatatgaaaacgcaagctctaagaaaagcaaacgacaatatctctatactcggatgttcgattgagccctataatatatcgagacg

SEQ ID NO: 7439 - DNA, 371 bp, Glycine max
  unsure at all n locations
ggcatgcaagcttctaccactggtatttaatctatntttatcttagaaaataaataagaaaattgtccaccggtttaccaacttctcttatgcctattgcctaatcctaaatttctgatttcttttaaaaaattacaccatactatatgtacagtatatgattgggtaagaaaaaataatttagactaaacaaacgtatgtatagtattacgatttaatcaacttaatcatagattattggtcaaaggatgcacttattcacacacaagaaatactattatgattgaaacttacttaatattcacataaatatttaaaaaggaatttatgactctgaaagttaatcttcatcgtctatttttatatcctat

SEQ ID NO: 7440 - DNA, 177 bp, Glycine max
  unsure at all n locations
tgcaatgtattgctcgacaaggacatgaatgctngttggttatcttgggcttgcaaggctgcatcaccatgaacatgtggctgacacaacaagagtgatagggactctggggtacatggcacctgaacttgtccgaatcgggcgaccatcagctgcatgtgatgtgtatagtttcgg

SEQ ID NO: 7441 - DNA, 359 bp, Glycine max
  unsure at all n locations
atcttctatataatctgaactattntatcaatattcacaagttgagttttattcagaanattagagtttatctcttttatcttagagagagtgattctcctaaattcttgagtgattcaagaacaccctggctgtgtcaaaggacttttacaacctttgtgtgttgccctcactggaaagagtgattctttccttcctttcatcttcacccttgttctttcaaaccacaattccagaaaatccacctctgcccagaattatctcgtggccataactcccattttacgtactcaaattaagtgattcttgagcctaaattgactttcaaaacgagacctttcacctcgttttggaatcac

SEQ ID NO: 7442 - DNA, 158 bp, Glycine max
gcttcttcccgttcgtcgtcatgcaggttgtcaacatcttcattaagcctctgtctcatgctctatcttcaggctgatattccaagctgtgaatgatgaacatgcagtcccagcttgcggcggctctcagtcgaagcctacgtacgctggataatcaa

SEQ ID NO: 7443 - DNA, 264 bp, Glycine max
  unsure at all n locations
ttcttattggattataacaacgcccagaatntattcttcttcttattttcgcatacaaattattttatcactaaattgatcatctctctaacgactgaagagatcaatacaatatatatttacgtatttatctgagacctgtcgtgatatttgtttaaacaatgtacatctatatatttttaagagtacatagaaaaataataggactttaaatttaagccatcttcttgctctgttcagcacctttaatttcaaaatcaattt

SEQ ID NO: 7444 - DNA, 623 bp, Glycine max
  unsure at all n locations
ctccgcctcgacgtcgcgngcgcgccatacacccgcatcctgacacatgtcgntatnatatnnnnnnnnnnnaagggacgcgctagtgggngcatngnaggaggccgnccgttttgaaaccactctgcacnncccncncacncacgcccgcccatttgaaacccttcgananncnccnttntataccgaactcaagctcttctctctccttcgcaaccgcacaatcgaagaagcacggctctcctactcccacccacgcagctctctaaactcaactggcccagctgcttggcccctcaactctcttaccagaacacactctcttctctcacgtgcgtccaggccatcactatgtgccgcccgaatgagcgtcaacttaccgccctgacgccacctgtctcaactccctcgtcgtcttccggcaaccacacactctatgtcgcctccctccttcgctccagctcacctcccccaccgtaagacccgcacactgtcgtcgcccgcctcgcttcctccctgacctccacgatggccccatcgaggcctctgcgacagcactanaaaatttaaaacaccttattctcacaagatctaacacttagaagtacaactgaaaactaccg

SEQ ID NO: 7445 - DNA, 435 bp, Glycine max
gcttgtattgtgtgagcttgttgtagcatgttatgtttgctgttattttttaattctttgaccctttgaatggccaaactggattttgatgtcttcatgagagttgtagagaattctatccttgacatttaggtactggtcttatgtcatttggaccaataacacataataaatcttcaaagcattgcacttacgttatattgtaaggataaaataacatctttatcttcatgatcagtttcttccaagatccaaaccttattagcccctaacttcttcatgaaagatgtatatctttttcttagatttccacatcaattgagataatatcaaatacacttttgtagcttaagcagtctactaattactactacacacatatcaagttgtctaggcaaaccaacgtctgcaactttaggcttaattttatccatg

SEQ ID NO: 7446 - DNA, 455 bp, Glycine max
taagataatcatgcttcgttgtcctatattggtgccttcttaatcacagatttgtaagttgtaattctttgatttcggtgttttcgcctttaattaattaattgtttttttagtactttgtaagatagtagcatgatgtgctgctagctgttgcctattagatagtgacatacattctttgccgcgtatgctttatattctatatctatattcggtactaaaagtcaaaataaaggaaaaaatatatctacatatatgtgcagtaagatgcttcagctttcctttcattcatttattgaagccttaaattgtttgaagtttacttaaagattgtgaatattaattgtgatttctgaatttctttctcaaagcctcctttggacactcatatttatttatttgtcatttataatattaaaatatagacttaaatatgaattattattatgaaataa

SEQ ID NO: 7447 - DNA, 240 bp, Glycine max
  unsure at all n locations
gcttatcgtaatcgattagacaattattgggatataatgacttgttnttcaggagtctctactttaatcaattaccaggtgatgtaatcgattacttctctctaaaaagggtgtctgaagtgatcaataacactctatcgattatatcaagaatctaattgaacacattgttcttgcaagttatgcagattttgggaagaatactttattcgattgaaaagataatataatcgatttctt

SEQ ID NO: 7448 - DNA, 498 bp, Glycine max
  unsure at all n locations
cgcnccgggtatgagccccttgangtgcggcccattgagacacttgagcttacggcggttttcttatgctgaaagatccaacttattccttttctgtcagattgaccacaacatttttacatccgtggcaaagcccctatccttggtgctaacatacaccacccaagtataaacgatggcggtgatttccaaagatctccccagctgatttgtagaccatattagttggacgcttgttcaatacatgatgcgggacctaaatgtgtcctagtgcccaatcatgatttgcacactcatttactcaccaatctctcgctgatactcgccattaccaacctcgtggccccttcctgcccttccccaccttccaactacagcccatcgcaatcaccctctccttccttctagctaaacatgcgtccacctcaagtgctacctccttcgcttcgctccccctcctcacccgcccccgttttccttctcttcgcgccctcaccc

SEQ ID NO: 7449 - DNA, 159 bp, Glycine max
tgcaagtggtagctcctccagtgaccatcttgtcggtagagttgtctattaaaaaggtatcctgttctgtaaccttaccttctactgcgaaagatgttgatggccccagtgcttaagtacctcaacaggtacatggaaccttacctctctattgcgaaa

SEQ ID NO: 7450 - DNA, 346 bp, Glycine max
  unsure at all n locations
agcttataatttaaaaaaatcaaattaattaaaatataaaaaagcgagatattttccacaaggctatctactttggtactatgtcattgttaccctatgtcggtgttactctgcgtaataataaacattntgtatgctatctttttcatatttgttcaagtttgattctacactcccaccatatcaaccattatcatactaaactgttttcttctaataatggctgcaacaacacgttcccttgcatccatctacgatgtgttcctcaacttcagaggggaagacacgcgctatggttntactggcaatctctacaaggctctttgtgacaagggaattcatacct

SEQ ID NO: 7451 - DNA, 463 bp, Glycine max
ttcttaactaatcccagaacaacaggcaagtaatcctcaagagcctgcagaaggtcagtcagtgttgaacctcctgcagaagaaatcaaacgatgccgatgcatcaataaattagagtaacttattcatcataaaatcatgttgttgttggtaaaactaaccatgctgagtttttctttttgttcttgtaattgtaggaccttcttgaccagccattacaactatacgcgttctaagagcagacaggcgttccactatattcttggacaaataatcaccaagtgattgagcaaaatcaacaggtttaggaatcctcaaaccaggaacatatactgaaagttcaccaatactcccctggcctcttctatttcaccagagtccttcggagctgacaccacacagcccatgtctaaaggctcactgtatctgctgaatgctggcacagataagataaagagaatca

SEQ ID NO: 7452 - DNA, 70 bp, Glycine max
agcctcgaagacctttccgtgcctcgacactcactactagccctaagggaaaaaccatgatttcgccata

SEQ ID NO: 7453 - DNA, 525 bp, Glycine max
  unsure at all n locations
cgcgattgaaaacccttggaannagcggatctttgaacccctccactcgcactgttctatcgaagactaacaacttgcttgtgcaaagctttaacactgtcatcttcctattttccactctgttgggcggcattcggttggccgttatataggatgttgcacctgcgccgtattatatgatctgcgcatcatgcataaactcgggtcagagagaaaaaacgtgcttgcgatagaaccagctctcaggaatgacgaccctgagagaagttgatatccacgcctcatcattcaattacatacctgtctctaccccgccaccgcatgttatgtatgttggatcgtgaggcaccacaataatgaaaagcggcgggaccaacacactacctctaacaccttaccacgctcaaatgaatcgttatgcgcattgcgttatatcgacgagtgccgaggagatactacctcctgatcggcgggccgatcgtccttatggtgtcgcgcggcttataccacctcgcagaatgaccg

SEQ ID NO: 7454 - DNA, 301 bp, Glycine max
gcatgcaagctagcagtagtgaaagtagctttatgtgatgttatggattaaaaactctctcttgcggtaaaacggcacgcctaaagtattcatttcatactacaagtaaacaggtatattcataccagcacgcaactggttgaagctataactgcccaacaacacacaaggggactcctccagcattaacgtgattgaagcatgtgacgatgccatacactaatctgatgaattatcatgtcgtttgaaagctcgaggtgctatgccctgcacctacataacacctacattatatgctctt

SEQ ID NO: 7455 - DNA, 600 bp, Glycine max
  unsure at all n locations
catctcacctccactgtcgtatgccntcacctatttancatattcttttcccccctcancccnnnnncacccggccccgccgattgagaccctgcnannngcngacatttgagacgcttcgaacnacacaccancatgcnacagccacgctatacacggagacgactcttatatctacaaagcaacgatctatttacttggcgtactgagtagtgcgacncggcgcttcactcaacacgatcacaaacctcctcgcgagataccaggaacacactacgcaacactagtgtcacgtcttactatctgtactgacaaacattaacccgtacgatggatagcttatgttgagccaacgcaccactgcatgacgattaagactaccttacggagctctatacagagaccagaagcttcaacgatccaacgaatcatcatgtcaaatccaaaagcgactcggcgcacacaaacaacggacaccacacgtatctccgaatccttttacaaaccaccaaggaactcagtcgattattcgccctcaaacactaaacttaacctacccccagataagcgcactaacggctctggcacgccttagccccc

SEQ ID NO: 7456 - DNA, 389 bp, Glycine max
agctttgatgcaacatttggagagtgttaatgaatcaacgagatgatgcgctccatgataggttggatcaaatggagaatagagatcataatgaagaagaaaggaggagaagagggaatgatggtgttcctagacaaaaccgaattgatggtattaaactcaacattcctccatttaaaggaaagaatgatccggaggcctacttggagagggagatgaaaatagagcatgttttctcatgcaacaactatgaggaggaccaaaaggtgaagcttgccgccacggagttttccgactatgctcttgtgtggtggaacaagctacaaaaggagagagcaagaaatgaagagccaatggttgatacatggacggagatgaaaaagatcatg

SEQ ID NO: 7457 - DNA, 446 bp, Glycine max
  unsure at all n locations
tatgcgcatatttccttacaaacgttctcttgcacaagacattctattaaccgaaaaaaatgcacccatatacaatcaaggcagcttcgttacctagattatttacacgtacttccaaggtgtatttgttacttacatcacacacatctccttggctaaattcacatacatgcatactcaaagcattttgggggaccaaaaattgcacatgtgcacatcttggtatttctaatacctatacatacacaaacctcatgatgaatcttgactatctacacaataaggtgctacatttcatgctcttttcaagtttttgctacctaaggccgcatgcaaattcaagtatattntccttcgctggctaaaattggattcaaattaaaagggatacattcttttggtaatgtatcttctttacatagcatgcaacatatttatgtatattt

SEQ ID NO: 7458 - DNA, 349 bp, Glycine max
  unsure at all n locations
tgcaagcttatgaagcctatttcgcaattanttctcttttattcgagtagcatctctactatgataccagttatgaaaacactgcacgaattctaaaatgctactcttagcagaagggtccatttggaacgctcatatagcaattcaattctaatccatatatcacgtattttatatatattcatattccccaagagactacttttcaaatataatttgattccatcaaacgtatgtgaatccacatagtaaaaatatgagagcatgtagagacaaatttgagaacagctgtggctcaacttgcacccaataatgagaatgactcttgagccatactctggggatacct

SEQ ID NO: 7459 - DNA, 148 bp, Glycine max
catgcaagcttcaagaaaaagatggcctcatcacacgccgcttgtttcagaagggaattctattattagacctcccatctataatggagagggttaccatcactgcataagccgaatgctaaacattattgatgctacctacctcaaa

SEQ ID NO: 7460 - DNA, 354 bp, Glycine max
  unsure at all n locations
gcatgcaagcttgagggtgaggttgccggttctcgggtccgatttcgaggaccgtgtcggtggtgtttatcgcggatctccgaaagatggtgtccagaattcgagggttgatgaaaatgtgttggcctctgctcttgtagaaacgtagagcttcttcgccatcgccatcgccatccccatctccatgcaattgccgcactgatcgtaacctccgaggaatgaatccaactacgcgtctagaggcaccaagcatgtgccactctcatgtacantttttatgcgtttcccaagcataagcatagatacctagtttggttgctcctttcttccaaggcccatcaaagcccaactgga

SEQ ID NO: 7461 - DNA, 415 bp, Glycine max
ccaatatgaataacatcttccaacaatcaaaataaatatttattctataatgataaaatcattttcaattctttttaaaaaaaattaccctgtatgaaattgaaaaagtcaaatcttttactttacgtgttatttcaaaaatctaatatttctatttttcttttgcagaaatgaaatgacagctatacataaataggaatgacaatgatcaagatttacatagggtcctatagtattccttatataacttttaaaatatttattataaaaattaataaatttatggtttgatttataaataaatgacatattggaaagtgaaaaagatctttacactatcaatagatatattactttctatatttctcagaaaaggctatatatatatctatattatcacttaatagtctctata

SEQ ID NO: 7462 - DNA, 55 bp, Glycine max
cgcgtcctctaagacacctgcagcagcttgttgaagatatgggaacccatcacat

SEQ ID NO: 7463 - DNA, 527 bp, Glycine max
  unsure at all n locations
cgccaccgcaatgagccccctcgaccccggcgctcatgaacaccctgcacnnccnncnnnnnnngcacggacgttgagacccttgtanancccncatcttattgtatactcaagcttgagctcattgttgctgccccacacagctcctcgcaatttatctcgaccatgttcctccttgtgggcccttatggtttcttgttcaagggctctcgcagcggccgcgccttcctctcgcaacttggagcactctttccggatgtttgtagccgctgtctcgaattcactttgccgaggccccccttccgtacctctacctcatcacctcgctatccatcaaccgcctcccccactcgcccctctccccatccgcccctccccatgccccctccccccctagctactctcgcctcccccctcatcctcactcctctcaactcccaccactacccctcctcgcccgctctctgctccgcgccggccccacccgcctcccgccatcttcgccctctgcacctcgtcctctccgg

SEQ ID NO: 7464 - DNA, 298 bp, Glycine max
  unsure at all n locations
aattaataatactaaaattagatagacttgtttgaactttaaattggtctgatatctagtttggatatagtttatcaaattgcatttcttactacaccgcgataacatatattgtagtaattacaatgtttgcattattacattaattatactcgtcatttgtgtaatatttttttataatgtcaaattttaccaatctaaattntattaagcagataatatttatataaaaaacagagacaatatgtagataattagattaatttcttaagcatgttattaagagggtcttattctg

SEQ ID NO: 7465 - DNA, 380 bp, Glycine max
  unsure at all n locations
taagctacacagatccgtttgcatccatcaatatatttgcacatttaatatccctataattgagaggaaataattaggtagatacaaagcttgtttcatgacattgcataaatgaaacaaaaatacataaaagaatatgttacacaaaatatgagcatactgcacaaccctaaaaaaaacactagccagtaaaatatccaacacttaatcctcatgtgacatgtatggtttatgcagttcaagttccaaagacaaatgttccttatactctacatttagaacttttgtactttatttntcttggggtaattctcatctctccttttggatttagcgaatcattcagnctctcaagcttaaccttgttcaataccaaagaa

SEQ ID NO: 7466 - DNA, 456 bp, Glycine max
gctgaaagccacattaaccaatatgagcaactatgcatatttatctggaggaggcgtgaaggtttttgtatagacgcagatgctcgatacattagaggtaatgccatgagacaatgactcgacgatgactttatgtcagaagagggatgatgaggctggattggttctcatcctagctatcaatgtttaccttaatccaagacacgaccatacgtttgactcggaggacgaagatgggccccatatacattcggacaactatgaattgtggattataacatgagggacttattagcataacggatgtatagatggaggctttgttttacactccaaaaagatcgggactgtcttgaataatggtgtacacttgcaggcacccaaacgcccattcaccttttaaatgacgtgtagatgaaatcactaatatcgaacaactccctaacgactacagtg

SEQ ID NO: 7467 - DNA, 239 bp, Glycine max
ccacatctacaatgtttgcgttgagtcgccactgtttctacctcactggctaagctgcatcctctaaaaggatcctatgcatgcacgcagatgggctaataccacgaatgttcgctaaagttccatccaatggcccttttgtgcttcttgagcaccggcaacaacctctcatcttgttcacatcaatggaagcacacatgatcactggaaatttgatgcaatcctaccccgcaagggca

SEQ ID NO: 7468 - DNA, 333 bp, Glycine max
attccctttttgtttactctttataccccctgctgacgcgcttaagccattttacttaagtcctttctcgcttaacttaaaaataaaataaatttccaccgaacgtttgaattgtattatccattaacttcggctaaaataaattccgaccgttcggtcgtgccgtaaccacgttggaaatcaaaaagaggtaaaaaaaatattataataataatcatacaacatcctttatgtaaataaagcggataatcaatcggacatttcttctttgggatttctcattcttaatcgaattgattaataactaaagtgaaactaacgcttaaatcaact

SEQ ID NO: 7469 - DNA, 331 bp, Glycine max
tggacattacttcttctatggacgctatatctacgcgcataatatatcgttacgctcaaaatcgaacaacggaagctcttgagaaattcaaatggtcataaccctttcactcggaggtccgattcatgcgcataatatatcgagacactcgaaactgaacaacggaagctctcgagaaattcaaatggtcattacttttcactcggaggttcgactcaagcgcataatacatcgatacgctctacattgaacaattgatgctctttagccaatcaaatgggcataacttttccctcggaggtctaattcaggcgcattatatatctacacg

SEQ ID NO: 7470 - DNA, 401 bp, Glycine max
  unsure at all n locations
cttaacanaaggcattcaaagtgggtggaatttctagagcatttcccttatgttatcaaacataaaagggaaaaggtaatattgtagccgatgctcttcctcggcgtcatgcattgctttctatgcttgaaacaaaattgattggtcttgaatgtttgaaaagcatgtatgaaaatgatgaaacttttggagaaaattttaaaaattgtgaaattttttcagaaaatggtttctttagacatgaaggctttctttttaaagaaaacaaattgtgtgtgcctaaatgttctactagaaattngcttgtttgtgaagcacatgaaggagggttaatggggcattttgggtccaaaagactctagaaacattacaagaacnattttattggcctcatatgaaaa

SEQ ID NO: 7471 - DNA, 451 bp, Glycine max
  unsure at all n locations
ttgcatcaggatcagtttcagcattctgcatgagatggcggcttatagcccaaccaactatcttctctgcatctgcaatatagcaaaaatgttatatgagatatttaagcagcaaatccttaagcacatactggtagaaaatactagtatgtgctttcgatacaagtcacaagtgtttttgagatcttttctactggaaatatagagtttttttcagtagagaagctcttaaaagagcttctagccttgtatccaaacaggctctaagtgtctaatccttaatgcacaaggtctcgagtccttcacactccaccccacaacggctcanaacctataaataaaattaaatgaaaacagttaagaacatcatcacaacaattatagtctacacagctcaaaatatttaacatctttaattatttttntctttagtacaccaagtcatgaacat

SEQ ID NO: 7472 - DNA, 306 bp, Glycine max
aagtttaacaacctaagtagttttttatcattctccatctagctctagtaacaaatcattagatttgtggaagtttatgggtgcacacagaatatcttactacttatagatgagaatgaaactaaagctcattagtgtctttttctctcaagattttccaagtgttctgaaagctatataacatagagaaatttacaacagaagagaacttgacggaggtaaagaatatgcaattcaaaagcatcacatgagctcttcaaatcttctcgtatttataggcttcttcaacaagtaaacgttgtccct

SEQ ID NO: 7473 - DNA, 431 bp, Glycine max
  unsure at all n locations
catgcaagcttcccaacatccagcaaatttcatttatcatcacaagctatcacagccaagcanaacagagcaaagacagaaaactctgccatacaccaccaaatacagctttctcacttaaagaccccagtaacaattccttcgttccggttcattaaccgttggatcgactcgaaaattntactggaagtctctagtacataagcctacattttgaccgttgggatctactagcanacatccagaactcattctgtactactctttccacagccaatcacacaagcatttttctgcacttgtgcaaaattctgttgcacaatntcacagcaaaaatctgcacaaagtgcagatttcgaaaaccacacttncnctcatccaatcttgcccaaatcanatcctacaagtcccaaatcatgtatcaatcatgt

SEQ ID NO: 7474 - DNA, 432 bp, Glycine max
ctaagcttaccataattgtattttcttttaaagaattccaccaatttctaaagtgtctatattcatatctcacatgtgttggcttattgaacttttctgcaatatttgcccaaccaagcttaatgaagtggtcgtgacgtttatttccagcattcttcttcacctcttctatgcacactttcaacataatctctgtaacagccgtaacttttaataaataaatcagaaactaataaattcattaataagtaagtaaaaaaaataattacgtcataaattcgcactatataaaccaaatattaacctagagcagctgttagaaaacacatcttgttcctttcttctttgtctaacgcacaagaaccctaacagaacaatcataggtggagctttaagagcaccacatacccacaattacttacggaaacattt

SEQ ID NO: 7475 - DNA, 357 bp, Glycine max
aggcatgcaagcttagagccaattcaaacgacattaactcttttctcggatgtctgattgagactttttatataacgagatgctcgaagttaaatgtttaagctctgagccaattcaaacgacaataactttttactcggatgtttgattgaggcctgtcatatatcgagacactcgaaattgaatgttgaagctctgagccaattcaaacgacaataactttttactcggatgtctgattgagtcccgccatatatcgagacgctcaaaattgaatgttgaagctctgaaccaattcatacgacaataactttttactcggatgtctgattgagtcctgtaatatatcgagacgct

SEQ ID NO: 7476 - DNA, 389 bp, Glycine max
tacacattcaacttcgagcgtctcgatatattacgagtctctatcaaacatccgagaaaaaagttattgtcgtttgaatttgctcagaggttcaacattaaatcttgagcgtctcgatatatgacgggactcaatcagacatccgagtagaaagttattgtcgtttgaattagctcagagcttcaacattcaatttcgagcgtctcgatatgtgacgggactgaatcagacatccgagtataaagttattgtcgtttgaatttgctcagaacttcaacattcaatttcgagcgtctcgatatatgaccggactccatcttacatccgagtaaaaagttatctgccgtttgaattggctcagagcttcaacattcaatttcgagcgtctc

SEQ ID NO: 7477 - DNA, 383 bp, Glycine max
  unsure at all n locations
catgcaagcttgttcttagcttcctgaactctgaagcattttaacacaaccaatcttaacatcaatctacctcaaagactaacatgaagtgacaacttgttgaacataacaataaaatatatgaagatgtcaatgtaatagtaataggcaccatccatatccctcaaccctgtatagcaaaactagagtggtattacacacggaaacaactcgagtgaacaagaacatttggatggtaaattattgggttattaacaatcagcaatagtggttatttttctctactggaattngatcaaagcttcctccttgaatggaacacaggtgacatggttgacatctggttcatttctactcagatttttagtatgcctatagctttt

SEQ ID NO: 7478 - DNA, 455 bp, Glycine max
catgttatatcacacattttatcttactatagcatataacttttgctaaagctctattacaacgtagcgccagtacttataccctataagcctatgatttggacagccgtttttgaaatatactgcttgtctgggccgccctagtcactagagttcatagaatctctattgcactgaacatacttgctagactcctccactacactgtggactagatgctatgtggacagacctatcattgaaaatagtatgatcgctgcttgcgctggtgtgtattgggatgactccgcgacacggatgtatagattctatatataccatctaattgaatcagcttacaacatcatcgccacacttctgtcctacacggctcaactacctaaaactctaattattctttctttacccacctaggccggaacatcttcattccaactcagctcttagtaccatcc

SEQ ID NO: 7479 - DNA, 360 bp, Glycine max
catgcagctattggaaacactcttgtacaaaactattttatcaacaaaatgaagattttttagatgataaaaaaccagaagtacctccattgcacaaagatagtcatttccgaacgtgaggctcatcgaggaccggctggtcgaagccctatgcatgtgcaccaagatgagcaaaatgaggatgcagacattagtggaagagcctttgtgcctcatcgattactggatgcaagacacgctcagggaaatcaaggaggccaagctcgccagagacatgccggatccgttctacaccgacaccgagatcagaggctacctctgcgatttctcttcgtggcgaggacgcatccactttgcact

SEQ ID NO: 7480 - DNA, 585 bp, Glycine max
  unsure at all n locations
tccgccctacgctccctcttcttantgtgncactactttccttttatctctcnnnnnnncaggcctggcatgaaccnttgannngcggaacatgaaaccttgaannncnanaacgataaanacatttgataccctaggattccccggtcgtcgctgagncggacatnttnttatatgtatcgtcatccaccgattgagcaatgagaaagagagctgtcgtgaatctctttactgactacctggacgaaacccttacactcgtggcttagcgacggctcatacgtgcttctcgaaaccattccttacgatattccacacattttgagcctccagaagcgccttcataatgatacctccattgttacaaccgtgctttgcgagcactagccttagggaaggacgacctcaattcgtcatacttcaacgaacacgaagctctgaccccactttgtaggaactgaggccatntatgaacatgaacagtgcccacgtaaattcgagacnttgaatagtaacacgatatgaaagggaattctttatgcagcaagaactaagcagttacttcaactaaagggaagatacacg

SEQ ID NO: 7481 - DNA, 431 bp, Glycine max
  unsure at all n locations
gcatgcaagcttagaggagcactcanaccggttgtatttacttctcaaggcctagactccaaagagtccgccaaggtctctccctcttgattaggtccaacccataaaactttntagcatgcagactctatctatgaattgtacaaaacacacgactcatcaattattctcaaaataattttaactcatcgcacctcanagtgatttaactcatcgggttcccatagtagaccttatcacaatactcgtcgtccttaaaggatcttacagtagtgtgattgtatggttcatagctcacaactcaatgcacacaacatctcaatacatctgtgatctcacaatttaacacatactcaacttatcacatacacccaatgaaattctattaatttttaaagaaaactcttcttatttatntgatcgaaaatggg

SEQ ID NO: 7482 - DNA, 387 bp, Glycine max
tgagatactatatgtgaaatgagataattgattatcccattctataattgattgtcatgtttctaacaatgcataacaaagaggaatttgaacgaattaatcgattatcccatttgtcaattgattaaatctgttttatctgttaaaactatgtataccctcacttgtccattctcattagtgactcttgatgagatcttatcttttgaaaaatactttctaagagtcatctaagggaatccctctacgtttcaataagagattcataatgatcaagattcattcattattcatcatgcgttgagcaaggaaagaaaggcttgaagatattatgatctacacattcacgtgcattcaatcttattttgattctttctagcttctgac

SEQ ID NO: 7483 - DNA, 382 bp, Glycine max
  unsure at all n locations
gtccgctgccatcttagacgacctgcaggcatgcatttcttccacatcatccaagcgaaacaacattacttctgtcaagctatcacagccaagcanaacagagcnaagcagaaactctggtaacacataaccaaattacgttttgtacttaagaccgagaacaattatcctccaatcgataccgtggatgacccaaatttacagaagcatagcgcatagctacattggaccgtgggacactacaccatcagaatatctgtctacttttcaagcaacaaccaatctttctgccaagtaaagctgtgcccatttaaagcaaagtgataggcaaatgaaaacactctttatcaagtggagaaccctaaatcaacctgaaagagtc

SEQ ID NO: 7484 - DNA, 324 bp, Glycine max
agcttgtagttatagtcagtcatattcctccattttaaatgctattatgtacactaattagaattatatataatagaatcttgattcttggaaattccataattttgaataacccatcaatatttctttttttttttatctctatcttcttattacatcatattacatattatacctatatttttctattttgtttaacacgctttctataagtattaaccagcatgctctctttaagtattaactagcatttggatgtgcacaaatatttttcctataccatattaacacactctacgaaaaagacaacggatgacttaagtg

SEQ ID NO: 7485 - DNA, 227 bp, Glycine max
ggacaagtacctaagaatatctgttccatgagattctgaagttttttcaagggtcttctcactctaacttaggcgtctaacttcaccgcctgttttcaatttatccttcaggcaaccctcgagtttcgtattatggatagtgattatgtgcttgtaatcaggtgaacacacctgatatggtttgcgggcacatctacatgcactttcatttccctcatgatgatcac

SEQ ID NO: 7486 - DNA, 212 bp, Glycine max
acccgtcacatgtgttactaggtgttgatcggacgatggcgcaaaacaactatcgacatccacaaatcacgcatgaacgcaccatccctagctgcccacccttaactgagctcacgtactcccacgttgcccttatcctcattcctttaacaccagagccgcatcaagctctgcaagcaatacaacatccaaacatcatgaactatcagaac

SEQ ID NO: 7487 - DNA, 286 bp, Glycine max
tgtggcagggcggacttccttcactttcttgtcttctacgcgagctctgaccactgttcttccttcccgcgatgcttatttcatgtccgcctgagtgggcttatagcctataccatactttccacgatttccttgtgtatttatcaagctaaatatgccgccgctgtttttcgctaaacccatcccgggttcataaccgctccccaacataactcgggccatcattaccgctgcatcggacagacaaggctgtccatatatggagttcacggacgaaatgctgacc

SEQ ID NO: 7488 - DNA, 432 bp, Glycine max
  unsure at all n locations
cttgcagcttgtccttatggttattaatgtatgaattgttgcttttgcacctcttccttgttttgttatatatctgtttgcattcgggattccaattttcatcaacagtggttaccctactcctcacgtgaagtggaacttgtgggttatccacaagctgctgcttaccctagtttatggtntcatactgttcatgtatcattctaggtggagagaaaggttacctggttagtgtcctggattgttatattattttatctttaattagttttatgatagcatagtttatcttcctcttttngcagcaaggcctgcttactataagtatgttaccattatgttcatcttgaatgcaattgcgctgtttgctcgcggcattactggaaacggtgctgctttcggattctggttagattcttctattctatatct

SEQ ID NO: 7489 - DNA, 416 bp, Glycine max
cgtaattataagagttcaatggtcatactctattagtaccaatttattgtataatatactattggattagaaatctatcttttaaagtaattacgtttaattgctaatttggtccttatacttgcacacgatctttacatattagtctctacacctagaagctacttgttttcgtccgcatgcaacactttttaattcattttagtacatactatcctgaacggtaggtactacaagagattaaaaagtgtatgtgtagacactaaaaccaataatttctagcgtaaaacatgaaaattgtgtgttataaagatcaaataagttattaaagcttgtcattatcacagaagttaacacttttaccatatatcatgacaatttatgatcgaacgacaatataacaacccttatactat

SEQ ID NO: 7490 - DNA, 385 bp, Glycine max
  unsure at all n locations
gcttctaaagatacagattgtaganaatagaaactgaaacctctcccccatgacaattacttctgtttctaaagcaatgccaggaatttagagaanaatgaattggaatacactggcattatatatcaaacagaaggagaaaaaagatcttanttagcatagatgactcaattgtttacatcagcagccaataggaaaaacaagcgatgtcttggttgctgacaagataagatgagcatcaatcacggtagaaagcaaaacaagcaagcaaaagtgcaaaactattatgactatcctgaaaaaagatgcaaaattaccccctcccccaatctctttaactatagcagagattgaaataggagaaacaattactaacctcttgtca

SEQ ID NO: 7491 - DNA, 442 bp, Glycine max
  unsure at all n locations
nggacagttctcaccttgcaagccagtttcgtgggactgagttatgccctaagcccaaatactaataagtacaactacttcatggttacccatccaaacatcccttttgtagggaaggtgggttagtcaactcttgtattctgcatgtgaaagtcattaagatgttgtgatttgtatcctaaagtatgttaaacgagctcctaaaaaaagcttatgtatgaagatcagggacgagcatagataataagatactcataaatgccaatcaggcatgctctcctacttacaaacaatcccttttttgggaattgtgtactcattangggtaatatgatagccaggaagaataagaaacaaaaacaaggtcacaagatccagtgcaaaagcagactggcaaatcatggcttcatctacttgctagctcattngaatgaaacaactt

SEQ ID NO: 7492 - DNA, 293 bp, Glycine max
  unsure at all n locations
gaattttttctggctattttcttgaagtttgncggaccttaataaaggtatattatgtgcatgttataaatgatgcgacttggccttgggtgaactacaagcattatcgattaacattagctattacgttcctcatttttctataatatacgatgatcagagtttgggtgagaatatgatgaactacaagcatttaccacctgctactatttcatatcagcttcttaaacagctacttcatattttttatttggatattcttctgtccccacacctgttgataaaatgaaatt

SEQ ID NO: 7493 - DNA, 268 bp, Glycine max
  unsure at all n locations
atcaataagcccattntaatttatgaaaaacaaatatttcattttctatcgtatatatatttataaaaatctactccgatgatatcataattaccagaaccatgataatgatggtgatgacgacaacaacaacgacaatcataattatggacgacaatagtgatgaagacaacaattataacaaggatgacaatcatgatggtgtaatagcgatggcgatcacgataacagtgacagtgactatccttgtggtggtggcggtgatgat

SEQ ID NO: 7494 - DNA, 396 bp, Glycine max
catgcaagcttgaaagtaagggtgatggctattgttgttgtggattatgctggggtgtgttagtacttctgttccactaatttggagtgcttattgtttcactcaccttttgtgtatatactataatatactatatagcacttcagctcctcttacgcatatctatcggtttgatttaaagttttaaacattattaagttattaatcaaactcatagaatgtgcccttttcttcattcccacagctaaagtcgtggttgaacttgcaaaatccagactaatccaagctgccgcgctattacatccatcgattggctctgtggatgatatcaatggtatgaattctcaatatttatgttatttcctacatttcatattggttcacagaatattactt

SEQ ID NO: 7495 - DNA, 450 bp, Glycine max
  unsure at all n locations
tcacacataatgaattcggtcctatccaactaanataatatatataatacaaataagaaataaaagtctatgatcagcagctaactttgatctcactcaacaagacaattatctctttaaaaatgtccgtagtatttgcttaactgcgactatccaattcaacccaatcaaacataattgaattgggctgcatatcaagattaaactcaagtcaacttgaactacttaccccgataatggttaaccttttttcacagcttcatttttctctgctccaaaagacaacaaatattaaccagctcaaaaaacgaaatccggccaacttggaaatgccacagatgtctgacacttctcacatgttctccacgtattccgcattcgtagctgagcgaccaattacaatacaatagatgtcaattttatcatcagnagcaacacacttaaagagag

SEQ ID NO: 7496 - DNA, 430 bp, Glycine max
  unsure at all n locations
cggcatgcaagcttgtaaatatgtaacaagggtactaggaactnctcntcacagagtgaagcgagagataacttttgtcatcatgctgataaatcccttattgagtatgctttgattcgtctggcggccgatgattatcaattcggaatttaagagtgacgttctctattatatcaataagagaacgcccttgtttgtttttctgacgccactccgtctcatatacagtatcgatatacaactatgcttacgttggttgtgtgcacggctacacggacatatggtgttacaagttgacagttagatattctctgcgaaccaattgtattgtatgtaagatttttgcttggtcttattcttcttgcacacttgcttctctttgctcgctgcactgttcctcctattctgatcagactttcttgtttttccg

SEQ ID NO: 7497 - DNA, 586 bp, Glycine max
  unsure at all n locations
tctctccctctcaccttcatgccacnttcancttcanttcatctnnngttttctnnnnnnnnncnnaagggacgcgattgacnccctttgcatcnacgtgacacttgagatcatttcaactncnacacgcttcaccttgccaggcatttctcaggagactgattttatttcctacactccaatacttatatatacaactactccgatggtgaccgatcatccttcctttgatggaggtgggatacttactctcgcattctgcttgctgaaaacacattaggaaggtgcgaccagcatgctaaaccatgttaaacgatctcctatgataacgctatgtttgactatcaccgcctagcatatacaataacatacctcatacatgccaatcagggctggctctctacttaccaacaatacctatttttggaattgtgtactcaatacggggaacatgatcgccacgacaaatataaaccaacccacgtccaagatccagtgctaagcagactgccaaacatggtttatcacttgttactcaatgaaagaacacctttggacacgtcattcagaagcttgtaaatgcccg

SEQ ID NO: 7498 - DNA, 358 bp, Glycine max
catgcaagcttctcggctcatactgggaatacctctagttatcacccgagcaacctaaggcacccacccagagggaagctccccaagttccaactccgaacacgactcgaccggccggtaattccaacacgacgaggaacttccctccgaggccatttccagaattcaccccactcccaatgacgtacgaagatcttctgccatccctcatcgccaatcatttggccgaggtaactcgaaccccctttcccgaagtggtatgaccctaacgcaacttgcaagtaccatgggggtgtccacgggcattccgtcgaaaaatgcttggcctttaatacatggcccacacttaatggatgct

SEQ ID NO: 7499 - DNA, 216 bp, Glycine max
agcttgttggcataaactttggtgacgaaagactattaaattgtaaccgacacgctcgaagaggtaccacaatgcggtggcataaacgagcaccgcaaccgcttccacgccaattattcacaacaccacattatattagcaactaagcctttgccgagaacacgatgaaaggatgagatacttaggttatgccaagattgtcagaagaatgatgaa

SEQ ID NO: 7500 - DNA, 380 bp, Glycine max
tgtctcagtgtttatgcgagacggagaccaacatgctagctatcatcgctaagtaccaagaagagttaggtctagccacgacccacgagcatagaatcgcggacgagtatgctcaagtatacgcggaaaaagaggctagaggaagggtgatcgactctttacaccaagaggcagccatgtggatggatcggttcgctcttaccttgaacgggagtcaagaactctcccgcttgttagccaaggccaaggcgatggcagacacctactcctgccccgaagagattcatgggctcctcggctattgtcagcatatgatagacttaatggcccacataattagaaatcgttaggaaacttgtatggtctctcagaccttgact

SEQ ID NO: 7501 - DNA, 382 bp, Glycine max
acactgtgttcatgctctcccaacagcacatgtatactcacgatcccaatcagacactatgctagatggcacaccatgtaatccgacaatatcactactatacacggaggccaacttctccacggaaaatatgacactaatgggaataaagtgagcagacttggccagcctgtcaacaataacctatataaatcaaaccttttgggtttaggtaggcctacaacaaaatccatacaaatattcgccctcttccactggggtatctacaagggttgaacttccctaaagtctctggcgtttcatcttacccttctgacagactaaacatgcatacataaactcactaacctctctcttcatgttaagaccttacaacaggatc

SEQ ID NO: 7502 - DNA, 384 bp, Glycine max
  unsure at all n locations
ggacaactccaagacccagttggacttcttcgggtccactatgtgtcttgcaaatgcgatccctgcaaacaatagatgaaatcagaaattagttgagcgatgtgcatacttacctatgtcatgatgacgtgaccttgccgaggggaaacgggcaccctgtaggactacagaggcccgtaaccagagctggaaaccctatggccctgttggacttctccgggtccactgggtgtctttgtgggtgcgattcctgcaaataatagatggtatcagaaatcagttgaaccaccatatgtatacttacctatgtctcgatggcatgacctcactgngggaacgggcaccctgtaagattgacagaggcccgtaaccagagctggaaac

SEQ ID NO: 7503 - DNA, 377 bp, Glycine max
  unsure at all n locations
agcttctagccaaatggacttaccttgaattaattcctttgatatcccttttgagccttgtttccctttccttgttntgaagctcactacaagccttaagtgaaaaaccatgatattaccatatccttaaggaattntggagctttggaattgttttgggaataagtgtggggggtttttgtttcattggacaacttgttttgttgactatgcttcatgatgtattttgngccatacttgatgtacattgtatanttggtaaatgttggacatgctgaatgaaatgttgtttctcanaggctagtttaaacaacaataaaaaaaaaaaatttcgaaaaaaaaaaaaaattcgaaaaaaaaagcaatagagtgagtga

SEQ ID NO: 7504 - DNA, 358 bp, Glycine max
ttaagatgagaagtcatcgcttagcaacacacactccctataatagctaagctcacccctatgccagaatacatgaaaatacaaaaaaaaagtccctactacaaagactactcaagatgtgctggaagacaaggcaaaaccgtatactactagaatggccaaaatacaacgcccaaaagaaggaaaaacctattctaatatttacaaagaagagtggacccacccttggcccatgggctcagaaatctaccctgaggttcatgagaactctagggccttttttagcagctctagttcaatcctcttggagtcttttatccaataccctcgcgagtaggattgcatcaggtatattgca

SEQ ID NO: 7505 - DNA, 126 bp, Glycine max
atagatgttatcgactggtgtgaggtgagagtttgtctcaaatttacctcattctaaatgtcactctttaaacctagaaaacccattcgattgacgggtgtcggacacctatattctgtgttgccg

SEQ ID NO: 7506 - DNA, 267 bp, Glycine max
actttcacaatgaaagattagccaaaggaagacaccacaagggtgatggataacccctaataagtccgaacgggttcaaccttcgacctagagaatactctcacaatacacaagtatttgtttgaaaattcaagttattttattccatggtaatttcgtgtacatataggcaaccaacctttaattattctaaatgcattttaattcatgaaaagacaccaaggctatcgatcactaatataaataaataaaacaaatacaacttta

SEQ ID NO: 7507 - DNA, 461 bp, Glycine max
  unsure at all n locations
tgtaggattatggngtatccatcacatgtggtactaggtggtggtcgggcgagggtgcacaacaattctccacatccacaaatcacgtataacccaccatcccctgttgcccacctccaactgagctcacgtactcccacgtagcccttatccccgttcctctcaacgtcgggtccccatcaatcctcccaagcttccacaacatccaggtaattccacatccaatcatcatggactaacaaaaccaagcaaaacagagcanaggcagaaaactctgcccaaaacacaactcanaatcacagcttttcacatacaaataccctagtaacatttccttcattccaattcgctaaccgttggatcgactcgaanatgttactggaagtctctagtacataagtctacattntgaccgttgggatctgctaacaaacatccagaactcattctgtactactctt

SEQ ID NO: 7508 - DNA, 337 bp, Glycine max
catgcaagctgtatcaccatcacttagactttgatacatttttaataatgacacgtaattcgcctcacacaatgcatgggtgttcctcctacgaccatagcaaaccactaatcacactaagagtactaaactgactaagacgtggtcttagaagaatcgatactctcctcctcaaacatatactccaactaccttagaagtatctggtactcctcgaactcctcggacgacatgtctgcatggtctccttgatctgttataacctctattacgtgcacttgctccatgttgtatcgacaaacgttgccccgcccatcatactccattggagtcaata

SEQ ID NO: 7509 - DNA, 302 bp, Glycine max
aagctctctattgatatctattcaaggaagctacttattctataaatagaagcatgtgtaacactggttgtaactttgacgaatgagagtcttgagagatacaactcaaaggtcaagatactctacctttctgcatgcttcaatatcgtgcgcccccctaactgtttatctcacgtctctttttcctccattgagagcaccctgtccaagcatcttatccaaagatcatcttggtggtgaagctccttcttctcatggcttattccctaacggatggtgacatctatcacctcgtctacttt

SEQ ID NO: 7510 - DNA, 62 bp, Glycine max
  unsure at all n locations
tatgcttgcttccatactgcatacattctatntttattgttcgcatgtgatgatcattcatg

SEQ ID NO: 7511 - DNA, 544 bp, Glycine max
  unsure at all n locations
gactctgatactccttactcaagaagcgcacccttcancatnttatcacantgcgcagctttaaactctcttaatgtgtgtgatttgacactccctcgggcagtagtccattcctgatggcatatccacctcctcggatgaattctgcaatgtcctcaaaagatgagacactagcaagctctcttgagactcgagatgtccttttgatgcatnttcccttacttgaccacttttgagctagtatgataaatacttcgatccttcctctgtgctttgtgaaaatgaaagaaaaaaagagaaagaatgtttttcctgttgtgtagtaattaatccacctccatctatcagaaataaaataaaatacaaagggttgcgataaagatgagacaaaatttggatagctgcctataagaaatagccacccctcctactcacaatggaaacggtgaattatttaatggatggcgaatggaagacccctcctcacattttaatggagaccctgtgtcctgttttatttctcctacatctccctccaccttct

SEQ ID NO: 7512 - DNA, 250 bp, Glycine max
  unsure at all n locations
gcatctatcatacttctctccatattactgagtccttcataaaaatgttggagaagaagctgttctgaaatctgatggtgagggcaactggcacatagtttcttaaatcgctcccagtactcatacaggctctctccactgagttgtctaatacctgagatatctttcctgatggctgtggtcctggaacanggaaaaaattttctagaatactctcttaaggtcttccagctcgtgatggccttggagc

SEQ ID NO: 7513 - DNA, 290 bp, Glycine max
  unsure at all n locations
ccgttcggtcgtgccgtaaccacgttggaaatcaaaaagaggtaaaaaataatataataatcaaaaaatatctttttagtaaaataaagcggaaaatcaatcggacgttttctctttgggatttctcattcttaatccaattgattaataactaaggtgaaactaatgcttaaatcaactcgcctagtcaagctcgtccacaaaaataggcttttgaagtatgtcatttcatttcctcactaagtanaatggatcattntaacgtccaccccttataatgatcactctta

SEQ ID NO: 7514 - DNA, 199 bp, Glycine max
  unsure at all n locations
tgatacaatgattaatacttaaatgaaaaataaacatacaactaatgccccaactgtcccatgtccatacaaatttacaacaagagacacctataggagaaaagcnaattacaacctcttccacgtgcctactatggtcgaatgatattgttatttatccatcactagcatataaatattggtaagactattcatcaag

SEQ ID NO: 7515 - DNA, 236 bp, Glycine max
caaaatgccctcctttcgcgatttggagcagaaatgagtaccaaaggttggagctttgttggggtttcaatggagaatgagggaggagaaaatggcaacgtgagagagagagagagctgtctgaaaaagtgtgggggctgagtgatgagagagaaaagctttttggttttaaataaaaggttttcctctttttttttctattatttattcaagctctgcacatgtccctattgatt

SEQ ID NO: 7516 - DNA, 260 bp, Glycine max
ttcgttaaccggtggatcgactcaaaatttactggacgtctctagtacataaatatacattttgaccgttgggatctactagcaaacatcaaaaactcattctgaattactctgtccacaaccagcaaatacatagcatgtttctgcacaaagccaaaatgctgcataagtgcagatttcgaatatcacactttccctcattcaatcttgcccaatcaaatctacgagtcccaaatatgtttaatcttgttaaaccaagc

SEQ ID NO: 7517 - DNA, 205 bp, Glycine max
  unsure at all n locations
cttgatggatcattgcatattggtggtctacaccattcaagactttccttggtgaattgattggcattcatgaagaggaatctatataaaggaaacaatcacattacatgtgtctggactgatcaaaagatttatcaaatcagatggatatagcaaaacagtgatatatgctgatattatnttagttgataaatatcaaatgctt

SEQ ID NO: 7518 - DNA, 211 bp, Glycine max
catgtgatgggtaccccataatcctacaagcttgagatgaggaagtgtagaagggtgaaacttcctgcttttattcgttaaccacaaagtggtacctgtagatatgtcgcgggggtcaggagaccttggggacgtcaggtggggtgctattgcccataaccaagcttgaccaatcccgacccaacccgggcatagtcggtctttgagacct

SEQ ID NO: 7519 - DNA, 334 bp, Glycine max
  unsure at all n locations
gaatctttcttagatattggagaaaaaagtctctntgtaatctattccttccttttgagtaaatcccttagcaacaagtcttgccttgtatctctcaatgttgcctaatgaatcccgtttggtcttaaatacccatttacatccaatgtcctttgccccattangcatctctacaaggttccaaaatttgttactgtacatggaattcatctcatccttcatggcatcataccataaatntgactctttacaactcatggctngatcaaaagtntaggatcattttcagttacaatatatagtcagattcttacaaatatacaatataatcact

SEQ ID NO: 7520 - DNA, 156 bp, Glycine max
ttgggtggcgttttggagaagaggagagtgaacaattgtgtttttctcgttgaggaacgtatttataatctacagatctcgcttagtgatctcgtcttgctaagcaggagtccacttttctcgctcagcgtgcaaattctcgctcagtgcaacttc

SEQ ID NO: 7521 - DNA, 268 bp, Glycine max
gggcggagtaggtgtctgccatcgccttggccttggctaacaatcggggaagttcttgactcccgttcaaggtaagagcaaaccgatccatccacatggttgcctcttggtgtaaagagtcgatcacccttcctctagcctctttttccgcatatacttgggcatactcatccgcgattctatgctcgtggaccgtggctagacccaactcttcttggtacttggcgatgatagctaacatgttggtttctgtctcgcatagatgctg

SEQ ID NO: 7522 - DNA, 216 bp, Glycine max
cagctaagcgcgtgctcctctatacttaagatgcatcattttagctaagctggccagggccaggcttagcgagagttgaagcttttctaatctgcaggtctcactaagcagacatactctcgcgctaagtcgagtttctgttcaaaaaaaaaaattggtttcaagtttgaaacgtcggctaagcgcacgtgttcactaagcgagcctagttgagaa

SEQ ID NO: 7523 - DNA, 211 bp, Glycine max
aaaatctgaagatgaaggaggaagagtgtattcatgacttccacatgaacattcttgagattgccaatgcttgcactgccttgggagagaggataacagatgataagctggtgagaaagatcctcagatccttgcctaagagatttgacatgaaagtcactgcaatagaggaggcccaagacatttgcaacatgagagtggatgaactcat

SEQ ID NO: 7524 - DNA, 89 bp, Glycine max
ttcaactacttgatacctttcacgtctatcccttttaacttctttctggccttcaacgcctatcctttactcctaccccgacacgttca

SEQ ID NO: 7525 - DNA, 200 bp, Glycine max
  unsure at all n locations
acatgaaggtaagctgcatgcatgtgttcagaggagtgcttttttctatccgaaccatcaaatcgtaacgtgcatctttaattgtccaacttaatgtcttgaatgcttcataggtgctagattaggtactcttgtcataactgctttaaatnttgatttgctggaacttcacaataatctgttgcattcttggggaaaga

SEQ ID NO: 7526 - DNA, 248 bp, Glycine max
  unsure at all n locations
aaagatgaattcaagattcaagagaagaaatcaagaagacttcacaagggaagtattgaaaagatttttcaaaaaacaaacatagcacagttttgtttttcaaaagagtttttctcaaaattttctaagttaccagagtttttactctctggtatccgattaccagtggcaaagtttgatttcaaaagttntcaactgaatntgcaacattccaattgatttcaaaatggtgtaatcgattacaagat

SEQ ID NO: 7527 - DNA, 156 bp, Glycine max
  unsure at all n locations
tgggtctgtagtcatcaaatgactggggatgtttaattttgggaatgagagctatgaaggaagcattactgcctctagggaaactgccatgtacatggaattcatcaacaaatcttctgaagtcagctntcagcatatcccanaattctttaatga

SEQ ID NO: 7528 - DNA, 357 bp, Glycine max
  unsure at all n locations
aacaatatttgggtgttcttatatttagggatagtctaagggttgtgccaggagtggccttaagaatatttgtaaactagaagtggtaggaaagaatacttgttgtaatcaagtttgattagtggaaccctctactggtaggtaaaggagaactagacgtagcttaggttgagtgaaccagtataaaatgaagtattgttgctgctattcattagcttattaaagtatttcattgtccattactatngcactttgcacacaaggtttttactgaaagacaagtntgcacctcattggacacagtccaccttttgtcactgacgagggttttataacttgttattatacatcttcatt

SEQ ID NO: 7529 - DNA, 253 bp, Glycine max
  unsure at all n locations
tcgattaccaagtgacaanggtttgaacaaacaatcaaaaagatgtgaactcttccaatggttntcagtttttctaaaggttataactcttctaatggctttcttgaccagacttgaagagtctataaaagcaagaccttgacttgcatnttgaaaaaaattcattacaatctttgacaacctttacaaacaactctttcacatacatctttacaacctttgaatctctttgaacttcttcttcttcttcttc

SEQ ID NO: 7530 - DNA, 284 bp, Glycine max
  unsure at all n locations
cagcatgagctagaaccaggaaatgatcactcatatgaagccaccatcgctggagctgttgattgtaaaaaaagaagattagagacgagatccaatgaggttgctcatcatggaccagtgccagcgtcagctgatgcactagttccaggagtggatccatcttcacctcagcacgcagcagactcttccattcctgttttagagatacatgagggccagaccataccagttctgcctttggacactnttccttcagctactccagtatgacatctaacagatga

SEQ ID NO: 7531 - DNA, 197 bp, Glycine max
  unsure at all n locations
ccattcttgctttccaggaattcatagttggntccatctaggattggtggtctgttcactggtcctccttctttctccatgttcatcagaatttatctccctagatctcactctgtgatttcgagtgttggctctgataccaattgaaattctgataccaggggacagatgtcgtaccggatgtcacgacatcacgc

SEQ ID NO: 7532 - DNA, 107 bp, Glycine max
tctactttatcatactttacacgcttgccattatgacattttaagcattgtgaaacgatttaaagtacaatctctctacgtttgctccaacttaaaagaaaagaagg

SEQ ID NO: 7533 - DNA, 490 bp, Glycine max
tttatgggatcttttatgcgtctgagctcattgagatctcgtttttgttggactcaaatgaatgagagggactcttattttaacattaggtgtaacacaactggttttgaatgtgggtcaaatcacctttgctctatagtggccaaaatattaggccaaggtctttgggaggttggtttatccctacatataagatgttttacgaatgtgtattacttgactttaaaatttgaatatattatttctcttcctcgaaacgacttattctcttagccctccacctattagtaaggtttgttacctttatatatcttctttcttataatctctagcttccatttctagtaatgtccctcattttctggatgtttacatttcttacttttctttttgctagttcgttatgctaattgacgcactgtctctggcgcataagcatgtatcgttacctatctattgtactctatatatctagataaccacttctacc

SEQ ID NO: 7534 - DNA, 235 bp, Glycine max
ttatgacacatacgtatttgcacacataaaaattttgtgtgaaacattttacaacacctattcatgtacatatttttttgaccaaacctttcaatgctacattctatatatatacacacattctttggaaggctttttttagtacctactcacaaatacacatattttgaaaacactcttacgctacccatccaaactttgtaaggcacttcacgctatatatattcatatatgc

SEQ ID NO: 7535 - DNA, 182 bp, Glycine max
gtggctggacaactaccaagcagaagcgagacttggaggacaccaagaggagcaacataggaatcacaatgcagaaaaagaagagacagagtagacgatagaggaagatagagacacatccatccaagatatgatcgacaacctccacaagaacaagaacccgcccagcaaataaaatgggt

SEQ ID NO: 7536 - DNA, 229 bp, Glycine max
cattgtttcagaataccacataggcctaaggccatcccctacaacccctcaactctaacaaatcaagcataaaaaacctcaaaactgccccacaaatatgagcacattctcacaatttagagcaccaaaagatgaacaaaatgcaccaatggaaaagctaaaaacttcaggattgaatacttacttcgtggagtgagtaggaatacgaacaatgaaaacaaaatgcgac

SEQ ID NO: 7537 - DNA, 312 bp, Glycine max
atatgcactaatgattgattgaaatccaataagactcaatcaaagcctaataccactttagtgtaattaaaacccaataagacccactatatgactttagtgtaacatattcatatgcaatactgatggcccaatcaaggctcaatatcactttagtgtaacatatgcactaatgattcattgaaacccaataaagcccaatcaaggactaatatatgactttaggccaaaaaaatacaataaccaaagcttaccattaattaaaagtactagtgcctgtcacatttgtgcacatttaaacacttgtttttt

SEQ ID NO: 7538 - DNA, 181 bp, Glycine max
  unsure at all n locations
acttttggcactttatgacttagcctctttttcacctgaaattgcacatatttcatcattaaatccaatgtacatattctagagatagctttctccataaaacaggaattatctacacaattcactacaaaataaccactaaatggagaactatacaaggtntggaaaatgttttctatac

SEQ ID NO: 7539 - DNA, 158 bp, Glycine max
tttaaacattatggacttgtcatggaatttctacttatcgagagcgaattaattgtagaagacacttactgtctatatcacgtgaattataatagaaagttctgcttacataagttctaaccacattcaaagtaaaaaacaatttctattatagctat

SEQ ID NO: 7540 - DNA, 302 bp, Glycine max
  unsure at all n locations
tcttttctcttaacaccgggtccccatcaatcctcccaagctttcccaacatcaaagtaaaacgacattcaaacagcacaagctattcacagtcaagcaaaacagagcaaaggcagaaaactctgtcataacaccaaccaaatcacagcttttctcacttaaagactccaataacaatgccttcgttccggttcattaaccgttggatcgactcgaaaatttactggaagctttagtacataagcctacattntgaccgtgggtctactagaaacatcagaactctttaaatactctttccc

SEQ ID NO: 7541 - DNA, 276 bp, Glycine max
ataaataagataagggaagagagaatgcaaacaccaatttatactggttcagccacttcccgtgcctacatccagtactcaagcaacccacttgagatttccactatctttgtaaaatcctttacaaagtctgaaccacacagggacaacccgtctcttgtgttcagatgctttacaacaagagacttacagtctcttaaccaatctcattgaataagaagaatggaagaagaattctcttcttcagagaagaatattacaatgaagatcatgtaa

SEQ ID NO: 7542 - DNA, 169 bp, Glycine max
ccttgggaacttatcaggctagttatgccgccgttggtcttgcctaaacccatcccgggttataaccgttctccaacataacccgggccatctataccgctgaattcggacagacaaggctgcccaaagagggagtctcacggggagatgctgaccacctcaaaagact

SEQ ID NO: 7543 - DNA, 236 bp, Glycine max
gtggtttgtgtgacatgggaatgcttgatgaggctagtaagtatgtggaggaaatgttgtccatagatttttctcctcattctgctgttgttcacgccttggtgaaggggttttgcaatgttggtagggtagaggatgcttgtggagtcctcaccaaggcactagagcatggggaagctcctcaatcggatacttggatggccataatgcctgtaatatgtgaagaggatgatgat

SEQ ID NO: 7544 - DNA, 362 bp, Glycine max
atttcctggtgcttggatgagcatattccttatgcgtcattcataggcatcttctctaatatataaaaattaaaaattaaaaataaattggtctatctcataattttgcagacctatgatgttaaggtaatgttctcgcgcaatgcattactggtggacattgttggtgagagtatcggtcgagtattgaaactagattcaattcaagcttggccaacatggaaaggaatagatgtaatgatatttgattcttgcattggtggatcacacaggaagaaaacaccgtatgtactcattataactagttcactttcacatattccatgcaatcattatacactttttcatattttttttttata

SEQ ID NO: 7545 - DNA, 327 bp, Glycine max
aaatgaagaccagtaaagtatatagaaaatatgtataaaggaacaaaactagaaattgtgaatcaaaatattgaccacctccattgctacttcgtgcattgataaatatgtatttatgtattagtaaagcatactacattgatgttagacaacttatccattctaattgaaaatgttctttcaatttatctcagcctgatatgccttattatttaattataacgaatctgatctcttatatatattaaattaaaatatatattgccctctgacaattttaataacatctattaccctctaaaaataaaattccacttgattattttt

SEQ ID NO: 7546 - DNA, 222 bp, Glycine max
aggcaaccatgtggatggatcggtttgctcttaccttgaacgggagtcaaaaacttccccgattgttaaccaaggccaaggcgatggcagacacctactccgcccccgaagagattcatgggcttctcggctattgtcagcatatgatagacttaatggcccacataattagaaatcgttaggaaacttgtgtggtctctcagaccttgactagatatgact

SEQ ID NO: 7547 - DNA, 163 bp, Glycine max
aaagacgaaccagaagcttgcggaagaagaagaaacgcctcgcggatggatgctcaactcgcggaagaagggaagggaatgcgcacaagaagaaaaggctgggtgcacaaaaatgtttaaaaactaacaagggtatttctgccttttcccgtttagtgttggg

SEQ ID NO: 7548 - DNA, 258 bp, Glycine max
ctgtgatcgtatccccatattagctagatcttgacgggtattcaagtcatccttcctcttgccttgaatgttaaggagcatcccaatcacactgtcacaaacatttgtctccacatgcgtaacattcattcaatgtctaacgtctagattagaccagtctggaagatcaaagaaaatggacctctgcttcatatgcaactcttacttttatccttctttgggtctttccaatacagaatcaagtgttgaaccgctgat

SEQ ID NO: 7549 - DNA, 165 bp, Glycine max
caaaccttcctcatatgcaaggctcatgcaactttcattcatccaacttcgatccatctaaataataactctgggatactcgcaaaattatttgatgcatgaaaatctcactttttcattataggtgtggccctatcccattcatgaagacattttttatggtag

SEQ ID NO: 7550 - DNA, 595 bp, Glycine max
  unsure at all n locations
tgtaatattcatagtaatcaagaaaatgacgttgggggggtcaatatccaaaccaattattatattatcttcaaatccagaatattccacctccatataccatattgctntgtatctggatagctcaacaagcataccttgtgcttagcttcaaatcatatgttgtctaaccacatgggattgtaacacccttctcaaatcaaaggaatttcaactccctttcatttttatattcatagtcacccaagggatcaatgagtgattaatacgaattgaattacactacctctaataaataaaaaaataaaatcatgatctctttgtctatgaggtgggatccgacaaatgaaatcatcactgtgatcctcacctaactacaacagaacatgaaccattcgctcttagatcaaacatatatcgtattcacatcctgttaacttactataaaaaacatttattaccaactacgtcgcaattcgctaccattataatattataatcatatccacattaattctaatcatatctgttgtacacatgctataataacgccaacaatacaacgacatccgtattattatacgtttatcagccc

SEQ ID NO: 7551 - DNA, 115 bp, Glycine max
gctttgtcatgaggccagtcctgaccaatcattacagagaatccaatgtcagagccaaatgaaagattatctttcaattttgattctcttgtcacgggtaaatgcacgtcgctga

SEQ ID NO: 7552 - DNA, 139 bp, Glycine max
gttagatacaaattatggaattgatgaaacagaatcaatactctcgttttctgaaaccctcaaaggtcttatgaagctcatatgttaacccccaatgttgatatattatgaaagactataacatatgattctccccccc

SEQ ID NO: 7553 - DNA, 61 bp, Glycine max
gctggctgtgacaagggtaatacatgtggggttctggacattttttagaggatgccatctt

SEQ ID NO: 7554 - DNA, 220 bp, Glycine max
caaagaatcaaagtttcaagattcaagttccgtgaatcaagatcaagattcaagactcaagattcaagaatcaagagaagactcaatcaagataagtatcaaaatgtttttttcaaaaactaagtagcacatgaatttttcacaaaaccttttaccaaagagtttttactctctagtaatcgattaccagattattataattgattaccagtagcaaaat

SEQ ID NO: 7555 - DNA, 534 bp, Glycine max
  unsure at all n locations
gtcacctatgtgtatagaatctttcccttaaaacgccctatgttttttatccccctccccttgaaatttcttcatctaacgagacgactttgccacacttttattacttacactcaacaagagaaatcgacctattatctccccaattggttgcccctcccactttgggataagtgtgatgaaagatgagttgcatcctatngaaaaaccccatatctatggaatcattcaaaaatctcaaaccatcccttgtatgtcttccaaaaggattttatgaaataatattatactattggaccttgctctttgagctccacacttcccacggcttcttacttcttacaccaacttgactaaaacctattttcatgtgaattgatgactgacccatccaaaccactatcatattttatgttcggcccatagcagagcttgacccaatgtcatatctcaatttcttcagactattggcctttcgccaggtctctcttattcacaaaatttattctattttccttcatgggttacaggatg

SEQ ID NO: 7556 - DNA, 236 bp, Glycine max
  unsure at all n locations
aaactaacccaaggcaacaagggggttgaggattatttcaaggaaatggatgtgctcatgattcaagcaaagattgaagaagatgaggaggtaactatggctcgatttcttaatggtttgactaatgatatccgtgatattgttgatctgcaggagtttgttgaaatggattatntgcttcacaaagcaatccaagttgagcaacattaataaggaaggagtggcttaagagttta

SEQ ID NO: 7557 - DNA, 465 bp, Glycine max
ttaaaagatagaataacctgaaattccctttcaaagaatgggagaaacgtttaaatcagatgaagaaagggaagaaagttcccgctctaagaaaaccaaaaaatttgcggaaagatctttggaccggaccattcctaacatacaaattggttccaatgaacaaagaaagaaaggaaccctgacctaaagtggcttatcctttgattccatcaaattttggtgtacgacttttccccgcctttcaaaacagaataggtaggcctcagtaatttaaagccaaaccccttagccaaaccctaaaaaccttccaagatgcttgatctgaccctgattttgatgaagaaattgaagcatatacattttggtaaatagtaaactctgcaaatgactttagattttttttcaccgtgtctatggcttaacaggtatcaactctagggggttttgaattttctgagatttttt

SEQ ID NO: 7558 - DNA, 305 bp, Glycine max
gacagtatgagagatctaaacaggtgacattaaacctgaaccactagaatataaggtatctagattttttttttcttctcggtccttgttacttttctaaaattctaaaaatcaatacttcaaaccaatttaatataattatcatagtaaatactaaataaccattagatgaagatattcaatttagtacatatgtcgttcaactacatttaaacccatattggatacttttattaacctttatagttttttaaagatacataatagtttcacattgaactaaaccaagttgaaatcattttaat

SEQ ID NO: 7559 - DNA, 167 bp, Glycine max
accttcttctactttcgtcttcttattgctaccattaacatctcgacatattgacaatacattgaaatgatagtttggatctatgccagacatatcgactaacaaccatgcaaatagattagcattatcattcaatactcgaactacaagtgattgctcaatttctt

SEQ ID NO: 7560 - DNA, 113 bp, Glycine max
gttttagtgcgtgaggggatgaagtaattcaggtttttaatttatcaacaacataacatcagttttttaaaaataaccgatgttgacctaagtagttaacatcggttttcaaa

SEQ ID NO: 7561 - DNA, 261 bp, Glycine max
cccattttaacacttgcttgaagaacaacttacattctagcctatgaacagcacattaaatatttgtacttaccaaaacttgcatttgtggtagctggaatatctgtcaccatcctgccaatgttaaagagagaagattgattacaaacgaatttattttaggtagccagtccaaaatatttataaatttgagcacatttatatacttattaggtttagctctacagcttatataactttaatacaattacatcatatttt

SEQ ID NO: 7562 - DNA, 257 bp, Glycine max
tgttctcctctatatacctttgtaaggctgttcaacgagcttgaatgctttgatttccatacagcaagtgatgcagaaattcatgacctgcagatacaacattggttgaaattatgacataaaaaacgatgtcaatataaacaagcaaatagacctaatgatccacatactacattgtttagcataatcaaatttgtgaataagcacactctcaaatcacactctttatttgtagctgaaatttatagaaatcacat

SEQ ID NO: 7563 - DNA, 206 bp, Glycine max
  unsure at all n locations
tcagttagactgtaactgtactgacggcagagtcagtagtctttaaatggcctctcaatagtttttctagttctaagctcatttgtaatcaataaacaagaaattatttctctctttactgttctcttcctactacatttgtaatatggtatcaagaatgtaaaatgagagaagctgangggatattggactgaanatcatgtgtc

SEQ ID NO: 7564 - DNA, 227 bp, Glycine max
  unsure at all n locations
cacttattntaacctgcaatagcaaattacatttaaaaagaactatccctaaccaaagtttcttctaacttgatagttagcaaacatattcatagctaatgtatctcgaaatctttgccattactcagtagcttgaatagttgtgatatcatctatgacattatcttgaactccttcccttgattgatggactaaactctcattaacaacagataagaatttaagtc

SEQ ID NO: 7565 - DNA, 191 bp, Glycine max
acttcttcaagcttttccttgagcttcaagctttaaccttaggttgttcaccatgttgttcatgttggttcccctatctctaaagatcttcccatctttggtttgatgatgcaaacatgatcctagtttatcctgaaatttttaacacttagagagatagatatcatcatcatggtcatatatattatatt

SEQ ID NO: 7566 - DNA, 275 bp, Glycine max
agcttatgcattaggtagattcagctttgggagaagttactcatgagaaattttataataattcaagggtataagtataagttgcataagaaggttttagcctacgagaggacattaattaccaactcattttcttctactatagggcttattgtcgtagacatttacagcatgaatacattgaatacttttagttggattattataacattttcacttctatctttaaattttatgcaatatataactggcaatcaataatatatgatgggtct

SEQ ID NO: 7567 - DNA, 224 bp, Glycine max
aaccccccgatgtccaggaagatcatatctttctaaagggctttcctcattctttggagggagtggcgaaagattgactgtactaccttgctcccaggaccattaccaactgggatgaccctaagagggtgttcttggagaaattcttccctgcatctaagaccattgtcatcagaaaagatatttcaagcctcaggccagtggagagagcttgtatgagttct

SEQ ID NO: 7568 - DNA, 170 bp, Glycine max
atggcaatgaaggggctacatggcttttttttaccccacttgcattatataaattctagagacatatgcaataattgcacattggtgaacacatcatactgcaattcctcaaagctttctatatatcatggcaaaacaaaaacacgctttctcagaagctgccagaaaaa

SEQ ID NO: 7569 - DNA, 154 bp, Glycine max
acctatttggtgtatgtatttgggaaatttcattcataatagttctttgctaaatgcaatcatgttagattgtaaagcaaaaggaaagaaaacattattagaaaaataataaagtaagctaaagacaagtggatagatcggattttgaatgaat

SEQ ID NO: 7570 - DNA, 331 bp, Glycine max
  unsure at all n locations
caatatgattcaaagatagatcttctaagagtcttaggaagaaaatttaagctgaaacagcaagaggtttggccaaagaatctaagataaaatggtttacaagagatatactctctgggtatcgattaccagaggatgtaattgattaccaatggccaaaatgcttcctgaaatgattttaaaatgtcttgaatactcttgaaacatgtaatcgatacacatgtctggatcganaccacagttgaactatttataaacctattagatattgaattcaatttacaaatggatcgttacctcgatggtatcgatacagtagtttgaccgttat

SEQ ID NO: 7571 - DNA, 189 bp, Glycine max
tgcacactttttgaagctgaatgatattgtcaaaaatttgaaccctgaacttaaataagtatctcttgataccttgcttagattctaggagagcatatggttcaaggcaaaattaccccaaatttgggggagtggaactaagaggtatgcaaagaaaaaggtaaagcactagcatacataaaaaataag

SEQ ID NO: 7572 - DNA, 276 bp, Glycine max
ttttcttctggagttgctgctacttctaaatcctgcaaaaaaaatttgattctctcttaattatgccttctacaggtggcgttaatctccaaatcaatgggaatcaaatcacctacagtagatcttctttgtatacaagagaacacaacaataagtatccacttcagaagaacatagtatatatgataactaagatatgaacacaaagaatcaatgaattaaagagaacaatataaagcaatgtctaaaactgaactatactttcttaatctagtc

SEQ ID NO: 7573 - DNA, 379 bp, Glycine max
  unsure at all n locations
tctaagaccactacacgacagatggcagggtacctgactctattatatggtaaatttgtggttttaaatatgttacgttcgattatgagttaaacatgtttttatgttatgttaacctctctnttttgtagtgctggatctatgagcactttcctagtgtgcatcagtgcgtcacagatgatgcataccaggagacgtccccatgtgtttcccggtggctgacgtcnnaagtccttatgaagggaatcacaggagcaccataccgggcactttgtgatgctatgaccgtcatagatatgtcttggttaccttacactgaccatcggggggttagggccttcgacctgatttcatcattctaaggtcagttgagatgggt

SEQ ID NO: 7574 - DNA, 443 bp, Glycine max
  unsure at all n locations
acaacatatttcttaaaccatcggatcaatgagagcnactcatgggtgtggagagtcaaccttcatgggcttcctgtaggaattatagtataacatcatctgaaatgtagctacatataggttcaaacaatgtaactaaataaattagtagtgagtacattataattgtaggaaaatggttagtatatagatattatatgtaccctaacaggttttttaaaacctccttgcaaactacactcgtggtagaggtcaagctttttttgtctttatcatgtattaaaacctttaatccattctttgatttgactctcgatagtgcaacatataattgaccatgactaaacaatggggtttatgcaagtaaagttcaacactatatcatgactggcctggagacttattaattgtcattgcataagagagcattattggaaatagtc

SEQ ID NO: 7575 - DNA, 476 bp, Glycine max
  unsure at all n locations
caacatccaaacatcatgaactatcaattaccaagataacagggcagaggcagaaaactctgcccaaaacacaaaccaataccataactttccttactcaaataccccagtaacattctcttcgttccaattcgtttaccgttggatcgactcgaaaattttactggaggtccctagtacataagtgtacantttgaccgttgggatctgctagaaaatatccgtaaccgaatatatacaaccctttccacaaccagccatgcataagcattttctgcacaagcacaaaattctgctgcatatttcaacagcaaaattctgcataatagtgcagattttcgaaatcactcttgccctcatccaattttgcccaaattggatcctacaagtcctaaatcatgtataaatcatatctaaaccaaagacaagcttcagaccatagcaactcataatctaggaatttaaacccctcaatt

SEQ ID NO: 7576 - DNA, 441 bp, Glycine max
  unsure at all n locations
gacaaccttatattcccattattntcttgttctcttcattctttttcattccttgcttgctctcttttccttatgctctctctttcctttgatagatatttatcatttgctcatttcctctctcgactttcttttgttttctctttttctctctgaagaagtcgtgcggacaacggcacacactacctactcacgtcttaccacaatgtgaacgagaaacgcacaaaaatggtaggtcgtaatatggtgacgaaatagatgagagccataacgccgaacatttctaacagaaacgagcaataatgatagtaatgttaagaaccatatgaacaaaatataaaatagtaatgtcaacaacaacatgggcaataacagacaacgtttatagcaaactaatgaaataaacagatatgtcaaaaaatgcggtgacctcgcgcacgt

SEQ ID NO: 7577 - DNA, 274 bp, Glycine max
  unsure at all n locations
tacaactacaagtgattgtcaattctccattctcaagttgggattcataactaactctccactctccattgttatcacatattcaccatgagcttccgtttcttttttattttttgtagatatttgtggcagctattagatcccactccgcttgaaacaaattgaacatgggaggagtgtactcttgagaaagatgtccaatcataggtgaactntgtatgatcattcttggcaacttcttacgcatctcataatctggctttaactcactata

SEQ ID NO: 7578 - DNA, 459 bp, Glycine max
tcccgttgcccgagtcgacccggcccgagttgggctggttgagtgttaactccagcgtttcaagtctcgggtcgctctggtaagcgaaaaacgggtacgggttgatcgtgaacggcgatttgttgtccttgagtatcgccagcagctgtttgagcgtgtcttgcatcgcctggttgaacaacccggacgagggcgggtccgactgagtcaacacgggcatctgagtgcactgtggagaccttgatcttgccgtcgagcgaagccgcgccgagggcattttggacatttagcatcttcgggactagctgcgacttaataccctgatcggataatgtcaaaatctcttttccgacggtgatcatagtgatgttgctcgccaggtagtaaggcaagacgttctcgataacccactgtgtggccgctgtgggatcgcctgcgagactcgctatgtctccgttg

SEQ ID NO: 7579 - DNA, 446 bp, Glycine max
  unsure at all n locations
ngactaggcgagttgattntagccttagttccaccttagttattagtcaattcggttaagaatgagaaatcccaaagagaaaatgtccggttgattttccgctttattttactaaaagatgtttttttttattattattatattattttttacctctttttttgatttccaacgtggttacggcacgaccgaacggtcggaattcattttaaccgaagtttacggataatacaattcaaacgatcggtggaaatttattttatttttaggttaagcgagaaatgacttaagtaaaatggcttaagcacgtcaagagggggtataaaaagtaaatgaaatgagaataaaaatacacgaaacacaatgtggaccaccacgggtacatagaatgaatcgaatagcttggttcaaggtacttacccattgaagatcgaagaacgatgaag

SEQ ID NO: 7580 - DNA, 465 bp, Glycine max
  unsure at all n locations
tatatacctggtgagttgtgatngaatgactgtacaaaaaatttcactatcaaatgtataactatttttatctttttttaatcaattctgtaaaataaattcatgatcaaaataatatatattttatgtattgtatattttatcattaattaaaatgaattattaacacacaaataaaataaatttaattaaaatatataaaaatttctatattttatatatatttgaccaaaaaatattttaaaagtgtaactataaaaacttatacttaaaaatttacagcaagttaccaatcatcaattctaaccatttatcaatggttaataagaagtttctccattgatgaagatgttattcatttccctatcttagacgtttgccttttttacaaactttcccctctgagcagggagcacaatgatgtttaattntatgaaaaagatggcagcggacatgcaatgtggt

SEQ ID NO: 7581 - DNA, 337 bp, Glycine max
  unsure at all n locations
atatgtgtntgtatgtgtgtgtgtatgacatagagttagattattaattatgcttcctttaatcttctcttttcaagttgttttgtatgatttgagcaaaagacctatagaacgcaggttcgtaaggaaagatgaagttataaaggaaggtgaatcaatatattttgatggacatttactggaagtaggacaacctgaacggattcatcactctccagcgaagttaaatgaacgagggactgacaataatgttgttgaaaggagacaactaggacatgtacaaaatggattctgctaggtcaatccatctttttgctaaaggttattccttgaataa

SEQ ID NO: 7582 - DNA, 294 bp, Glycine max
tgaagatgttcatgttactgtctatcatatcacaagagaaaattttgttataaaaataagtgttgttatgctgtcagtccactagacgaaggacacttgagcaaattgagtaaatcttagttttgctaagttagcgagtctcattgtattcaaacttactgtgtaaacactctttgagtgattagaatacatccactatcacacatatactatttgtgaaagctaacaatagcttaatgacaaataatacttgggtcttaatctagaggggagattaagtatagtgtcaggaat

SEQ ID NO: 7583 - DNA, 472 bp, Glycine max
  unsure at all n locations
nganagagcccaggtagtcaaagagaagttcaagtccatagccatcaaagtctgaagagagtatgatgaactaagggacgttaatatggccaccgatgaagccttggaatgagaaaccaagaaggcccgaaaggaagaacacgaccaaaacaagttttgaggggctttatagggcagcaatagtgagctcaaactctgaagaggtgaaaggaatcatcatgggtcaaaggcatgatctggaaggacgagctaaaggcttgccttangtcgaaaagaaatttgtcccaacagttaaagtgagactgaagggaatatgtgggcaatcatcgatgagtgccaagagaagctaaatctagcggcgactcacgagcaaaggctagaagatgagtacgccaagatatcagcagaaagggaagcaagggaaagggtaattgattcattgcaccaagaggcaactgtgtggatggaccga

SEQ ID NO: 7584 - DNA, 145 bp, Glycine max
tatatcaatacgctcgaaattaacagcggaagctctctcgatattcatatagtcataactattcacacggatgtccgggtctggcgcttaatatgtcgagaggctcgaaattgaacaacggaagctcttgagaaatgcaactggt

SEQ ID NO: 7585 - DNA, 492 bp, Glycine max
  unsure at all n locations
gatggcctcagcanattccttatttccagaagggaattctatcaatagacctccaatctttaatggagagggttaccactactggaaaacccgaatgcaaatttttattgaggcaatagatctaaatatctgggaagccatagaaatagggccttatatacccaccacagtagaaagagtttcaatagatggtagttcatcaagtgaaagcataactatataaaaacctagagatagatggtctgaagaggatagaagacgagtacaatacaacttataagccaaaaacataataacatctgccctgtgaatggatgaatatttcagggtttcaaattgtaagagtgctaagaaaatgtgggacactcttcgattaacacatgaaggaactgcagatgttaaaagatctacgataaatgcactaactcatgagtatgaattatttagaatgaatgcaaatganaatattcaaagcatgcacaagagatttac

SEQ ID NO: 7586 - DNA, 421 bp, Glycine max
  unsure at all n locations
tcaagtcgctcggatagcaacttgttntgngccaacatagtgttctatgatgaaagcttcaacaggctgtctttggttgggatgtgtgctctatcacacaagattgaatggtcactagcaaccatattgtcaatcaattccatggcttcttcaggggcgcttcaatttatttttcccctgcagaagcatctaaaagctgcttggattgtggccttaacccgtcaatgaaaatattgagcangattggttctaaaaatccatgagtaggcgtctntcttagtaacccacagaatctttccaaagcctcactcaaggactcgtttggaaattgataaaaggatgagatggcagcttttccttcagcagtcttggactctangaagtatttcttcaagaatttttacccacttcatcctaagtc

SEQ ID NO: 7587 - DNA, 614 bp, Glycine max
  unsure at all n locations
cccgacacccgacctcgacgacttcgtcaccgtgctctacatcattagtnantgctaataaantatcccnnnnnccgccgcgttgataccatcattactgacactaagatacacaagcaagaatgactcaattcgctacagaatgaccatggcaactctctgcatatgcaatcaggtcacccacctacgatctacgatgggacactaatcatatcacgacatgaataatcatacaagctccatatgactaacaagcccaagtccagtgaataacagcttatgtactgacaatatatgaaattcgatactgattatgaacaaagacgcaccacctttcagatgcaagccacgcatggacaagctgtcggcggatatgccgtaggcaaagaaatgcatcgaactctgcatctgttagtactggggatatgcggtctacaccttattacctgacagatacactaaattgacacggtccaggcaagtttatagatgaaccacagaactatagaccataactaccttagtaaacaacgaagcacgatctctatctggaggaacgaaatggcactgaagaggatgtatcttatcacatncgcaccccagccttggtcgag

SEQ ID NO: 7588 - DNA, 414 bp, Glycine max
  unsure at all n locations
caattactgtgtaaatttcatagttgccaatcattgtcttctctatatctcttatgaacaacacgagtgcaccacttttactctgatattagacaacctataacagagacgggtgtttaatatttctctatgaatagagacaactattggacaagtatggaactggggcaacctcaaagatttcattaattgcaactttgtcaagatcatcctctccagagccgtctactcgtagtaaatgatntgctgcattatgaatcatcaatgaattatacgtgccacaattatagcatacaatgtattaatatgcagcttaagaaacaaaagttcaatctaatacagcgaattaccagaacagaagaacccacggtcatcttcacaaatgccaccaagatcattgccatctggaattga

SEQ ID NO: 7589 - DNA, 490 bp, Glycine max
  unsure at all n locations
tctntccctaacctgtggcataggcaacacagaaatgatgtctatgatgaagtaacgttntaaatatctcttggcaatctttctaggatctataacaagttcacctcgtccaaatacccgagatgaaggcgcaatgtaggcggtgcggaattgaaaacttatgcggaggagataaatgaaatcacatattgttctcattgtgacagcaaaacttgctaggctgttatctatggcgaggcaaaatgatttgtggttgaaataaggaaggtaaaagaagaagggatcgcatgctatagaaacaatgcacagaatctcaaaaaacttgttccaataaagaaggttcttatcttgaggatcaaatactttnttctcagacactttaagatcttctgggaacactgcccaagtagtcactccagtctttagtgatcttccanatgtctttagtccatctgaactcttcttcattcctagcctaaatgatttcgat

SEQ ID NO: 7590 - DNA, 440 bp, Glycine max
  unsure at all n locations
tgtgattctatatccgtctcccaagaccttgttcaccggttgctctggcgatacaaggatgattggaagtctgcattgngggtattcagatgggccagttcgcgatcgagctttagacattcgcggagtcgtagtagacatattgtgtagaatgaaggttatggaaaagttgagggatttgtgcgcgagggcggtcttgtcactatgaatactgttgctaagacaatgagatggtttgtttggacacgatagtgggtagatgctgtgaggatatttgatgacttgcaagctcttgggttggagaaaaacacgaaatccatgaacttgttgcttgctaccctgtgcaaagagaaatttgtggagcaagcctgcaaaattttcttggagtgcagcagcatattgctccaaatgctcacacgtttaacatattcattcgtgga

SEQ ID NO: 7591 - DNA, 421 bp, Glycine max
tctacttatgtggcaaggcgggcttccttcacttccttgtctccaacgcgagctattaccactgttctttcttcccacgatgcttcttttcatgtccgcctgagtgggcttatagcctaaaccatacttcccacagtttccttgagtatttatcaggctagttatgccgccgttgtctctgcctaaacccaccccgggttcataaccgttccccaacataactcgggccatcattaccgctgcatcgaacagacaaggctgcccaaagagggagtccacggaggaaatgctgaccacctcaaaagactggaaagcagtttctaacgattcttctacggcttccacataaggcatggaggatggccagcttaccaagatgtcttcctcgcctaacacgatgaccaagtgcctctccactacg

SEQ ID NO: 7592 - DNA, 421 bp, Glycine max
  unsure at all n locations
tatccctagaggtgatggacctttgcaggtcttggagaggatgaataacaatgcctataggttggacctccataagagtatggagttctgatttaattccttttgcaggtggagctgataatgaggaggaggaacgaacagatttgaggtcaaattctcttcagggggaggggatgatgcaatcctcccttgtaagggaccaatcaccacagccatgagcaagaagctctaagaggattangctagagctgctgaagggtctatggttctcatgaacctcanggtagatttctgagcccatgggctaaggttgggtccacttttctctgtaaatattagaataagttcttcttcttttaagtttgtatgataccctacaaattaagggtctcctaccttacaagtataaggtacccttagt

SEQ ID NO: 7593 - DNA, 422 bp, Glycine max
  unsure at all n locations
cggaagctgacgcganactaanatggtcattacatttcacacggaagtccgattcaggcgcataatatatcgagacgctcgatattgaacaacgtatggtgtcgataaattcatatggtcataacttgtcatacggatgtccgattcaggcacataatatatccagatgctctaaactgaacatcgacagctctcgagaaattacaatggtcataactattcacacggaagtccgattcatgcgcataatatatcgagacgctcgaaattgaacaacggaagctctcgagaaactcatatggtcataacttatcacacggacgtccgattcaggcgcttaatatatcgagacgctcgaaattgaacaacgtatggtgtcgagaaattcaaatggtcataacttgtcacacggatgtccgatt

SEQ ID NO: 7594 - DNA, 491 bp, Glycine max
  unsure at all n locations
tatcacatcattgagttcctaggtgagttgtcactcttaagtgcggataaatgattntcataataaacaaactntaaatatcttaacaaaataaaccactgatcttttgttcaaaactggcgggtaaagatagatgggggttactccatgagttaacaagatttcacgtattcaaataagtcaacattgtccaaaacatactttttgtaaatactattatattagataatccaatttagatttcctaaatttgagtcactaaacaggatattttgaaattnttatagatagagcgagctactgctgtttagttaaggcaaaggctaattgtgtatgaatcggataggatgagttccatataataaataataaaagagacattgttatgttttaactataaatgagacanttttttgcttccttttctnttcaatcccaatacataacaattgtaattatacgttaatgcttgcanatgtggagcgagcaac

SEQ ID NO: 7595 - DNA, 503 bp, Glycine max
  unsure at all n locations
tactcagctagctaacacacncatctagaaactaacctcacctccttgagaagcttccttgagaagctagagcttagctacacacacccctctaataactaagctcacctccttaggaagagaagctagagcttagctacacacccctataatagctaagctcacccccatgacaaaatacatgaaaatacaaaaaaatcctactacaaagactactcaaaatgccctgaaatacaaggctaaaaccctatactgttagaatggccaaaatacaaggcccaaaagaagaaaaaaaaacctattctaatatttacaaagaagagtggacccaaccttgacccatgggctcaaaaatctaccctaaggttcattagaaccctaaggccttctttatcagctctagcccaatcctcttggagcctcttgctcatggctctggtaactggtccttttctagggaggatagcatcacattatgacaagctcagtcttaactggttcac

SEQ ID NO: 7596 - DNA, 327 bp, Glycine max
tgatcatcctactaagacgactgatataactgtggcacataaagagggtgaggatgaaggagagacccatgctgtgactgtcattcctgtacgaccaagtttcccaccaacccaacaatatctttactcagccaataacaaaccttctccttacccatcacccaggtattcacaaacgccagtcctaactctaccacatagtcttgtctaccgcactttcaatgacgaacaccacctttagcacgaaccagaaacaccaaccaagaagtgaattttgcagcgagaaagcctgtagaattcacccccaattcagtgtcctatgctgac

SEQ ID NO: 7597 - DNA, 463 bp, Glycine max
  unsure at all n locations
ctaggcttagcacgtgaagacatgacgcttagcgcaagggttgcgcttagcggttggacaactgnataattttttctgagtcttttgtgcccatatcttcacatgagcttaaaaacccccttgttcacttctaaacaagctgcaaaattaatcacaatcacaagcaactatcctaactacatgcaagagatacagaatgaaaaagtgaaaagggaaagaaaagttgggttgcctcctagtaagcgctcttttaacgtcactagcttgatgcatcatcctgttatcttgngtccaacaaggttccaacttccagatccttcttctctagtctcttttcctccatcacattcaccttcaaacaaaaattntggttaggcaaagctntctcttcatgaaacatatcaaaactgattngctggtcttctatggccatttgtaggttcctctttcccatgtcaaccat

SEQ ID NO: 7598 - DNA, 398 bp, Glycine max
  unsure at all n locations
tatgagtntgtggatgatgtgaggcttgtgttgtcttatgcattgcaataccctccaaggagtgaggctcacagaactgcaacaaggatcaccgagggttntgaggtcaattggaaaactatgaaggagaagtggatgcgtgaggccgaagagacgaacaagatttgccagagggaattacatgtgtgtccaaatgaaagaagtcaagtgagtaatcatctcacaaaaaggagcaatattcctatgtgctgattcaaaatagcttcttaccacaagtcaagaaagctatgccaataacggtcattatgagcagcatggacattacccctcttcaagagtntcatttaattaccctggttattcatctttatgtataaagtatctattgagtttcacgt

SEQ ID NO: 7599 - DNA, 492 bp, Glycine max
  unsure at all n locations
ggcctaattaacctganattgagaganaatgattattaaacacacaaaataaaaatactaagtatttattacctatacttaacaganaatacttataaccttacaaaataaccataaattgggagagtttgatacaatttatataagttttatacacaaaagttagtcattttcaccaactaacagttgccccaaatttacagttttgcttgtcctcaagcaaaaagagaacaactcacttgtcctcaagtgacaatgacatgcagtgattatgtacgaaggtgtatgctacaaagtgactaattgcatgataagagaatggagtaaaatgccctcaacacttgtctttcacaacagttatctaaagacaagaataaaatgtaacctgaacagatagatgaagttaggcataagacagatattaatgaaagtagcttaaaccacagtctcacagctaatgtttcactcaagcacaagtgtttaagctattca

SEQ ID NO: 7600 - DNA, 487 bp, Glycine max
  unsure at all n locations
ngaagggttctggtctgagtcttcagggaaggctngcatggtatggaaaggaaatggttattctaagacaggtaagcatcttaatttggatgctgtgtttaagcttgataaggttttcagtgcaagcaatatcactagcttggttaatggaagcttggagagcttgagttctccaaaggatgagagctacttcgaacccatttctgtggtgatgtttccaaaagcaaattacaaatataccttgaattccacagaagttaccaatgagttctcttctgggagtgatgctatgaagggtggtttgtcattgagttcattgagtttttgttctcgtcccctctcaagggctattagaaggctcccattagagttctctcctgagtgcaattcttcaaagaactgcactccttttagtgagaattctggtccactgccatttctagtgtctttgaaaggcattgagtgttccatttctaacaacaagcat

SEQ ID NO: 7601 - DNA, 432 bp, Glycine max
tatctgatggcaacttggaagtgtcaactgctgattctgaatcatatacacggaatgttttttctcctttggatgtgaatgtccatgttagtgttcgataacaaggttctggtattgtccagattatagaattgtaactttgtaaccccttctctccctttctttttctccgagggatggaaaaaaagaggaccatttgatgtggatgtaaattagtttcctttacgatgttggaacttggaagagtgatttaatgagcttctgatttcaaatattcattcttcttccaatgagtgaaatattaactatatatacgtgtgtgttaacatgtttatgttacttgtgatgtattacgacaaaagcaatgacatgattcattttgacccacttactgatgagtaaggaattttgacatacaatgaagtggtatgt

SEQ ID NO: 7602 - DNA, 148 bp, Glycine max
tatgtaagcgacactatggagtgctccatcttctcaatgaagatctctcaagaaagcttctcttgaagctaactagtctattaatcagaagcatcgtgtgacacatcgttgtcaatatgatgaatgatagtcttgtgagacatacttc

SEQ ID NO: 7603 - DNA, 492 bp, Glycine max
  unsure at all n locations
cactatagatactaagctaaaggaacactcaaatcgggtgtatntactcccaaggcctagactccgaagagtccgttagggcctctccttcttaattaaaatccaacccagaaaacattttagcacacaaactctatctatgaactgtacaaaacacatgactccttaattattctaaaaaaaaattcaactcgtcgcgcctaanagtaattaaactcgtcgggttcccacagtggatcctatcataatactcgtctcacattaactcattgtctttaaagggtcttacagtcatgtgattatatagttcattactcacaactcaatgcacacaacatttcaatacatgtgtgatctcacaatttaatacatactcaacttgtcatttacacacaattcatcacacttccataatcccaagacaacacattatcacgcctcatgcatcatatacatgtcacacaataataatattaatatgntatattcata

SEQ ID NO: 7604 - DNA, 420 bp, Glycine max
  unsure at all n locations
attggtcttcgctggcaaaatgatcgtagtgggtctaaaaagaggcaaatctgatcatcatgccttgataaatgcaaaanaactatggcaaatgaagagggtgagaatgagggagaaacccatgctatgactgccattcctatacagctaagtttcccaccaacccaacaatgtcattactcagccaataacaaaccttctccttacccaccacccagttatccacaaaggccatccctaaatcaaccataaagcctgtctactgcacttccaatgacgaacaccacctttagcacaaaccaaaacaccaaccaagaaatgaattttgcagtgaaaaagcctgtagaattcaccccaattccgatatcctatgctgacttgctcccatatctacttgataattcaatggtagccataact

SEQ ID NO: 7605 - DNA, 448 bp, Glycine max
  unsure at all n locations
ctaagcttacatggagctacatcattntctaacatattcaaagacattctcagtaattgaacttggattntagttgttttaaaaataaacataaaagtggaaccaacgaaattaataaggggcgcttggtttgaacaaattacgtctgcatagcgcaatgcaatcatgtaacattatgaataaggaataatgaagacaaaatggacatttgggtctacaacacaacctgacaaaagggcaattgtaatgaaacatgagggaatacaataatattattgatgcagtcatgatgttgttttggccgaaattntgtttccatttgtttgaaaaaactatgacaattgggttgcttccctaactgtgacaaaacattgagttcaataaattaaggtcattagctggtatagtaagaagatggttactaaattagataaggtcatgcacctct

SEQ ID NO: 7606 - DNA, 481 bp, Glycine max
  unsure at all n locations
gtgaagctcctgtttagctatacccgattntactcaaccattcgtagttgaatgtgatgctagtggagttggcattgtggctgntttgatacaaaacaaaacgcctatagcttatttctcggagaaattgggaggagccagattgaactattgcacctatgacaaagagttctatgccattgtaagagctcttgatcattggaatcattatntgcgttctaatcactttatattgcattcagatcatgagtcattgaagtatatcaatgggcagcagaagttgagtccaaggcatgctaaatgggttgaatntcttcaatcttttaatttctcttcaaaatacaaggatggtaagagtaatgtggtggctgatgcactttcaaggaggtatgctttaatatcaattcttgaaactcgtttacttggttatgagactttgatagattattataaagaagatgttgattctcgtgaaatatac

SEQ ID NO: 7607 - DNA, 321 bp, Glycine max
  unsure at all n locations
cgagcgtctcggtatattacgagactctatcggatatcggagttaaaagttattgtggtttgcattngctacgagcttctggtcgcaattacaggcgtctcgatatattatgggactcaatcggacatccgtgttaaaatgtattgcagtttgaatttgcaacgagctttcgttttcaattacgagcgtctcgatatattacgagagtcaatcgaacatcgaagttaaaagtgatcgtggtctgcatttgctacgagcttctgttgtcatttactggcgtctcgatatattatgggactcaatcgaacatctgagtacaac

SEQ ID NO: 7608 - DNA, 371 bp, Glycine max
ctcagctttgttccattgagaactactatcattccatccaaagatgatagtataccaaggaatggtttcaccatgatggatgcagaggaaatcaagaataccaatggtgattgtcattttctaatttgtatattatatttgttgtctttatttactctttttactatgttattctttttagttttatcgttaacaattatttttgagataagaaggaaagaaaatcatgcttattcaattggaagttgctgaagagaagtacttcacacttaattcataatttaatttttgttgtaaaacgaattgaccaatctgtgtcatattatctattattagcattttaatgtatatgtatgaggtatcttttattc

SEQ ID NO: 7609 - DNA, 480 bp, Glycine max
  unsure at all n locations
nggagaggatgcttcaatggagcanaaganagaaggagagaaatagagaggngggagcacgatattgaaggaagataaagggagagaagttgaactttgagttgtgtctcaatggactctcattcatcaaagttacaacaagtgttacacatgcttctatttatagacttggtagcttccttgagaagctttctttagaaaacttccttgagaagcttctttgagaaaacttccttgagaagttagagcttagctacacacaccctctcataactaagctcacctccttgagaagcttgcttaagaagattcctaaagaagctagagcttagctacacacacctctctaatagctaagcttacctccttgagatgagaagctagaacttagctacacacccnctataataactaagctcacccctatgccaacaaaaaaacatganaatacaaaagaagtccttactacagagactactc

SEQ ID NO: 7610 - DNA, 466 bp, Glycine max
  unsure at all n locations
taccttgtgaatganatgatatatcctntgcacccatgattaatctaaaaatctgattgcttgagttgaaccttgagcctatgaaattatatctctacctaccttgtcttaagttgtaggagagcattatggttcaaagcaaatttgtctcaaatttgggggagcttattgggtgacaacttctaatggtaagaagatgacaacacacacaataaagtaaaaagctgctgttaaaaaaaactgtaagtatcaaaaataaaactgagtgtgtgttgttatctaataaagctaagtgctgaaaggcaagtaattgaagctggaaataataatgaaaagagtntatctatggatgaatgctctcctataacttaagctgtttcatcttagaaaaaccataatttngttgagcccgacctcattacaagcttagaaaagtccttcagattcagtttgtgtggttatgact

SEQ ID NO: 7611 - DNA, 473 bp, Glycine max
  unsure at all n locations
gcttggaatgatttcatacanaagttagtcgtataaagcgactaacagccaacctactaccatccttactcaaaaaccaaatggtcatagtaagcccgggaaaggtctatcaaccttcatttccctaatggtacaatcctaacgccatatgcacctatcacggtggcgtctcggggcactccatcgagcaatttgtagcttttaagcacaaagtacaaagtttgattgatgcaggatggcttacatttcaagaggatagttcaaatgtaaggactaatccactttcaaatcatggaagctcgttgatgaacgtggtggaagaatggaaatctcatgagttgaaacagataggggatgtgtcgactacaaaatgattcatattggaggcgttgcacgaggctgatgtgattaaatgtgatggtaataagggagatcaatgcttgatgcattcangggcattgcttgatgtagaa

SEQ ID NO: 7612 - DNA, 392 bp, Glycine max
  unsure at all n locations
ntctctntgaagttntgtatgatattcctttcatacaaaatttcatactttgcaacgganaaacataattaatgccaaaagtatactatcgaaacatgtaattgaaaatacatgtaatagaaattaaaatccctaaatttcataattaggatttatacataattgagagaaattaaatcatccctagatttaataattagggttcatacataattggaagaaattaaatcattcttggagaatcataaatttcataacacatgttttgatatcacatgtaaaacattaagggggttcttagactatcaattataggaaacaacatgatcttaaaacatatgattctcacatacaatcaataaacaatagataatggtgcatacctttcttca

SEQ ID NO: 7613 - DNA, 420 bp, Glycine max
  unsure at all n locations
ccccttgttcattactaaacaagctgaaattaatcacaatcactagcaaggtatcctaactacatgcaagagataagaatgaanaatacgaaagggaaagaaaagctgggttgcctcccagtaagtgctcttttaacgtcactagcttgacgcatcattatgttatttaggatcaaacagaattcctacttcaaggaccttcttctcaggtctcctttcctccatcacatgcactgtaagacagatattttgtctaggtggatctttgtcctcatggaacaagtcaaagctgatattctaatcttctatgcccatctgtaacatcttctttcccatgttcaccacacagcttgtagtagacatgaataggcagcaagaatgagaggaatgtcagcatcctcttctatatctatgacaatg

SEQ ID NO: 7614 - DNA, 460 bp, Glycine max
  unsure at all n locations
acagtgagaagaatgataaaaanatcgtgacttagttgacatatgacaaanaagagtataattntaaattttgaaagaaaatanttgtttcctctttcaataaatatttttttaaaagttgaattgaatggagcttttaagtattgttgatcccaatagctatggaattacctgtcgaaccttggtaaaagtgaaagataatgctaattagtgtcttgagggtattagttaaagaacttnaaagtagaaatattattattgggagaaaaaaaaattgtgttactcattatctttttacgttttctattaattatacaataaatatnttcttaattaatatcctananacattaattagtatgatcaaaataaaatacagattcataagaccatctaatacattgagtagacaaacaaatccctaatagnatgttgatagtctacaaatctcaccactgat

SEQ ID NO: 7615 - DNA, 368 bp, Glycine max
  unsure at all n locations
atggctcgcctccggacttcacctnccgtgccaccccggaagatntaagccaagcccctactttcgaggggcaactcccaccttatgacgactatcccgggcaagacgatgaggaaggagatacccatcttggccccctgctccacctcaaagatctgtccccccatgaactaccccaaccgaacataatctgccatatcccggcctcacccacacctgtaaaagaatctgttcccttcgcggaagataagggaaagattgaggcgcttgaagagaggttaagagcagtcgagggccttggccattacccattctcgganttggcggatntatgtctcgtgcccaacatcgtcatccttcccaagttc

SEQ ID NO: 7616 - DNA, 389 bp, Glycine max
ttgtctcttaacagggcctcctcaacatgcggagccagtcgcatgatgatgatctgctgaccaccagcctagtgcctgttcatacccgtccccgagcatctgaaaacaggagatggcatttatgcagtgaaaatatggccttgctaccacttaccttggttcatccctgtctaggatttgacgctgtattgaccacctcacgaaatgatcatgtccctgtctgtcgattcataaggtacaaaatgcatgtgcatgcgtatgcatgggtagtttcaaaggcaataattctttagcaaaaacccattgtgtttagttctaaataagcacttagagcatccctataggtcgagcgagaaggcttgaatcatttaaaaagaatatgcatcctt

SEQ ID NO: 7617 - DNA, 431 bp, Glycine max
  unsure at all n locations
tactcagctanacattcaatttcgagcgtctccatatattacgcgactcaatcagacatctgagtaaaaagttattgtcgnttgaattggctcagaggttcaacattcaattttgagcatctcgatatattacgggactcaatcagacatccgagtaaaaagttattgtcgtttgaaatggctcagagctttaacattcaatttcgagcgtctcgatatattacgggactcaatcagacatccgagtaaaaagatattgtcgttngaattggctcagaggttcaacatataatttggagcgtctcgatatattacgggactcaatcagacatccgagtaaaaagttattgtcgtgtgaattggctcataggttgaacacttcaattcgagcgtctcgatatattacgggactcaatcagacatccgagtaa

SEQ ID NO: 7618 - DNA, 457 bp, Glycine max
  unsure at all n locations
caattatctaatcattccaatccactcaaatcatacaattgcttattcaaatcatactcaaacactcatttcatgcaaaataatccactgcatatcattttcaatcaattcactgttcaaacacacttttggtacaagaaaacaactcaaagtgctaaaatttaaataactgaaatataaagcaaactaaaaagcaactaaatcctgataaactaaaatgttcatgcttttcagaaattaaactaaacacaatttaaacatcctgctcatcctatggctgatgttcattaagatccagtgctggagctgctgatgaatcctgaataggctgctttggctccgtgactggtgcagatggctgggtctcctcanggataggtacangagatggctcatggatctggtttatggaagtcccctcctcttgagcaatgttcgcatctgcatcaaaataaaa

SEQ ID NO: 7619 - DNA, 544 bp, Glycine max
  unsure at all n locations
cgcacgcgattgatgcatcgatggaccanggacacatccanacgccagcctcatggatcgccataagacttcatntcccaatcgaggatctatggttcgatggtctctcttacataacctacccaatattcttcaccaatcggcatttgctggatcaagtggtctgacagtaattcccaacgtggacgcctgctacacctctattatctgtccctcgctgaactacccctacccatcataatctgccatgttccggcctcactctcaccttgagaagagtctacttccttatccgaagacaatgcgtagatcgaggctcttgtagagaggttaagagctcctctacggccttgggcattgcacgctataagaattggccgctttatgtttcctgacccacatcgtcatctgttcctacgtgcaatcaccatgacttcgacacttcttaaggtatgacatgtccatcaaggcttctttcgatgcttagactcaacagaggagcgcccttctcatggaccctatatttgcccatcatttttccccg

SEQ ID NO: 7620 - DNA, 427 bp, Glycine max
  unsure at all n locations
gctctctctgtcaatgttaggttcatatgctcaactacaccattgagttgaggtgttcctggcatggtcctctcccttctaatattgtgctcatagaaaaactttctaaatctgtctacatattcaccaccattgtcagttctgtgccttatgatctccaatcctgtctcattttcagccatggctttccatatcttaaaagccacaaatacttctaacttgtattttagaaagtaaactcataccttcctagagtgatcatctataaaactcataaagtattgtttgccaccaatggatgacacatatgttggtgtacacaaacatcagagtgaacaagctcaagtntttccttctttagggttctgctatctgtctaaaagctgactctnttctgattgccaaatatgcagtcttcacacatgta

SEQ ID NO: 7621 - DNA, 467 bp, Glycine max
  unsure at all n locations
tagcttcttatctaaggctcatcttggtggtgaagctccttcttccatggcttattccttaatggatggcgcctcctctcacctcttttcctttgtcttccgctgcatctccatggtggaaaatcaccattaaaggatcccattgaagctcaaagatccagcctccatagaagtcccacaagcaagcttccatcaagaaataggagaaaataatggcacatcacacgctgaatgaattaattcanaaagaagaaacatatagtaagattaatgtacttgttgcgataaagacttgaccagatgtgtcggccaagcaaggaaggtctaaattgcctaccccacttatgaaacctcatgagtgggtacaggaactgaagcatctgcatctataacctcctccacacttacctttacttggccaggcaacaaaggagtgttatgaacaatagtggatccctcataaactc

SEQ ID NO: 7622 - DNA, 410 bp, Glycine max
cagagcaaaggcagataactcttgccaaacaccaaccataatcacagcgttgtctcacttaaagaccccagtcacaattcctgtcgttccaatttgttaaccggtggatcgactccgaaattatactggaagtctctagtacataaccctacattctgaccgctgggatctactatctaacatccagaactcattctgcactacgctttccacaaccagcaagtgcatagcatttttctgcacttgtgctatattctgctgcacaatttcacagcagaattctgcacacagtgcagatttcgaaaatcacactttccctcatccaatcttgcccaaatcaaatcctacaagtcccaaatcatgtatcaatcatgtctaaaccacagtccagcttctaaacacaacaacac

SEQ ID NO: 7623 - DNA, 473 bp, Glycine max
cttttcttcttcactggttaagcagtttacaacatttaccaaagctctttccagcgaagtctgtggagttgcaagagcgctaatgttttccttgtcaacttcctccaccttgaagcacttcctgttctcctctagatattttattgcttcaaacaggttgaaggtcaccttctgaatgtcaatgctcatctccagatttccattccccatgtccaccacacagttggcagtcaacatgaagggtctacctaagataaaaggaatctccgtgtcttcttcgatatccatgatgacaaagtccactaaaaaggtgaagtggcagaccttgactaggacttcttctaccaccccatacggtcttgtgattgagcggtctgctagctgaagcgtcatcctagtagggtctatcttcagattaccaattcttctgcacattgataggggcatcaggttgatgctcgcccctaagtcaa

SEQ ID NO: 7624 - DNA, 333 bp, Glycine max
  unsure at all n locations
tcatgtcttcatggttcctcattgtgctcacttctctctgaagcatgtgtctgatcccattgcgatttcttcttatgaaaactagtttctatagtgtattattcacgaatntgatgttctttagttaagagacaaacaaaaataaacatatggcttgattcatcaatctataaatgagtaatgttctttactcagatacatgtattacagagcattttcacagaaattaagatgccaactagagtaattcaatacatgtattttgtggttgttaaagtgtttttgtcctacacccctgtggctatccttgcctctatcatcctatctagtctt

SEQ ID NO: 7625 - DNA, 405 bp, Glycine max
  unsure at all n locations
taccttgaatgataattatataccttgcacctcttttgagttgaatgatattgtcaaaagtttcaaccctgaacataaataattatctccanatacctcgtntagattctaggagggcatatagtttcaggcaaatctaccccaaatttgggggagtggaactaattgggatgcanagaaagagatatagcatcagcacacacaacagataagttgtcattttcaaaaaaaaagtgtgctgatgtaacaaggttaaaagcaaatgaaagtgaaaagctagtgagcaagccaattgtattaaaaagaccattatgataagtctaggatttgtgctctcttagaatctaagcctttgaatcctagaaaaacaaataaattgttctagccaagcctcactacaagcct

SEQ ID NO: 7626 - DNA, 452 bp, Glycine max
  unsure at all n locations
ntatagaaacagcggtgagtgctccttgatatataatatagatgggggattttctgcttcatgatcacctgtaaacaagaaagtttgctttattattctatgtaactcatcttatctaaacatttgcctttcttgttttgatgattgtcatagactcatagtttttgcctttgatataattttctgcaatcatatccgttttaatagtttgagtttttcaataatggatatgcagaatattttcaaaataagttggtagacacgatacatttcatggaaattctcagtttgaaagatagtgtggagagagacaccttcttccgcaagcttccaaatttagctgagcaacttcctcgccagatagtgttgaagaaggtatatttctgtggaatttctaattataaactatagacggatccacctttgttatccaanntttttatgattcttat

SEQ ID NO: 7627 - DNA, 444 bp, Glycine max
aggcattctcaatggtggaaggacctccgaaagctatatcagtcgcttgagttcagtcttattcatcaacagatggtatggaaggtagggggaggggaaaaaattaaattctggaaagataaatggttgggggatgattgtaaacttgaacagcaatataatcagttgttcctgattagtggtcagcataatagtaccatctcgaacatgggaagcttctctcaaggcaattggtgttggggcatacagtggagaatgaatctatctgattatgagcaacatatagttgcggcatttatggaagcaattactgatatacaaatccagcttcatatgcacgatattataaagtacatattgagaagttctgaacttgcatccggattaaagatcaactatgcaaagagtagtttcggagcaataggaaaatctgatcaatggtgg

SEQ ID NO: 7628 - DNA, 468 bp, Glycine max
  unsure at all n locations
ccttcaattagaattatatcatctgcaaatgacatacatttagggataatcttttgagctaactnttttaatagtaattttgtgaacttaagttataagttatatatgtctaacaaatttcatttacgtggataaacttcactatccacttatatgaaaagagaatagggtaaattagaattttgttcctcctaatattttaaattctttgattttcctgaattttaattgtaacattttgatcccttagtttgataaattggtaatttgatcctcctgatagattattaacatataattttgattagttgagttaattataaattaattaaaattattaattatttaaaaattaataaaatattattaataatcctaattctccactacactgtgctcctcttcttgaacgcaaatatctcttccaccttcattgtcacatgcaattaccacattagggttaatagt

SEQ ID NO: 7629 - DNA, 439 bp, Glycine max
  unsure at all n locations
gctagaatacagttacctcgaagaaaaccgcgaaggtcagattggatgcttcgttctctaacaaaacctcgagataagcttggaagattccgctccaattaaagggttcctctcgatgtgggatttcaacagagaattacggcggtttgtggcggccaccgatggttttgggttgtggagaagaagcttgtgatgttgggaagggtcttggggaaaagaaagggaaagaaatggttgcttttccactaccacacganaacaaagctcgcaacactcaagtgtttttgctctcgggaaaaggaacatctctcacactccagaagtcatatcgcatatcacaatggtcagaatgtggacagttgtcctatgaacctcctgaacaaatttcgagatgatccaacggttaacaaatgaaggaggggcaatttaccgagagagc

SEQ ID NO: 7630 - DNA, 324 bp, Glycine max
ttttccggccgtctgaatcaacttgggagtttacttagcgattctagattcatcagctaacctgacctgccttcagttatgtctcgtgggcgctgagcaggaataatgtcatacacggctaccataattcaaattacacgagtgcaaagttagggtctcaaaattcactaagtctgccagtataattctgatcacacatttgacatcgcccatatctttggatattggtaaagtattagctcatggacacttacagagttggctaaaaatgtgctattccacatgtagactgtgtgtcatactacgaactcatgcggactagaa

SEQ ID NO: 7631 - DNA, 399 bp, Glycine max
  unsure at all n locations
agctttctggtcttaacaagactatcgtcacgctgccagtcctaagtcgacctaagctaggaatgcctctacttctatacctctcagtagctaacgaagccgtcagctaaaccctcgtacaagatgatgggaaacactagattcccatctattttaccaaccgtgtccttcacgatgtcgagaagggataccaaatgatagaaaaggtagcattagctcttttagcctcagcccgatgccacaagcaatatgtntagagccaccaggtcattgatgaaacggataatcttattagacaagtattgagaaagcttgagctagctggaataatggttgcaggatctgtagaaatattagtgtatgacctctaatatgagcctcgtggccccatgaagaccc

SEQ ID NO: 7632 - DNA, 378 bp, Glycine max
  unsure at all n locations
tctcccncaattntctataaatagggggagaagtgaagtgnantatggttcagccccttaggcacttctctctctttcgaatttgcttaagaaaattgtttccgtgaagaaaatacaagccgaggcgcttccgtaacgtttccgtaacgtttccgtgagtgatttcgcgaaagatttcgacccttcttcgacgttcttcattcgttcttcatcgatcttcaggcttcaacgggtaagtacctcaaaccaagcttttcgattcattctatgtacccgtggtggtccacattttgtttcatgtatttttattctcgcttcatttattttgtatacccccttttgacgcgcttaagccatttatttaagtcatttctcgct

SEQ ID NO: 7633 - DNA, 465 bp, Glycine max
  unsure at all n locations
tgagctgtgcataggagganaatgagagaccaaagtgatggctctagccatttctacggtaaattgggtgttgagaagtcaacatttgattcggtagagttttcttcgtaaaaacaatatgagcaagtttagattaatgttatagacttgtttgagatgagagtttgctccaaaattaccccattctcattttcacttctcacaccttgaaaatacactaaaatgagggggtttagatacctatattttgagttgccttggtctgaagctcgtctttggtttagatatgatttatacatgatttangacttgtaggacctaatttgggcaaaattggatgaaggcaagagtgatttcgaaaatctgcacttttatgcagacatttgttgttgaaatgtgcagcagaattctgtgctagtgcaacaaattcttatgcatggctggttgtggaaagggttgtacata

SEQ ID NO: 7634 - DNA, 465 bp, Glycine max
tttgaatgtcaagttcatattacttcatgagtcaataagttatttatgaacatataagctatcagttcatcgaacgaattatagtctatccaaacgagaacttggtgagttgcatgcataagtgggtcaagaaaaaaaaagttgatcaaattcaatttattcatctaaaatgagtttgaaccctactgaaagcttggatgtgtatttccttttatgggacaagtccaaattagatcatgattagattgagacaaaaaaaagtatttaattgattcatgcccaccatttcctttggtggatctgggttaattaggttagtcacttactcaatacaggttaggcatctgcttgtggtacccagtgttattgctgggacacccagcggatttcaaaattgccaacatacccttataaatagcatgtctcgctttcatttctacaatgccttttattcgtaaatctcac

SEQ ID NO: 7635 - DNA, 386 bp, Glycine max
  unsure at all n locations
ngctctanattacattgatgtntgtatntatgggaggaggttgtacgccatttttgttttaagagtagtgtcccactggtaaaactaactttccaaatttttgccttcgcaggaaatggccccgaggaagcttgcctcaaagaggtccaggaaggacaaggcagccgaaggaactagttccgctccggagtatgacagtcaccgctttatgagcgttgtacaccagcagcgcttcgaggccatcaagggatggtcgtttctccgggagcgacgcgtccagctcanggacgacgagtatactgatttccaggaggaaatanggcgccgacggtgggcatcactggttactcccatggccaagtttgatccagaaatagtccttgagt

SEQ ID NO: 7636 - DNA, 322 bp, Glycine max
  unsure at all n locations
cgctgcanaattcatttcttggttggtgttatggtttgtgctaaaggtggtgttcgtcattggaagtgcggtagacagactttgtggttgatttaaggatggcctttgcggatgaatgggtggcgggtaatgataagagctgatattggctgagtaatgatattgttgggctggtgggaagtttggccacgtaggaatgacaacctcaacatgggttacttcctaattctcatcctcttcattngccccagttttctcattcatcaaagcaggatgatcaaatntgcctcttttcagacccacttcgatccttttgtcgatg

SEQ ID NO: 7637 - DNA, 430 bp, Glycine max
  unsure at all n locations
tttttgtatggtntattatcagagttaaagtgagaattaattttagtgtgaatatatgtagtcttcacataattgaaaaaaatattgatgtttcaaaaactcatttattgtaatatattttaaatacaaaatatatcatttttattcttttaagtgttagaaacactgcattataattattaattttatgtttactcatgtttttcattatattcctcattgtatttctggtattattatgaatgaaatgtcttaagttgtctcctctaaaaaaaaagcaaactatccacctgctgcatggctacaacacgattttcaacaattttaatttcattttgctttttattttattggattttctatgttgggggttttcagaggacaatgagcccggatcagtgtcccaaacatttttttacctgcttccttc

SEQ ID NO: 7638 - DNA, 314 bp, Glycine max
  unsure at all n locations
actatgatactaagctngaatgaggaagtgtggaaaggtgagacttcctactcttattcattgaccacagagtggtacctggagatatgtctcgggggtcacgagaccttgaggacgtcatgtggggtgctattgcccaaaaccaagcttgaccaattccgacccaacccgggcgtaatcagtcagtgagaacctgtgatgtacctaaacatgcaagctcctgtcagtcaaccgatcaaagaacaaagaccacaaagcaaggacgcttgtgtggtggctggccagctgtgaatcttgagtgatatatacgatat

SEQ ID NO: 7639 - DNA, 478 bp, Glycine max
  unsure at all n locations
attatgaaattgatgagtgttattacgtcttgactctagtgtgtgattcatgtgtaatgtgattggtgattgaaaaatgaattctaaatgataaagtggtgaagtgatatgcattgtattaagttgagctatcttataaatatttatataatgtattttgcttatgtctttgttcatctctattttatttaaaaatatgataactcactccctatgtgttgtctgtgtttggatcctgtgatgatctcaaaccttatgtttgtgggagcatatgactaggtggatgactttaaataatctcgtgctagaggatgctggaacacaatgctctaataggatgtgacattggggcatgagtttctgttttaattgcataatgtttcanacatgtattctactttantttatttcgctgcttaacttgagttcttttgtaatcttggacggccttgtttgagccggagatgttttaataagt

SEQ ID NO: 7640 - DNA, 486 bp, Glycine max
  unsure at all n locations
tntctagcctggatgtatagatctagggcacgtagcttgtctccgtaattgctataatagcactggccaacatcttaaactacctgtccacattattgccttcactggagaaggtgcaaccgagcccacgtccctagagaagagctaaacagcaaccgcagtcatgggaacaaccatcactcctgcattttacacatacccgattatgagcgtgctacaccgagcagccgttcgaagccgtactggacagaatgtttgtacgcgagcttacatagggactcaggcactagaagtggactcgttcttccaaatgaatacggaagcctctgttggcatcactgagcgctcacatatgctactgtcatgcanacacaatccttgagtatatactcatgctcggctacatatgatggggctgccgcaatatgaatcttactatgcgtaaagggtacgtntgacctatcacttttgccacatcattgatcg

SEQ ID NO: 7641 - DNA, 399 bp, Glycine max
  unsure at all n locations
tcaagcttaggactcattctntaactgccaacagagagagatgcagttttgctaagcccagactagagtatcttggccacatcatttgtggttttggggtggcagcaaataaatccaaggtggcagcaatgagttcctggccagttcctaaagattcgaagagtttgaacgggttctagtacagatgcaaaaaatatataaggtttattctagaatgaataaaagagggcttggatttacttagttgagccggttggtggttaacattttacgcgaatattacatgatacaacaatatttaacatgcgctatcattaatgtcatatgacgcatgcagagttctgagtggaacaccgagtgtaacatataagatgtggggtatctttaaggttttaaaaa

SEQ ID NO: 7642 - DNA, 441 bp, Glycine max
  unsure at all n locations
tgctatanataggggaagaagtgaagaagataaggttcagccccttaggcacttctctctctttcgaatatgcttaggaaaattgtttccgtgaagaaaatccaagctgaggcgcttccgtaacgtttccgtaacatttccatgagaaattacgcgaagattctcgaccgttcttcaagattcatcgttcgttcttcgttttcttcagtcttcaacgggtaagtacctcaaaccaagcttttcaattcattatatgtacccgtggtggtccacattttgtttcatgtattttcattctcgttctcatttactttttatacccccttttgacgtgcttaagccatttatttaagtcatttctcacttaatctaaaaataaaataaatttccaccgattggttgaattgtatcatccgttaatttcgggtaaaatgaattccg

SEQ ID NO: 7643 - DNA, 437 bp, Glycine max
  unsure at all n locations
ntagactcatagccatcattaacaatctcatacatgtgaattgtcccgtcttgacctccagtaaaaaggaagtcccctgtatggcttcgtgccaaagcataagtattaccaacatgagcattatgaacaatggtcaccaaagtcccacattctcacaacagagtcatacccagaggtaaatatgagcttcgcataagccaatacgaaaacattattaaaatgtaagtgtgaatttgattgcattactgttataacttcacctattttctgctttcattcttggatcttataaaattcttaaatgcgaaacttaatcataaaatccaataactatgagaatattcattaaagaaagaagatatcaatacatgggataagccaacaaatacaatatatatatataaacccacccaacacggtgaacaagctataataca

SEQ ID NO: 7644 - DNA, 269 bp, Glycine max
ttagagaaaatagtgcatatgcactgtacgtgtaccgcgttcttatacaatccatcaatttaaaatcgatatgtatgttaagtttttattattattattataacacaactaccttaaatgtatacataatgtgatttatctttgatctcgatgcacttaaaaaatgcattgaaattgaactctaaatttttattaatattaaagaatgagttcgaaacgtattactaatacttgtcttatattgtaatatcaacatcttggacggacac

SEQ ID NO: 7645 - DNA, 373 bp, Glycine max
  unsure at all n locations
tattaatggctnggcagcanagtctgatcattcacccataatcatccacctgcatgggactaatcgtagaagcttcatacgacaatttagatntgagaattcttggcttcttgagctagacatggtcaatattgttgatcttgcatgggaaccacaacaaacgagtgactttattcacataagatttcaataccaggaccaaattgatatatgtgagcatgaattggagtagagaaagaattcaaatgatgatgttaatggtgcggcctatttggaaacaaacaacaagttttgtactcttattgcgctagaagaagcttattggagatagaggtccaacgtgttcttgtgacaccctctacctcgacataca

SEQ ID NO: 7646 - DNA, 295 bp, Glycine max
  unsure at all n locations
gagtgaagatgagaagaagaagcttgaatagttgaatgtagaagttgacaacctctgcaaggtgatcaaggatgttttgggtgacaaggttgagaaagttgtggtctctgaccgcgttgtaaattcaccatgctgtcttgtgactggcgaataccgctggaccgcacacatggaaaggataatgaaggcccaagctctaatggacaacagcatggcagggtacatgtcaagcangaagaccatggagatcaaccctgagaacccaatcatggaggagctcacgaagcgtgctgat

SEQ ID NO: 7647 - DNA, 463 bp, Glycine max
  unsure at all n locations
tctatataagctgaaccatnttatcaagtaacacaagttgagttttattcagataattagagtatatctctttgatcttagtgagagtgattctcctaaattcttgagtgattcaagaacaccctgactgtatcaaaggacattcacaaccgaagtgtgttgccctcgctggaaagagtgattctttccttcctctcatcttcacccttgttctttcaaaccacaattccagaacattcacctctgcccagaattatctcgtggccataactcccattttacgcactcaacataagtgattcttgagcctaaattgaatctcaaaacgagaccttgcacctcgttttggaatgacctcatntggagccctgtagcttccgctcttgccatttctatatttctgtccagccaccacttaacctactgtctaccattccattcatccattttatgccaagaacca

SEQ ID NO: 7648 - DNA, 549 bp, Glycine max
  unsure at all n locations
cgcacgaggatgattgcnatgcatgtncgtgacgctacacaatacatcagcttagctagtcataagggaattctgtcacttacatagttcgcgagcacttgttgagatcaaagcaattacgagtatatctcagaccaaaatgaatgtggactgagatcgtaccttaccatcttgtgttggagatatcgaaactgtatcagacatggatactaaggagcacgagcatacacctcaagacgatcacccgtctggaagcaccatatatgaaactgttatgcgatgacgttgctcatcatggacaaatgccctcgacccatcatacaccatatcctagagtcggtccatcttgatactagcatgtagcacactctttcattcctttcttcgagatgcctgagggtcgaaactcacgcaattttgcttgcgacgcttctnctacttctactccaccatagggtctggcatatgagaagaagagtgtgttatatgacaatggcgaccacccacaggaaatgcagcactgacgacactttctgcttatgatacatt

SEQ ID NO: 7649 - DNA, 509 bp, Glycine max
  unsure at all n locations
tactaagcttgaggtangagaagatgagtggagggagagggagagaaggtgtgctcatatttatgccttaaatgaggtctgaaattcgaagtctaatttctcaaatgattaaaggtgaaaaaatgcacacacaatacctctatttatagcctaagtatcacacacaattggagggaaatttgaatttgtattcaaatttcactggaatttgaatatgaattggtggagccaaattttcactaattatgattagtgaattgtggttatggttcaacccactaatccaagatcaagttcaagattctccactaagtgtgcttaggtgtcacgagacatgttaaacatgaaggacatgcacaaagagtgactgtatgatgtgacaatgtggtgtatcaagaaaatgctcatttcccccttataatggtccaaaatttaattggattgcgcttctcccaatttaattaaatntatcctccaatacacacacatcagatagtgcacttaatgcg

SEQ ID NO: 7650 - DNA, 478 bp, Glycine max
  unsure at all n locations
tactaagcttagatcatccttggtatttccattatcagtcaacagactcacctaatagaaacccacgccaattggttaagaatgctttgctactctcagaanaatcacaataatctaactgtttttttcttgctggatgcttgcttttacactaccagttagagttataatatagcattgttttacttgtttaaataaaccaagttatatttagtcaacttcacaaaaatatcatgttggaagtgcgcccaatgccattttatcttggattataaacccgaaaggagaaaacaaaacaaacaaatattactatcttgaattgaatgtaaaggtttttgttagaaattaaaaaaagagaagaaaagtagaatcaataggagatattcgactttctccatgttatggaagcgtgccagaagactatntttatcttctanagcaaccttcaacaaaagataatctcagtttttagaacatg

SEQ ID NO: 7651 - DNA, 218 bp, Glycine max
tgacacacttcaaggtaacgttctcctctgttctcttgattacgagcgccccttcctctactctctctctatgtgctttcgctccattgaacctgtatctctaagcttcttgtccaaggcactgtatcggaggagaagctccttcttccatgacttattccctagtggatggcgccatctttcatctcttctcctttatctcccgctgcatcttcatg

SEQ ID NO: 7652 - DNA, 417 bp, Glycine max
atacatagcatgcacgaactatttcagttgagaccaattatgagtatatagcagctcgatgagaatgtggactgacaaggagcccgaccttcttttgtgggagataatgaaagttttacagccaaggcacctcaacagcatgagccagaaccagaaaacgatcactcatctgaagccaccatctctggagctgtgatccaatgatgctgctcatcatggaccaatgccatcgtcagctgatgcaccatttccaagagtggatccatcttcacctcagcacgtagcagactctttcattcctgtcttaaagatacatgaggggccagaccataccaattcttcctttggacacttctcctacatctactccagtatggcgtctaacagatgagaagaatattatgttatacgacaatc

SEQ ID NO: 7653 - DNA, 425 bp, Glycine max
tctagctgagttggtttggtcctttgatgattattgtgtatattgaccaactgccctatcttttacttgtttacaaatatatatttgatgttggcatgcacatttatttaatgtaattcttttgatatgtgtagatagagaaaggtgcatgctacatattgtttaaaaattttagaagcccagtaatactgcatgataaggatgcaggtcttaaaattctaatgaaaggtaatggctaattgttcatgattaacatcttgcaagcaatgtgagatatgtctatttttcatgttttatgtatgcatttttacaattttttatgttggtctcaaatgtagttgttcacgagttacaagagcaacatggtgctgattctaagtcacttaatgtagtgagatgtacatatatgaatcaagatgggatca

SEQ ID NO: 7654 - DNA, 464 bp, Glycine max
  unsure at all n locations
nggtgcgtatgatntatatgctccagcttgaggaggagtgtttaatattctaatatttatctatgttaggtagcttagttggtaagttttattcagaaggcagcactgaattgtcaccgccaatagccttctctctctcttgcgtcttgaatatatgtatcattttgaaatcaataaaagctaagagagaaagagtgaatttttcccttaactcacctcagtcttcaagaagtctatatattcttcatttgttaatatatatacaaattaatactacctcacacattcattatatttgtattaattattgaataattcttaaatgaggaaattacattatatatgactaactagggaaaaataaaatacaaacattcttttggtttaattaaagggagaacagaanaattctctttctttctctctactctttaattcaaagtataatatatctttctattctc

SEQ ID NO: 7655 - DNA, 311 bp, Glycine max
ttcgagtgtctcgatatattacttgactcaatcagacatccgagttaaaagttattgtcgtttgaaattgctacgagcttccgttatcaattgcgagcgtctagatatactaacggacacaatcgtacatccgacaacaaagataatgtcgtttgaattcgctcagagcttgcgttttatatttctgagcgtctcgatatactacaggactcaatcggacatccgagtaaaaagttattatcgttggaattttctaggagcttctatctttaatttggagcacctcgatgaattgccggactcaatccgac

SEQ ID NO: 7656 - DNA, 308 bp, Glycine max
tctcagcttgtacacacgcacatctttttcgtgattatttagtttattacgagtatacttgcgcaaaatataacctccgaaaagtatgatagaattaagaatattgtttacacaaatagtgagatataaccactctatgtcattgtattaatataaaattgatggacaaccgccaatattgagaactctatcgaggatataacattaactacacgtgttccaacataaatagagataccccacgattatcaaatgcaactaataattttgagatatggagcacatacatatgcgttagaaatagatcg

SEQ ID NO: 7657 - DNA, 350 bp, Glycine max
  unsure at all n locations
gtggtgcatgtgaactcgngcagtaacaatttgtctggngaaattccacactccatggcgtatctgtctcaacttgagtctttgctgttagacgacaaccgcttctcaggatatattccttcaacactgcaaaattgctctacaatgaaattcatagacatgggaaataaccaactctctgacacaataccagattggatgtgggaaatgcaatatgatagaaatgtgattagtgaagaggggcctatgccaagggtgtggagagcttatactacgaaacagacaataggaatgaaagatgatgacgtggctgtgaacgtatgagagtgactatatatagctattgctgg

SEQ ID NO: 7658 - DNA, 165 bp, Glycine max
ctgcacgcatgcaagcttgaatgcgtttagaccgacgtgacttatattcttatggtggtagctgtgatggtttcacattgtgggcccaagtgatggctagaaccactgtgttgctggcggaatactatgtcagcactggcagttccattattgtcacccaacgca

SEQ ID NO: 7659 - DNA, 336 bp, Glycine max
  unsure at all n locations
agcttgccttgccccttgatatattagagggactcatggtcactatgaatgacaaattccttgggataaaggtagtgttgccatgttttcaaagcccgtactaaggcatacaactccttatcataagttgaatagttaagggtaggaccacttaacttttcactaaaataagcaattggatggccttcttgcatcaacacagccccaatcccaacatttgaagcatcacactcaatttcaaaagatttttgaaagtgtggcaacgcaagtatggnggcattagttagctnttgcttaagaacattgaaagcttcttcttgtttctctccccatttg

SEQ ID NO: 7660 - DNA, 450 bp, Glycine max
  unsure at all n locations
agcttaccttgctcggcgggctcttgattacttgattgggtttaacatttcaccattactatggaggaagttaccaggttgccaatcagctggaagagttcaatctgctgcactttctcttatatgtgatagagaaatggaaattgatgaatttaaaccgaaggagtattggactgtggaggttcaaatgaaaaagaaagagctgagatcaaacaagaaccttacttttcctgctcacttgacccattttgattcaaaaaagttgaataagttttcaattacttctgataccgaggcaagagatattcgaagcaatataaactcagctgattttcatgttgttagcttgaaaaanaacaaaagtcgaagaaatcctccaacaccttatataacatcgacacttcagcaagatgctgcaaacaagttgcatttcactgcaagtcacacaat

SEQ ID NO: 7661 - DNA, 493 bp, Glycine max
  unsure at all n locations
gccatgattgaatcatctgacncggatcttgaagtcgttctgcagctgcgacttaactgccgaggttcaaccggttattgagctgcccggggtgttaaatgagatatggctacgtggagtacatgagctcacttggagtggctacatgggatggcgggtttatgcacaccttgtggatgtggaaaacttgttgtggaccattctccgaccgtcatctatttccacatgttatgggttccccatcatcctgcaagcttgatatgaagaagtgtataacggtgaaactttctgcttttatgtcgtgaccacacagagtgacctgcagatatccaacatggcgttatgagatcttggtgacacaatgtgcgtgctattggccataaccaatcttggacaatcgccactcacgccggccttaacagtaattggaacctgtgatttacctaaaagccaactcctggattctcctattataggacaccacacccccccg

SEQ ID NO: 7662 - DNA, 470 bp, Glycine max
  unsure at all n locations
agcttataaggtttgggaaatcctcacctcatgagctagcttttaggattgagttatgtttaatctaacttcaagatggaatcggagcttaccatggatatgatagtgagccatcttcaactgtccaaagatctacctggcctcacagctttcccaatgcaatatattaaaaaagttctacaagctccatgccctagatgtccaatcctatgcgtaaggggagtgttaagatcccacatcgactataaatatggccaaagtagaacaataatttttacctcatgagctagtttttgtgattgagttaggcccaacccaaattcaagatgaaataatatgctntactgaagtgttacctataccatgatcctctttgggtcttcttgaattgataaggaacatgaatccctcattgtctagggaaaaagaggggattctgatccacatatntgacgttcattgtcctcatg

SEQ ID NO: 7663 - DNA, 534 bp, Glycine max
  unsure at all n locations
tggaacattattgaaatcgatctcgtaccccgngatcctgtanaccatacttgancgcgtgcaagcttgaattgactgtggctgcagctgtaaactgcttactacttattgcaaagtactagggattttcgtaccgttggacctgtatcatacttgctgctattgcattacctcatatgtcaaggatgtgcacatttcttgatttgaacacatcatctataacatttggtataatatgaaccaggcttcgtgtgaaagcggcccttttcagtatgagcacaattgccataaagttatgtctactgacttaatctcaggcgactactcaaatgggatggattaagtgcaacattgatggtgcaacaaataagtgtctggggccttcagctagcgggggaatttttcgtaattctaggggtgctcttttggggtggttctaaaactgctagatacttcacatagcgtctatgcagagtngcaggnngatatttactattgaaaaacacaacgcagaggtccgattaattattgttn

SEQ ID NO: 7664 - DNA, 217 bp, Glycine max
agcttatcttatggatgcttgcgatatggctacttattataattccaagcaacttctgggcagtggaagtaaccgtgtttgtcaagcaaggcacaacaatggaaaggaacctgggccagaacttgcatataccaacagccctcctatggaactttgtggaggacaccattctcatttgtctccccatttacgaacgttactatgcaccattcatgcg

SEQ ID NO: 7665 - DNA, 284 bp, Glycine max
  unsure at all n locations
agctngtgaagattgatggggacccggtgttgatataaatgaggatatgggctacgtgggagtacgtgagctcagttggaggtgggcaacacgggatggtgggtttatgcgcgcattgtggatgtggaaaacttgttgtgcaccatcgcccgaccgccacctagtaccacatgtgatgggtaccccataatcctacaagcttgagatgaggaagtgtagaagggtgaaacttcctgcttttattcgttgaccacagagtggtacctggagatatgtcacagggg

SEQ ID NO: 7666 - DNA, 315 bp, Glycine max
  unsure at all n locations
agcttgtaatctattacacacatactgtaatcgattaccataggagttnttcacaaaacattctcaacagtcacatctttatatctgattcttaagtggccatcaaaggcttatatatatgtgactagagacactaattttatcataagttttcagatcaaaaaggtctaatcctcttaaaaagaaaaatccttttatcctcataccaattccttggccagaacactggtgactcaataaagaattatttgagtgctcaaattgttcaatctatctcttttaacagagatttcttcttttcttcctctcattctg

SEQ ID NO: 7667 - DNA, 387 bp, Glycine max
agcttcgtttaatccgcagacgaaattccgttcgcccaaccgattcctaactttccggttgttcaggaacgacgtcgcatcatcccgagttttgatcagatgggtgaggctccaccggcgaagcatatacccgcgtggctaccggctttgcccgatcctcacacgtatattcacacacccgtgtgggatgaaagaatctctgatcctcgcgaggataagattgaacaagcgaggcagcgtaggaaagctgagaggtcgttgttgagtttgcagaaacggttgttgctgcgtaatgggtcggtggaagcaagtgcaataacatcatcttcaccgaatagtgctgctttggatcctcaagtggttggtgaggatgataagggtgttgat

SEQ ID NO: 7668 - DNA, 302 bp, Glycine max
  unsure at all n locations
agcttcctcggggccatttcctgtgaatgcaaacatttggaaaggtagttttaccaagaaatgctactcttaaaacacaaatggcatacaacctcctttaataaacacaaacatcaatgtaaatttagaataaactcatgcacatactcccttacgaacgttcacttgcacaagatattctctaactaaaaaaaatgcacccacgcacaatcaaggcaccttcgtcacctagaatatttatatgtacttccgacgtgtatntagtacctacatcacatgtactttcttggctaaattacaca

SEQ ID NO: 7669 - DNA, 384 bp, Glycine max
  unsure at all n locations
agcnttgggttgcanttgggcgcctatntgaattccctacgctgtccctatatatatataaaccagccccacaatccttaatttacaaaatcacattcatacgtcattggggcatttcaccgagcacttggtgggcgcatgtttagacataaattgcaagagaatgggggcaatgtggcatgccccattgcttcagaatacaccataggcctaaggccttctcacacaaatccttaactcaacaaatcaagcataaaaagcaacccaaaactgccccacaagcatgagcatgttctcacaatttagagcaccaaaatgaacaaaatgcaccaacgaaaagcaaaaaactcaaggatngaatacttacttgttggagtgagtaga

SEQ ID NO: 7670 - DNA, 286 bp, Glycine max
agcttctttcacatgataataataccattccagagtttctatgtgcccactaatttaattacattgaattagagcttgaattacacaaaaatattacttcaatcagtacaacatccattaaccaaggcccgattttgtaggtgtataacaatgtcaattatgtacaaaagtcaagtaattaaattccctgtacgtaagggcattcatgagtgacatgaggctcatttgtgttgttattgtctttgaaaattattatatcttttgttcatttgttttcattatttat

SEQ ID NO: 7671 - DNA, 411 bp, Glycine max
tgcacgcatgcaagcttatatcaatttccttgctttcttttcttctcctacaagtgtttatggaaaagcttatcctaacagggtcagaagcataaacaacaaccttgaaacaatagtgataatcaaatgagagatgatacatagcagacaactcaaaaatagtgagtgactgagatatcatgttggttgagagcaactttaattcccttaaaataatttttcagaaaaaagcaacagttgcatcacaaattgtgaagttgaaggagctgatgtggcaaccaattatatgcaaactgttccttttataagattcaggtgcttatcaatgaaaaaggtaataagataaaacaacagcgtggaagagtgaatatggtgaaaacacaaaaatagtgtgctagatgtgggataact

SEQ ID NO: 7672 - DNA, 385 bp, Glycine max
agctgtgaaagatcatgctcatgttgaacaagagactagagagtgggttctcatcgatggactatttttatcagaacatcactatatggaaactcgctacacctctaatgccttcagacactcctgccttttctattgatctctcatcagaccttgattatcccggtgataactatttaatgaagctagatgaagatattgccgaactccatggggagaaaaagtaaaatctagagctagcgacatcatttgaggggaatccataaagcctaaagaaagcatcgattcatagggagttttatatttaaagttttaattctttctttccctgaagcttcttattttgtaatctaacacataatcgatgtgacaactcttatatgaa

SEQ ID NO: 7673 - DNA, 399 bp, Glycine max
gcttgtgtgatagaacaaggagcgcaatgaggtctttgttgcaagagcaccgaactgtttcaactgcctttggggtgataaagatacgtaatgcttctggtatgttgcgaacatacactatatttgcctgtaaagcataggaattgtctcatattttacaagataatgaatctatacgagttaatgagagagagcaactagaaccacgggaatgaaaaaataaaaaatataaaaagccacacaacacaagaataaattctccccttcgcaggtaaatatataaattatatatagagagagagaattattggacatgacagaaaatataactcaggtaaggatgattatatttcctccttgaacacacaatattgctattgaacaataactatataactg

SEQ ID NO: 7674 - DNA, 441 bp, Glycine max
  unsure at all n locations
agcttccttatgaagatntcctaaaaagctagagcttagttacacatacctctctaatggctaagctcaccttcttgagatgagaagctagagcttagctacacacctcctataatagctaagctgaccccatgaaaatacaaaaaaaaatccctactacaaagactacttaaaatgcctcgaaatacaaggctaaaaccctatactactagaatggccaaaatacaaggcccaaacgaaggaaaaacctattctaatatttacaaagataagctggctcatacttagcccatggactcgaaatctaccctaaggctcatgagaaccctagggcattcccttgaatctctggcccaatttacttggagtcttctatccaatgcccttgcggggtaggatggcatcacaagtaccctccacttgaactgatccacaagagat

SEQ ID NO: 7675 - DNA, 239 bp, Glycine max
agcttcaacatcagaccacttccagggtgctggatctacttcacatggatttgatggggcctatgcaagttgaaagccttggaggaaagaggtatgcctatgttggtgtggatgatttctccagatttacctgggtaaactgtatcagagagaaatcagaaacctttgaagtattcaaagagttgagtcttagacttcaaagagagaaagactgtgtcatcaagagaatcaggagtgac

SEQ ID NO: 7676 - DNA, 327 bp, Glycine max
  unsure at all n locations
agcttgccacccagctcgcccaggcaagctctgctcgcctatgcgagcaaggtggcttcctccagaagcaaccgtcttctggagggcccaagtgggcctggttgctatttgcatccccatttttactaaatacacccccaacttttttttgtgcttcttttttcgtaaagttacggaaacttatgaatttcgtaacgatacttgttttctttccgtaatgttacaaaaccttgcggatttcataatcatccattttntgacttacggaacattatggaatctcacgaattgtgcaacgatgcttcctttttgatttctggtatgtca

SEQ ID NO: 7677 - DNA, 331 bp, Glycine max
  unsure at all n locations
agcttaacatgtaaattaatcaatcacaccaatctatacaaacaagcattatcatggttgaaattcccaaacacaaccaatttgagttcacaagaaaaaccctcgttacctaagcttttaagagatccacacccaanaaggaaaagatgaagccttagagggagaatgaagttcacaagctcacaatgtcggcacnaataatttggtctccttcctctcttgtctntgccanaaaaaacaaatggagaagggttgaagcattttctcttttttcggataaggttgggaggttagagtgagtgaggaacaaattgagagaatcgatcgtggg

SEQ ID NO: 7678 - DNA, 357 bp, Glycine max
  unsure at all n locations
agctttgagcaaattcaaacgacaataactntattatcggatgtccaattgagtcccctaatatatcaaactgctccaaattgaaaatggaagctcgtagcaaatttaaacgagaataactttttactcaaatgtgcgattgagtcacgtaatatatcgagacgctctaaattgaaaacggaagctcatagcaaatgtaaaccgtaataacttttaactcggatgtccgattgagtcctgtgatatattgagacgctcaaaattgaaaacagaagctctgcgcaaattctaacaacaataactttttactcggttgtccgattgagtactggtatatgttgagacgctcgaaattga

SEQ ID NO: 7679 - DNA, 402 bp, Glycine max
agcttcatgatcctcagttatggctgtaaggaatttatcttggcaacaatagatcgtgcttagccaaggataagttgtcgcttactgatcaggctaaagcttagccgaattcatatcgaattgaagttagcttagcttatccttggccagcttagtggaccaaatcagcctcaaatgcaagggttgggggctaagcgcttgagactctacgcttagcgcatgaccaaagatgcgcttagcacgaagttggcgcttcgcaaaaggactgtttttcaataaatgttatataagttatttttcagtcccttcctcaacaaattgaaacccatatatctaacattcaaagataggttgatatactcctatgtatagattatgtagcaagttcccaatgatctaatg

SEQ ID NO: 7680 - DNA, 407 bp, Glycine max
  unsure at all n locations
agctataaacattaaaaagaggtttacataaattcacagatattcaaatatgggaataatacaggcacaataaccttttaattttataccaaaaggattacccacccgcataagctgttgaacaaaaagagtaatatcctttccaacaatatgaatcgatttgatgctactcccaataacatagccatctgtaacaggtacaacaggaatcgatttccaatgtcttcatttaccggctcagcctgtgagactgttgccatgttcgacgattccccatgtcatatccattntatgtaagtcggaactatcccatcacagataagatgagaatctatgtnctttacttgttgtcgtctcccatttgatagctgacacatagacaaaatatttccccacagagatagaca

SEQ ID NO: 7681 - DNA, 381 bp, Glycine max
  unsure at all n locations
agcttataggatggctgaagatcaacctcgcagagtcactcttgaggactactcaagctttactgtgccgcaattctttacaggtattgtgcagccagaggtgtaggcacacaacatcacatacccacattctttaattcagttgatacaatggaatttatttcatggtctacccaacgaggacccatatgcatatttgacaacatatattgagatatacaatactgtcaaaattgtcggtgtgccagaagacgcgctaagcttgttttcattttcactatccagtgaagccaagaaatggctacactcattcaagggcaacagtttgaagacttgngatgaggttgttgaaaaatttctgaaaaagtattttcctgagtc

SEQ ID NO: 7682 - DNA, 331 bp, Glycine max
agcttgcttggtagatagtcaaggcttggacacctactgtgggttggggcctggtatgctccctaatggggggatacggtgtcgtcacacaaatctacatcaaatatgttgtcgccttcaagctttcagcatagcattgttgttcctacttttaatcttccttgacaaccatgatatctcccatcaaggtggggactttcatcttgagatgtatggagatgatgactcctagctcgtttggtgttttcctgccaatcaaagcaaagtaggaggtatttgcaccaacaattaaatacctaattgtgaagctccttgagagatggccttgatc

SEQ ID NO: 7683 - DNA, 524 bp, Glycine max
  unsure at all n locations
gacacatttttgaaccgtctcgacccgngatctgtaagcctcctgcggcatgcaagcttgaaacctatagcataatcacttgcatcgcacattaactcaaattcttgcccctatctggtgttgtaattactggtgcaaacactaattntgttttcaaatcattaaatgctctcatacattcttcattgaacacaaaagcaacatctttattcaacaaattgctcaacagtttggctactttggagaaatcttttatgaatcgcctgtagaaccctgcatgtcctaagaaacttcttattcccttgacattcaggggaggaggtagtttctcaattacattgtccacctctttccctcttacttgaaatttatgccccaacactattccttcttgaaccatgaaatgacatnttctccaattgagaactagattagaatcttcacatctctgtatactctntcaaggttgataagcagccttcaaagatggcccaaaatagagaatcgtcatgaaacctcaatgt

SEQ ID NO: 7684 - DNA, 375 bp, Glycine max
agcttgcaagccaaatcgtaaaatgcttatacctgtatagaatcccaggcctcgaccgttagatcgtcaaatgattcaagatcgagtgatagagttacgagaaattgtgccaaacggagcaaaagtatttgcttgtttattctttcattcctaattttttggtaatttaaatatcttgttctgtcactgagttgtttttttttctttgatctctttttatgacttgacagtgtagcatagatgcacttttggaacggaccattaagcatatgcttttcttacaaagtgtgacaaagcatgctgacaagctgaaacaaacaggggagtctaatgtatgggacagtatccactattcactcccgtgccttctacctt

SEQ ID NO: 7685 - DNA, 422 bp, Glycine max
  unsure at all n locations
tgtgctagatggggtctaaccattctttttttggtgtacccctgatttgaagatggttgaacactagctttggtgcccacaaatcactttctgattagaaccttcttaacatttaaagatcttaatgctattctattttcatgcaattgggaaccagtcctttttaggaattntaccggcaacttttttttttgctcttttttgggggagggaaggactttggtaatcattgatgcagttccagcacaacaatgatgcttggttcagctaaaagttcattgaattttccagctaggtgtgagctagtatcagtttatataagaacttgtgtatacatttggagcatgccaaaaatggggttacttcaatgctcagtgctactattttaaagtgcanaccgcatcacgtgatgtaatctatga

SEQ ID NO: 7686 - DNA, 336 bp, Glycine max
aacaacactgtgacaaaaacaactgttagataatagcattcagataacgctaagaggtgatatctaatcgatacgaagctttcaaataatacttatgtaatcaagtgttatttggttgtcatcatcattcaacacttatttgaacaagagttttttaaattttagaagaaaataacatatggcattagctacacacagtggtttatatagtcattacaattttaggtttagtactcactatttcatctagctatcttgagtccctgtgttccctcgacccgataacctgcccctctaaacgcctcattcaaatgacatttaccacttactacacat

SEQ ID NO: 7687 - DNA, 216 bp, Glycine max
agcttatagattatataataaaagaacaatgacatttgaagagtctatacatgtttcctttgatgagtctaatgccattcttccaaggaaggattttttagatgatatttcagattccttagaagatacacatattcatggaaatgactcttaagaaaaagatgaaggaagcaatgaagattctcaagataatggagttagaacaaataatgaact

SEQ ID NO: 7688 - DNA, 273 bp, Glycine max
agcttatagagtatataataaaagaactatgactattgaagaatctattcatatttcctttgatgagtctaatgctatttctccgagaaaggatattttagatgatgttgcagaatctttagaacaaatgcatattcatggacaagattctaaaggaaaagggaaatgaagcaatgaagatcctccagaagaagccaaatcaaatgatgaacttccaaaagaatggaaagcttcaaaatatcatccccttgacaacattattggtgatatctc

SEQ ID NO: 7689 - DNA, 362 bp, Glycine max
  unsure at all n locations
agctnttaactcggaggtccgattcaagcgcataatatatcgagacgctcgaaattaaccaacggaagctctcgagaaattcaaatggtcataacttttaactcggaggtccgattcatgcgcataatatatcgagacgctcgaaattgaacaacggaagctctcgagaaattcaaatgttcataacttttcacacggaggtctgattcaggcgcataatatatcgagaccctcaaaatttaacaacggaagctctcgagaaataccaatggtcataactcttcactgggatgtccgattcaggcgcataatacattgagacgctccaaattgaacaaccgaagctctccacaattcaaatg

SEQ ID NO: 7690 - DNA, 396 bp, Glycine max
  unsure at all n locations
agctntataactngngtcanagctaccaggaatgagtatactcccatcaataaactcaaatgtgttcttagcacctaaggcgcgtctcataaaacgagcccatgcatggtaattagagccatttagcacaggagtgactgttacagacgaaggtccatctcctacatgaacataatacgggctggaaggatcttgcgatggatctgcaagaccacctccatgattgttgccggaaccacctggacgagccatcagagttacgcagatatggagctagacgctctgtgataccatgttaataaatgaatataaaagcaaggaaggagacaatatggagaaatgcattgacactcaattcatggaattacatcaggctgatgcttgttatttatatga

SEQ ID NO: 7691 - DNA, 442 bp, Glycine max
  unsure at all n locations
agcttaactataaagtttaacctcacattaatgcatcatataacactttctcacaccataggaagggactaaaaattgaaaaatgattaaaatcaattntagtgctagcaaaactaacaaatgacttatttttcccattgaaccttcttcatgggatctccaatcacaaaggttaaggttacaatcatttgcttgtttttaagtggcctaagtctcattcctctcgatgtttcaaaaaaagaatttcttcactaggggtttcagtcagaggatcggctgaattcattattgatttcacataaataaaatacttccatattttaagtaattgctttaccaaaatatctcttcattttttgacaatcgcaacgtacatatagaatatgcactttcctatnaaggaacacatttgctaagaaattttttacataatcaatctcat

SEQ ID NO: 7692 - DNA, 315 bp, Glycine max
  unsure at all n locations
agcttcctcggggccatttcctgtgaaggcaaactattggaaagttagttntaccaagaaatgctactcttaaaacacaaatggcatacaacctcctttaataaacacaaacatcaatgtaaatttagaataaactcatgcacatactcccttacgaacgttcacttgcacaagatattctcctaactaagaaaaatgcacccacgcacaatcaaggcaccttcgtcacctagattatttatatgtacttccgaggtgtattttgtacctacatcacaatgactttccttgcttaaattacacacacgcatactc

SEQ ID NO: 7693 - DNA, 428 bp, Glycine max
  unsure at all n locations
agcttagatatatgtaatgattaaattatgataatatttgataaataaaatgaatggttttaatgttaatataataatttattttagataaaataaattattatattaacatgagaaaacataaataaaattaaagaaaaaaataaaaaaaatagcaactaaaaaagggaaaaaatcacgtgtggttaaaatttaacaaaaaaacattatgatggtttgtatttcttaatttaatgaattattttggatcgatttangttcatattactcatatcgatgaacactctacataaaaattcaattcatataattaaaacttgaaaaataaaaatcatataattatagtatgatgagagaccaaaaatataattaatcaaaaataaatataaagggtattaccaatcactctcatgataattcttaatata

SEQ ID NO: 7694 - DNA, 469 bp, Glycine max
  unsure at all n locations
agctttatgtcataaataacaaaataaaaaccttatagtcctactagagattgaccctagaagagaatcgacactgcactaaactaccattatccaggccattggcagcaaggacagaaggaccaagctgaaccaaattcaacagtgagatgcctcataattataatgaaacacatatgacaaagtttaaaataaattcaattaaacacattttgagtttataggaaatttagtgcatgtttgtgggtagtttctgttcagttcgaacatgatgatgggtggagacttgcaagctntatttgggtgagtgttttagttgcctgatcatgatggacttctatggttntgtaactagtggtacgtgatcatttgtaaatattttacgcttaagtaagatataagtaaaattacacttgtatgtgggtcaattagtaaaaatatgctttttagcgtatgtgagtgcatcata

SEQ ID NO: 7695 - DNA, 415 bp, Glycine max
agctttattatgccctctcccctcggcagggatttcttcttcggcgaaggcgagatagttgttggcagtgatattattgaccagccctccgaaaccttctaccgagatgtcttgggccacatgggcctcgttcataacttttactagcagagcccgatgaggctcggagctcatgagtaactccaacagcgagaccctggccggagttttgttgagctgttcgataaccttgaattcgctctgctgaattatacggaggaactcactggcttcctctagcgacacctcctttttaccatcctttttctccggaagacctttcgccggaatatctttattcgaagcgtggggtgcttcaccatcttgttcctccaccacttttcctttccccttgatgttcgcgggttggactggt

SEQ ID NO: 7696 - DNA, 472 bp, Glycine max
  unsure at all n locations
ggatccttaagtcacctgcggcatgcaagcttctaaccaaaaggacataccttgaattaatttctttgatagcccctttgagcctatnttcccctttctttgttntgaagctcagtacaagccttaagtgaaaaaccatgatatcaccttacccttaaggaattttggaattgttttgggaataagctgggaataagtgtgggggggtatgtttcattgaaagatatgatttttggccatgcttaatgttttattttggccatgcttgatgtatatatatattgccttggtctttttttaatcttcaatttcgtactgttcaataaaaaaatacataaaaaatgaaaaataaatgaataattaaaaaaaaaatttagttcctgcaaattctgcaatttcgtacttttttcaaaaataangaagaagaagaagaagacgaagaagaagaagaaaagaagtgaagttgaataaa

SEQ ID NO: 7697 - DNA, 363 bp, Glycine max
  unsure at all n locations
agcttagctcttctttgcttatcctcggagtgagctatgacaaactctagcaccacttcttcaaggataggcttacgatctatgttcatcatggtggccttttcacattcctttagagattccagaacaaaatcttctagaatgtcttcaaattccttcgctgttaaggcaacaaatcttacatcctcaactangtttgttntatgttttttagcagataaagcctccacagaaactatgatgacttgttctatntttgaagcttacttcctttccaaggtctgatcaagtttttccttcttccttgatttagccaagggattcttattagcctttcccaaggcaacaacttcctttttactt

SEQ ID NO: 7698 - DNA, 228 bp, Glycine max
  unsure at all n locations
agctnttcgtcttacagacagcatanaagatagtttatacgcataaccactcgggtatttccgcccgtcagcgtgactcaaatgtgagtatgacagatcttgtgatcgcggaagatgacgtaaatctccgcgtgtcaacgggcttgtctgccgcgattgacgaacggcgcagaacacgacattagtctctgcgtgctatcaggcttttcgtcttacagacagcaaaaa

SEQ ID NO: 7699 - DNA, 344 bp, Glycine max
  unsure at all n locations
agcttcatttctcatattggaactgctgacacttatccaacatgaagataatgacgagaaatagcatggaatcgctcttaaagccatatcttctattccagaagaaagtgacaaagacgacttgaatgaaacacaataagatgatgagatttacttcttcgctaagagcttcaataccgttctaaggagtctaggaaatcaaagaagaacaaacttttatctcaagaaaaaaggagaagattcatcttatgttccacagtgctatgaatgtaatcaacctatacatctaagagttgattgccctagcttcaagaaaagaattggaaaattngacaggataacct

SEQ ID NO: 7700 - DNA, 298 bp, Glycine max
  unsure at all n locations
agcttagatgtatgacataactggatgttgctgagttattgtgagtcagactgagaccagattacctgttgggtttcgatgctccattntaaagaacgaacaacacacggttgttgcgtgtatgtggcgtttttaggggaacaaatattcttctactaatccttcagtgagggaagcaactagcatttggctatatagctcataacaagataacatgaaagaaaaagcaatacatttgggtagccttcatatgcttaattaataataatacccaatctatacttatatacataatata

SEQ ID NO: 7701 - DNA, 505 bp, Glycine max
  unsure at all n locations
ctgcatctttgaaatcatctcgacncgngatcctgatagccatctggagccggatcctctaatcacctgcggcatgcaagcttgatctttctttaagttccatcctatattcgttatgcattctatttctcaacactattattgtaaattaatattctcaaacatcatcatcttatttattgaataaggcatgcataagctaaccgaatggaaaactcagctatattggcacctctcatcctaaccggtcttaactacacaaccaaatatgaatcactcagagacaaataccacatcgaatgaatcagaggtctaataaccattcaagaaacttataattatgaagacctaatctatttctataaaactattcccactttccatccaaaagaggtagagatcttatccttcatngacccacaactgtaataatagattaataaggaatcttacattaataatctatattcgtcatattaagctctaatgcacataataatatgan

SEQ ID NO: 7702 - DNA, 278 bp, Glycine max
  unsure at all n locations
agctntatgttcaattgccccaatgacatctattcttcacatggaanaaggccaagaggcggacatgactttcagacgatggggcagaacattgacattgttcgcatacgctcgacatatatggcatttacttacatgggtgcagcaatcgctttccataacgagccaagaataacctgctctaaggatcttcctggccatagcatgcccattggcatgtgtgccaaatgaacccccgtggacttactcaatcatgtaggtcggctctatggcatcta

SEQ ID NO: 7703 - DNA, 361 bp, Glycine max
agcttcgttctcagatccctcttgttggactatgctcaatttagacagccctcctaggtttagacttacttaaactaagcttcatccttagatccctcttgttggacaactgctgtgcttagcacactgatcaatttggctctgtccagggtcacatcaaatgtgtgggaggtgggaatgaggttagaaaaggaaagaatgctccatgtctgagctagagtagtcatgttcttcctcaaaatcttcaaaggcttcccattagcattaagcccgaatcccctccctgggatacaaagcttagcagccaactcctgaggatcgggcctcacgagtgcaaatctggaatatgtacacaagttct

SEQ ID NO: 7704 - DNA, 389 bp, Glycine max
  unsure at all n locations
agctntacattactcctcatgcttctcaccatgtctaataaggttcgatttcttcattctaccacaccattctgatccggagaaccaggcatagtgtattgggcaacaatcccatgttcttgaagaaatttcgcaaatgaacctggtgcttgtccatcctctgtgtatctaccatagtattccccacctctatctgatctcacgatcttaatttgttttccacattgtttctcaacttcagccttaaaaactttaaaggcatctaaagcttcattcttagaatgaagtaagtagagatacatatatcgtgaataatcatttataaagcttatgaagtatttctgactatttgcgtccatgtctagacaacatatgtctgtatgtatgat

SEQ ID NO: 7705 - DNA, 438 bp, Glycine max
  unsure at all n locations
agcttatatatctcacacttacaccatggatgaatgtaacaaactaatataccaaatatttcattattactaaccaaaatctaaaggggtgtcgtgagtntctttaaaacaaaacattcaaagaaatcgttgaacgtcatttctcgaaaccaccaactccttaatatataataatattaacatataccattagccattattttttaatgtcaaagaaanttttcgtataaatatgccttgatgtgtcaattacttggaaaaagaaaagatctgcataaaaggaattactttctgcaattcaaaaagcttgcagtaacttattgaatccaatcataatatgcttcctatatatcaccatatcanacttttaaaaaacagttcataacatgcttttttaaatttggaaactattcttttatcatgacacatccttgacat

SEQ ID NO: 7706 - DNA, 439 bp, Glycine max
  unsure at all n locations
agcttcatagtattcctcttcaaaccatggagtatactttggagagggtggtggaaagggagaacgagcaaccctctttcctctatagctaggcaagcctcctttggttgtctccttcactttctctttctttgccttggtcttgggtgcagaggtcatgtgccttattgacttcatgtgtttgatcctttgttcacctattaatggaggttgaggatgaaaggtgacaatgattanggctttgagggggtgaagaatgagaaaaaaggatgtgtacaattgttgagggttcgtaaaagggttaggaatgtgacaaatgaggtttatgtttagtgaaaaagggtatttaaaacagaccaagttgtttttttgttctgccagatgtgtttagcttgggtaattgattatgaaatgtcataatctgttacgaatataccca

SEQ ID NO: 7707 - DNA, 465 bp, Glycine max
  unsure at all n locations
agctntactaattaanaaatgtactcttctaaggcttttacttatgttgttaagagaataaggagtagaagagaaacttaaccaaacgtaaaagtggaaattaaaatgcacagcggaaagtaaaagagtagggaagaaggagacaaacacacaagagtttttaaattggttcaacaacaacccgtgcctacatccaatccccaagcgacctacggtccttgagatttctttcaaccttgtaaaaatccttttacaagcaaagatccacaagggatgtaccctcccttgttctctttgaacctagtggatctaccctccactagaactgatccacaagagatgtaccctctcttgttctcagtcaaacccaagtagatgtaccctctacttgtaccacanaggatgtatcctccaatgtgttaagacaaagatctcatgcagtcaaacctttgatactttgtgaat

SEQ ID NO: 7708 - DNA, 439 bp, Glycine max
  unsure at all n locations
agcttagaaatatgttttaaatccaagcccataagtaaaatcaaatcaaatctagattagatgagataagataagatctagacgaaataatatctagatgagatcaaatctaaagtgtgtctagagaagataagatctaattctgtagaataaattagtctgccttcttcaagtccaagcccaattatggattcaagcccaagcccaattctagattcaagcccaatgcttcattaattgctgaaattatattaaaaacatcaaattagctgaatgggcctaaataataaaactgccgcataaatgtgacaattaagactaatcaatatttaaaatggtgcaaaaagggttaagacatatgagaanataatggcacatcacaacgtcgggccaaactgaaactgggaataaaatcacttatagtggataaaaactcaca

SEQ ID NO: 7709 - DNA, 416 bp, Glycine max
  unsure at all n locations
agctntgccgatttagtgttcgtcggcgaaactgtcaaagtgggtttgagaagaggcattattgattgtctcactttgacaagtaaaaagcctgnggcaaatggagagaatgagaaggaggaaggaacccatgttctggctgccattcctacatggccaaatttcccacctgcttaacaatgtcattactcacccgatatcagctctcctcgttacccaccacccaatcgtccacaaaggccatcaataaatcagccacaaagcctgccttccgcacaaccaattccaaacaccacctttagcacaaaccanaacaccaaccaaggaaggaattttgcagcananaagcttgtagaattcaccccaattccagtgacctatgctaacttgctcccatatctactcgataattcaat

SEQ ID NO: 7710 - DNA, 391 bp, Glycine max
  unsure at all n locations
gcttgcatgcttgctaagatgcattntgaagaatcataccaagaaaagtattacaatttataatctgaggcttgcacatcatgtcatgttgacatgagaagcatatataattgaacaagaaggaacataaattgtgtttattttattgaatacataccaagaataccagtataatatgaaagcggaacatcggtgtgctcaatgttgaaaagtatttgagttggggacaccaagctgaattcttcccattntgtagatccccacactaaagcacctttcttgaatctgggtgccagatttaggactattacactccataccctgtaatggctgatgtacacaacggtagagttagaccagccaaatttatgatcccaagagtatntcaaac

SEQ ID NO: 7711 - DNA, 415 bp, Glycine max
  unsure at all n locations
agctagagtatcattccaaatgtatggcttcaattacctgctaaaggcaacaggcacaattccagctctatattcagcaatttgcaagaaggcaggttcagccatatcaaagtgttgcagaggagggttgcaccaacccccattgttgttaggcaaagaacggtttggggggcagaagttagtggcagttacagtaatggagccaggtttgcaccatcttgggtcatcatcacatctcatttcatagcaagatccacagcttaagccattgttgaacaaagcagtgcttatagccacagtgtcagttccatagccctggctatacaaatttccatacccacatgctccacctgcatgtatanaatacanagcataaacatacaactcatcacttaactttcataaacacactcta

SEQ ID NO: 7712 - DNA, 363 bp, Glycine max
  unsure at all n locations
agcttatccttatggcttgcctccggacttcactccctgtgccactctggaagatttaagccaagcccctactttcgaggggcaactccccccttatgacgactatcccgggcaagacgatgaggaaggagatacccatcttggccgcctgctccacctcaaagatccgtccccacatgaactaccccaaccgaacatagtccgccatatcccggcctcaccctcacccgtaaaagaatttgttcccttcgcggaagataagggaaagattgaggcgctcgaagagaggttaagagcagtcgagggccttggcaattacccattctcggacttagcagatntatgtctcgtgcccaatatcgt

SEQ ID NO: 7713 - DNA, 265 bp, Glycine max
  unsure at all n locations
agcttgagctcactgttcctgccccacaaagcttcatganaattgttacggccatgctcttccttgcgagccctcttggtctcttgttccaaagccttggtggtaactatatttatacctcttagttnggcattctcctttcggatcttaaaagctgctgatttgaacctttctttgactatttgggcttgctcgagttctgccctaagggcctgcacctcttcgtatttcttcggtgcctcaacttcctcccttatagtggttc

SEQ ID NO: 7714 - DNA, 342 bp, Glycine max
  unsure at all n locations
agctatgattctaagaatgaaatagataaagattactttgtaatgactaaattgatcaaagatgtactcccgagacatatgataaangatgtatatagtgataagaataaggccttttaaatttaattttgagaattaattttgctgccgcatattttattcaatagtttcggttatcacaagtactcagacacttgtttaaaacatctgcaagaacctataaattaacacaggagcctcgtatgcaaaatgcttttgaatgggaaatatatgttaagatttacagagttgttgtatttataaagtgactcatgaatatataagtctttttaacttttctat

SEQ ID NO: 7715 - DNA, 421 bp, Glycine max
  unsure at all n locations
acacgttaactcgcttntgatctctatgaatctgctgcaaatcaactatcaagacgtcaacgattgcgcgagttgcttaaacaatcccaatcagctcctcttaccgaggaagaacagataataactatttatactggaacgaatggttatcttgattcattataaatgggacacgtaaggaaatttcttgttgagttacgtgcttacttaaacacgaataaacctcaattcaaagaaatcatatcttctaccaagacattcactggggaagcagaagtccttttgaaggaagctattcaagaacagatggaactctttttactacaggaacaggtagaagaaaattgattaatcgtttaataactctataatgtcactttcaaattcttatacattagatcttttaatatctctttatttc

SEQ ID NO: 7716 - DNA, 426 bp, Glycine max
agcttggagtagaaagaggaaacaaacatggaaccttgttgcagaatgatcaagtcatgcttaagttgaaaaattaaaggaccatttcgttgctcgaaacattcttgaagatcattccagattgctttatcagaagaacaatgtaacactactaaaataagtagtttcaatgactgaagttaactacattcctttcaaacccgttgttattttttaaccggcggtattttggttaataaaagaaatagttcaaagacgatgaatgataaacccgttgttattttttaacgggtggcattttggtgaataaaagacacatatcaaagaccgtgattttctaaacccgtctgtgaatgacgcgagtctttatttttattgtgactactcaactcgtgtcataagtagccttcgcgtggacttcctcac

SEQ ID NO: 7717 - DNA, 383 bp, Glycine max
atcttatctatttctccatcacccggtccctttaatttaaatcaagtgatgcattactaatgagattattacatattttgaggtaatcatgttaagaatagtcataagagtctatatattacttattgttgctaggtaactgactctattgttggatcaagtatcctcagaataattaagacagggggttgaattaattgttcctaaacctttactaattaaaaattactcttctaaagcttttactaaattgttaagagaatgacgagtagaagataaacttaatagaaaataaaagctcaaattaaatgcacagcggacagaaaagagtatggaagaatgagacacacaagagtttttatactggttcggcaacaacccgt

SEQ ID NO: 7718 - DNA, 359 bp, Glycine max
agcttcctcttattagtgcacagctccttcaagaatttggcatattttggaattttctttattgcatccagcagaggtatgtttacctctacttttctgaatgtctccaagatctctttctctgcctcttccatttttttgttggaaactgctcttggagggaatggaagaggagggatgtgctgcttctgcaaattaccagtggaagattcacctgcacagaaattgttaggtaaatttttgtcatcacctttttctggagtagagtgaagtttggcagattcatttgtagatgaggaaggtgctatgggttgaggtccttgacactgctttcccgacctcaatgaaatggcactgac

SEQ ID NO: 7719 - DNA, 392 bp, Glycine max
agcttatttaggcaatatagacctcagccttagacacaaatgacacagtgctcctaacaacaccacactattggacacctgtactactgacatattccctcaacagaaattgtaattccattctaacagaatacacgatctcatcattacaaaggattctgatcctaacaacctaatggacatagtcctcccacccttgaggcttccttcccatacccttgggcctgtggtcataatcattatggtgcaaattggtatcatatcccaaaaccagcacacacatggatttttaagattacaaactaaaacttcatttaggcatttcaccaaacacataacttacaacccattttgcaaaaaaaaaaaaaaagagggagagagagtataaaacg

SEQ ID NO: 7720 - DNA, 410 bp, Glycine max
tgcagctttgagcaattcaaatggtcataacttttttcggaggtccgattcaggcgcataatatataaagacgctcgaaatttcacaacggaagctctcgagaaattcaaatggacataacttttaactcggatgtccgatttatgcgcatcacatatagagacgctcgaaattgaacaatagaagctctcgagaaattcaaatggtcataacgtttaactcggaggtccgattcaggcgcataatatatcgagacgctcgaaattgaacaaaggaagctctcgagaaattcagatggtcataacatttaactcggatgtccaatttaggcgcataatatatcgagacgcttgaaattgaacaacggaagctctcgagaaattcaaatggacataacttttaactcggat

SEQ ID NO: 7721 - DNA, 436 bp, Glycine max
  unsure at all n locations
agcttgataagttgatgacgaattgccacaaataatataattctttgataagaccgaatgtttcacacaagaaccaagagaggcactcttttaactgtgtataatatgaaatttcatcaaaactgccaacaaagtgtttaaggagtctatttataactcctactaataacccttgtagaagcaaagcttccaagcttattttgatgatgccaaagactcaagtcaagaatcaagattcaagaatcaaagagtaattcaatcaagaatcaagattcaagtgaagattcaagaagaagactcaagatatgcaagaacttcaagaaaagcatcaagataagtataaaaagatcttttcaaagaaaagaggataacacaatttgtccaaagaattttcanagaaaaacctttaccagagttttactctctggtatcgata

SEQ ID NO: 7722 - DNA, 401 bp, Glycine max
agcttctacctacatagcatatgttcaccacacattaactcgcatttctttctcggtttctgatgcaaaatacattatatgctgtatgtgatcggctccatgccagtgatccacgtttacaatgacgatcaaatttgaaacaacggatctcattttcacttcgcacattctttttttacgataaaaatggtgcttattcaataattactacatcacacattcattcgttaggattggatcgatgctacggaaatcgaatctgaaaagacgaataacaagcgcagaaagttgcagaagcattgcaaaacgtttatgatccagtttgtgattaagttagggttggaattgtgggaaaaaagaggtggagatggagaagaagggaaaacgtaccacggttgatg

SEQ ID NO: 7723 - DNA, 343 bp, Glycine max
agctttgtactactccaaccaaccttggtacgttcctcccctaactaattacctctcttctcttcttatttgcactcaatcactcatatatatgcctgtgctgtcattccttgtttgcaatgctctaatatatgctctaaatcatcacttgtgtcatgtaatctacactactcactatgctattaagatatcaccttctactcttgatatatctcgtatagttgtattccttgtcttattctactaataaaagatagacagcgtgcaagaacacatatgggtttatatttcttggttagttagctatacttgaatttttgaaacggaaccttaacatgccatc

SEQ ID NO: 7724 - DNA, 338 bp, Glycine max
  unsure at all n locations
agcttagccacaggtcctttgtgctaaggattcaaggttggagaggaanaagagagtgaaatgagagtgtctaattatgtggttcagtttgggttaatttaagtatatgactcttcctcttctttatatgcacatcccatcacttcctatattcaactactttgttctcatcactcaagacccacttatctcaacctaaatactctaaaacttactattcacacccaatacaatattttcgcatatgtaaacataaacatacatattagcatcacacaccatcatctcataataattagttaattataaacacttatactaaatataattcctcaatg

SEQ ID NO: 7725 - DNA, 180 bp, Glycine max
ttctcgataagaccgattgtttcactacaagaacctagagaggcactctcttaactgtgtataatatgaaatttcatccaaactgtcaactaagtgtttaaggagtgtatttataacttctactaataaccccttgtagaagctaagcttccaatcttaatttgatgatgccaaagactc

SEQ ID NO: 7726 - DNA, 397 bp, Glycine max
  unsure at all n locations
agctataaacttcacagatgagaggagaagcaaaatatttataggaaatggtgaggggtctacacacaagagtaaaagaaagggagagctttatgcacaaaatcagagtgaatagaaatggcttaagtgtttatcctttcacggtttttagtcaatatgatcggagccaaaaatccctccttgtgcctttgaattttcagctatatatgactctccaccaacaaggtatgagagttntattttcttttcctttatgatgtatatataagagccttgaaattggttcagaaagaggtgtattcanattggttaaagaaatcaagttaactaaaatctggaagttaatgacttaattacgatgtcaatcacatacatgtgagaactaattattcattat

SEQ ID NO: 7727 - DNA, 331 bp, Glycine max
  unsure at all n locations
tatttctttgagataatacttaaaataatattttttttaanaaatactaacttctaaattttgtatttattctctttntatccttacacatttatntaaatttctttntaatcttttctatttttttattatatatgatattgatataatatatacataatttatgtggttttattcttattttatatactttataaataaaaagctacaagtgcttaanattgatttaaaactaatattataaatattacaaaatatatttttatcacaaaaatcaaataaaattttgtataaaagcattacataaatatatcccattatgntattatat

SEQ ID NO: 7728 - DNA, 432 bp, Glycine max
  unsure at all n locations
agcttagattgaatccaaagctagattgataaggcaaaaggacactcaaagaagatgctgagagtagtgttttaaaacccaaaccgaaccgataggtcagattggtccaagataaagcctttcgattgtagcttatcaccagaaagaattttccagtaataatttctagagaagaaaagaaggagaaggtggaatggcttggttccaattcttcatcccaaggaaccttatcatcacaaggataataggtatgacttaattccgaatctccaaaaacatatcaggaaaccaagcttcaagagatgctggaagagactaagaatttcctgagataaaatcttctaccttagcttccaacaagctacgtaattgatatggaatattacaaagattcacaacanaatcactattagaaaataatggtttaacatc

SEQ ID NO: 7729 - DNA, 538 bp, Glycine max
  unsure at all n locations
cgccgtggattgacgcccattganacgcgcgatcctgagagttcgattgcctgtccgcacgctgggagctctaaaacacctgcagcatgcattctattggtggagagaacaattatattatacttatataattctgagaaatacttaaatatattttattaaaaatactcacttctaaatcttgcatctattctctccgtatccctaacgcatttatttaaattttgtttgttagtctctttctatttttttatcatgatatgatatctgatataaatagtataactcaagtttgatggtggcgtccatctctttatatttaatcatacttatattanaatgaaaaatgcctacagacgtgcttatanatatgattctaacaacttactattattaaatattacacaaatttatgtttatcacaaacatcaaatataattttgggtaaaagcctgacataaatatatccattatgtattattattttggaattttcaacttcagaattaaggaaagctccttttaacgtatgtaactn

SEQ ID NO: 7730 - DNA, 521 bp, Glycine max
  unsure at all n locations
ggagtgcgttgagaccgatagagagacgngannttttggagatgatgtccnttcgagcnacctntaaatnnacagcggctgcaagcccattctagatcctggagtggacacgttctttttgacagacctacttgagcagacctcttaaacgaagcgtaatccctagagccctcttgttggacaactgctcgtgcctaacctatgagaacaatgggtctgttcaaagtcacatacaatggtgtggaggcggtcctcacgctagagaacgatagagtgcttcctgttttgagttaagtactcacgatcttcctcgacatccttgaagggcaaccttttctttaaacccggatccccactctgggatccgcaagctaatgactatctccagatgattcggcctctccaaagtaaatctggtgtatatcacgatatatcccactctgcgcgatccagaggtatttaaaaggggtgcaaaatactcatgaacttctttaaagaccttcccacccctgtctagggcc

SEQ ID NO: 7731 - DNA, 304 bp, Glycine max
taccttgctctgcgggctctcgaatactattattgggttcaacatctcaccattattatgtgttgatgttaccatattgccaaacaactggaatagttcaatctcgctgcactttctcttatctgtgatagagaaatggatattgtagaatcttaacccgcagcaccttggactgtggacgttcaactgaaaaagatagatctgtaatcaaacaagaaccctacttttcctgctcacttgacccattttgtattcaaaaagttgaatatagtttcaattacttctgatcccgaggcaagagata

SEQ ID NO: 7732 - DNA, 519 bp, Glycine max
  unsure at all n locations
cgcgatgcttgaaanccnattcgnacacgnngatnctttagagtcgatctccatgccagcancctnatnnntgtnatggaatanctacaccttactttctatcctataagattgacgtatgttattttaacttcaagatggaatctgagcttaccatggattagatagtgagacatcttctactgtccaaagatctacctggcctcacagctgtccctatgcagtgtaataaaaaagtctctacagctccatgcacctaaaggcctatactatgtcgtaaagggagcgttacgaacccatctcgactataaatatgggccacagttcacaacactctctacctcatgtactaattctgtgatcgagccttggcccacccacttcaaatgaaataatatgtttactgatgtgtactcaacccatatccttgtatgagctacttatttatatcgacatgattcctcactgccagtaaaagaggggatctgaccaattttgacgacattgactccggacacg

SEQ ID NO: 7733 - DNA, 440 bp, Glycine max
  unsure at all n locations
atctctgagtcacctgcggcatgcaagcttgtgattcctcaatacatccttattaattgtttaattcttacttcttaaatgtacgttatatacttgttataggaaccttataattctaagtatatattagtgtagtatggtgttctgccttaattgcatangtagtatggttggttgtgatttcttgttcttagtgatgctaatactctatagttggatgactcatatcaagttatatttcataaggaatactcttttgatcgtaccttctaattctagtgcaacctatntttttttgtgtngcgtgcttaagtcaaataaattgagttcacttgaaagcctaagtataattattctatngtatagactacatcaaacaatnggatactgatgttttatacaatcagtgattgtatgtctcatatagtgacattgggcat

SEQ ID NO: 7734 - DNA, 373 bp, Glycine max
  unsure at all n locations
acattcaataattactggtaatctattaccatatatgtgtaatcgattacacagtgcanattttgaattcaaattntaatagctattgtaaatcatttttggccattggtaatcgattacatcctctggtaatcgattaccagagagtaaatctcttgaaaaagactttttaacttaaatttcttggccaaaccttttgctacttcagttaggaattcccttcctatntaatatacccttcctaagaatctagagactgtcttgatcatnncatctgaatatncttaatttctttggcttgaataaagctttgagaacatatgatcctttggcatatcaaaacattcagcttgattccgtgctacaatctccc

SEQ ID NO: 7735 - DNA, 338 bp, Glycine max
  unsure at all n locations
agctntggagtttccaagtgccaattcgtcttcttcttttgtccagtcttcttctggcttcaattcattagagggctttccttctgtgtccagcatcttgggatgttcccagcctttgatgacagctttccaggttctgctatccagtgatttgaggaaggccaccatccttgctttccagtattcatagttggttccatccagaattggtggtctgttcacttgtcctccttcttttctcatgttcatcagaaattatctccctagatctcactcagtgatttcgagtgcctgctctgataccaattgaaattctgatactggggacagatgtcgta

SEQ ID NO: 7736 - DNA, 437 bp, Glycine max
  unsure at all n locations
atctctgagtcacctgcggcatgcaagctnttcgattcattctatgtacccgtagtggtccacattgtgtttcgtgcatntttattctcgttntgtttactttttataccccctgttgacgtgcttaagccattttacttaagtcgtttctcgctcaacttaaaagtaaaataaatttccaccgaacgtttgaattgtattatccattaacttcgggtaaaataaattccgaccgttcggtcatgtngtaaccacgttgganatcanaaagaggtaaaaaataatataataatcaaaaagacatcttttagtaaaataaagcggaaaatcaatcggacgttntctctttgggagttctcattcttaatcgaattggataataactaaagtgaaactaaggctataatcaactcgcctagtcaagctcgtccacaaaa

SEQ ID NO: 7737 - DNA, 252 bp, Glycine max
  unsure at all n locations
gttagctntgttcgtcaatgcttngaccttccaccaccatctgcatagaattagattattattattatattntaattntaagccttgtatttggctatgttttatgacatttgaatacttagtatttcttttcatatttacttagtatgactgaacatgatgattatatttacttgcttttggttggttatggttatgtgtgttaaactttattatttttatgatatatatgtctagtgatatgtacttaca

SEQ ID NO: 7738 - DNA, 437 bp, Glycine max
  unsure at all n locations
tgcacgcatgcaagctatataccctagcaactcanaatctaggtatccataacccctcaatttaatggattttcaaggtttgagaagtgaaaatgagaatggggtaaatttggagcaaactctcacctcacacaagtctataacatcaatctacacttgctcaaactggttttacgcctaatattctgtcgaatcaaaatttgactcctcaacacccaattntaccctagaaatggctcatgcctctactttggtcattagctttctctcttgacagnccaactntctcataagtataaatgacatttcanactaggaataactccctttaacctccaaataccactaaattcagatttggccttcaactctcaaagcttcactctttttcactcaaacaccatattctactttctaaccctaggtaaccctaccct

SEQ ID NO: 7739 - DNA, 347 bp, Glycine max
  unsure at all n locations
agcttgttcgcacatcgttcgcgtgtatgatatccattccacaaggtttgaagtagaggagaccttcaatcctataacgcaatgtggcgaacaaaagtgggcagttaacttgaatggtcatcattgtcaatgcggaaggtattttgcgcttcactatccatgttcacacattattgcaacttgtggttacgtgaacattaactactaccaatatatagatgttgttacacaaatgagcacatcttataagcttactctgcacaatggtgaccacttgggaatgaagcggctattnctncttctgatgacgcatgaacacttatccctgacccaactacaattcatgc

SEQ ID NO: 7740 - DNA, 367 bp, Glycine max
  unsure at all n locations
agcttcaagaatgtgaagtagctgctggacggccataactaagaccataacatcacttgaataaaagaagccaagtctattgtagtcttctgatttctgtgtattgtaatcaagtgatgttatactagtaagtctttctcagggttggctcaatcgacacaatccaaactaacaatgtatttacttcgagtctgattagatctagagaatcttatngtatctacttggaaaagtaaaatattcaattttcctaaaatcagtcgcttgcaaaagccacaaagaagagacgcganaaagtgtttgttcaacaatcatatcaattgataaatccggggtgattggttaaatgaacttgccatatcaattc

SEQ ID NO: 7741 - DNA, 575 bp, Glycine max
  unsure at all n locations
tttactttgtcgagactctaatttactttaattcatntttntgaannnaannnnagcctatgancctgaaccttgaccggatcttaagcgactgagctgcaacttctatctattagaattatgaagtttctaatgctgaaatcatgggattaagaaggccatgaccaatccctattctattatttaacaaaaattcctaatgaaggtgagccctttgagggtgcattgattgatgattggaaattctatatttctgtgcctgatgcccgccggttggtttgaccacccaaatggatacgaccggaacgcttcttgcgcgacattgagctttgaaaccgcatcctccataccttattgtccgcatttactcccttaaacttcaaaccttgcttangtttctgaagaatatctcatagacgagtgggccttacataaagagttacataatgttggacacacactgctagatatcgcttgcttaaacactgccacgaatgccccatggctataccttatcatgttcccttttccttaacactttacaacgctcttattatgcacctatgtcaatcaan

SEQ ID NO: 7742 - DNA, 436 bp, Glycine max
  unsure at all n locations
attntaccccactataacctataaaagagtatgatatggttttccattaaattattgtggtcgatactcaaccccaaatgatctcattccaatcagatttntactttgctaccaataagaattgctgaacccatttgatttagggtgtaatttttctgatactaggatgcataaaattgcgctccataattagtancactttctcttatgatttgtatatgaacatattctntcttttaattccttacactaggacacgtagtaacatttgtctttattatttaagaaattaaacgagtacaccataaatttattattttgcaattcttggacgactataacaacgcgtacattatcatggtaactaagaaatattgngtcgataatcacaaatgaatcactaacaaacacactatgactggcctctcaccgaaan

SEQ ID NO: 7743 - DNA, 280 bp, Glycine max
  unsure at all n locations
agccttcaattttgaatatttagaggtacgggtgcgtttatattgatctcctacaaagctttctgatgttcctttgcttaaacttatattgcatgttatttctttcgcagagaaggtcgaacaacacactaaagctttgatttttatctcaacaaaacgacgatttttatcaccgtaggtgcatagacccataaacggaacccgtcttctgctaaagatgcgattttaacatcacatgtcttcatttgtccacctgtcttctgcatttnttcttttcgtt

SEQ ID NO: 7744 - DNA, 523 bp, Glycine max
  unsure at all n locations
tcccacccactccatttnattgtataaacatattngnaacnnnnnnnnancacgatatgaacttgancncgttaccaannnacgcagcagcaacngcanccnnaaaaaagagcgcggtattaggtgaaaaaaacacctcgataaacttcatccttctttccaaaaccattaggcaccgagatngaagctcaagcgagattcctgattccttaatttccagctagaaagaaattaaaaagaaacccctgattattaaatatagactagatcgctcaccgaagaganataccaaacaaccttgaaggaactacgaacctctttcagggatgactatcctataacttatgatgcaacatcgggtgtcaaatcagctagttattttcttctccactgactaattaccaacattccaaaaaactaactaactctaatctaaacaactgactgattgttataagttaataatggtattaataaaactgaccgacactaatatacaaagtagaatccaataacccattcg

SEQ ID NO: 7745 - DNA, 451 bp, Glycine max
  unsure at all n locations
gaagaagaagaagttcanagagattcaaggcttgtaaaggattgtattggattgttagaaagattgattaaaaatgcaaaacaaagccttgcttttatagactcttcatgtctggtcaagagaaccatttagaagagttatgacttttagaaaaacttataaccaatttgaaaaagtcaaaaaccatttgaagagttacatctttttgattattcagaaacaatcattggtaatcgattaccaaatcagtgtaatcgattacacaaagcttttaagtgaaatgatgtgactcttcacatttgaatttgaatttcaacgttcaaaggcactggtaatcgattaccaaaacatggtaatcgattacagctttttgaaatcaattggaacgttgtaaattcatttgaaaattttttcanatccattttactactgggtaatcgatacaataatc

SEQ ID NO: 7746 - DNA, 473 bp, Glycine max
  unsure at all n locations
atctctaagcacctgcggctgcagcttttatccaaacactctcttggtggtgaagtttctccttccatggcttattccctagtggatggcgcctcctcttacctcttctcctttatctttcgctacatctccatggtggaaaatcaccatcgaaggacctcattgaagctcaaagatccaacctccatagaagcttctcaagcaagcttccatcacttttctttactctaaccatgatgatgaatgatgtaatacanatatcatatgttttagaagacacaacacangataacaaccaatacanattccacttaaggggagtaggcatgtaaaagtctaaaaatcttcaaaacttctttaacatttgccttgagaggtngttcaccatattgctgatctcattgtactccccctatctctaacaatctcccttttttttggcttgatgatgccaaacttaaatatgacattga

SEQ ID NO: 7747 - DNA, 261 bp, Glycine max
atacttagactatcctaaaaaatgatagctctttcaattggaaacccaagattgctaaccagacctttaagtcagatcccatcctttattgcttctattagagcatgcactctacctttgtagtggataaaaccacaatgggctaaagagtttccttccaactatcaagagagttgccaatcatgaatgcgtaccttgtcatagttctccttgcatccaaatctacagcatagtcaaaatctaaataaccaacaagagcac

SEQ ID NO: 7748 - DNA, 218 bp, Glycine max
  unsure at all n locations
agtcatcaagagattattatatgtgaccatggcatgaatntacttatcaatcatataatctatctttcaatatcttctttcatctctttcaacactttcaatagatctttctgatctatntctcttcatctttctaaaaggttttgttcaaacactttctcttccaaaaaaagttctttggtcaaaacttgggctattcatattttttattctcttct

SEQ ID NO: 7749 - DNA, 394 bp, Glycine max
  unsure at all n locations
agcttctttgagaaaacttccttgagaagctagagcttagctacacacacccctctcataactaagctcacctccttgagaagcttccttaagaagattcctaaagaagctagagcttagctacacatacctctctaatagctaagctcacctccttgagatgagaagctagagcttagctacacaccccctataatagctaagctcacccccatgacanaaaacatgaaaataacaaaaaagtccttattacaaagacaactcanaaatgccccganatacaaggctaaaaccctatactactagaatggcaaaatacaggcctagacgaatganaacctattctatattacaaagatagcgggctctacttacccatgggtcgaatctacct

SEQ ID NO: 7750 - DNA, 388 bp, Glycine max
  unsure at all n locations
agcttcctcggggccattgtctgcgaatgcaaacattnggaaagttagttttaccaagaaatgctactcttaaaacaaaaatggcacacaacctcctccaataaacacaaacatcaatgtaaatttagagcanactcatggacatacttccttatgaacattcactcgcacaagatattcttctacctaaaaaaatgcacccatgcgcaatcaaggcacctttgttacctagacttatttatgtgtacttccaaggtgtatttgctacctacatcacatgcaacttctttggctaaattacatacatgcatactcaaagcatcttggctaccaaaaattgcacacgtgcacattcttgtatttctaatacctatgcatatacaaactt

SEQ ID NO: 7751 - DNA, 284 bp, Glycine max
agcttctcggtggcctcgctgttcgcatgtataacatgttactctgctaatgcattcttctagttggtgatgtgatttatcattaggcaaggattttaggtttaattattacgaaattgttgattacttgctttaatgtttatgtttcatcatggtggattaatgtaaaagcaagatcacctgtttatattatttgatttgagttaacaatttatttactgggaattttactattggtgttcataagttgtatacctagtcctagatgttaaccgggcattctt

SEQ ID NO: 7752 - DNA, 289 bp, Glycine max
agcttctcctttgctccctataactgattgcagttctcgagagtgttggacctctttttagcattagggtggaaattagataccgagctattacagagagggtcggagtttcgcctattgtatagaagatggtggaaaatatacttaggtggtttgggcatgtacagagaagaccggaagactctgtattgaagatgagtgacctgatggagagaatgcacacacttcgatgcagatgaagacccacaaagactattcgagaggctatcaagaacgatctcgaacttaa

SEQ ID NO: 7753 - DNA, 362 bp, Glycine max
  unsure at all n locations
agctnggatngatttggtctgacgagggatcgatgtttattaatttaggctacgacatagaacacaagagcatgattgattagagaaatatatttatatgcatcagcttgtttatttgaaagacccaacatttctacctactactgttacttttacttaccttgcattntatagtttttagcataaaagtttagtttaaattctgtttgaaattatcaatcatacatgttctctcaacaatgcttcatttctgaacttaacttaggctaacattagttccttgtgttcgatactcngattcnatccatttaatttttaaatacttgacaatccagtgtgctttccggcaaaccgaatttccc

SEQ ID NO: 7754 - DNA, 308 bp, Glycine max
  unsure at all n locations
agcttctcaaggatgtgagcttacttatgagaggtgtgtgtgtagctaagctctaacttctcaaggaagttntctcaaagaagcttctcaaggagagtttctcaagatagcttctcaaggaagctacctagtctataaatagaagcatgttgtacactcgttgtaactttgatgaatgagagtcctgtgagacacaactcanagttcaacttcttctcctttttgctccttcgatttcgtgctcccccctctctctttctctccctctgtctttttcaccattgaagcattctctccaagcttttatc

SEQ ID NO: 7755 - DNA, 157 bp, Glycine max
  unsure at all n locations
agtcaaacgacaataactnttgactcggatgtccgattgggtccggtaggatatcgagacgctcgtaattgaaaacggaagctctgagaaacatcaaacaacaataactnttaactcggatgtctgatggagccctgtaatatatcgagacgctcaa

SEQ ID NO: 7756 - DNA, 322 bp, Glycine max
  unsure at all n locations
agctntgagaaaaatcanacgacaataagtnttatctcggatgtcctattaagccctgtaatatatcgagacgctcgaagttgaaaacggaagctctaagaanagtccaacaacaataacttttaactcgaatgtccgattgagtcccgtaatatatcgaaacgctcgtaatttaaaacagaagctctgagcaaaatcaaacgacaaatacttttaactccgatgttcgattgagccctataatacatcgagacgctcgatatgaaaacgggagctcttaagaaagtcaaacgacaataacgtttgactcggatgtccgatt

SEQ ID NO: 7757 - DNA, 333 bp, Glycine max
  unsure at all n locations
agcttagaacaataaacttggccttctcttaattgtctntgggcttggcgaccacgatcaacaaagtactttcggcacctactatatgttgacttgaccaatgctgttattggaatgttgcgacaatctttcaacacctttttcacacattctgataggttgttttcatgtgaccatatcgtcgtccagatgtatcgtaagccatgctccatttntctttngaaatgcgatcaatccatcttgctatggctggagtcaatngacgaaatttttctaagttttgatcaaacacatgcttgcaaggagtgtacgctgcatcaanattgtatcatc

SEQ ID NO: 7758 - DNA, 254 bp, Glycine max
  unsure at all n locations
agctntgcgaaaagctngccgctggagctgacccattaactgccctaactcctttagactagtggtccctaggctcttgaccttgacttgatagaacctttttttaagtgaaggcatttgacttgatcacatngtttactaaagtgagcaaaaatcggtgcgaatcaaaactctaacatttatcatgggtggaattgatgaatgcatgaagatatgcatatgacacagatgcgtattatgaatacgggagcccg

SEQ ID NO: 7759 - DNA, 377 bp, Glycine max
  unsure at all n locations
ctgcagcttaacttcggctgtgcatactggtgaataattgtggcacagtagaacttgaataatcctccagggttactcttcttagctcttcagccatgattggatcttcaacaggttctatatgagaatgccctacaataggaaaactagaagatgccttggaagatcaaggttcttcttctggagttgctgttgcttctaaatactgcaaaaaaaattttgattctctctgaattacgccttctacaagtggcattaatctccaaatcattgggaatcaaatcacctgcagtagatcttctttgcatacaagaaaacagaacaacaattatccagttcanaagaacaatgaatgtacggtaactaaaatatgaact

SEQ ID NO: 7760 - DNA, 390 bp, Glycine max
  unsure at all n locations
agcttactntaagtatttctaatatttctgttgtgggaattcttttgtatntttttaaagcagattcccattcttttatactttnttttaaacaagttagaacctattacttccaaagccagtggaaggccagaagcataagttactgcacgttgcaagacctccacgtaatttggatcagctttttcctttttaaaagctttccatgtaagtaactgaagagcatcgttctcatccaattccttcacctcatatgttgtaataacttgatgaggtgctagcaattgtttgtcccgagttgtgatgatgaatttgctgccgggaccaaaccaatctggtctaccaacaattgcctgtaattgctcgtgcttgtcaacatcgtctagaatc

SEQ ID NO: 7761 - DNA, 411 bp, Glycine max
  unsure at all n locations
agctngtatatttcattntcatctgatacattatctacaaagaaagagtaagagcttggaagaaccaaaataaagcagttctttcatgacaatgactgaaggtatattttgattctattttccgcatttgttaatgacttgtgtttcatttttgttgtttgtaacatcacaggtttgatattttagtcttacaaggattccaaaggttaacttaatttgccatttttttatcacattaattcatctccgataataagtgaaaggacaatgatgtgggcaaagtgaaagggtggagaaaattaaagctttgtctgaagtagctactntgtatgggtggtacatagaagatgggtaagtgttctttaaaattagatgaattgcctttttttgagtccatgcttttgttcacat

SEQ ID NO: 7762 - DNA, 239 bp, Glycine max
  unsure at all n locations
agcttaacctctataaaagtttcttctcttatggtctcanatatagccacttcttgtgctaacttaccaacttgaatatctagacttttagatgctcgttgagtagattcaattgtttctttgaattgcatcaacaaattatccaaattagaacttctttcttctggatattgattgtangggtgtaactcttgctcccactgataattttccatggagtagctcttgtcaacctgaat

SEQ ID NO: 7763 - DNA, 168 bp, Glycine max
  unsure at all n locations
atttgtgcccctgctattctagaagcatggccaaaagtncaagtgctggctgattatcctgtaccttctagcatattggtgaggtttgattcctctattgaagaccaaacggttagttaataacatagtcgtctatatgatgctctcagctttccttcttatgaatat

SEQ ID NO: 7764 - DNA, 347 bp, Glycine max
  unsure at all n locations
agcttgtattattgttctaccagcatattaaaaccatcaattntctttaaagttggagaaaaattgaaattntataaatatttaattgtaatcattcttttattatctatctaatcacttaaattcaatttttgatttggaatctcttttgtctatatcaaacaatctcaatctttgttcattcctcatatactttcattcctattcattcatatcaaccaaacacaccttaaagagaaccagctcttcaacgttcctactcagagagaggtatatcctatcctttctttatttcccatcatccggtgattaagtgagaagtaattttacattgngcttttgtcctc

SEQ ID NO: 7765 - DNA, 310 bp, Glycine max
  unsure at all n locations
agctttgatgatgttgtcttcaccgatgaaaggatcaaagtangtctaaaaagaggcaaatctgatcatcatgctttgatacatgccaaaaaaaactagggcaaatgaagagggtgagaatgagggagaagcccatgctgtggctgccattcctatacagccatgtttcccaccaacccaacaatgtcattactcagccaataacanaaccttcttcttacccaccgtctagttatccacagaggtcatccctaaatcaaccacaaagtctgtctaccgcacttccaatgacgaacaccacctttagcac

SEQ ID NO: 7766 - DNA, 328 bp, Glycine max
  unsure at all n locations
agctngtagaatggctagacatgatacatgtcatggtttggtttggttcaaggataaaaagggatgccccacattatttccatgacacaaatgcaaaaatgacgatttggaaattttatgcaaaactggttatgcatgcacctatgcggacactcaagtgtcaaattnttatggtcatgtgatgctagggctcaagaattcatttctctantttagtcaacccaacgtttccaaaatatgttcttttatcaatttgtgcattcatccgagtccattttgggcgtctgggaaaatcttcacagcattcacccttcaggtgtatacacat

SEQ ID NO: 7767 - DNA, 339 bp, Glycine max
  unsure at all n locations
tagtcaatttttnttctattaatttcaaaaagtnggcattttttaccatcaaactaatatcttcatttaactntcttttttttatgaaatatactntacataataataataatgaaggtcgattgtattatctaaagagattgtttggntgaaaaaagaagataatattatngttttacatttttcaaaaacataaatatccagggaatagtttatttaattatttaattattaaaaacctaaaataacaataatgagatgaaaactggcttcatatttggctataagtatgtggcagcagcagaggcaataaagttaggaaagcccttgaccccttct

SEQ ID NO: 7768 - DNA, 377 bp, Glycine max
  unsure at all n locations
agcttgcaagtgtaacaaccaaaagtgtacagtatcaatactcataactttgataagntagtgaaaacttgatggttgccaagaactagatgtattattgaggtcgagataatttgcaatattagagtttttggtggccgataccgatgatgttggaggtgatgagaaataatttgtattcgatggggttgagcttttaatctactcacagagaatccttaggttttaaatcactaacattncctcttcgtgagtgaccactgcggtgtttacctcatgactntggtacaggcgcgagggtctaccattcaacgtggtggcaatgatgagaacaaccacgagcagtagagcaaccaaaccttcaagtcgtaccacca

SEQ ID NO: 7769 - DNA, 158 bp, Glycine max
  unsure at all n locations
agctnganaggtggtactatagaggattacaaggttgtaaactaatataatcgtgcatattaactacaactgcannttaatttataagggaannattgtaattgactctatgctttgccatcttaggacaacaacgtggatgaagatcttaatgatga

SEQ ID NO: 7770 - DNA, 263 bp, Glycine max
  unsure at all n locations
agcttttacaaaagagnttctactctctggaatctattaccagnttactgtaatcgattaccaatagaaaattngttntcaaaagctttcaaactgaatttacaacgttccaattaatttcaaaatggtgtaatcgattacaagattttggtaatcgattaccagtgtgtttgaacgttgaaattcaaattcaattgtgaagagtcacaccctttcacaaaaatgctttgtgtaatcgattacaatggattgtgaatcgatta

SEQ ID NO: 7771 - DNA, 177 bp, Glycine max
  unsure at all n locations
agctttttggagtagaaacatgggtctctactcattttatttcaaatataaaggctgtatctagncaagggctgagagaccatacaagtttcctagcgacttctaattatgtgggccattaagtctatcatatgttgacaatagccgagaagcccatgaatctctttggggcggagt

SEQ ID NO: 7772 - DNA, 351 bp, Glycine max
  unsure at all n locations
ctgcagcttatgtaagtcaatttaggaggcatctcggataggatcttttccgtgcatatttgcgcanaatctcttgaactaggaagatgttgtccatcatctttctgttcttaatgaaggcagtttgagtttccccaataatagtctcaagcactggggctatgcggttgaccaaaattttagacataatcttgtataacaaattacaataagatatgggtctaaaatgggtaacctgggagggctaatcatgcttaggaataagtgcaataatagcatggttgatctgctntannaattttctagttgtaaagaattcattaaccgcctcaaagatatcatcaccaatga

SEQ ID NO: 7773 - DNA, 356 bp, Glycine max
  unsure at all n locations
agcttatgcatnngaaagtggtttgatcaatntctcagatactttatttaaaagaaaagcgtatgatgnaacaatttgagttacagtatcacgtaaactaagattatcattcaggatctgttttctcatccatgccttgcacagttggttggtcatgactcatgatatgattgtaccttntaggaatgataggtttttgatataaatggccggtaagactcccttagtgaattgaaaaagtatctgatccatggcatgttagaatgtgtttacaaccattggtgccaatgatggcngaaataacaatgcatggttaatgaatgggattttnggatgcttgaaagcttacaatcata

SEQ ID NO: 7774 - DNA, 307 bp, Glycine max
  unsure at all n locations
atatcatgaaactaccctacacctagagaacagggtagaggcagagaactctacccaaaacacattcaaattccacagctttccttactcatataccccagtaacattctcttcgttccgattcgttaaccgctggatcgccttgaaagttctactagaggttcctagtacataaatctacattttgaccgttgggatctgctaaaaacggcctggaacccgaaatgtactattcttcccatgactagcaatgcacaagcnatttctgcacatgtngaaaaattctgtgcacaatcaacaagcattt

SEQ ID NO: 7775 - DNA, 329 bp, Glycine max
  unsure at all n locations
gtcacctgaggctgcaagctgcacaagatatttnntttgccgacattgttgcaatttttatttatgtgncagcaacgccggccaataatagttttagtacgatcaagcacattctcctttttgatttcgctcagtaataggtttaccatcgaggtcgcctggggtatttcgtgggaactcaaccgccgttgtgtttcggttgacattggccatccttgatagaagaggcaaagaaaaatatagccgaccatggcggcagaaaaaattctcgacaaacttggattaaaaacaattctagccgacatcggccaagaacgattaccggtcgc

SEQ ID NO: 7776 - DNA, 475 bp, Glycine max
  unsure at all n locations
acctgaggcatgaagcttgaggattatggngtacccatcacatgtggtactaggtggtggtcgggcaatggtgcacaacaagttttccacatccacaaatcgcgcataaacccaccatcccctgttgcccacctccaactgagctcacgtactcccacgtagcccatatcctcgtttctctcaacaccgggtccccatcaatcctcccaatctttccccaacatccaagtaactcaacattcaaacaacacaaaccatcacagccaagaaaacagggcataggcagaaaattctgcccaaaacaccaaccaaaatcacagctgttctcacttataggccccangaacaattccttcgttccaattctttataccgtggatcgaactccaaactttactggaagtctctagtacataagcctacantttgaccgttgggatctactagcaaacatgcagaactcattctacattac

SEQ ID NO: 7777 - DNA, 329 bp, Glycine max
  unsure at all n locations
agctnntacatcaaatttagtaatgatccaataactctagaattaaaagaacttaaagccactaacctagggaattaaaagaacttaatggccgagtgtaactaaaattgtggcaaccaaaagtcaccttcagcagccatcaagccagccaccatttggtctcccaaaaggctgatgcctaggttgccaattgggcccttattacaacttgaaccaaaccaaactaaagccttttagttgattaacccacaacatatttttggtcagccaactttacaaggattgagccattatttagacaaactanacactctanaaatgagacaaag

SEQ ID NO: 7778 - DNA, 270 bp, Glycine max
  unsure at all n locations
agctngcatctgcccaaacctcttttctcattgcaccatcatcgcccttaacaccaaagctatcatcctaatccatgtcgccaccacatcgaaccatccttgtgtcttcgcgttntaatttttttgttgtcattaacttccctattttattttatttttagtggaacttgggtgagtttaatatactatagtttctttgattaatagtccaccacatgtaaagttttgaaagcattcgtaacttatgatattggtaccaaatcttagact

SEQ ID NO: 7779 - DNA, 382 bp, Glycine max
  unsure at all n locations
agcttaccttgaatacagtacgttgcacagcgcgtcaacagccaataaggcacaatgaccctaggtggcgatggtgccacgacaatgtaccctaggttgcgggggtgccgcgaacaatacgcgacgcagaggtagtggagccgtgacaatgtacccttccttttgcggagctgacagtggtgcgacggagattgacctcaacaggagacaccgactaatagcacaataattttcagacactgaggacgatgagtacgcgtgttcaattatcgcgcaagggggacatatatatatgaaaccatgttaacgacgatgtatttctanacccgtctttgacagtcgatatgtctacaacggtgtttacaaatacaccgtctttgat

SEQ ID NO: 7780 - DNA, 301 bp, Glycine max
gcttctatataagctgaacccatttatcaataaacacaagttgagtgttattcagaaaattagagtttatctcttttatcttagtgagagtgattctcctaaattcttgagtgattcaagaacaccctggctgtatcaaaggactttcacaacctttgtgtgttgccctcgctggaaagagtgattctttccttcctttcatcttcacccttgttctttcaaatcacaattccagaaaattcacccctgcccagaaatatctcgtggccataactcccattttacgcactcaaattaagtg

SEQ ID NO: 7781 - DNA, 410 bp, Glycine max
  unsure at all n locations
agcttgtaggattatggggtacccatcacatgtggtactaagtggcggtcgggcgatggtgcacaacaagttttctacatccacaaatcgcgcataaacccaccatcccctgttgcccacctccaactgagctcacgtactcccacgtagcccatatcctcgtttctctcaacaccgggtccccatcaatcctcccaagcttccccaacatccaagtaattcaacattcaagcaacacaaactatcacagccaataaaacagggcaaaggcagaaaactctgcccaaaacaccaaccaaaatcacagattntctcacttaaagaccccagtaacaattccttcgttccagttcgttaaccgttggatggactcgaaatattactggaagtctctagtacataagcctaca

SEQ ID NO: 7782 - DNA, 116 bp, Glycine max
  unsure at all n locations
agcttatcataatctattacatagctcnttttgagacaatgnagtgatttttaggagtctctactntaatcgattacttctctcttaaaatgtgcttcagaagtgatcacaacttt

SEQ ID NO: 7783 - DNA, 284 bp, Glycine max
  unsure at all n locations
agcttcaagagatcatccnctcgacaacattattggtgatatctcanaaggggtaacaactagacactctcttaaagatttatgcaataatatggcttttgtatccatgattgaacctaaaaatataaaagaagccataatagatcataattggatcattgccatgcaagaagaactaaaccaatttgaaagaaacaatgtgtggaaattagtagaaaaacctgaaaattatcctgtcataggaacaaaatgggtttttagaaataaattagatgaacatggta

SEQ ID NO: 7784 - DNA, 196 bp, Glycine max
  unsure at all n locations
ctttctcgtcaattctagcatttcactcacacttacctactanagaaactgaagtagcaactgatctcattattcaacaacaacaagaggcaaggaaaaggtagactactctcctgcacaagtaaaaatgtgagcatctcttatatgcatagcaaaaacaaacccttttatagcacgaattatcctcactatattt

SEQ ID NO: 7785 - DNA, 509 bp, Glycine max
  unsure at all n locations
ttattgggccctttgtcgcgtgatcttgagacacctgcggcatgcatctatctcatggagcatacgagctgcaagaactacatgctatatcaactccgacggaatgaactgcaacccatctgaagttctatagtagcttacctactgtaagaccaggcgttgtattctttctcctactcaagggcttttgtcccgaaagagaacaatcacggttttggcatgataggttgtaacgacgctgccctggggagcgattgaanttgctctcatagactacattgaataagagtcgatctcccttcagctatataatctctcgggcgaccctacgaggctcatccatccgcgtttgccttgtgagcctcgcacacgcggatgaacacttctggtgcatctcaagagctgccaactaaggtcaccttgtgaatgcgatcttaacgctgtacaccctggtctccataagaggtccatcttcaagtcgtacactaagtcgtcttggagctcgattc

SEQ ID NO: 7786 - DNA, 320 bp, Glycine max
  unsure at all n locations
ccttaccgcctcaataaacataggctaatcagcaggccaatacccaataataagtaaaagttgcaactccgaatgaaacattaaaatctatgtgaatcanaatgcagaaagaaaataaagtagtctgattaccctcttgaagagcctcgatggttgactgcaaatcatggcggtctttgtctaggctagacattttctttctgcaatatttattatgaaaagttattttgatataccccagaaataaatatattaaaattcccgagaaccatcaaagaaaggagatgaagagctgacagaagatcaaattccgtcagaat

SEQ ID NO: 7787 - DNA, 377 bp, Glycine max
  unsure at all n locations
tgatattgtcacagaatacacttgaggcacctcctccatttcatccaccccacttgaattctagtcgcgcattagttaaaaaggtgtatatttttacagcattgaggagaaataataatcaagggaataatcattctattttcaaaataataattgttacagctgtcatgaattactagtagttagttagagggggtaagaaaataaatatgaaagactgacagagggaggagaataatatatgtaagaagagttggcctctcanagagctaagttaggattgatgcagctcttgctacttcatngtatttgataaagaactatccaacgaagaaaagtttgacttatgtgagctcaaattggatggactaatcact

SEQ ID NO: 7788 - DNA, 112 bp, Glycine max
  unsure at all n locations
ctgaaaatatctaanaatctcaccaaataaaggtccttctccttcttggaaggtaccacaggatatggtacttccatactttcggtcacaactttatcacctctactcctct

SEQ ID NO: 7789 - DNA, 451 bp, Glycine max
  unsure at all n locations
tttttgttcactttctatctcatattttnnaccatctgatgtctgactttacggatctagccctgttcagtaattacgcgaatatgttttattgcttttgcaaacggaaaattggccaataagatgggaaaacattttgtttatatccattgttaagaataatagctcctattgggctcatgtaacaaacgagggttagactgaagaattttcctttgtgtattatcaatatgtctaacgacatacatgacaaaaaggtgaacgtaagaataatgtcaggagccatgtgcactaacacatcccagtatgaaacttcatgagaaccactcttagtgactgcccccacaactcttgcgatgtgtatgtctacgtgaggggaacaaatatgataaatggtggattcgagggatcttaatttttatcttctttagtcgacgtgtatatttattcg

SEQ ID NO: 7790 - DNA, 433 bp, Glycine max
tctaagcacctgcagctgcagcttgaggattatggggtacccatcacatgtggtactaggtggcggtcgggcgatggtgcacaacaagttttccacatccacaaatcgcgcataaacccaccatcctctattgcccacctttaactgagctcacgtactcccacgtagcccatatcctcgtttctctcaacaccgggtccccatcaatccttccaagctccctcaacatgcaggtaatacaatattcagacagcacatactatcatcaccaagaaaatatggcaaaggcagataactctgcccaaaacaccaaccaagatcacagtttttctcacttaaagaccccagtaacaattccttcattccaggttcgtaaccgttggatcgactcgaaaattttactggaagtctctagtacataagcctacatttt

SEQ ID NO: 7791 - DNA, 575 bp, Glycine max
  unsure at all n locations
aacccttcatttttcgcattcttcgctattattcctgttnnccnnaattcatattgtgatcttgaaacctcagatcgagatctctaagcacctcagcatcaactttccgtttagcctctctttaaagatctatcggtcttaaactgggaaatcgctctcctgccttaaataatgcaaaaactactacggcttccgattacgataacaatgagggagaaacccatgctgtgactgacatttctatattgcaagtctccaccaagccatcatagtcattactcttccaatatcatcccatatccttaccaccacccattattcacaaaggccgatcctaaatgtaacctacaaacccacctaccacacaaccaatgctaatcaccctctttatcactaaccaaaacaccaaccaaaaggaattttgatcatatagcctgtaagatccacccgaaattccggcgtatatgcttacttgggttcatatctactcaataattcaatggatcactatccctgtaaggttccaacctcccttctccatgaaacatctgacacacatgtctattcttgaggcc

SEQ ID NO: 7792 - DNA, 470 bp, Glycine max
  unsure at all n locations
cgagatccttaagtcacctgacgcatgcaagcttgaagggaccactcacatttttactcccagtatctcttctaacaaattctttcttcctacacctatactgaccgctcctttcacaaccaattaacacaaatgaactccttcctccactaccagtctgtgtgtcagaccttataatgactgcaacaaatctattttcatgagcaactgatcgagcccactgcaaaacatcatctcgggtatcaaacacctacaacgtaacccaaaacaatttagttttctacaacacattcattntatcaaatcactcacaataacgaacattattacctaagaagtattaaacgcatccgaacaatcaacatgtggttcgttcacaccacatnctttgtcatttgatcatccatatcaacttcttctgacttatattgcatacatcatcgacttcgtcatctaaaacaaaaaatttt

SEQ ID NO: 7793 - DNA, 347 bp, Glycine max
  unsure at all n locations
acattaatattgattaggtaaccagtgactcagcgagtaagggtctctttcgcgaacttagtggagggtgaactaactcccttgccaataccaccaataaaaacacgaaaggcaatatgaacaaacttttaaaaataattctaaaagtaaaagtaactttttaataaataaaaagtttatataaattccgagagagagagagagaaactnanagaaaaaacggagttaaacattacaggttaaaaaaaagtcctaatccagaagcagagtggaatactgaaatgtattaagaaccaaacaaatagcaacttgcctttgcacatacaggaggttcaacatgacataat

SEQ ID NO: 7794 - DNA, 317 bp, Glycine max
agcgtctcaatatattacgggactcaatcagacatccgagtaaaaagttatcttcgtttgaattagctctgaggttcagaattcaatttcgagcgtctagatatattacgggactcaatcagacatccgagcaaaaagttattgtcgtttgaattagctcagaacttcataattcaatttcgatcgtctcaatatatttcgggactcaatcagacatctgagtaaaaaaggtatggcgtttgaatttgctgagagcttcaacattcaatttcaagcgtctcgatctattacgggactcaatcagacattcgagtaaa

SEQ ID NO: 7795 - DNA, 535 bp, Glycine max
  unsure at all n locations
taattacttcttatcggggtactatctatattgtaaaatataannnntnnaattttgatgaacttgaagcggatctaagcactgagctgcaactcatatatcctatttgatttgagagattaatggttaattcaatctaaaatttaaaatatcaagcatttaaatatattgaccccactgtcatctttgactgccagaaggggggttggaaggttcacaataaattagcttgattcataactttgaaataccaaagcaattaccaactcgcatgattcttatttccctggattaatataattgtttgactatcatacttgccatgaaaacagtcacgtttttattcttgctttaaaaatattgggatcacaactatttctattaatatttttgccctcttaccaaataaaaaagatatcttgcttgtgctttggtaacaagaaaatatattatactcttgttgcgtgtgaacgtgaatgcccccataagtatttaactcattgacacactggattattatataatccactcttct

SEQ ID NO: 7796 - DNA, 585 bp, Glycine max
  unsure at all n locations
cctcattacactntcaacgcgancataatatgttgtgagcttgtgaataatannnntnntagtacnngngtagtgaggcatgagcnctggattcttccatctatctgcacgcatgccagctngagactatgattctacttgctcaagagatcttatagatgtgttccctcttgtattgtggcttgagtttagtggtaagagacccttttctttcccctctcatcttctattttcatttgttcgtccatgagcactatcgggaagtaataaaattgaccattctctaggtcttgatgtgctttatgctgggtttttggtggtctggatggtgtgcatgatgcacaacggttgtgtgagtaggagaatagctttatcctggacctaaagcccctcaatcccctttctttcttcttctcataaacatgtcttgattttgtaaggtatcgaagcttaaccttctttacttatgctggtgtgaaccttgtctcgctccttatagctctctaacttgacgttcttccgaaatgacaattagttagggttcatgtatccattgagtgcttgtccacatctcacctcactgcg

SEQ ID NO: 7797 - DNA, 394 bp, Glycine max
  unsure at all n locations
cttataatcgattaccacaagttttttaaactttntataacatcctctagaaatttgaatttaaattctaaagcttgcaatcaattacaacttgtgtgtaatcgattaccagacatgagaattcaaatttcaaatctgaagagtcacaactcttcagaaactaactgtgtgatcgattacaacaattatgtaatcaattaccagcaaggaattgtcgaacataactcccaagagtcacaactgttcaagaagttttgaatggctatcaaggtctataaataggtgacttgngacatgaaattctgaaaaagagaatttcctgacaaattgtctatcctctcaaaccaaattgcttatactctcaaaagaattcttgtcaaacacttcaaattaa

SEQ ID NO: 7798 - DNA, 343 bp, Glycine max
  unsure at all n locations
tgagatcatctgagtcacctgacgctgcaagctttatttatttcatacagttaccgttgtaatcggacaaaattgtagctattcttttttagatatggaaaaataaaacactagtggtaaagctagtgtgttggttgaatgttttctcatgatgcagaaattattaattgattntggcatccatataaaaggagaaacaaaacatagagaaagtcaacacagatcaagggggctgtattctgatttatcttacactctattaaagcatagtaggacatagttgaagtttcaaagggacgtcatataacatgaaccgcgtcaaaatcattatgttattatgcat

SEQ ID NO: 7799 - DNA, 293 bp, Glycine max
acactgctcactatcgatggcgatgttctacgtttctatattattattattattattattattcagctatctagataaaatgaatatcaattgtatctaagttaatcgtctaagctttttacaagatcaaggaattattctatgcaataaaataattgtcttacttaaaagaaagtgttaatagtgttgatacattggagcaatcattgaaaatttgcaaacatggattaactaaactcctctttttctcttatggatgaaatggataaaggtctatttccagggatgtcact

SEQ ID NO: 7800 - DNA, 329 bp, Glycine max
  unsure at all n locations
agcttcanacttcattccatccagtcactttctcttttcttcactttccatggcctctctaaagcactcaaattctctatcatctgttaggatcacatactcattaggagaatacctcttagaaaggtgtctctcccagttggacctcctaagttgaacttgaggtgattcggtagcctcaccgagaatttcatcttgtgacatgtcatgctcctcttcatcatcatcatcaataggaacatatacctcatctccaggttgttggacaccaacatcattctgaacatcaatattcaaattctgaataggcggctaaactagttgaaaat

SEQ ID NO: 7801 - DNA, 276 bp, Glycine max
  unsure at all n locations
agctngcgctcattataatgagatggagggagaatctgccaagacgtcatacactatatttatcatcacctgaatatttatataatgtgcccccttgattcttttgatagggacaaaaatgtatgaattgaaatcaatacattatatntaatctcattggtttttacttgctttccctgatcagcacccatccttgagagatcagcncgagaaataaagactcatcctcataccctatgatctacaatagttatgtttgccatatgtttctcattg

SEQ ID NO: 7802 - DNA, 262 bp, Glycine max
  unsure at all n locations
catgcaagctnntcatttcatatttcgaccatctcgaatattaccggactcatccggacttccgtgtataaacttattgtcaattcaatnttctcagagcttcggatcaaaattttgagcatcttgatatattacgggactcatttagacatccgagtaaaaatttattgtcgttagaatttgatacgagcttccgttttcaatttggagcatctcgagataaaatgagaccctctgtcgggcatcccgaaaaaacgttatt

SEQ ID NO: 7803 - DNA, 125 bp, Glycine max
tgtgagcatagtttccaaacccttataggaaaataggcgatcgctccagtgctagttttgcttaacctgagagaaccctctgaggcgtattgtgatgcatcaaagatgggcttaggacgactgtt

SEQ ID NO: 7804 - DNA, 356 bp, Glycine max
  unsure at all n locations
ataaggtctcgattcaagaggtggattcaacggaggaagagcatatcacctgtacttaccaaaatntggagttggcacatgtcagagtggacgtgggtaacgtgcgctcctaaacttcacatgttggactgatagtgacctttgttagaaggacaagaggggggacttgtgtaacaccctaaaatatcgcttattataaatcaatatttaatatatntatcgnngttattgattatatgattgacttgaatgagtttaggtatggtgtgaattaatcatgtgtgaatttcttgatgtgaatgtcgagttatgtggagtttattgacctaagttgaaatatgagaattaaatttacc

SEQ ID NO: 7805 - DNA, 495 bp, Glycine max
  unsure at all n locations
ntgacccgtgagctcggctcctntcatgcanctgcggcatgaagcnttgcttcctattcttctctgattnntcttttcttgctgncagatgccctttgtgtttcaactttattctttaaacaattacacattctctctctttggctaataatccgttgggattacacggttctccaatttttttatttaatggaaaaaagaacctttcagcacgtaaaggctgtttttctttttaccccacccacatccactttacaatgcttatcattagatttgacatgccacatctaggagcttcttatacattaccttttttgcttggaaatacacctccttttctatattatcctcctattcaaagataacaccttccacttactgactccatctttttttttgtttgtatgtaccgatactcacaccccctacctttcttttgtcctttcaacatacattttcttttcttttattcacatacatcctacctgctacacc

SEQ ID NO: 7806 - DNA, 204 bp, Glycine max
  unsure at all n locations
tacattcctgggaatggttttacaaaacttatatcaaaagtggtaatgtgatattcccaagtccacattcccaggaagcttgctcaacacaccttgaaacaagaaccacccaaatgttcaaaacttacctaccaatttccaacagactcaaatcanacagacaaatgcagcaatttgcaataattaatttacctttaaacgatg

SEQ ID NO: 7807 - DNA, 332 bp, Glycine max
  unsure at all n locations
agctagaggaaacccttcgcattgtaccttttatttcccgcaaaacccaaaactgtctcagaaaactatgatcctggatttgttaaccgctggattatattcgaattgngatatgttgttagaaattcaattgcacaaactttcactgttgggatttgcaagataatatttgtggagggagaaaaatgaatcacatgaagatagtgcaagtggagacttcaattccttctcattctctcntaacgttggggaccctatcagagcaaccagaggaatctcaagaacttgttatagatgtctctattcgctgcggaagacatgtgaacccgctt

SEQ ID NO: 7808 - DNA, 347 bp, Glycine max
  unsure at all n locations
agcttgtatgctngcactagttctttggctntacacactaactcagacaaaatggtgacccaatatgcttctcagttcaagaaaaccatggntacattcatcattgacttttggacaaggaattcagggaagtaacaactagttgcaagtaaaacttacatattcttaggaaagaaatgagcttgtacccttggaatagatctatcttctacccaaatgagaattttgagagcagctctagtggcattggattacatgtgtcaatcgnagaccagacatgacacataacccacaccgtaggaaataacatcaagcataaatacaggagggagttgatgttttatttt

SEQ ID NO: 7809 - DNA, 261 bp, Glycine max
  unsure at all n locations
agctagacgaaagtagttgagtaatatatcatacttcaagagnaaaaattactcaacctatanttgtgagtcatgatngaaatgagaatttgacaaaagtatcgaattactcgagtaacataataataagtatggttttcacaagaatttgtgcaataattaaataattaatagtaaattagatattgacgcgtgcaatgcatagattaagaaatatgtaaatcgtatgattagaattagaattatttaaataaataaatc

SEQ ID NO: 7810 - DNA, 88 bp, Glycine max
agctcgtaatggtaagataagagcatcacacagtcttctaataagtataagaaaaactataagtataaaataaagtagatgtacccta

SEQ ID NO: 7811 - DNA, 443 bp, Glycine max
gagatcattcttctccacgtaaggcgtgtagggagactcaaaccctataacgggatgcgtcggctcaaagggctctcaaaagaagtaatgccaggatatgccatgtggctagaggcctataataacataattgcctaaaccatttccaacaatgcatgtgacacttgacacatatccaagtaactctcaattgctctcttttacacaagcactaggtgtctatcctctcgaaaacatatatccttctcctttactctaacgtcgaatattgaatccttactcttcttcctccttcatgatcttccatttgctttctaccaggtgatccttctctctttttctcgaattttattctttactctcctcttaccgtccattttatcttctattctaccctttctcgctttcttttttcttcttatttcatctctctctcctctgcc

SEQ ID NO: 7812 - DNA, 131 bp, Glycine max
  unsure at all n locations
agctcgaaggtgttgaaatctcattcttccaaattcttttctcacaaataatctgtctcaatntagccaatgaatacctttattatgattgctgcgctttcccacctgagaaattcatatttccctaattc

SEQ ID NO: 7813 - DNA, 508 bp, Glycine max
  unsure at all n locations
cggtcnattgaaccatctgcactcgggatccggaatactataagcgcctgcggcttcagccaatggcttgcctgaccaatttctatttatgacctttgaaccttgatatcctttccttggtttgaagctcactacaagccttaagtggacaaccatgatattaccatattcttgaggaatttttgagctttgcaaatggtctgcgaataagtgcggggggttatatgttcattggacaacttgttttgttggctatgcatcatgatgtatttcgggccattcttgatggacattgtatattaggtaaatgttggacatgctgaaagaaaagctgtttctcacaagctacaacaaaaaaaagacagttcggataaaaattagaataaatactgagcagcccttccgttgcgtgaatggaatcctaaatggctcaacaacgacgaaactcttaggtcttcctctcaagaaaagatctgatctgtactaagtctattgtcatatttggacg

SEQ ID NO: 7814 - DNA, 458 bp, Glycine max
  unsure at all n locations
agctgntgcctcanaacacattgnttcccacatcctatgctctagtaatcgattaccagacagtttaatcgattaccagaagacaattttaaaaatcagattttaaaaaaggttttgaattagaatttcgaatcatgtaatcgattactagatgtttgtaatcgattaccagcaacgacacttcagaaaaaactttgaaaagtcatgacccttcaaaatataactgtgtaatcgattaccagtgaagaattttagaaaaagctttttgaaaagacacatatcttcaaacaattttcaaaaggcacaaagggcctatatatgtgtgtctgcattgtaaaatcaagagagagatattctaagagaacttaattgccaagtgctctctcaacaacttttgggaaaaacacttccaaatctattgagaattcatccaggaacttcaaantgtattatcatct

SEQ ID NO: 7815 - DNA, 273 bp, Glycine max
gatcgaagaacgatgaagaacgaatgaagaacgtcgaagaacgggtgaaacctttgcgaaattcttcacggaaaacgttacggaaacgtttcggaagcgcctcggcttagattttcttcacggaaacgaattttccaagccaatttcaaagagagagaagtgccaaaggggctgaaccccttccttcttcacttcctcccctatttatagcaaaataggggagggtggtgccgcccagctcgcccaggcgagctcagctcgcccaggtgagcc

SEQ ID NO: 7816 - DNA, 444 bp, Glycine max
  unsure at all n locations
agcttattatccaagatcgctaagaagaagatcaaggaggctggcagcgtcgttgttctcaatgcttgaatttgatggtgtcgcttttttgaatgatttaggttttttttattttgttccaatatgtctccttttggatgacattgttgttgttcaatctatgctatatttcatgatttaatttacggttttattattttaatttatgcattttagaattttgcttatttatgttgaatttaatcacgtttaactatgatagcttgatgatgttaaaatctatcgaaattgttaaaattgtgcttgttagctnttgtattgttggacatatgacatttgaaattaggttttatgctatggattgaacttcacctaggagtnttgttctttttgtgtgattcattntacattcggtaaatgacaatgaanacaagtgattagagt

SEQ ID NO: 7817 - DNA, 470 bp, Glycine max
ttaagtcacctgcggcatgcaagcttcttagtttcgtacttggtgacttggcaatcaacgcattgagcaacaaagcgagagacgtcatcttgaaggccgggccaataaaaattggtcatgagacgagccacggtcttggcgacgccggcgtggccaccggtgggggtggcatgatactctgtcagcagggtggtgatgatgggtatatcggaaggcaaccagatacggcctttatacaacagcagtttgtcagcaatggagaactcacggtggtggtcgggatgattctgaacatcaagcatcttttgctgaaaggtcgaattcgtgcgtgactggtcatggagctcatctaaaaaagtgagacaagggacggagagaatgagaaaggcttgagaagctcctttcggtaacctagataaggcatctgctgcctgattatggctccctgagcgatactggatatgataatc

SEQ ID NO: 7818 - DNA, 412 bp, Glycine max
agctagaagccattgtctccacaccgcatctaatgatgaagttccctaccttgataggagagactgtgactgtcaaattagatcaaaagcaagcacgacaatgctacacaaaaagcttaaaggtggcaccttatcctcccaccaaggagcctaccaaacctcaccccacaacgaatggtaccactcaagtcatgagcatggacgaaggatctccagtccaagccttgactatcttccaagtaagcctggatgatgaattcgatgtagatccgcgtgatgacacttttgacagagtcccaaagcctattgaaagcttgtcaagctacagcttaaatccaatcttgagcaatctatgcaactcagtagggacctcaccaaccataagcacagacacatagttgatgtcctacac

SEQ ID NO: 7819 - DNA, 347 bp, Glycine max
agcttctcaagaaggtgagcttagttatgagaggtgtgtgtgtagctaagctctagcttctcaaggaagttttctcaaagaagcttctcaaggaagttttctcaagaaagcttttgaacgaagctacctagtctataaatagaagcatgtgtaacacttgttgcaactttgatgaatgaaagtcttatgagacacacttcaaagctccacttctatccctcttttattccttcaatttcgtgctccccccttctctctttcttttcctccattaaagcatgctcttcaagcttcttatccaaggcaattcttggtggtgaagctccttcttccttggcttatgccct

SEQ ID NO: 7820 - DNA, 338 bp, Glycine max
  unsure at all n locations
agcttgaaattgaacaatggaagatcttgagatattcaatcggtcttaacttttcactcggaagtccgattcaggcgcataatatattgagacgctctcgtgaaattcacatggtcataacttttcactcagaggtccgattcaggcgcataatatatcgagatgcacataattgaacaacggaagctctcgagaaattcatatggtcataccttttaactcggagttctgatctangcgcataatacattgagacgctcgaaattgaacaatggaagctctcgagatttcaaatggtctaactctaactcggaggtccaatcaggcgcaaatatatc

SEQ ID NO: 7821 - DNA, 343 bp, Glycine max
agcttgatgatgatgaacctagcaattgtgacgatgcctttagaccacgtgattgattccagacttcacgatcaagcgtcatgaatctaatccaagattcaagattcttgagacgaaatcaataagctccttgtgaagacttcctataaggatggagattaatagatttctttctaaacaagctcgcacatgagtgttatacaaaccaattttctcaaattctttaagctaccagagtgattactctctggtaatggactacctgttatcagtaagcgattaccagttgtcataccctaatttcgtgcggcgacctgtgctcgatgacatgcgaccattcttt

SEQ ID NO: 7822 - DNA, 426 bp, Glycine max
agcttcctccttattttcaacttgttcttttctgttgctgcgctcctccacctaccacaatatatagcatatataattagctacaaaacattcttcatccccgttaatcacatttctcaaattgaaacaaacgattaggacttcagataaaaaaaaatagaaatagaagatggacaactaatctgtatgagagaacatgtgaagtcactagtgatgtgcataagtgaattcaagaatcaacaagtagcaagattcaagacatttgagtctttaagctctttctccccataataacctaaacgagattttaaattgttatcgtggttgcaattttgttacaattctcgatattgtgaaaagaaattgtagatgcgtctttaataaccataatggtacagacgaaatcgtagttatgaaccgtattga

SEQ ID NO: 7823 - DNA, 405 bp, Glycine max
  unsure at all n locations
agcttgccgcccagctcgcccatgcgagtaatgttgcttcctccagaagcaacagccttctggagggcccaagtgggcctgtgttctatttacaccccctttttactaaatgcaccccccttttctattntttttgtaattctttttccgtaacattacgaaactttatgaatttcgtaacgatacttattttccttccgcaagggtacgaatccttacggattatgtatttactctcttttggctttcaaagaagttacggaaactcacggattgcgcaaaaacacctcttttcgatttccgccacattacggaatttcacggattacgcaagcctgctctcttttggattgttgagacgtctcgggacttcatttattgcatgtcatcaagtaataatccccg

SEQ ID NO: 7824 - DNA, 448 bp, Glycine max
  unsure at all n locations
agcttctcagatccggtcatggaaagacttggctactgccttcattangcagtaccaatacaacacggatatggctcctgatcggaaccagcttcagagtatgaccaagcgagaacatgagtccattaaagaatatgcccaaaggtggagagatctcgcagcccaagtcgtcccgcccatgactgagagggagatgatcacaattatggtagatacgttgcctacgttctactatgagaagctgataggatacatgccagctaactttgcagacctcgtcttcgccggagaaagaatcgagtccggactgagaaaagggcaatttgaatatgcctccaacgttgcccccaacaacaacagaagagccccagtggtgggcgcgaggaaaaaagaaggagatacccacgcggtcaccaccgccccaacatggatgaaagcgccccaaatg

SEQ ID NO: 7825 - DNA, 438 bp, Glycine max
  unsure at all n locations
agctngaagagtttatagccatccagatccgaacagattgttagcattcctctattgatttggttttttttactagccttgtatttttcacttgtgtcaaagggaatttgttattctccaaacctttttataacttcttctcttgatgaaactattcttttaaaacgctcagacaaacccaaaagagaaagaaaaaggtttccactttaaagaaaaaatttacagacaataatttaatcagacaaacctttttcaaaagggctttcacgcgatcatatgcttctctaaggagtttcacaacctgcagaataggtagaggtgtatgacttttatttttgataaaacatttcttagaagaggaagcaaataatggaaacatgatattcttagttaaagtatataaattcacaacacttgcctctgcatcaatacgtgact

SEQ ID NO: 7826 - DNA, 418 bp, Glycine max
  unsure at all n locations
agcttaacctacttaggtttctatgttgaaggattgtggttctatcttntctagagattagattggattaaataaatttttaaggggttgaataaatatctactctaattaattttgattaacatttacagttaaagttaaccattcacattatagtttaacgattaaaatttcaacaattttgtaatttcctttacatattaaagtattttataatgattttagttattagttcttaatgttattaaaaagtcaaaatatcatttgattgcaaacttgtaaactaaatctaaattttcttaaaaaatggacctgacagcgggaggggatttataaccatacatctaatttattctctgttcaatgtagaaaatgcattttgattagattgcgcttcaatagtgtataactaaaaaat

SEQ ID NO: 7827 - DNA, 444 bp, Glycine max
  unsure at all n locations
agcttgaatatgcctttgatgaagtcatgaatctttacctttggttgttctttcgacgaccttgttaattaataggaaacacttttttgcaacccaacaaaagaacttatcttcgactttgaatggagcaattcttgccattgcttgatcacctttacttgcaaagctagcatagattccataggatgactaattagcttctaccatttcaagttttccatcttcattccaaatgaaaagcttctgatgaaatgttgatggaactgctcctactccatgtatccattctcttcccagtaacatgttgaagttagcttgcaaggaaatcactanaagagttgtaagtcttgatggaaggttgcttgtgcggcttctatggaggctggatctttgagcttcaatgaggtcctttaatggtgattntcaccatggagatgtagcgga

SEQ ID NO: 7828 - DNA, 465 bp, Glycine max
  unsure at all n locations
agcttcagaccaaagcaactcaaaatctaggcatctaaaaccctctaatttagtggattttcaaggtttgagaagtgaaaatgagaatggggtaaatttggagcaaactctcacctcaaacaaatctatatcatcaatctaaacttgctcaaactggttttacgacaaaaactctaccgaatcaaaatttgactcctcaacacccaattntaccctaaaaatggctcttgccttcactttggtcatatgtttttctctcttgcacagcccaagctttctcatatgtcctagatgacatttcaaactaaggtttactcactttaacctccatttaccactgaatcccgttttagccttccaactctcaaagccttacttcttttctactcgtaacactacattctcactttctatccctaggttaactctaccctctcatcctagcaattnctcatcagcaatttc

SEQ ID NO: 7829 - DNA, 452 bp, Glycine max
agcttcaccttccatggcttattccctagtggattgtgcctcctctcacctcttctcctttatcttccactgcatctccatggtggaaaattaccactaaaggacctcagtgaagctcaaagatccagcctccatagaagcttctcaagcaagcttccatcatgatgagaaaaaagatgacagagaaagctaagagaatacttaataaaaccattaaaatgagaagttggtagaaacacttggtttatactgattcactcaaatagagctacgtctagttctcttttatagaagagtaaagggttccattaatctaaaaatttgattaccaaacaagtattctatcctttcactcctggctatacaagtattcttctagccacttttggcactaccttagagttcccctgaatctaagaacacctaagtatattttaacaataagccacttc

SEQ ID NO: 7830 - DNA, 416 bp, Glycine max
  unsure at all n locations
agcttntagtatgtttaagaatttatttcaagacttttgttaaagctatatctganaataataaatcactttgtgtaattaacatgaaaaatgtatcgatatggtcaaagtgaataattacatctttaaagatgcgtctttcactttaaaacgattgaaccctttctttctttctttcttttttgtgaaagatgacagattcaacggccgacacaatagacataaactttagaacaattatataatgatgattgttttggatatatcaagctcaaacaatttgtagtggctcttcttttatagaagacccttcccaaagagaaacaaaggatctacatatgtcatagntaagttggagaagaagattactttcccaaattgggggtaaagatctagtatatgtgaccgacactatg

SEQ ID NO: 7831 - DNA, 339 bp, Glycine max
agtcctctcaaggcgaggacgtgtagttctctgtcggtgagggtaactagtacccaaggtgagggcgtgtagccctctcaaggcgaggacatgtagtcctctggaggtaagggcgtgcagccctctgatggtgaggacgtgtagtcctctcaaggcgaggacgtgtagtcctatgacggtgagggtaactagtacccaaggtgagggcgtgtagccctctcaaggcgaggacatgtagtcctctggaggtgagggcatgcagccctctgatggtgaggacgtgtattcctctcaaggcgaggacgtgtagtcctctcaacggagatggtaaatattacc

SEQ ID NO: 7832 - DNA, 421 bp, Glycine max
  unsure at all n locations
agctnggccaattggaagaattgcaaaattntgtctttatatgtcaaatctgcatttcttaatggccctttagatgaagaagtttatattcagcaactccccggatatgaagtcataggcagtgaagacaaggtgtacatacttagaaaggctctatatggactaaaataggctccaagggcctggaataaaagaatagactcctttctacatggtgaagactttaaaaaatatattgtagagcatggtatctatgtgaaggcaactaaggatggtggagtcctgctaatatgcctatatgtggatgatttgctgattatagggagtaatccagctgagatagaaaagttgaagggcaatctcaaatctgaattcgagatgtcagaattaggcttgctatcatacttccttggtattgagt

SEQ ID NO: 7833 - DNA, 446 bp, Glycine max
  unsure at all n locations
agcttgagccaaaatcctgactcactataaactcttgacccagggtgagaatgccaatccttaccctcggaagcaaaaaaagaatagaggggaaatttccgatcaaagaaaaagagaaggaaaatttccaatgaaagcaaaaaagaaatgaaggaaaattccccaatcaaagagtgggagaaagcaaaaaaaggaaaagaaggaaaattccccaatcaaagagtgggagaaagcaaaaagaaaagaaaggaaaattcccaatcaaagaatgggagaaagtaaaaaaggaagaagaagaaggaaagaaagctcctgatcaaggatcgaaagaaaccagaagaaatgtgcagagaggtctttggaccagacaatatctgaacagtacagaattgtcccaaatgaacgananaagaaggaaagggaaccacgacctaaaatagtcttct

SEQ ID NO: 7834 - DNA, 421 bp, Glycine max
agcttgtgctattccaagttcattaatcatacctttaagccagaatgcttccttcactccttcagctagggccatgtactctgcttcagttgttgaaagagcaacaactgattgttgatttgctttccaactgattgttgtaccaaacaaagtaaacacatatcctgttaaagatttccttgtgtctacatttcctgcaaaatctgcatctacataacctgtgattgctgcctcatatgctgtcttcttgtaccttaatccaactttcgaagatccatttagataccttagtgtccacttcacaacttcccaatgtgcactgccaggatctcccatgaatctgcttataatacttacagcatgagctaagtcaggtctgctacaaaccattccatacattatgcttcaacaccactggcat

SEQ ID NO: 7835 - DNA, 300 bp, Glycine max
  unsure at all n locations
agctntagtctttagccttcaattatataaaagttccaagtaggacaaagtaaaaacaattaaatgaaaaagaaaaagggttaaacaaaaaatattagtccttaatgtcttgttgtaagaacatacttaacgtgggtcgtggcttgtggctcgtcttgactcttgagagaaagggctctgagagagaagggttcaaagaggcagcggcgatggagagatctggcaatggattgcacagtggcatggttgtcataagagagggcgatggcgaactggtggagctagagggggggggggtct

SEQ ID NO: 7836 - DNA, 458 bp, Glycine max
  unsure at all n locations
agctnggcagctgacattggctttttggaatcattcgcagacatgtcttctgaacctgaaaccagcatctcaggcttgatggtggttgagccgtccatggattgactatgctggtgtctaactctgggcctttcattagtcccaataacaacattctcggtagaagaggtgggtgcccctgacgccggtgttgaagccgatgctcccacagcattagacggctcaaccatttgaaacgtggacgttgccgacgatgaattgaacttatccatatcaaggtacatggacagcaagtcctcctcggcatcatcggagaaggaaggaccatcaccacctccaacaacaccaaggtcactgtcgaaactaatatcatccggtaaagtgagaatctccgaatgagcacgcctatgacctctatttctcggnggattatcaggcattctgctaatatcatgact

SEQ ID NO: 7837 - DNA, 340 bp, Glycine max
atcacccttaacccatgcgctatctccttcccacgacacggtgctactccttgcttatactgcgatccactgttcttgatatttcttctggcgaacggcagctctacaattaatctatttgtcccatccattatgatccacccattattctcactaggtgcaagtattccgcttagcgccaatgtcagcaaatgtcaatacttttcacgaattcatcattttattattctatttttttcaagctacagagtccgaatctcttctgtttgggtttaaagactcaagcttttataaaggatatttggcgactgtgtatgcattatccaattctcattttctc

SEQ ID NO: 7838 - DNA, 389 bp, Glycine max
  unsure at all n locations
agaatcaatatagataatattatgaagtggaaaaagatccatcattagtcataaccaaccaaaatcataaataagtcataaccaaaaatataactccaaaccagtcataaattcacaaagacaccattaaaaatccaagtcattaaaagactaaaagtccaacataccanaaagataaataaagtgcagaanatgataacttaaataccatagccaaaatacacggctctaaaaagaaaatataaactaaactctaagaaggtggaggtggtggtggaagatcgaagctctggcgaatataacccacatcttcttcaagctgtgtgagacagatantcattctggcaaagcgaatatccaatgaatcanaacgttctccaacataagta

SEQ ID NO: 7839 - DNA, 451 bp, Glycine max
  unsure at all n locations
agcttgttcgcatatcgttcgcatgtatgatatctactctatcaaggttgaagtagaggagaccttcaatcctatcacgcaacgtggcagacaaaagtgggcagttaacttgaatgaccattattgtcaatgcggaaagtattctgcgcttcactatccatgttcacacattattgcagcttgtggttacgtgagcatgaactactaccaatatatagatgttgtttacacaaatgagcacatcttaaaagctntctccgcacaatggtggcctcttgggaatgaagcggcaattcctccttctgatgacgcatggacacttgtccctgacccaactacaattcgtgcgaaaggtcggccaaaatcaacaaggataagaaatgagatagattggctcgaaccatctgagcaccgacaaaaatgtagtagatgtggaacagaacggcacaac

SEQ ID NO: 7840 - DNA, 353 bp, Glycine max
  unsure at all n locations
ggatcttaagtcacctgaggcatgcaagctntgagctttgagcacccacaagactntcagtaccctagtaccaacagtgtatgtagggttctgttcgagccacacttcgaagagcagtgtagggggttctgtgggtttgagcacccacaagacttttagcaccctagtaccaatagtgtatgtaaggttctgttcgagccacacttcgaagagcagtgtagggggttctgtgggttcgactgaggggtttccggcactattgaaaacaatgtggaaggaggagggcaaggttttctagggcgcgggttgtaaatgtgaagtttaacttataacataacacatccgtttctaag

SEQ ID NO: 7841 - DNA, 517 bp, Glycine max
  unsure at all n locations
attggtttcgtgaccctgcaggacccgngatactctacaggcgacctgcnagctgcaagcttanatggccgaaagggacaagtcttgggtggaatgcatggctatcaaggaccaaatgaaggcttgtcaaaggtcgaagagaagtttgaccgatcactttagtagaacaaaagaatatatgttcacattcattgaccagcataatgagaaggtagacctagctgctgaccatgggccaagactagaagacgatcatgcgacagtatcggctctaccaatggaatgggacgcaggagagagagtgattgaataattgctctgcgaggcgatgaactggatggatagattctctctcactctgattgggagtgaagagctttcaacgctgttagccacagccaaggcaatggcggatgtatactcatctcgccgatgaaagtcatgggctttttgatcatctccgacacatgatcgaggtgatgtcccacatgcatatgaaccactgatgcgtttgacg

SEQ ID NO: 7842 - DNA, 205 bp, Glycine max
cttctaatattcctaggatcaatctgatgttgcgacttggaatcttgaagtattgtcttgaattttaatcttgaaaagcccatttgcatcaattgcaacacatcatcatgatcatcatcaaaacatcaaagcccattgcatctacacatgtgttctccaccttcgagattggagctatgtctcacgattgcctaagtgcggaccc

SEQ ID NO: 7843 - DNA, 403 bp, Glycine max
agcttttgagtgaaaggatgtgactcttcacctttaaatttgaatttcgacgttcaaggacactggtaatcgattaccaaaacattgtaatcgattacagccttttgaaaatatttggaatgttgtaaattcagtttgaaaacatttccaaacttatttcgctactggtaatcgattacaacaatatggtaatcgattaccagagagtaaaaactctggtaaatgttttgtcaaaaactcatgtgctattcaaagttttgaaaaactttttaagacttatcttgattgagtcttttcttcattcttgaatcttgagtcttgaatcttgatcttgattcttgagatcttgaatcttgattcttggttgtaggctttcttcatgagtcttgaattcttcttattc

SEQ ID NO: 7844 - DNA, 386 bp, Glycine max
  unsure at all n locations
agcttcattaagaggcttcctctagaatcttcctcgtggcttctttgagaagctagatccttatctattcacacccctctattaactaaattaacctccttaaaaataattacggatgaaaataacgcagcaaataatcaaacatcaaacataattactaataatatatatatatatatatatcagggtgttacaccacctattttagggacttggtgcctaataatacctattttgggcaccaacaaagcacaaggatttaagctcttgcgaaacanaccctcatccaacaacttctttacttgaggaataaaatcaagcccaagaggcgtgacaatgctagcaagtgtctttttacaaaagagaaaatgtggaggttgtctaag

SEQ ID NO: 7845 - DNA, 299 bp, Glycine max
aattaatactattaagttctcgttgggcagacaaataaaatagatggcacaacataaatctgttacgcgtgtacgatacaatcgtgacataatcgacaacacataacgacatgcatgcgtattaaagtttgagcacgacaccacattgactgacttgactacacattcgttaggaatcatatacacgaaacatgttcacgcgtgtctatcttgttgtataaaagtgaggcatcttctgtgagaccatgttgtatctgagaccgactaatagtccacatatcttgcttcacatagtctcc

SEQ ID NO: 7846 - DNA, 330 bp, Glycine max
  unsure at all n locations
acaatgatggaggccatgatgagcatgaagaagataatggaagccaatgcggttacaattgccgctaccagcactgttgctaaggtgaacccgatgcccccatctggcctcaaccaaatgaatcatccaaccttagctatggtaggcaaaagattgggaagtatgaatggccccatgatgtgcaaattcaaaacgagcacgccttcccgccatatggcttgcctcccaacttacaccagccaatgtggcgtacacttccaatgagaatgcaataactccactcctatacttatngagagccaacaacctcaatctgatcatgcacatgtc

SEQ ID NO: 7847 - DNA, 393 bp, Glycine max
agcttgaagttcaaccttgacaactatgaggcattaaatatatacaactataaaagaaatagatgaaaatatcaaacaataatattacacaacctaaaagtcataacctatgtttacactgaattcaaatagactcttgagtgttagggtcagacatataataaacagagaaaatttctacgccaaaacgacgatatataaaaactattcatatctcttcacttactaacaataacatttttccgaggttgcaatttgttcctataaaaaatggactcaaaccctacctaagttttgccttcatcaaagacatattgtaggtaatttacatagcaggggatttcattcactgcttctaaggatggggtggtctaatatgaagcaatcaagaaa

SEQ ID NO: 7848 - DNA, 417 bp, Glycine max
  unsure at all n locations
agcttgttgacacgcggagatttacgtcatcttctacgctttcaagatctgncatactcaaatttgagtcacgctgacgggcggaaatacccgagtggttatccgtataaacattcttttttgctgtctgtaagacgaaaagcctgatagcaagcagagactaacgtcgttttctgcgcccttcgtcaatcgcggccgacaagtcccgttgacacgcggagatttacgtcatcttccgcgcacacaagatctgtcatactgacatttgagtcacgttgacgggcggaaatacccaagtggttatcgcataaactttctttttgctgctgtaagacaaaagcctgatagcacgcagagactaacgcgtcttctgtgccttcgcaatcgcggccgacagcccattgacaccggagatta

SEQ ID NO: 7849 - DNA, 229 bp, Glycine max
tgctctttaccaagtctggatcttctttgtatatgcatttgatgattggcctaactgcaaatcctaatgtgcacagaccatgcaatattggccgcgagaatctttggaacaacgttaaatttaaattaactatccgaacaatgaattcatccatatgatagaaaatgaccccaaaagaatggtcacatacaaactgatggcgtttatcttaaatggacataccactatg

SEQ ID NO: 7850 - DNA, 457 bp, Glycine max
  unsure at all n locations
agcttgtgctccaggaaaccactttttatgatgatcaaatgaangcaaattttctgtcactaatgcatcaccaattgaaaaatttgaatcactaaaactccaagcaagaatcttagcactgtctattatcctccctgttgaataattatttgatatcagtagtgatgtttttgttcttcaactgggtgttgacatcagccacaaacagttcacttttcctggttcctgatgctgtagtagtcttcgtattgtgaaatttgaaattaatattgttgcaaaggcagaacaatggaaatttcaaaatatgaaagtgcgaactcacatgtggaaatctatcaatgaattttgctgcattagcaacttcagtggcagctctgatttcttcatttgttgccccatccttaccataggcaatgttttctttgatgctgcaactgaagagtattggttcctgact

SEQ ID NO: 7851 - DNA, 272 bp, Glycine max
gactcacaccaaacatgtatgtgtagtatgctttcaacaaattccttcataaataattaccataatgcataaacctagtaaaattacccatcatatctcccaaaacccagtacccacgaaaatttatgtgagaagaagtctacccaaacctgaaatttgaagtcccacaatgtagaggtgcgcttcacgactccaaaaatggcttcctttcgcgatttggagcagaaatggtgagcaaaggttggagctttgatggagcttcaatggtggag

SEQ ID NO: 7852 - DNA, 338 bp, Glycine max
  unsure at all n locations
agctntgagcaaattcaaacgacaatttctntttattctgatgtccaattgtgtcccataggttatcaagacgctcggaattgaaaacggaagctcttagaaaaatcaaacgacaataatttttaactcggatgtgcgattgagtcccataatatatcgagacgctcataattgaaaactaaagctctgagcaaattcaaacgacaataacttttgactcgaatgtccgattgtgtcctataggatatcgagacgctcgtaattgagaacggaagctctgagaaaaatcaaacgacaataactcttaacttggatgttcgatggagccctgtaatata

SEQ ID NO: 7853 - DNA, 453 bp, Glycine max
  unsure at all n locations
agctntcaccccataattccnccaaatttgggctaattttctttgaaccaaaatttccttttatgaatgatgctctcctacaacctaagacaagttagaaggagataaactgtacaggctcaaggttcaatcatacaagggataaatcaatcatgcagaaggtaagctttttcgctaaatggctatcttcaatcaaaacacggccttcatcctcttcaaactcatgtattcattccatactcatagattcatgcagaaaccattacttactgctagtcgttctctcgcaattaaagatcacactccaccgggttgcggctaatgcattccttcacaatcaacctgacaaaccaactaacattntcagtcataatccaaattccatattctttctcttctaataactgcatgctcattcaaggcttatgatctgcgcatttcagttcactcaca

SEQ ID NO: 7854 - DNA, 407 bp, Glycine max
  unsure at all n locations
agctngcaccaacattcagtagttcaatacactcttaacaaatagtcatcatccatccacaattccaatcattcatgcttaatatgatgcatgcacctgacctcaactctcatatgcaatgtggtaccatccccaaggaagtagcctaagcgtgtccacatgacactctcacttaggaaaactaggaagtaagtgtcgaggtcaccctatcgtggacaggaaactctcccccccacatggtgatcagcctgagtctcaagggagttccaaaccgagtgatatgccccctagtacaagtattcctcctcacaagaaactataattacttactaacaaagtttatactatctccatgtcatatgaagtatgaaacacgggcaccatcaaatgcactaaacgtggataat

SEQ ID NO: 7855 - DNA, 427 bp, Glycine max
agcttgaacaatagttgttaactcaacttatagaacactgctaacccctagattattagaaaaaccctaatccagttcccttggtcatctctaagaacaccaccaccagttgctaaatggccatcattcttcactgaaccatctacactaaatttgcaaaaaccttcatgtggtctttaaaaaacctaatattctactctttaagattaaaaaagatcagctcttgaaatctacatcaatatgatccatattgcaaaccttgattgtattccaaacctctgtagcaaaaaaaaaatctctaaaaagatgcacatttgtttcctgttgattaccataaatagcacaaacatcattatttgaaaagccataatcatatctgttgatgttagtctttaaacctccattaataagagaccaaaagaacata

SEQ ID NO: 7856 - DNA, 451 bp, Glycine max
agcttgccacccagctcgcccaggcgagctatgttgtttcctccagaagcaaccgccttctggaggaattttctggaaggcccaagtgggtctggttgctatttgcacccccatttttactaaatacacccccttgctctattttggtgattctttttccataacgttacgaaactttacgaattttgtaacgatacttgttttctttccgtaatgttacgaaaccttatggattacgtaatcatccccttttttgccttccagaacgttacagaactttacggattgcgcactaacacttccttttaatttctggcaagtcacggaacttcacggattgtgctacaatgctttcttttgacttccggcatatcacaaaacttcaagaattgcctaacgatgggtgccaagtacctcgaagtggcaaacgagggtcgcatctacaacggat

SEQ ID NO: 7857 - DNA, 413 bp, Glycine max
  unsure at all n locations
agctnttcgattcattctatgtacccgtagtgtttcacattgtgtttcgggcattnttattctcgttntgtttactttttataccccctgttgacatgcttaagccattttgcttaagtcatttctcgcttaacttaaaaataaaataaatttccaccgaacgtttgaattatattatccgttaacttcggttaaaatcaattccgaccgttcggtcatgccgtaaccacgttggaaatcaaaaagaggtaaaaaataatataataatcaaaaaatatctttttagtgaaataaagcggaaaatcaatcggacgttttctctttgggatttctcattcttaatcgaattgattaataactaaagtgaaactaaggctaaaatcaactcgcctagtcaagctcgtccacaaaaa

SEQ ID NO: 7858 - DNA, 441 bp, Glycine max
  unsure at all n locations
agcttggttntcggcaatagcaccccacctgactgtttcaaggtctactgacccccgcgacatatctccaggtaccactctgtggtcaacaaacaaaagtaggaagactgactcttccacgctttctcacatcaagcttgttggattatggggtacccgtcatatgtggtactaggtggtgatcgggcgatggtgcaaatcaactctcccacatccacaaatcaaacatgaacccaccatccccaattgcccaccttcagctgagctcacgtactccgacgtagcccttatcctcgttcctcttagcactgggcccccatcaacccctccaagcttccacaatatccaagcaattcaatttccaaacatcatgaactaccctaaactatgaaaacagagtaaaggtagaaaaatctgcccaaaacacattcacatcttaca

SEQ ID NO: 7859 - DNA, 423 bp, Glycine max
  unsure at all n locations
agctntcaaccgttcttcgacgctcttcattcgttcttcatcgttcttcgatcttcaacgggtaagtacctcgaaccaagcttttcgattcattctatgcacccgtagtggtccacattgtgttccgtgcatttttattctcgttttgtttactttttataccccctgttgacgtgcttaagccattttacttaagtcatttctcgcttaacttaaaaataaaataagtttccaccgaacatttgaattgcattatccgttaacttcggttaaaatcaattccgaccgttcggtcgtgccgtaaccacgttggaaatcaaaaagaggtagaaaataatataataatcaaaaagacatcttttagtgaaataaagcggaaaatcaatcggaccgtttctctttgggatttctcattcttaatcg

SEQ ID NO: 7860 - DNA, 457 bp, Glycine max
gcttgcacacaagattctccttggctggcacttcataactctttggttgggtcttatagatgtcttcctctaaatccccatgcaagaatgcagttttaacatctagctgctccaagtaaagattctctgcagcaacaatactcaaaataactctgatggtagtcatctttacaactggaaaggagtctctgtgatatcaattccctgtttctactgaaaccctttcaccacaagtctcgccttgtatcttcttctaccgtcagattcttcctttagcctacagacccacctattttgtaacgctttctttccttctggcaatttagttaaagaccacgtcttattcttctgaagggatgtcatcttatctttcatcgctagcttccactcaatagtgtcattcccctgcatagcctcactgaaacattctggctcaccaacatcagttaacaacaaa

SEQ ID NO: 7861 - DNA, 195 bp, Glycine max
  unsure at all n locations
tctatgccactcctggtactatccttaatcaatgaaactcgctaactaagtacaactaagattcacttaattcactcaagtttctttcatccagtaagactgataccattgcanaaacttgatcgttatgtctcaaattattctcttgttattcaacaacttaacacgaacatcttcaagctttatatagacttc

SEQ ID NO: 7862 - DNA, 361 bp, Glycine max
  unsure at all n locations
agcttaaacattcaatntcgagcgtctcgatatattacatgactcaatcagacatccgagtaaaaatttattgtcgtttgaattggctcacacgctcaacattcaattttgagcgtctcaatatattacgggactcaatcagacatccgagtaaaaagttattgtcgtttgaataggctcagagctttaacattcaatttcgagcgtctcgatatattacgggactcaatcagacatccgagtaaaaagatattgtcttttgaattggctcagaggttcaacattcaatttcgagcgtctcgatatattacgggactcaatcagacatccgagtaaaaagttattgtcgtttgaattggct

SEQ ID NO: 7863 - DNA, 455 bp, Glycine max
  unsure at all n locations
agcttattactagcattgtatgtagcacttaaatgtttcttatctctaatttcagntcttgaagtacttcgctagttaacctgacttttcctaattgaacagaattgaaattgctatcctcatatgtttgttaatcacacatcatctgtgaatttgtgacaggttcatacataacaactcatttagcagggaaataccagccggattaatatctaaaaaaatcatttataagtaagtatgcttagcaatggaacaattttcttacatattggtaattatatgcaattaattgctttaaatgctcatcgatttgactaggaaatggaatcagtttgaacataatagaacaaggatattttcaactagtcttgtaccaagatttaagtaacatccatatttaatttctgctctagctaggatggtattcttgaactatacagaggaaacaagaagca

SEQ ID NO: 7864 - DNA, 436 bp, Glycine max
agcttccagcaaggtccttataatcagcaaggtctttgaaggaaacaccccgacaaccagttcaataaagaccagggtggatcctcaaacaagccaattcaacaagggcctaacatctttcagaggacgactaagttggaagagaccttgactcagtttatgcaggtaatgatgtcagatcataatagtattgagtcaacactaaaaaaccttgaggttcaggtgggacaactggccaagcagatagttgacaagtcattcaacagttttggagcaaatacaggcaataatcctaaggaggaatgcaaggctatgatgactaggagtaaaaagtttgtggaagctgaggatgaagagagtgtggtgtacaaggagcaaatgggtgaaaagataggtgctgaggttaaggaaaatgatgtgaagggtaaagagaatc

SEQ ID NO: 7865 - DNA, 454 bp, Glycine max
  unsure at all n locations
agcttgcttgtggggcttctatggaggctggatctttgagcttcaatgaggtcctttaatggtgattntccaccatggagatgcagcggaagacaaaggagaagaggggagaggaggcgccatccactacggaataagccatggaagaaggagcttcaccaccaagatgagccttggataagaagcttggagaggatgcttcaatggagggaaagaaagagggagagaaagagagaggggggagcatgaaattgaaggaataaaagagggagagaagtggaactttgaagtatgtctcacaagactctcattcatcaaagttacaacaagtgttacacatgcttctatatatagactaggtagcttccttgagaagctttcttgagaaaacttccttgagaagcttctttgagaaaacttccttgagaagctagagcttagctacacacacccc

SEQ ID NO: 7866 - DNA, 496 bp, Glycine max
  unsure at all n locations
ntgaattcgatgcnatctagtacccgcgatccttagagtcacctgcggcatgcaagcttgagctataagaatacgacaaggatatgttatttatcctcgtccactggcgcatctccaaaccatgtcccttgagcgtgcacaccctgtattggtagataagccattcatgatcatgaggggcgtctccatccataattggaaagctgacaccaagctctctagatgaaagactggcacaatcatgcaatactattagcagctgcagcgtgtcttatgtgtgctattgccatgtaggagaggacatatcgatttatatgttatattaaggtttacgcattgaaaaatgcgagtaactcttagaagcgaacatagcgtcgaaaatgcttcatcgcgaaggatcatgtgacgaggttcacaacactatacattcctactaatcatgcccttcaacgagtntgatcttaatagataacaacacactatgacttatgcgttg

SEQ ID NO: 7867 - DNA, 432 bp, Glycine max
  unsure at all n locations
agctttacgagcgcaagagcgtctctactgtgatattntatgagacaagggacaagtatgctttgaataagctatattatcttacacaagatggagttagtgaataaatcaacattagcttacaaaagtaaatggtatctttagtgaataatatatttacttgcacaaagtgatttccattgacaaatctaattgcaataagatgagtgagatgcaactggtgtgagactcctaagtggaaagatccaacttggcagcctagataagtggaccgatacaacattatatcaaccagtaataacataacccatgtcgggaatgatcatctacttcacagtaggcattgggccggccacattcaacatacaaagaagttattaatgtcaacaatcgttcttctaagccaaataattgaacatacggagagtatca

SEQ ID NO: 7868 - DNA, 383 bp, Glycine max
  unsure at all n locations
tgcaagctatcccatgacagctaagtgaccgggatatgtcactccggagacagctccaagaagacttgtgggtagctgcacaacatcatgaatctttgcttcgtcagaagtcgagagcaagatgggtcaaggagggagattctaattcccattattttcatttgctagtaaatgcaagaagaagagataattctctgcaaggtttatggattgatggagcttgggttgaagatccgccaagggtcaaggagacaggaagacaatttttcatctgcagattccaaaaagtggttcacaatagacccctcctagatggngtagaatntcagtcattagatcagtaccacaataacttgctgagtgggagatttacggaggaagag

SEQ ID NO: 7869 - DNA, 406 bp, Glycine max
  unsure at all n locations
agtcttttacggtgttaagaaactgttgtttgttccctanaggtagagggcatcatctcatcaaccataaagggcattcaattttacctatatatgcgtgtgtttgtgattgaattattgaagggtaacgggtaacattttttaccccatttgattaccaaaggcaacatagccttgatgggtaaacagaataataaaggcacactcatcatacaaattccatttaaaatatgtgtcaatgatagcttgtcaacatttaattaggctggaccaacaactttatttgtttgaggatattggaagggaagaggaaccttacatccacatttggtgtagagagagctcagaccatggccaatgcgggaccagattggtgggtgcattatagcctgtgaaagaatcctat

SEQ ID NO: 7870 - DNA, 424 bp, Glycine max
  unsure at all n locations
agctntataagcgcaggtttggaagacaaagtttatgtggttgcaatatgcgaagatgatgttccgagtacattggacttggtacgaccatgccctcctgatttccagctgggaaattggcgagtggaggaacgccccggcatttacacaacgagcataatgtaaacctttacaattttaaaagctctatagttgggcctaggctttagagtttttccttttgttaaggctttgtgtcttttgtttttgaatttataatacaaggatctttcttcatctgttcctacgtctctacccattctcattcatttgcatgtttacttctttttctgaaacggcagatccgatgatgagtcccncgaaggtactaatacctgggacccgcctatcaacttcgagcaagaaatgagtcaaacggaagatg

SEQ ID NO: 7871 - DNA, 333 bp, Glycine max
  unsure at all n locations
atcctctcagtcacctgcggcatgcaagcttggttcgaggtacttacccgttgaagatcgatgaactatgaagaacgaatgaagaacgtcgaagaacggttgaaacctttgcgagattcctcacggaaaacgttacggaaacgtttcggaagcgcctcggcttagattntcttcacggaaacaatttttccaagcaaattcgaaagagagagaagtgcctaaggggctggacccctttcttcttcacttcctcccctatttatagcaaaataggggaggtggttgccgcccagctcgcccaggcgagctcagctcgtccaggcgagcagggtt

SEQ ID NO: 7872 - DNA, 441 bp, Glycine max
  unsure at all n locations
agcttggttattatttatcctctttgcaggatctctctatctgtgtaactagacatctaaatggctgcgatcaacatatgataatccttagaagattaggccctccgttacagtggaatgttatcgtttcttgatattggaattggagaaaaatatgttgtgcaaccctagtataaattccttaaagaaagtgatttttctcatggtgatgaaatctcattctactacaggtgtcatgaataaatttggaaaagtattattagaagtcaaaaggattgggacgacactgatagtgactaaattaagcttaggttgtttgttttgtttattaacattatcatggtcaatgagtaatcttgctcttttcttctatgcaaacaatctaattattattaatggtacatatatttntatttctgtactatctttcattctaatact

SEQ ID NO: 7873 - DNA, 407 bp, Glycine max
  unsure at all n locations
agatgatgacaccaagctcgaaagtcaagatcacttcatgataacaaagatgatgacattccagaatgaattcaagaatgagttcacgattgagtcaagaacacttcaaggatcaagaggaaagaatcaagaatcaagatttaagattcaagaataatcaagatcaagattcaagactcacatattcaagaatcaagagaagacttaatcaagataagtattaaaaagtttttcaaaccattgagtagcacaagaagttctcacaaaatcattaccaaagagttttactctctgataatcgattaccagattatagtaatcgattaccagtgggtttaaaatgttaagaatntcaaaattcaaaatgaagagtcacatctgttgagtgactactttcgaacaattca

SEQ ID NO: 7874 - DNA, 459 bp, Glycine max
gcttcctacgtgttaagctataaatagaaacatgtgtaacacttgtcataactttgatgaatgagaaacttgtgagacacacttcaaagttcaacttctctccctcttctccttcaatttccgtgcccccctcttctctctctcattctcttcctccattgaggcttcctctctaagcttcttatccaaagcattctcttggtggtgaagcttctccttccatggcttattctctagtggatggcgcctcctctcacctcttctcctttatcttccgctgcaactccatggctaaaaaatcaccattgaaggaccttatagaagctcaaagatccagcctccatagaaacttctcaagcaagcttccatcataaggcttcttcttaaacgataggagtaacatgatgagtgaagacgaatcttgagtaaggaaaatgcaccataaaagagaagtacaat

SEQ ID NO: 7875 - DNA, 569 bp, Glycine max
  unsure at all n locations
cgacaacgngacatcacacgcgccacactgccaaccntatgcgaagtccacacgcacgaaacnnnnanccaaccgnncaacagcgcggtttgaaatcgaggccatngcaggaccgcgacncnaanagcgaccggcagcangcnagcnacacacgagacagacccagactataccattattagacagcaaacaaacagaggcgaagcgggaacgcaaacacaaccagagaacacagccgggccctcgcaaacaaagaggagcaacgccctctatggaaccaaccacagggcacaaccgtgactaacacccacaccaaagacacaaaaaagccacacgaacaagcccccatgaaggaaaccacaccacccaagcaagaaaaaaggccgccaggaaacgacagaaaccaccgccagcgcgccaagacaatggagcgaaagacaaccaaaaaacacccaacaggcgaccagaatgaacaacacaacgacgcgaccagaggcggaaccaaaaagaacccaccacaaagaaaaaacgaagaaccgccaaaacacaaaaacacgcgaagaggaacg

SEQ ID NO: 7876 - DNA, 444 bp, Glycine max
  unsure at all n locations
agctnttcanaaaatatgaacatgactntttgtattaatgagtcggatcgagctaggttttaaataggcgacccgacctactttcacccttaatgataatagataatttataagtgtgattcttgaaacattctagaaaaacatttgtgattttatcaatttccttattttaaacaaatctttttatatataaaagttagggaattattattattattattttaaggctaagttacaattttattttttttagttntatttgggatttttatcttctttttcttccttgcgattttaatacccaaaatttaaaaaataatcattttgatttaatcttcaaccttgtatacatttatttttatttatttnttaactttacattataaaattatttgtaattgttgaaatattattttctaccttaccataatattgacatatcat

SEQ ID NO: 7877 - DNA, 426 bp, Glycine max
  unsure at all n locations
agctntcggatcaaaccgttgnttgtccttttgtgacaatgctcttcaaaccgctttacatgacaaaagaacgcataaacgttaaatgaatgaacaaataacaagcattttcattgatcacggttcactatctacagccattgactcttgaatatcagagttgaaaatacaaaacatacacatgaaaactcttaaaaccaccattacaccactgccactaaacacttgccatagacagaatgaactgagaaaagagcatgctgtctacatgtaccaaatcactgtcttcatttcatacccccaataaaaaagcgacatgtgagtaaagaaaatttccaactttgaaagagttttattctttataccacgtttcactttcaattgtagagccattgaaggaaggaacaagggttgaaatggagatac

SEQ ID NO: 7878 - DNA, 399 bp, Glycine max
  unsure at all n locations
gcttccttttagtgcgtcacgtttaataccgttctcatggtggtgcgatcctttgatggtactcagcgggaagtaatggaggaaatcgacattcccattcagataggcccccacacttgcaatgtggtgtttcaagtaatggatataaatcccgcctatagctgcctcttgggaagaccgtggattcatgccctgngagtggtcccttcaacgctccaccagaaattgaagttcgcagtgggtggacttttagtgatagtgtcgggtgaagaggatatgttagtgagctgcccctccttcgcatcgtacgtagaagcggcggaagaatcattggaaacggctntccaatcctttgaggtggtgagttgcgcctctgtggaaccaagtccgtcgctacct

SEQ ID NO: 7879 - DNA, 402 bp, Glycine max
  unsure at all n locations
agcttgtggagacctttactactaggcagtggtatcttgtggtggacatcttgggtatgcatgttaggtcggctctaactgcaatggtatatcgaaaggggctaaggatatcaagcttggccaagcaaagtcacacgagtggggaggttgttaactacatggctattgatgttcagagggtaggggactactcttggtatcttcatgacatgtggatgcttcctctgcagattgttcttgcccttgcaatnttgtataagaatgttggaattgctgctattgcaacactgattgctacaataatttccatcgtcgtcactgttcctattgccagngtccaagaaaaatatcaagacaaattaatggctgctaacgatgaaaggatgaagaaaacatctgagt

SEQ ID NO: 7880 - DNA, 414 bp, Glycine max
agctagccacccagctcgcccatgcgagctatgttgcttcctcctgaagcaaccgccttctggaggaattttctagaaggcccaagtgggtctggttgctatttgcacccccatttttactaaatactccccttgctctttgttggtgattctttttccgtaacgttatgaaactttacgaatttcgtaacgatgattgttttctttccgtaatgtagcaaaaccttacggattacgtaatcatcccctttttaccttccggagcgttacagaactctacggattgcgcactaacacttccttttaatttctggcatgtcacagaacttcacgaattgtgctaccatactttcttttgactttcggcatgtcacagaacttcacgaactgtctagcgatgggtgccaagtacct

SEQ ID NO: 7881 - DNA, 418 bp, Glycine max
  unsure at all n locations
gcaagcttcaagaacgagaatgattggtggtgttatatttagcaacggtggtggttggaggagaggctttgagggtgggggcatgcgatagtgatgatagtgaagctttactctttatgtgaattagagaagacgggaagtgaagagtctacagcttatgagttaacattaatctggactatgctaagacacacttgagtgtattatttntggctaggctcaataagaagcacttcaaacacatatacttggtcaggtttaggtaccgacgatgtaaaaatgtcattatgaacccgcctaataatacatgtgtcaacccgcttttatgactcctatatcatggtatacccacccagattacacttttctctctcgattgttatcagtttgggttggactgagttcactcgaacaccct

SEQ ID NO: 7882 - DNA, 402 bp, Glycine max
  unsure at all n locations
agtcacctgcggcatgcaagcttctcattctcacctttctttgcctatagttctccagatatactantttcatgtttggcgctgcatctcaagttcagacttgcgtaaaagtggaagcaactacgagtagcttccacgttttttgtgatagtataacgcgatttgagcattaaatgcatatacttgaagtggctccatgctatgactcttaattcaaaattaagttatttttaatgttttctattttctttgtcatgaatagaaatatgttgatttgaaaaaggagttgagcacaacagatagacatattttgatagaaacgggattcattcgtcaatggtgaacatcctcataagttcatattaaattaccttgctaccctcgaaacacctacagaattga

SEQ ID NO: 7883 - DNA, 449 bp, Glycine max
  unsure at all n locations
gccgatttgccttttgatcgtgataaacccactttgtaagagcttcgagaaatttataatgtaagatgttgtttgttttgggacactcacggtgaataaggggatctagaatccatgaattccgacaacggtattaagtcttaagagttaaagggggaggcattttcataaatgactatatcactacgttaaaataaaaatatagctgaactagctggggaccaatttaaggtgttaattatgtgatgcagaataataaacacaagtacagctgtacaccgctaaaaaataccattccaactacaaacaaactctatgtggctatctgtcatcatgaaccacttcagtacttcatgtttaatcataaattcgtactatctttgttgtgatcgattattaagctgaaaaataaaacgtctgcctaattcctctacgcagattgaaaggcn

SEQ ID NO: 7884 - DNA, 459 bp, Glycine max
agcttatgctgcaaacacttataatagaccccctcaacagcttaaccaacaacagaagaataattatgatctttcaagcaacaaatacaatccaggttggaggaatcatctaaatctgagatgggcaagtcctccacaacaacaacagactatccctcctttccagaatgttgctggtccaagcaagccatatgttcctcctccaatgcagcagcaacaacaacaacaacaacaaagacaacaagcaactaaggccccttctcaaccttccttagagaagttagtgaggaaaatgactatccagaatatgcaatttcagcgagacaagagcctccattcagagtctaacaaatcagatggggcagatggctacttagttgaaccaagctcaatcccaaaattctgacaaatttccttcacaaactgtgcagaatccacaaaatgtgagtgtcatcatct

SEQ ID NO: 7885 - DNA, 122 bp, Glycine max
gcttcaccggatgatgccgatcgaacattttctaatgtacttcttccaatggatattcagggattgaacagaataaacaatggccagtgtcggtcgatatatggccccgactgatatctttc

SEQ ID NO: 7886 - DNA, 398 bp, Glycine max
  unsure at all n locations
agcttagcattntccaattgccatgatgtaatcttcttcttgacagtctctcatcaagttggagtggtatcacagcattgaactaagttgatcgttccaatggttttgattgctgcagataaagtgtgtgattgtgagtttctggtcccatgagtaacagaggtgaggtagtttgtgccttcatggttgggatgatgttgcacgtgccggtttgttgttgagagaaaagatgatcatccacgtctcgtgtgtgcataggagagtgtctttgccctctccacaacattagtttcaacaactgacgttagtcgaaactggatggtgagaatcaaaagagtaaaaaataaattcaactgagactaaagtagaatgatttatactataaagactaaaaaaaa

SEQ ID NO: 7887 - DNA, 422 bp, Glycine max
  unsure at all n locations
agctntacatctaaagcgaacacacaattgacatgctcctgagattcactagtcgatctcgcaagcaactcgattagactagcgattgtttaccaaatttcagcgtaaacaaattggcacgcccagtgggaccggtcaattgtgtgttttggttttaaattattattaaagttttgtttagtgcagttggtttattgcattcttaattgttttgatcttgtatgcatttaagaagtgggaaatctgttccacacttaactgaattcaaaactcgtacaaggatggctagaccacccccaagtaatcgaaacaatgaccttccaaatatggaggggcaaccaacgcagacatctgtcagtaatgccaatataaattctggcataagagcaattcctgaccaaactgttggcacgataagttcg

SEQ ID NO: 7888 - DNA, 417 bp, Glycine max
  unsure at all n locations
aacttatgatgaggttattgtatgtanggatgaagacctaaatcacgttaacaaaataaacagcattgatgaaggcctaaatcacgctgcctggctatttggcactcaacctgcaccacccttaacgtcttggcctatccgccactgacctccccatgatgcctgacgaatcccatagtccaacatctgaatgccacaactaggcatagcaatgaaacccgtactcgtggatatccgcccaaatccatcccgattntgatggagaatacctgagttgattaggtacgggtttgagttcgaggattacccgacttatttaatcggtgtcgagttcggggacaaggatgtcattacccattccatactncattccgtacccaccccattgatgaaaattattaaattctattaattact

SEQ ID NO: 7889 - DNA, 341 bp, Glycine max
agcttattgtgcataccatatcttacagggtatttttttaccttatgtagtgatgtcggatattattttttgaacatcgcactttcttttctacctgtttaattagctgttaatagaatgctttatttccttgggctgctattatctttgagcactgcctcctgttattatatcgcttgacagttgactctctcattatttgtttgctatatagcttgaaggagcccaaacggctcaatctcgggacttgtttgcgatatcatgctttcatatggatcttcttagtgaagctgaagatgcattatgtcatgccgatgagcccggtgcagaggtataaaaca

SEQ ID NO: 7890 - DNA, 299 bp, Glycine max
  unsure at all n locations
gacatgtcaagaagaggccggcgttttcttgaaaatcatctggcgtatggatacctacataagggcttcaattgtatgcttagtgccaactgttgcgataacgaacattggcagccaacaatgagtgcctgtcttccatttggaccaaaaatgattattttcttgctggacttaatattaataccacccgttcgcatttntgaatctgggatgatgtttagcttaacctttatagatagaacaaacttggagccatatgacatgtgatatttgttcttgcacaattatcataatgcatc

SEQ ID NO: 7891 - DNA, 422 bp, Glycine max
  unsure at all n locations
agcttaatcaattganaattgacggtgtgagattctccctggactctactnaggggcaatttccttggcaccctttatcatgttcaatttgttggtaagtttaggtcttttaatccaaaaaaggaaacttggttaccatgtgagagtaatttggataaatgaaaattgttttggttgttatatgcatgagtatttcgatgcttgtttgcaataatgtaatatacaaaagtacctaccacatagagagtgcctacgcaatttggaatcaagaagtttcagattgtgtgattgcattctctagcaccaaagctattgcattgaaaaattactgcatacccaaaattactttataaagttgcaaccaatattacttggcaaaaaagtagtctaaagctactctgtcatcatggacctcatgtatg

SEQ ID NO: 7892 - DNA, 391 bp, Glycine max
agctagtagaatggctagacatgatacatgtcattgcttggtttggttcaaggataaaatggatgccccacattatttccatgacacaaatgcaaaaaatgatgatttggaaattttatgcaaaactggtcatgcatgcgcctatgcggacgctcaagtgtcaaatttttatggtcatgtttatgtttctgtttagtgcggcgcgaaaaagtcgctagcgcacgggattttggttggtaatcaaagggagaagaccattataggtcgcggaatactttccttctgtctgttcattaggtgacaattctgtattgctcagatattgtgcggtccaaagacctttctgcacatcttttctgttttcctgcgatccctgatcaggagctttctt

SEQ ID NO: 7893 - DNA, 362 bp, Glycine max
ctgcaagcttgagcaaattcaaacgacaataaccttttactcggatgtctgattgagtcctgtaatatatcgagacgctcgaaattgaatggtgaagctctgagcaaattcacacgacaataaattcttactcggatgtctgattttgtcccgtaatataacgagacgctcgaagttgaatgctgaagctctgagccaattcaaacgaccataaccattctattcggatgtttgaatgagtcccgtaatatatcgacacgctcgaaattgaatgtgtaagctctgagccaagtcaaacgacgataacggtctactcggatgtctgattgagtcccggcacatatcgagacgctcgaaattga

SEQ ID NO: 7894 - DNA, 166 bp, Glycine max
atgtttattctctaaggtttggaagaacttacttcttcttgaaacaaaagaaagaaggattcacagcttaagctaactggataccccaattgataatacaattactagctcctagaaacaaagagaaggtctttgggtgattctataatcaattatcacacatgat

SEQ ID NO: 7895 - DNA, 411 bp, Glycine max
  unsure at all n locations
agcttcttatactaacgtcacaaggaatgtggttgttagattcataaagaaggaggtganttgtcgatacggactccccaagaagatcattactgataatggcaccaatctaaacaataagatgatgcaggagatgtgcgaagacttcaagatccagcatcataactctaccccttatcggccaaagatgaatggggctgtagaggctgcgaataagaatatcaagaagattggtcaaaagatgacggtgtcatacaaggattggcatgagatgttgcctttcgccctacacggatacagaacctcggtacgaacttctactgggggcaacaccgtattcttggtttatgggatggaggcagtactcccatttgaggtagaagttccttctcagaggataatggcggagtc

SEQ ID NO: 7896 - DNA, 273 bp, Glycine max
agcttgactcacaccaaacatgttaagtttagtatgctttcaacaaattccttcataaataattaccataaggcataaacctagtaaaattacccatcatatgtcccaaaacccagtacccacgaaaatttatgtgagaagaagtctacccaaacctgaaatttgaagtcccacaatgtagaggtgcgcttcacgactccaaaaatggcttcctttcgcgatttggagcagaaatggtgagcaaaggttggagctttgatggagcttcaatgg

SEQ ID NO: 7897 - DNA, 415 bp, Glycine max
agcttattgttccctagaatacaaggtatgctgaatgtacctggatctttacattcttcagggatttggggaacagatttacgcggagacatttctgcccatactaattctttcacttcctttaagcttccgcttattagtgcacagctccttcaagaatttagcatatcttggaatttgctttattgcatccagcagaggtatgtttacctctacttttctaaatgtttccaatatctccttctctgcctcttccaattttttgttggaaattgctcttggagggaatggaagagggatatgctgcttctctttagattcacctgcatagaaattgttagggaacttactctttaaatctttgtcatcatctttttctagagtaaagtgagggtgggcaggttcatttgcggat

SEQ ID NO: 7898 - DNA, 411 bp, Glycine max
agcttcaacattcaatttcgagggtctcgatatattacgggactcaatcggacatccgagtaaacagctattgtcgtttgaatttgctcatagcttccgtattcaatttcaagcgtctcgatatattacaggactcaatcagacatccgagtaaaaagtcattgtcgcttgaattagctcagagcaataatattctatttcgagctcgtcgatatattatgggactcaatcggacatccgagaaacaagttattgtcctttgtattagctcacagcttccacattcaatttccagggtctcgacatattacgtgactcaatcagacatccgactaaaaagttattgtcgattgaatttgctcatagcttccgcattcaatttcgcgcgtctcgtatattacgagactcaat

SEQ ID NO: 7899 - DNA, 446 bp, Glycine max
  unsure at all n locations
agcttagcacaatcggcgcgctaagcgcatttccaagcatttcaaaagcagtaagggattggcgcttaacgcatgctgccgctaagcccaactcgtgaaagttcacttccagaatggatatggggcttagctcangacaatgcacttagcgctgctacaaaagatttttccagagatggagtggcgcttagcgcatcatctctgctaagcccactgcttgaagtttacttccagtgaagatgttgggcttagcacagtgatgtgcgcttagctgaactatntagccaactatccaggggtctaagcgcttagcatgagcaagctcaggcttagcgggtgaagacatggcacttagcgaatggacaactgaaaaanaattctaagtctcttctgtccatctcttcagctagggcttaaaaaccccctttgtcactacntaaacagct

SEQ ID NO: 7900 - DNA, 383 bp, Glycine max
  unsure at all n locations
agcttgtgcatccaataccctgatgaggatgtcccatatgttcttaaaacaggactgattcatttgcttccaaagtttcatggccttgcaggtgaagacccgcacaaacatttgaaagaatttcacattgtctgctccaccatgaaacccccagatgtccaagaggatcacatatttctgaaggcttttcctcattcattagagggagtggcaaaggactggttgtattaccttgctccaaggtccatcacgagctgggatgaccttaagagagtattcttagaaaaatttttccctgcttccaggaccacagccatcaggaaggatatctcangtattagataactcagtggagagagcctgtatgagtactgggagagatt

SEQ ID NO: 7901 - DNA, 445 bp, Glycine max
  unsure at all n locations
agcttatgcgcatgtttccttactaacgttcacttgcggaagacatcctattaaccgaanaatgcacccatatacaatcaaggcagctgtgttacctacattatttacacgtatttccaaggtgtatttgttacttacatcacacacatccccttggctaaattcacatacatgcatactccaagcattttggggtacccaaaaattgcacatgtgcacatcttggtatttctaatacctatacatacacaaacttcatgatgaatcttgactatctacacaacaaggagctacatttcatgccctttttcaagtttttgctacctaaagccgcatgcaaattcaagcatattctcctttgctgactaanattgtattcaaattatatatatatcttttggaatatgtggttttttcatacaacattcaacatatgtatatatat

SEQ ID NO: 7902 - DNA, 554 bp, Glycine max
  unsure at all n locations
tcgtactctatacnaataacgccgctcatctatctntgtactttttnatcttctttactccagnacacgcccnttgancttattgatccactcgacccggaactntaaancgactgcggctgcaacctataaacgaaatgcagtgtagattttctggctctataggggcgatttacttggcaccctttatcatgctcaatatggtaggaagtttatgtcttttaatccaaaaaaagaaactcggttacgatgtgagagtaatttggataaatgaancatggttttgcttgtatatgcatgaatatttcatgcttgttgagtaatgtatatacaaagtacctacacatgagagtgcctaccatttggaataagatgtttagattgtgtgattgcattctctagcaccaaagctattgcattgaaaaattactgcatacacacaaatactttacaaagtgcaaccaatattacttggctaaaaagtagtctaaagctactctgtcatgatggacctcatgtatgacaagctaatacaaatggtgatgatgctgacg

SEQ ID NO: 7903 - DNA, 307 bp, Glycine max
  unsure at all n locations
gctggacatttatcaatatatacagggagtttattagaaaatagagttatctttttatctattgagagtgattctcctaaatcttgagtgattcaggacactctggctgtatcaaacggacttcacaacctttgtgtgttgccctcactggaaagagtgattctttacttcctttcatcttcacctntgttctttcaaaccacaattccagaanatccacctcttcccagaattatctcgtggccataactcccattttacgcactcaaattaagtgattcttaagcctaaattgaatttcaaaacg

SEQ ID NO: 7904 - DNA, 422 bp, Glycine max
  unsure at all n locations
tagtggatgggcctctctacctttctctttgttttcgtgcattcatggtggaaataccattaaggacctcattgaagctcacagatccagcctccgtagaagccccacaagcaagtttccatcatgaactntgaactataattctaaaatgatcaaagttcacaaaatgcacacatatggcctctatttatagcgtaagtgtcacacaaaattggaggaaaatttgaatttctattcaaatttcacatgaattagaaattgaatttgtggagccaaaatttcactaattatgattaatgaattntatntatggttcagcccactaatccaagatcaagtccaagattctccaataagtgtgcttaggtgtcatgagacatgtaaatcatgaacgacatgcacacagtgtgactatatgatgt

SEQ ID NO: 7905 - DNA, 443 bp, Glycine max
  unsure at all n locations
tgcaagcttatttcatcaattaaccttaactatactgttttgacttatttcttaaatgtgacacgtatatatactttaccaagtgctatatgctattgtcgtcttattctacatggctcaagctgcaggcacaacgaccaaatgcaatgtaatcatatnngtattttctcttaaggggcatgttattggagtggataagaacttctatatattgtgcaaatatagtaatgcaatttaacttggtttattacgcgtgtactttttggtcgtttatcttcatttctaccttcttcattattataagaaaatcgttcttgaaattgagatcataaaaagttcattgntaaatattntcatgtgtttttaaagatctatttaanaaatatcacaaaaagctagaattgattctaataatttattttaaatctataattaccattcat

SEQ ID NO: 7906 - DNA, 428 bp, Glycine max
  unsure at all n locations
gagtcacctgtgcagttgttcaagtttgtgaatgcaatacaacgtgaatgtttgtgattcatacaactgtgcactatntctagaatgagatcatttgtgcaatagagaaagaatttcaaaagtgaagtagatgtgacataagtattaaacttctcaattctttttcatgttagtttaactttctttgggactttatcattctttatctatgatgcagtttagcccatgtcagtctcagctagtgcagcgccactattangggattgactgtgtgaaaatggatttaagtattaaaattctccctgccaccaatgatgtacatggaggagtcattgtggacttaaaggagcctatggactctaaagattntgctactctgcttagatcttcacttttacatttggaagcacagggtaacattatgatct

SEQ ID NO: 7907 - DNA, 416 bp, Glycine max
  unsure at all n locations
tttttatatgtttcctcggaatgtttttgcaaagggtttcatatgatgaggcaacaaaaattgctttttcaaatggaaaagtttctttcggcatgaaaatagtttgtagatactacaaagtattttaaaccttggggtgagttagactaatatagatacactatagtatntgatgatacactgcaagtgaaatggtcatccatttatggttctattaatgcactcacaatgtctttacatgattagctgaagaattttctatatgatttgttcttctagactacgccttgtcactgttatatcctcaaagatatctttgatactctntcaatccactttttaagacttgatgatcacttctttctctttagaaggtaatgatgaggaggatcaccatgagcactggaatggatcta

SEQ ID NO: 7908 - DNA, 492 bp, Glycine max
  unsure at all n locations
taggacctaataaactcagcttatatgcaagctcanagganaattataatcgtttagaaacaactaacacttgaaaatgaatacctatgaatactagatgctttgaagaaatgagtaacgaacctacacgctatcattcaaattctttatgtagaaaactctttgtatattcttataaagtttgaaaagctctcagaacatcttgaatactctaagacaaaaaactaaatgcttagatttcacatttgtttgtaagatgattaagatttaatcagttagcaaatcaaacaacatatcttctgatttgtatagaaccaacagtggcttggtaggacaaagaatattccgctgttaaagcttgacgataaactctgttgtgagagctaaaagtaaccgtgacacatacttgtaacttttgtgagattagtgaaacttgattgtaaccaaaaactgaacttagtctgaatggtagagacaaaccaatataaatat

SEQ ID NO: 7909 - DNA, 348 bp, Glycine max
atattgaaagaagcccatttattgatgaagttaggtctttcctatgaagatctcaatcttattatgttgcaaagacatcaagaaggccttactcaaatgatctatcaaaggctacattgaatagacaacatcagaatgaagcagtactagagtcaacattagaatgatgtaattgaggactctgagaatgtgatctcataatgatattctaaagatagactagaatcaagatgataaacatcaaatttactgtattttcatatgcaatttgagacatttatttgatactttaatatactctaggctttattttgaaccaaattcgttatgttttcagtttttaatata

SEQ ID NO: 7910 - DNA, 457 bp, Glycine max
  unsure at all n locations
gcttcaatggagganaaganagagggagagaaagagagaggcgggagctcganattgaaggaagaaaaagggagagaagttgaactttgaagtatgtctcacaagactctcattcatcaaagttacaacaagtgttacacatgcttctatttatagactaggtagcttccttgagaagctttcttgagaagcttctttgagaaaaattctttgagaagctagagcttagctacacacacccctctaataactaagctcacctccttgagaagattccttgagaagattcttaaagaagctagagcttagcaacacataccccctataatagctaagctcacccctatgccaaaatacatganaatataaaanaaaaaaaaattcatactacaaagactactcaaaatgccctgaaatacaagtctaaaaccctatactactagaatggccaaaatac

SEQ ID NO: 7911 - DNA, 515 bp, Glycine max
  unsure at all n locations
cggcccatggtaattttganatcgatctcggacnctggatcctctagagtgcacctgtgngcacgttagcttgtctantggctatacatgatacacgtcacggttagggaaggttcagtgataaaacggatgccccacattatttccatgacacagatgcaaaaatgatgatctggaaactttatgcacaactgagcatgcatgcacctatgtggacactcaagagtaaacttttatggtcatgtgattatcggctgaggatacatgtcctctatgttagtcaacccaacgactccaaaatatgctattttatcaatgtgtgcattcatgcgagtacatgatgggcgagcgggaaaatattcacagcgttcacccttcaggtgtatacacattattgtttcaagaatcggttatgatcagtgaatttgttgatagaaaagatgaaggtgattttttataaaagcatgtaggatctcaagttaacaagtcatgtgagtttaaactacgtggctctn

SEQ ID NO: 7912 - DNA, 449 bp, Glycine max
tggatgatgacgacgtctgttatcatgaggcacacagacacacactcacacacgcacacgcacacgcttggtactattcgatcgatgatatcaagttgcattctcctcctttgtgctcgaattcatgctggtcgtaaaattaaggggagtacttatgtgagatcttgagtgaatgcctatatgtctccccctgaggcatcaacatatagccgaagtgcgtaacatgtataagacaatcatgtgctattagtcattcacagggcgatcatgggagaatatgaacccatcatgaagcaggagacatgaatagatcaaatatatataacaaccacatatatgacatacacatgaatagagaaagagtctatcaagatatcttaaccattcatgaatcgtagagagatagtacttcatagaatgacatgtaatccagaaagtcattcctaatg

SEQ ID NO: 7913 - DNA, 342 bp, Glycine max
  unsure at all n locations
agcttgtcggccgcgattgacgaagggcgcagaatactgacgtagtctctgcgtgctatcagggctttcgtcttacagatagcaaaaaaaagaatgtntatatggataaccactcggggtatttcgcccgtcagcgtgactcanaagtcagtatgacagatcttgtgagggcgcagaagacgacgttagtctctgcgtgctatcaagcttttcgtcttacagatagcaaaaaaagaatgtttatatggataaccactcaggtatttccgcccgtcagtgtgactcanatgtcagtatgacagatcttgtgagcgcggaagatgacataaatctncgcgtgtc

SEQ ID NO: 7914 - DNA, 410 bp, Glycine max
  unsure at all n locations
tgtgccgtatgttgctataaataggggatgaagtgaagaagagtatggttcagccccttacgcacttctctctctctcgaaatagctgaggaaaattagttccgtgaagaatatccaagccgagacgcttccgtaacgtttccgtaacgtttccgtgagtaattacgcgaagattctcgaccattcttcaagattcatcgttcgttcttcgttttgttcagtcttcaacgggtaagtacctcaaaccaagcttttcaattcattctatgtacccgtggtggtccacattntgtttcatgtattcttgttcttgttttcatttactttttatacccccttttgacgtgcttaagccatntatttaagtcatttctcgcctaatctaacaataaaataaatctccaccgatc

SEQ ID NO: 7915 - DNA, 311 bp, Glycine max
  unsure at all n locations
agctntaagtgaaaggttcgggagttgtatttacacacgggngaaggtattagcaccccacgccgtcgtcataagagacggcaacctttaatcaaatgtgcaaatatgacttcaatttatattcttttccctttttacgttcttatgtttttttatgcctttttatgtttttatctttttgtggacgacaagggcgtttccctttgctcctacgtattcctcgattttgatgagaaaatcagacctacgtagttctttntgtgaacaaagcgtttggttaaattattttttatccttttttgcaagatatg

SEQ ID NO: 7916 - DNA, 477 bp, Glycine max
  unsure at all n locations
ggggcgaganatagaaattgtctaagctagatntccataagtgcaagaattacattgtgcattgagtcgcaaggtaatttgtctctatgtgagtggactctatgcaaggttcactctgagtacatatatctgatgggaggttagcacactaacttangaagttaacatgctaatctagaattaatattaggataagatttaccaactttatcaaaaatagtttttatcatttttgcttaagtctactttaatcatttctggttaaatattcaaaaggaaaaaatacccgtatatggcagaatttggcacgtccatcatgtaacatcccatttttcgtaaaataatttaaaaatgattgttatttgtaaacaaacagagttttagaanaatgatgaagtttttataattaaataaataaggagaaataactctattaattaaaataatagttctggagaacataaaaagggtatttta

SEQ ID NO: 7917 - DNA, 325 bp, Glycine max
atatatgcatgctcataggataatgataatcgtttacaaacatgtaacactcgaaaatttacacctataaatactagatgctttgaagaaatgagtaacgaacctacacgctgtcatgcaaattctttatgtagaaaactctatgtatattcttataaagtttgaacagctctcaaaacatcttgaatactctagagacaaaaaactaaatgcttacatttcacatttgtttgtaagatgatcaagatttaatcacctatcacatcaaacaacatatcttctgatttgtatagaaccaactgtggcttgtgaagacaaagaatat

SEQ ID NO: 7918 - DNA, 341 bp, Glycine max
  unsure at all n locations
agcttcatcctcagatccctcttgttggactgggctcaatatagacaaccctcttaggtgtagactaacttaaactaaggttcatccttagatccctnctggtggactagacttagcttanatagattatgagagttcggcctaattagcctaagctatgttctcagatccctctcgttggactagacttagaccagacagcattatagtaatagcatacttaaaaccanaacttaatccacagattcctcttgtaagactaagtttcaattctgctgcattcaagatatacggcaacaatacatttcccaatgttaaatcacctaactatgcaagcaaat

SEQ ID NO: 7919 - DNA, 433 bp, Glycine max
  unsure at all n locations
tccatcaagtggtaatcagagcacaagagcttcaagtaggtgctccttanacctncattaattntttttctttaccttctcttccattgntgnttcttcatttttctccatgtatctcctcacatgtcttgttctaaatgttgttaacatgattgtttagagtttccaccgattaaacttgctatagaagctagatttgattntctatgattcaaatttcttgttcttgttcttgaaccatgaattgtgttgagtttacgttcctttgagttctttcttgttattttttgtggctgaaacctaaaccataaaattcttacaaaaatattaaagtagaagaaaacctcaaaaatctagagtgacttgttcacctattgtagttntgtcatagaagtcatgtctagtcatgaaacttgtcacataagatttctta

SEQ ID NO: 7920 - DNA, 335 bp, Glycine max
  unsure at all n locations
agcttattacataaattatgttaacatgggattggaatgtgattcccaaattcttgagactttcagtatgaatatgttgtggtaatgtatataattcttgtaagcttcatacatggttaatcttcttcaatcaaccctttttcctacttacactctnttagctntacacaaatcaaattcttaattaaacaactacatcacacttgcacgcctaatgacaaaaaagaatagcaatgagaaaagggctaatcacatgtttaatgataaaatgtgatcaaacccaaggatgcctcgaataatcctttggtgacaccccaaatcagcaaacaatgatg

SEQ ID NO: 7921 - DNA, 465 bp, Glycine max
tgcaagtgaaatcgaattacttgacttatgtacgcaacacatagaatagtttacactagaatcagaaggtgtggtcaaaagagtattctatatgaaatatatctcgatacacgtcctcgaactatagagtatcaacattgctaagaacaagaaatcacgaacaaccatactatctatgcaattaaggcaaaacaccatactactaacatacccagaattataaggttcttataataagtatacaacgtacatataagaagtcagaatttaatagttaatagggatgtattaaagaatcacaaacttcaactactacattcacgacacataatatagtgagttaactagtcatgcgtttacacatcaagaaagacatactcatccaagacatatatatggtttataaaggtttcacaacattaatccacacatgaagatagaaataagttattaacaacatacatg

SEQ ID NO: 7922 - DNA, 357 bp, Glycine max
  unsure at all n locations
ngagatgaggaagtgttgaagggtgaaactttctgcttttattgttgaccacagagtggtacctggagatatgtcgcggnggtcaggagaccttggggacgtcatgtggggtgctattgcccaaaaccaagcttgaccaatcccgacccaacccgggcatagtcggtcagtgagaacctgtgatgtacctaagcaggcgagctcctggcagtcaacagataaaaggaacaaagaccacaaagcaaggaggcttgtggtggctggccagctctggattntgtgtgatatgtggagtatggcctctggtaatcgattaccaagggtgggtaatcgattacaaggcttaaaaatgaagac

SEQ ID NO: 7923 - DNA, 359 bp, Glycine max
actctaaggattcgcctagttaacattcctggctaacttcaatacctaatttccttaaccttcaatggccaaaccgcctaaataggtttcctttaaccaataagtttttaacctaatctttcatacttttttaagtggttacctttggatagttccaacattattttttttaccttttggtttcaaacctccacaagaaaaaccgcacttaagaaccacatgagtaataattatctaatgtaatggcgaggtactatcatagggacctttattagaatttagataagtgagtccctcagttatggaagaaaacagagagatagaaaaggaaaaaagagtgaagaatagtcagatgaaga

SEQ ID NO: 7924 - DNA, 538 bp, Glycine max
  unsure at all n locations
cggcgtgacatttgacnccctgcatttggngacctttatttgactccctctcatatacgcgcagcactctattatcaacattcacaagtggagatctttgcacacgagcttcaggtaagcgtctcttatccaatcgagagtgattgccctaccttctctacagatgcaagacctcacttgttgcttcatgagacttccacatgctttgtgcgtaatgctggctacatgaatcgatacaagttccacttatttaactagcctagaagctaccttcgaatttctatgagtaaacatctcctgccatagtcatgaaccatgaattgtgtcgagttacgactcttagagagtggtcctggaacctatagtggctgacacctcaacaccttaaatcttacctaggaattacatgattaggagcacctgagcatctagagtgacatgtctactctattggacttcgccatataacctatcgttaaccatgacactcgtccaattagagctcctatgcagcgccggatgatatctgacttgaccg

SEQ ID NO: 7925 - DNA, 488 bp, Glycine max
  unsure at all n locations
tgtctaccacacttccaatgatgaacaccacctttagcacanactanaacaccaaccaagaaatggaatttgcagcgaanaaacctgtagaattcaccctaaattccggtgtcatatgctaacttgctcccttatatacttgataatgcaatgatagccataacccctaccagggttccttaacctccatttttctgaggatacgactcgaacgcaacatgtgcatatcatggaagagttccaggacattccattgagcactgtatgacctcgaagcgtaaggtgcaaagtgtaattgatgtgggctggttgaaatttgagtagaatcgcttgtgaatcctaaacattgacaagcgacaccacacatggggtaattttgaaagctgttgttagatgtctctaatgactcatcangattttcanatntattgccattattgtaaccacagttacaatgctaaataaaaaatgtaaatttgacatctttg

SEQ ID NO: 7926 - DNA, 333 bp, Glycine max
  unsure at all n locations
tcccttgccgctgcagcttaacattcaatttcagggtttcgattattacgggattcaatcatacatccgagtaaaaagttattggcgtttgaatttgctcagagcttcngcatgcacagtcgagcctctcgatatactacgggactcaatcagaccaccgagtaaaaagttattgtcgtttgaatatgctcagagcttcggcatgcaagttcaagcgtttcgatatattacgggactcaatcagacatccgagtaaaaagttattgtcgtctgaagttgctcagagcttcgataatctatttcgagcgtttcgatatattacgggactcaatc

SEQ ID NO: 7927 - DNA, 450 bp, Glycine max
  unsure at all n locations
actcggatgtctgattgagacccgtaatatatccagacgctcgaaattgaataccgaagctcttaaaaaattcaaacaacaataactttntactcggaagtcagattgagtcccgtaatatattatcgagttgctcaaaatggaataccgaagttctgtgcaaattcaaaccacaataactctttactcggatgtctgattcacgcccgtaatatatcgagacgctcgaaaatgaataccgaagctctgagaaaaattctaacgacaacaactttttgctcggctatccgattgagtcctggaaaatatcggaatgctcgaaattgaatgctgaacctctgagcaaattcaaacgacaataacattcttactcgggtgtctgatggagccctgaatatatcgagacgctcgatattatataccgatgctctgagaaaattcacacaacaa

SEQ ID NO: 7928 - DNA, 140 bp, Glycine max
tatataaataacaatttcaattgattaattggcataccagcttttttaaatataattcatgaatgtaatgaaatcttttatacaattttttattattatagaaaacgtgtattgtatatggtattagcgacaatgacata

SEQ ID NO: 7929 - DNA, 379 bp, Glycine max
  unsure at all n locations
tatcttagcgagagtgattctcctaaattctcgagagagtcaagaacaccttggctgtatcaaaggactttcacaacctttgtgcgttgccctcgctggaaagagtgattctttccttcctttcatcatcacccttgatctttcaaaccacaattccagaaaatccacctctgcccagaattatgtcgcgggcataacttccattttacgcactcaaattaagtgattcttgagcctaaagtgaatttcaaaacgagacctttcacctcgctttggaatcacctcatttggagccctgtagcttcagttattgacatttctatatttctgtccagccaccacttaacctacgttntaccatcccattcatcccatttat

SEQ ID NO: 7930 - DNA, 359 bp, Glycine max
  unsure at all n locations
atattacaacaaactgcaatttccatccttttcaaacttgtattttcttaaatatttttgctacttgagttggaatattatgatttatgaaccattgtattatgttatgattttaatattttatagaatgtgttgttatttttctatatgataatatgctgtagtaaccatgcctgngttctagaatatttgttgtattcccatacctgtactagtactggaactcatacatgtatccatgaaacacagatgacaaaatattntcagtattgctctgttgtttgtctggtattgccaacctcacctaatgggataggatttttgtgcccgtgtatgctatttgtctgttatatgatctg

SEQ ID NO: 7931 - DNA, 470 bp, Glycine max
  unsure at all n locations
ctttcccattaaaatatcaattgcaacatagtgacactntgtatgtccatgctcgcctgtctttgacgtagagacctctacaacctgtcaagataaatcgacaaacaaacaaggcaaaaaaatatgtttacttaactgattgtctcagatcataataacagacaaatagcatacaacggcaacaaaaatcctatcccattatgtgaggttggcaataacagacaaacaacagagcaatactgaaaatattttgtcatctgtgtttcatggatacatgtatgagttccagtactagtacaggtatgggaatacaacaaatattctagaacccaggcatggttactacagcatattatcatatagaanaataacaacacaatctataaaatattaaaatcataacataaatacaatgttcataaatcataatattccaactcaagtagcaaaaatatttaagaaaatacaag

SEQ ID NO: 7932 - DNA, 292 bp, Glycine max
  unsure at all n locations
attggttgcaagtaccttacatacgattattttgacttttatatacacatctatacggctgttatagttatattttggggctttacctctcagccacaaatttatgatgtaatcagcaaagttctctactgatggccctgagttctcctgctcttgatattgcttgagaattctgcaaggaatgaaatcatatggctgtctaatttagttttagtctgtagtacatattccaaatgttgctgtaagaacataaagtataaccatccataannatagttactgcagtatatgc

SEQ ID NO: 7933 - DNA, 446 bp, Glycine max
  unsure at all n locations
tctcacaatgaaacagttaatggaagttaccatacgctgcatgattgtcagaanaaattaaagtccacggataataattcattaaaaaaaaaaagtgcaaatctactacagatccaaactcgagcactgcataagatcaggaacattaaaatatttaacttgctttaaagaattataagcatagctttccaatttgagagccgattagattttcactacatttagtgcagtgaatttcataactgttgaagatccatgcaaagcattttctcaggttctgtgaccttgcataaccattaacataacatttatcttgtaaggcttttgacagaacattnttccttggaaatacttcactggaaacatacctnctaacaaagaattctncagttgaaagccgaagatatgaagtacatttcgttaccacaatacccatataatccaat

SEQ ID NO: 7934 - DNA, 133 bp, Glycine max
ttgataaatatcatatataaatagtggccgaatattatatcgtaagcaagaaactaactgctcaatgataacatgatcacctacatatgatgttataatggcttatcataacagcatgccacatgctttttta

SEQ ID NO: 7935 - DNA, 378 bp, Glycine max
  unsure at all n locations
tagccttgttcctncctaccttacatgtttcatcaaacttggttctgaacactcactttgctccaacaacagattatcctttggggagttctacaagctcccatacatcattattctgaaactggtctagctcttcttgcattggtttgacccaatattaatcagacatggnatcatctatgtgtttttgctcaatctcatataagaatgatgtgttcttaagagagttccttctctgtacttatgccataggatcacatatgatctacgctctagatgttgtttcctcaacaggcatacagttggttctctggcctcttcaggttggttgtccactggtgagttagacgcaagttggttctgactcgacacaacagt

SEQ ID NO: 7936 - DNA, 328 bp, Glycine max
  unsure at all n locations
agcttgttaaaaaaatgaaagaaacgaaaccgaatttgaacgaaataaagatgaaggccaaaaaaccaagaaatgaattaaaagtctcggatttggaaacttacctgctgaagaacgaagaacggatgaagaacagtgaagaacggaagaaaccttcacgggattgcttacgaaaacatctcggaagcgttacggaagcacctcggcttggattttcttcacgggaaacaattttttcacccaaaacagttgaaatgcatagccagngngatcatggacccttagaacaggcccnnttttttccttttatagagaaaaagtgggagga

SEQ ID NO: 7937 - DNA, 466 bp, Glycine max
  unsure at all n locations
ttgatggcactattgcaacaacaaaacataactcacaacaatttacatgttagtcaaattggtacaactagcaacaaaggtagtactctatccattacttgtagtgtaagcaagatcagtcaagaagagtggatccttgactcaggtgccacagaccatgttacagtctttcctcataaagttggtaatcaattataggaggaggcagcctactggtaatcgattacatgaatattgtaatcgattacatgccatctgttctagtgtaatcgattacaatattcatgtaatctagtgtaatcgattacaatattcatgtaatcgattaccagaacaaanaatagccttttcctacaagaaaacttatttctaagtctaaaaacttatactatcttaagagttaattatactaacaagaaaagtaaactaaattaaacaaaacaagcgtcatacttaatcagaacac

SEQ ID NO: 7938 - DNA, 319 bp, Glycine max
agcttgcatgatttacatctccccctttctcaagcaaattcttcttgatatcatcaaaatcttcatgatcccgactcgttggtggaggatgcatgaatgacaatcaattcatggggctccgaataaaagtggagattggaggataggcgaatagcgctaggcaatcaattcgcggtgtttccgactcgttggtggaggatgaatgaatgacaatcaactcatggggcttcgaataaaagtggagaatggaggataggagaatagcgctaggcaatcaattcgcggtgctgcagactcgatggtggaggatgcatgaatg

SEQ ID NO: 7939 - DNA, 412 bp, Glycine max
  unsure at all n locations
tctccttatttgctataaatagggggagaagtgaagaagaaaagagttcagcctctttgccacttctctctctctcgaaattgctgaggaaaattatttccgtgaagaaaatccaagccgagacgcttccgtaacgtttccgtgagtaattacgcgaagattctcgaccgttcttcaagattcattgttcgttcttcgttttcttcagtcttcaacgggtaagtacctcanaccaagcttttcaactcattctatgtacccgtggtggtccacattntgtttcatgtatttttattctcttggccatttgctttntatacccctttntgacatgcttaagccatttatttaagtcatttctcgcttaatctaaaaataaaataaatttccactgatcggttaaattatatca

SEQ ID NO: 7940 - DNA, 340 bp, Glycine max
  unsure at all n locations
tcagaattcaatttcgatcgtctcgatatattacaggtctcaatcagacatctgaggaanaaagttattgtcgtttgaatttgctgagagcttcaacattcaattttgagcgtctcgatgtattacgggacttaatcagacatccgagttaaaagttattgttgtttgaatttgctgagagcttcaacattcaatttcgagcgtctcgatattttacgggactcaatcagacatccgagttaaaagttattgttgtttgaatttgctgagagcttcaacattcaatttcgagcgtctcgatgttttacgggactcaatcagacatccgagtaaaaagtta

SEQ ID NO: 7941 - DNA, 567 bp, Glycine max
  unsure at all n locations
tctcttccgcacttntctatactcttcactcngtcataatantatgtactttttctcncagcgagccttgcgacntcgattgaccccttgatggacnccttgcattaccggcacctagacactcaacctgaattggaactatacaaatcgctggttactgtaacgattcaattgaatgactatgaagtcagtgcgcactcacactagaagtgaggaaaagtaatgctgataccaaaatgaactaanaaaaacaacagcgtcaatggcatcaaacaaagcatagtgccaaccacataacctatagaacattaagaagcatgagtgttaaattcatgataataccgtacaaatgaagagacttcctatttactaatctctagagagccatgagttttctatacagaatcccacactctcacgttctggttataatgacaataaaaataactaacaataatatggctttgccactttaacattgcaatcagtccacatacgaaccaatgatttattatcatttcgtatttatgccatcaacacggtgatatttactgaaacattctagcg

SEQ ID NO: 7942 - DNA, 338 bp, Glycine max
  unsure at all n locations
cagagttgngagcagcanagggatctattaaatataaactaaagataaataatcaaatagtattgataaaagaaatgtgcataaatcaagtacaaatccttcaaaacaaagtaagaacaaatagtgattttagaagaaaagagaaaaagaagcaaaacaaaggataagcaactaaagttagaagctaaacgtaagaacaaaaccaaaaccctcgaaatttaaggtgtgtgtgagagaactgaaccgaaggaattgtgacctatgaagaacaaatcatagtgaaaatgcatagaagagtgtcattttttttaactaagaaatatatactttacggcatg

SEQ ID NO: 7943 - DNA, 434 bp, Glycine max
  unsure at all n locations
ctcatccaaacatggcaagttcaacatgctntaacanatttcttcacaaataaccatcatgaagcagaaacctagcaagactacccatcatatctcccaaaacccaatacccacgaaaatcaagtgagaaagaagtccacccaaacctgaaatttcgaggtctcacacgtagagatgcgcttcacgactctgaaaatgccctcctttcacgatttggagcagaaatgatgaccaaaggttggagctctgttggagcttcaatggagaatgaagaagaaagaaaaagcaacgtgagggagagggagagagagcttctgaaatgtgggctgagtgaggagagagagagagagttgctttttagtttaaaaaggttntttcctcttttcttattattttaatttaagctatgccacatatctncatttgagtggagc

SEQ ID NO: 7944 - DNA, 357 bp, Glycine max
  unsure at all n locations
agcttctaataatgctcatctgggtgtctnttctttntcctggatgctntactgtttggacagtgaacatattataaaccagtagctgagacttcttaggccctttgttgtgtagatataaatctgaaactagatgatcaattataaccaagaagttatttgtggtgagctatacagtagtttcacgcttacttgctaacatggtatccacatagtgtactgttgttctatgtaaactttctcgtaggtggatgtcgggttaagctagagccgatgctatacattatcactgcagttctgttacttcaaataatagacatatctgngtctatatctattgaaatatggactgcatat

SEQ ID NO: 7945 - DNA, 451 bp, Glycine max
  unsure at all n locations
cgaggctgacgtattccctcanattcgacgtcgatgagctcgcctcagtctatgacttccgcatcgacaagtctcaagttcgttcaccgtatgcttctatttctcttcgttttcgagaaattcgaaacttgtgtgttgaggtcttgatttgcttctgatgagtttcagcggcacgccatactggcttttttaagaggcttctcggcggtggtttccgctccgacgagcagcaagaagacgctgattggcgaggctgcggccgaatgtgagtacttattgacgactgcttttcatgcagtgatggtaatgtttcttctagaagcggacttgtgaatgctgatgtgattgttctggacgaagttgattaccttagtgacatatctcgtggacagtctaagaggagattgtacgcattatattttgactctacatgttacgtagcttgctcaac

SEQ ID NO: 7946 - DNA, 311 bp, Glycine max
  unsure at all n locations
agcttgagatgaggaagtgtagaaaggtgaaaacttcttgctttatttgtgaccacagagtggtatctggagatatgtcgcgggggtcaggagaacttggggacgtcaagtggggtgctattgcccaaaaccaagcttgaccacatccgaccgaacccgggcatagtcggtcagtgagaacctgtgatgtacctaaacaggcgagctccttgcagtcaacagataaaaggaacaaagaccacaaagcaaggaggcttgtggtggctggccagttgtgaaacttgatngatatgtgagatatgggctctggt

SEQ ID NO: 7947 - DNA, 125 bp, Glycine max
acatgtcttgtgctgcctgttgatctgattaattcttccacatctcagcgattaaccttgccatagagcgctacacttgatcttctatggctctaatatcctggttttgctcttgaaccatgaat

SEQ ID NO: 7948 - DNA, 333 bp, Glycine max
agcttgttcgcacatcgttcgcgtgtatgacatccactccacaaggtttgaagttgaggagacctttaatcctattacacaacgtggccgacaaaagtgggcagttaacttgaatggtcattattgtcaatgcagaaggtattctgcgcttcactattcatgttcacatattattgcagcttgtggttacgtgagcctgaactactaccaatatatagatgtttgttatacaaatgagcacatcgtaaaagcttactccgcacaatggtggcctcttgggaatgaagcgactattcctccttctaatgacgcatggacacttatccctgaccc

SEQ ID NO: 7949 - DNA, 541 bp, Glycine max
gtcgcgcccgagccgttcctttgggcacttatatacgcatcttgtaggtcaccccagatactccgcatgtgctcgagctgatacaatatgtacgttcctggtacagctaatcattgacctattcggttgttcagtcacactacatttctacgagaatacgactcgaggcctacgtgtgcgttgtccaaatgaaaactctgtgcgtgtccatcgaagcattggcatggctgccgacagcgtactggacgcgaggatctatattggtagctgtgctgaaactatgatgataatagtgctgaaacgctgtacttgactcgacatgccacgcatggcgcaaatttccaagctggtgatagacgtaactaatgactcacacgttctgtgaatcttgaccggaatgtgggcgtacgctattgttgtgtttgctctagcaacgtgcgactctgagtcgctactcgcaagaccggcacatatgagaatactcatgttgcaaggcgcgggcggcgccgtagaacatcgacgccgagttcatactaatacg

SEQ ID NO: 7950 - DNA, 391 bp, Glycine max
  unsure at all n locations
gcttatgatactngttaatgttntcttactaattgtggttatttgatttttttgtattaatttcttttataataaactcacccctcacaatttttgtaccgtgtggttggtacctgtgatgatcgcgatcttttgtgggagcagaatgacaacagtagtggacgagaagtaagattcttttgtggagtcgtcgagccgacatgatgacattgggattantttgggagaaagttgtgttttgtaatcaactcctncatagctggttctgtaattctttttggtgattngaagatgtaaatcacaaaattaggtatatgtatgaacanattattntccattatngtgaatatgtgtactanggtactatacctatatatatatatatatggat

SEQ ID NO: 7951 - DNA, 481 bp, Glycine max
  unsure at all n locations
tgtgtgtaattgggttggctccttcccacattgctntcaaggatgaatgtggaatttagccattgatttcaatgttggaaagtctgatcgcaacaggataaaagtcactggaaagcagaagaaagtacgtatttttctcaagtttgaattttcacgctcttcttctctctgtttctagatatgtatgaagaattagtaaagctgattcctatcgttttttggtgcacaactgacaaatactttcatattagtgatattacttttaagactagaagtctagaatgaatggctntgtcgttgttaatgatatcctttcattatttctccaagtgaattgagttgcaaattttagcaattaataattaaacttgtaagcattaggcacttatccagctcacggttgtgatattggtgcatacatcggcagccatttccttggtttagagtctcctattttgntctctggagctgtggttacgtc

SEQ ID NO: 7952 - DNA, 503 bp, Glycine max
  unsure at all n locations
agaacaccactccggttctggaacttgagttcgngcccttagatcatttgacctgcagctcggcagatcagatcgcggaggctctcatgaacatgcaggttggttggaacaagatagatggatgccccacattattattcatgacacacatgcttaaatgatgagttggaaactatatgcataactggtcatgcgtgcacctaagtcgacactcaagtgtcacaattttatggtcatgtgatgctatggctcaagattcaattcctctatattagacgacccagcgataacacaatatgttctgttatcaattttgcattcatccgagtccatgttgtgcgtctgagaaaatcttcacagcattcacccttcaggtgtatacacagttttgtcaaaactaattattatcagtgaaattttttcaaagaaagatgaagtcatctctttcaaagcatgttgctattaacttgacaacttaattacttattcttctttttttatta

SEQ ID NO: 7953 - DNA, 443 bp, Glycine max
  unsure at all n locations
ggcatgcctgttaaactgtttccaacttctttctatcttcagtgtatntggtcatcactttctcaaagagtaggttgcacttatgcaccattccataacaatttgttaggtgtagctcgctgattttcttctaatgaataaatgcagcaaactctttgcggaagttctacaaaatgtgaaaatagataaaacaaaaagacatttagatggttgttgtcaaagtaagtacaatatattcaattgcatgatttgcaacatcagaatgaacaaataaataacattattaaagttaaggatgtgggcttacaattttgctacaggtagctgtatccttagtcaaagcttctctaaattntgtcatctaaggagcaaataattntatgaactaagctaatgtcaaattgtactgaaccaccttattacaataagtaacgtatacttac

SEQ ID NO: 7954 - DNA, 225 bp, Glycine max
ccggcaagcaatactggcttttctaagaggcttctccgtggtggcttccgctccgacgagcaccacgaacaccctcattgtggacgctgctgcaaaatgtgattacttattgaccaccgcttttcatgcactgttggtaatgtctctcttagaagtggacttgtcaatgttgatgtgattgttctgaccaccttgattaccttagcgacatatcctcgggtacac

SEQ ID NO: 7955 - DNA, 275 bp, Glycine max
taagcaagcgagcttctggcagtctacagattaaacaatcaaaaccacaaagcatggaggcttgtgtggtggctggccaactgtgaactttgattgatatgtgggttatggcctttggtcctcgattaccaagagtgggtacatgattacaaggcttaaaaatgaacacaggaggctcagctggtctctggtaatcgattaccaaagggtgtaatcgattaccatgcttgataacgaggtcaagaagctatgagagcttctggtaatcgagtacc

SEQ ID NO: 7956 - DNA, 470 bp, Glycine max
  unsure at all n locations
tctataaaactaagcttacanatctggcaacagagaaatatatggtaggtacctagtactggtacaaggtttatagtgtgacagcaggaacatctcacacttgtagcaccacgtgtgtacattagcaatgtcgtacagcctccacaataaagttgtgacatgtccattcctgcacgggcaacatgaaattaaagggttccccagatgtaaccatttagttaaagtccaatacatgttaatgaatacttaatcaagctgaatgcatagtttcttatcagattatctctgtctccagctctctccacacacacacacacagagtatcttttaaaataatatgccaatgttagctacacacacaatttcttgattctttttatcttaataaaagcatatagctaacatttctattgatctttcatcatcattgatcttcaatctcttgaagaatctattanacaagcataatc

SEQ ID NO: 7957 - DNA, 206 bp, Glycine max
agcttatccggcctcccattaataggacctttatttaaaaatattgcatgccaaggtaggcatagcagcaggagaaggaccaccagcagccagccacagatacgccggcgccacctctatggtagccaccatctctggagtccatttctgctcacttgcgaaagatggagcttcaaatggatgcatatatgcagcatgtgaccgat

SEQ ID NO: 7958 - DNA, 419 bp, Glycine max
tctacttatgtggcagggcgggcttccttcaccttcttgtctctaacgcgaactttgaccattgttcttccttcccgcaatgcttctcttcatgtctgcctgagtgggcttatagcctaaaccatacttcccacgatttccttgagtatttatcaggctagttatgccgccgttgttttttcctaaacccatcccgggttcaaaaccgttccccaacataactcgggccatcattaccgctgcatcggacagacaaggttgcccaaagagggagtccacggaggaaatgctgaccacctcacaagactggaaagcagtttctaacgattcttctgcggcttccacataaggcatggaggatgggcagcttaccaagaatatcttctcgcctgacacgatgaccaagtgcccctccacta

SEQ ID NO: 7959 - DNA, 363 bp, Glycine max
tcactgttttgactaataagttaattaaaatgggaagaaacatgtgcaagggattctaattgttgtcctaattgaacatgtgttagtacaaaaacgtatcgttacgtaaatcgtgaggttctgaaacgtatcgtgccttacagaagaaaacaagtatcgttcataattcagaggtttttaacttacggaagagaaactacaaaaacgggcaactgggtgttttataaaatggtggtacaatgtatattcaatcggcccttctaaggttctggcatttttgcttatgaaaagcaccttcttcctgtgcacgtagtgcacacttccttttttgtaaaatgctgcggggccctatgttcttaaaat

SEQ ID NO: 7960 - DNA, 303 bp, Glycine max
  unsure at all n locations
tccaataaccaaggtagaaatagtattactcgaattgacaacattataaagcttgagaacaacctncaaaagttgcatgctatagccacttcctgttccaaccatgcaaagcctccctgaagattctgcccagaacccatcaagactaaacattattgaacttgggaaacgcttacggctcttcaatcttttgccacgtgtgaagtttcccacacggtaataggagctggcacttcttattaacaaggtagctccaactttgagtaagccagagacatcagtttcatacacactctttattcg

SEQ ID NO: 7961 - DNA, 367 bp, Glycine max
  unsure at all n locations
ggagacgaaggtcatgtgttcgcgatatgtgaagatgatgttccaggtccttcggatttggtccgacattcccctctggatttcaactggggaaatggcgaatggaggaaccgcccggcatttaccccaccagccatatggaacctttacggttttaaaaaccctatagttgggcctaggcttanaagtttctttttgtaagggcttgggtcttttgtttttgaattataatacacggatctttcttatctgttcctgtctctacccatctcattcatttgcatgttaccttcttttctgaaatgcagatcgatgacagtcctcgaaggtcaatacctggacccgctataacttcagcaagaatgan

SEQ ID NO: 7962 - DNA, 203 bp, Glycine max
ttgctttaccttctcttccattggtgattcttcattttttctccatggatctcctcacatgtcttgtgataaatgtttttaacatgattctttaaagtttccaccgaattaacttgctatagaagctagacttgattttctatgggtcaaaattcttgttcttgttcttgaaccatgaattgtgttgagtttacggtcctttg

SEQ ID NO: 7963 - DNA, 342 bp, Glycine max
  unsure at all n locations
atttgcggcatgcaagctcgcagctcagcaattgtccatgggtgagaccttacaaacagtcacgtttcagctgaatgaaatcttcatcgtcttcccctacgagtccaacacaggtccctgcccactacctttgttcatcttcttccctgcacaccatcaccgaataaaattgatgttctcgattgatgggagtgacccctctgggtggatcttcaagatcacccagtacttcgagtaccattcaaccccagaggcagagagacttaccattactgcattctacatggatggctgtgcgtnggcttggttccaatggatgaacaacaatggccaattcacgtc

SEQ ID NO: 7964 - DNA, 472 bp, Glycine max
  unsure at all n locations
tgtgcctcttcacgtctggaatatgaatgtagcatatagatccaaagacccttaggtgctttgctgatggcttcttcccgttccaagcttcaattggagtcttgtcttttacagacttagttggacatctgttgagtatgtaaacagcagtgtagactgcttcagcccagaatttgttaggtagtcccttctccttgagcatcgatctagctatttccataactgtgcgattctttctctcggacactctattntgttgaggagaatatgagactgtaagttgtcgctcaatgccttcatcctcacaaaatcttttaaactcgcgagaggtgtactttntgccgcgatcacttcttagtacttttatccgttttccactttgattntcagcaagggccttgaactntntgaatactccacagacttctgattttatttaaaanatataccatgtcatctagagaagcatcat

SEQ ID NO: 7965 - DNA, 400 bp, Glycine max
  unsure at all n locations
gagtcacctgccgcatgcaagcttgttggacctcagagttgtgtcaaagggcatgagtcatcatcaaatcatacaacaagctctacaattgtagcaggagggattcgaagctaggtgtagctcgaagaggaaaaggaagaaagctgccaaggccaaggatggtggcaagggtagcagaggtagatgatttcattattattattttttatcaccaacattgtaatggttgaaaacgttaccgtaacgannaatctttatttcatttgtgttaaggggagtttccaaaaaatattaaaactggggaggaaaaaaatatacattgtatatgtttataacggaatcacgattctatcgtaataagggggggggggtgcanaaacagtataataatgaaattatg

SEQ ID NO: 7966 - DNA, 414 bp, Glycine max
  unsure at all n locations
tcattaagaggcttcctcaagaagcttcctcgnggcttctntgataagctctctcattagacttctttgagaagcttgatgcaatccttcctacgaagggaccaatcactagaaccaggagcaagaggctccaagaagattgggctagagctgctgaagaaggccctagggttctcatgaaattcagggtagatttctgagcccatgagccaaggttgagtccaattatctntgtacatattagactacgatgtcattatatttggtccttatatttagggcttcatattgtaggtagggtaccctagaaatataggattttttcagcccttgtattttanggcacctagactagttnttgtattaagggtagtcttgtaatttcacatgcactaagtggatatttgatgtgtg

SEQ ID NO: 7967 - DNA, 290 bp, Glycine max
tctcttaaaggcatgccaaatcgaaagataaagaatcaccatgtaattttgataggaaaacatacttgctcactgcaataatagatctttgtacgacaaaagaaataattggtgaaaggcattgaatgttgcaattaatgcaatccatcgaccatttctctttctatatagatatcacacgagggaagattgaagatgtgagaaaatgaataatttctaaagtagtcctcctatttataccaaatgtccctttgctcaagatagataacgagttgctgaacattcaattt

SEQ ID NO: 7968 - DNA, 424 bp, Glycine max
  unsure at all n locations
tacatctacgatgactttaatactgtttatacatcatgaccgtttgtcttctttatagaaacaaaccagatgtttgctgcttcatatatactgataagagaaatcagtgctgccttttgcaaggactcctnatcttccaacttcaatttaaaaatatccatgaagagattttaaaatgaaagttgattaaaatatatcttcctttgaacacttatgtcaaaataaccattttattcttcaatgtctaaattcaattgattttatggctggatctctggatacatattcgaaaattaatcgataactcatgccacgaaaaaggtgttacctgcacagttatccagcaactgtatcagcaaagattcgctattgaacatctacacattatgaaagggttaattaacccatccacagtggctacttg

SEQ ID NO: 7969 - DNA, 342 bp, Glycine max
agctttgattagcttatatgaatatattagtattttctaatgcgtaactttttccatttggtttttgctaatggaaagtggttggctttcttggtgtgaaaatcatatgctaattatgtgcagactaaatttctacaagccaaggtaaattcttctaatacttatatactggaacttataatcacgaaggagatattatatatctttgctggtaatgttaactatgaaggtcttctggatcgggactctttttagtttttcaaaatcattatattatttgaatttttaatttcaagataaattattattttattagtcacttaactgtcaattaatacaact

SEQ ID NO: 7970 - DNA, 481 bp, Glycine max
  unsure at all n locations
tcttgcgtagcccctcttggtgctcagaanatccacnaacaaatccctcttattactagctattntgaattctttagttcctgaatgtacaaccttcaaattgttgctcgttcccctctttgttttctgcaagaaagaaaatcaatatcaaacaattcaggctgaattgttatcgttattattactcgaaccataacgaataacaactaaacaagtctctcttattcaaatggaaatggatgttgttccaccagcatcatcagctntggaacaggattttggtctccaaataccatggttggaggggattagatcaagggcctaaaaagcattatttttctacttggtgggatgacctaagagccatcatccaacaccagagtatgaatcctgctcttaaccaaatttgctggaaggtgggtaggggagatcagttcctcttttgggaagatccttgcgctgatgacgngactcccttaaa

SEQ ID NO: 7971 - DNA, 373 bp, Glycine max
  unsure at all n locations
ttctaatgacaaactagacatttaaatgcctccccaactttacaccaaagtgtatcatagtagttatggaatggcagccttgttacaaactctggaaaaanaaaagtgacatttggacttctattcttcatccaaagatgaaaaaattgagctggaaaactaaattttaccaagctttggaaggcaggtttctagctatggacctttttctctattcatcttgggaaccttgcccgaagagaagaaaagatgacatatatggataaggaactagtgatcaggagtttgttccaaacagactggtgcccccaatattacatacacatatattagtagattatttttcacatcatgattntttctctaaaataan

SEQ ID NO: 7972 - DNA, 430 bp, Glycine max
  unsure at all n locations
gtgtcttttgtgtttgaatttataatacaaggatctttcttcatctgttcctacgtctctacccattctcattcatttgcatgtttacttctttntctgaaatggcagatccgatgacgaagtccccgaaggtactaatacctgggacccgcctatcgacttcgagcaagaaatgagtcaaacggaagatgaaggaaacgaggatgtgggacttccnccagaattagaaagaatggtcgcccatgaggaccaagaaatgggacctcatcaagaagaaacagagctggtagacttacgaattggcagtggaaaaagggaagtaaagataggtacaggtattaccgcacctatccgtgaagaattaataatnctgctaaaagactaccaagacatctttgcttggtcataccaagatatgccccggttgagt

SEQ ID NO: 7973 - DNA, 284 bp, Glycine max
  unsure at all n locations
agcttgagacttgccacatatctttctctagttgttcttttgtcagcatgggctgttatgatggattcggtatctgaggggaacttcatagcccaggtgagggggtggacanctatcacacgctaaagcatttaaaagccggacgatcaaagaagtatattgtangaagtgtaggcatgcactatcccttatcaaaattntagaccttnnntgtttggtccctcatggccaaacttagtgtatagctatatgcatcccttggttcctactctttctacagcaaa

SEQ ID NO: 7974 - DNA, 463 bp, Glycine max
  unsure at all n locations
tgtcattggtcaatacatccttctatgctaataatcatttaattcgttctctntattgaatggattaattattgtgatgtaaatttcaaaattaaaaatgaagtgaattactcatagaattagaattggtagaatcattaaaagacgatccttttatcaagaaacctcaatttcaactcatttttatttattggctgatatcttataaactaataaagcaaatctatacacctataaaaaaaattgcagctccaatgataatagctggagagactcggtcatatgcatttgcaatatacgcaacaagaaatgccaataatcctgccaacagtgtcccgaatcctctgttgagccctttgcataaagttacccctagaaccaaaagaaattaaaaaaatattaagatcatgcacaaataacatgcnacagaaacacattatntaacataggaatatagaaatat

SEQ ID NO: 7975 - DNA, 282 bp, Glycine max
  unsure at all n locations
catgcaagctntgaatgctctattctatggagttgacaataatatcttcagactgatcatacacttgcacagtggccaaagatgcatgggagatcctgaaaaccactcatgaaggaacctccaaagtgaagatgtccagattgcaacttgtggctacaaaattctaaaatctgaagatgaaggaggaagaatgtattcatgacttccacatgaacattcttgaaattgccaatgcttgcactgccttgggagagaagatgacagatganaagctggtgagaa

SEQ ID NO: 7976 - DNA, 378 bp, Glycine max
cttatatttgtctcttacgagcaagttcattcccaaaaacttattagatatgaactaatatatatttaaaacctgcctctcgctgtatcaaactgactgttgaaagtttatctaacctttctttggtgtcacctcttcctattcgatgttcttatagaagaaacactatgattaaaactcactaattcagtagcaagaaattctcactaacttgaatgtctcctatgaactagaattttcttcattaacttgaatgtctactatttatataagtactgctgttaattgatttcttgagtgtctactatgaactacaatttttttcagtactttataatgtgaaaatttcacataacttcatatatatgagagagaaac

SEQ ID NO: 7977 - DNA, 170 bp, Glycine max
agctagggattaggttgatccgcaataggatagttgaagttacggatcaagttgatccggaagaagcatgcggatcaacctattatgcttgcggatcaagatgatccgcgtgaagctctactaattttaaaaaggtgataataagttataatactgaaaatggttttaat

SEQ ID NO: 7978 - DNA, 411 bp, Glycine max
ggctacacaaataacctgtgattgtgtcaatctcctgtgattgtgtgtatgaacattgaagtaggaaccattagcctatgtgacatctaggcaataaccagattgagatagtttggtgtggccatgactatagctctaatagcagccatgatattaagagtacctttttgtcaacctaaatacagtagagttgagagacatacagttcccttctacctaattatgatctcatgtctcccactttcttctccaatctctcttcattatctgactctatttcaatgattcagctctctccataacctgtcctgacatgttggaatattctgtaacctaagtacattgaacacgaggaatatcaataatgaggcataatattttgcctaaatatagttcattctatacttcaaa

SEQ ID NO: 7979 - DNA, 348 bp, Glycine max
  unsure at all n locations
catgcaagcttgtatagttccccaatttatggttattttggagtaaattntgtaaataaatcttgttttatggttaacgccgtctctagaacatttccattggatttaatgatgaaatctatgcattttcaggtgaaaaagaggctaagttttgaattgcaaaaaacaacagttggactaaacgcatatccaccgctaagcgcagcttcaacgctcttagcgcaaaggagaatctggcaaagcatcagcatcaaatccgtgcactaagcgtgagatcagtgagctaagcgcagtaggtgccttcagccaggctaagctcgagaatgacgctaagcctaatttcactta

SEQ ID NO: 7980 - DNA, 476 bp, Glycine max
  unsure at all n locations
ctcagcttgaggtatttattggtataatttgcctgttccattaggcttttaatgtctttagaggttacttcctcgttgacatcttttgtcttgaatggaattgccatgacaggtttattgttactgtctttgatatttggtagttgatattgtgttgtgggaggtaattccgattggattaactcaccatccttcacttgccagtttgttatgacatttgttgttggatcacctatgatgtcttgtttccaagggtaatctatatcctttctgatggcataagcatgaaaccaatcaaagaaaatgacattaattntgactctttcgacaaattcgtagaacttgtcttggatttgttttcggtttgtacccttgtaatgttggaaaaaccatctcttttgaggttcattctccggagaatagaaatctttcctaanggtttccttatcaatgctaaaagtgtcagataacatcat

SEQ ID NO: 7981 - DNA, 453 bp, Glycine max
  unsure at all n locations
tctgaggttgtcgtgtgtatattagaggatatgttcaatgaattatccagacaaggtaatgaaggccttgatatgactttctaggtctaatattaaaaagtgtgaaataaatatgatgcttatttttattgatctatatattattcttgtgtaatgtctaagattattatcctttcaatcgtaaaggaagaaaaaattaagaggaagaccaggcagcatcccaatgagcaatcccacattntgattgaggttgatttacttgctaatattgttgacataaggctttggcaagctcaagaaattatagaattgctcaaacctacggtaagttccttcacaccatgtcttaatcttctgtcctgtgggttatgttgtgtgaatcgactgctatcgagggttactttcatctctggtcagtattattaagtttgtgatccctaacagtgatacata

SEQ ID NO: 7982 - DNA, 373 bp, Glycine max
  unsure at all n locations
tttgatctcttttttgtgctctaaatggtgggagtgtgctcaaatatatggggcaaatttgatttggtttcttgcctgaatacggtgaattaagggtttggatgaaatggccctacgcctataatgccattttgagtaatggggcatgcccacattgtccccggtcttttgtattgaccactaaaacgcgcgcccacccaatgttcggtgaaatgcctcaatggcattagcgcgtaatttttgtnaggaaacaacccattgggcaatttggttgcacatattttnggacatgcattcattttcaaggactagagtaatgcccccatattcctangctaggaaccaaagtttatgcaaagtcacaaaaggagtg

SEQ ID NO: 7983 - DNA, 353 bp, Glycine max
tgtcaaggaggtgagcttacgtatgagaggtgtatgtgcagcttagctctagcttctcaaggaagttttctcaaagaagcttctcaaggaagttttctcaagaaagcttatacaggaagctacctatgctataaatacaagcatatgtagcacttattgtaactttgatgaatgagagtcttgtgagacacacttcaaagttccacttatctccctcttttatttcttcgatctcgtgctcccgcctctctctttctctccctctttcttttcctccattgaagcatcgctccaagcttcttatacaaggctcatcttggtggagaagctccttcttccatggcttattccct

SEQ ID NO: 7984 - DNA, 174 bp, Glycine max
cacaatggcatgtttatatggcagaatttcagtcttccgccatctgtcattgataacaactgatcagggaaagaagcactacattaaaaagtataagagttagaagcaatgaataaagagttggagcaagttatattagttctccacaggacatcacgagcacttagaaaagct

SEQ ID NO: 7985 - DNA, 463 bp, Glycine max
  unsure at all n locations
taagcttaatgatcagcacanagccatcatttgtaactatccaggacccagcattaaaaatgtataagctgtaatcaaatagaanattcctttccaatcatcaagattagtatccaaagaanaaaaaaacatgaaaaaaaaggaaattctgatttaatatacaagcactggccactcagtcatgtaccagcattgggcagggctgccataaaggaattgtaagaagactcaagatcaaagtgaagctgcctcgcctgttgttccgtcaactcatcagctgcacccatcttagataaccttgcaatccattccttcattntggttntcccctcaaaatcaggcggcaggaatgtcaacttattaagcgaagcataaaggtccgagagcaatgggtgcacctgatccacagccaccatgttaagtttcaaggaatccattgaagtaataaaattctgaacacact

SEQ ID NO: 7986 - DNA, 367 bp, Glycine max
  unsure at all n locations
agcttgcaaaatgcgcgctaagcgcgcgatctacatgcgctgagcgaggtggtgtcgcgctgagcgcgcatactaaggccccaaagccactttagcagctataaatagagagtcagttcaggggatcgacacaccaccacagaaccctcctctcctaggggtttcacttactccctttttttctttcaccccttctcgttgtaaaatctcaatggccatgagtggctaaacccttagttaaggtctgacaggcctagaagccaatgcaatgtatgatgtactcttcactatttatcaatgcaataccaggttnttctttcctattntcttttctnngtttacctttgcatactcatcttatattctg

SEQ ID NO: 7987 - DNA, 421 bp, Glycine max
  unsure at all n locations
tatccaaacaggaaaaaataacatatgctttctatgcttctgatagacttgaactttatatatttgatcaaataaagagtacactagatgaatttctcaataaatatttataggagaaaaaaataataaggtaaaatgaattaaatntctttgtcttcaactaacacagctaatttaactcataagtacttactgagaagtttatccaaataaggtctaaagcttaatcagataccgaaacgggtatggagggagtaaaantaattttaacaaaaagagtgtgacaaaaaacaatgaaatgaaagagtacttcgaaattggtcttctacaggtgtactgatggcccatccattattacgacagataanaacaacagggggcctcatgactgctgcaaaattcatagcagcatgaaaaatct

SEQ ID NO: 7988 - DNA, 346 bp, Glycine max
  unsure at all n locations
agctagcgctgatccaaaaatttcaaaaatcctatatgtctaaaacattagtctcgcttagcgcacagacgcacttaggcgggtcatcaatgaaactcatcagaaggatgaatgtgcttagcgcaatcatctggaaacctacaaattcatcaattgcgatgaacaggctaagcgcagcaggcgcgcttagcacgttcatcacaatttctagcagaaacacaggggtcctcaccccttttagtagcatntcccctaatgggcttaaaacttaacttaaatcctaaaatagcaaaccctaaagctaaaaaccctaacctaaacagcaatgcaagctaacaaagcaaga

SEQ ID NO: 7989 - DNA, 348 bp, Glycine max
cttatcaatgaatatcctatagaaccatatcattgaaaatccctcagacaatatcatacatgaaactatgttgatagatgtgcgaacatacgtagctatcatggtaaatatgacaccttatactgatggcatacgaacgttgattgttacactatatacttatgagatatcactgatctcttgatatattatgtcattccctatctatatttatgaacgaacattgcatctttaccacaagattattatgattttgcttgtgccacacaattatattatgtgattatgttacaataattacagaaggagctgctgctttagcatacagcctattgtatctatgtgtat

SEQ ID NO: 7990 - DNA, 267 bp, Glycine max
  unsure at all n locations
gcttctatataagctgnaaccatttatcaataaacacaagtnngagtttattcagaaaattaagagtttatcttttttatcttagtgagagtgattcttctaaattcttgagtgattcaagaacaccctggctgtatcaaaggactttcacaacctttgtgtgttgccctcgctggaaagagtgattctttccttccaatcatcttcacccttgttctttcaaaccacaattccagaaaatccacctctgcccaaaattatctcgtg

SEQ ID NO: 7991 - DNA, 458 bp, Glycine max
cggaagctctcgagaaaatcgagtggtcatatattttcacacagttgttcgattctgcgaaataatatatcgagacgcacgacattgaacaacggaagctctcgagaaatctgaatggtcataacatttcactcggatgttcgatccggggacataacttatcgagacgctcgaaattgaacaaccgaagctctcgacaaattagaatggtcgtaactcttcacgcgaatgttcgattcggggacataactcatctagacgctcgaaattgaacaacggaagctctcgagaaatttgaatggtcataagttttcacacggatgttcgattcgggaacataatatatcaagacactcgaaattgaacaacggaagctctcgagaaaatcgaatggtcataacgttccacacagatgtccgattcagggacataactcatctagacactcgaaattgaac

SEQ ID NO: 7992 - DNA, 153 bp, Glycine max
gcttgtgcattcgatatcctgatgagggtgttccatatgttctcaagactgtactaataaatatgctgaccaagttacatggtctagcaggtgaagatcctcacaagcatcttagggagatccatataggaaatgccaccatgaaacaccctg

SEQ ID NO: 7993 - DNA, 210 bp, Glycine max
tataatctcacagcgctgtggagagtcattatatactataacctctaccaaggttatgtatattgaaaactattaacaggtcatgcggaccagacctactgctattacgaaaataaatcacagaacacgtaaaaatattaccttattgacaaacgctcaacataacgcaatcacattattcagacacattgtaaaagtcaagctaaaaaa

SEQ ID NO: 7994 - DNA, 396 bp, Glycine max
  unsure at all n locations
agcttgatggtgtcgataataaatcacatgtttgtcatcatcaaaaagggggagaatgtgaatgtatgtatacatgatttagatgatgtcaaagaagaatctaaccaggctgcttcaaatgataagcatttgctttcaaaaataattaagaatgctttaacaaacaaagccttgtttcaagattcactaaagaccaagccttgccttnaaacaaagtgctttcaagacatgcaaggctctggtaatcaattaccaggaagtgtaatcgattaccagaagacagggttgagaaatagctgttgaaaagggttatgaattgaatttaacatgaatcgataccacatgtctgtaatcgattaccgcaacgaaactttggaaatcaaattcaaagtcata

SEQ ID NO: 7995 - DNA, 470 bp, Glycine max
  unsure at all n locations
cccattttctcccctntggcaacatcaaaaagccaaagaacttgggaatcaaaacagatatataataatgaagtggaaacagatcaattacaaagtataaggcataaccaaccaaactcataaataaggcataaccaaaccagaatccaaacagttcaaaattcaaaaacacatagtatcaaagcataaaagtctgaaatccaaatactacaagataaataaagtactgaaaataataatctaagtagcatagccaaaatacacggcttataagagacatagaattagaaactaaattctaagaaggtgaaggtggtggtggaagatcgaaactctgacgaatgtaacccacatcctcttcaagttgtgtgaggcgaatatccattccggcaaaacgtgtatccagtgagtcgaaacgttcaccaacataagaacgaagaacccgtaattcggaaagaacttcagtcatg

SEQ ID NO: 7996 - DNA, 412 bp, Glycine max
  unsure at all n locations
agcttaataggccttctttgtcgggataagcgactaccctaaatgcatgacgattattccacttatgaatcattggggcgaacaattgcccccaattttcgtcatgtttcccttttaatggtatgccatgaatgtttaaggttgtgaaggagacttttgaattgggtgctgcatcccaaattgtctcaatactctgtccggttggtgccactcaataacttgaaacaaattagtggcaccaccgcgtaccacgcgagacttccgactaaacanacgggaggcaacagtgatataacggttgatgggtgctcccacacaaactgcaattaacaacatagttgtgaacattttagtanaataacacatataantttttattnntacaaatacatagcatgttcttacctcatga

SEQ ID NO: 7997 - DNA, 473 bp, Glycine max
  unsure at all n locations
tgcccaatgtctcaataatntattttttgctatgtcagaaatttcccaaggttaattacttcactgtaaatcaccttgaagaagaaacatggttttgtaatggtcatcctcacctttttggcaaaatggaacagatgcccaatggtaataaatgttccattagaacatgacaatatgagactttaaaccttttaacttatggtctttcatagatacgaggcttccaatgtttgatgagtatccctttggaactttaactccatgaagaaacttacaaaaagatatttttttcttttctagataaagtataagttgtgataagtgtcatatttcagttattgttggtattaaaatgttagcacttatctttcgattgtaatagttttcttataaactttccttaaacctagttgttttatatatattgtacatctactaatgtttttggttcaatatggaatatntatcgatga

SEQ ID NO: 7998 - DNA, 316 bp, Glycine max
  unsure at all n locations
agctngtaaaactataatctatattgacattcaaatatgttgtattaaataaaaaccacacgaatgctaatatataaaaaaatctttatattttagtcagcgtctgccagctcaattaaaaaaattttgatatgcattgtggttagatcaacaaaataactttgttctattttaattattgcttgaacgtatcatgcgacagtaacacaaacttcaaaaatatatattgcgccaccttccagagctaccattagctgaagattttatgtggtatggaatttataaccactatttagcataaaaaaaattgtccgaa

SEQ ID NO: 7999 - DNA, 481 bp, Glycine max
  unsure at all n locations
acagcctctgtgaccgcggagacgccgacttcggagcgagcgtttattgccgactatcaacgacgatctcaggaacttcgaacataacactctcacagcaattgctgatcaagcgtttctacaccgttctatgaatgctgagaagaagcagaccatgttatacgcggaaacctgctacacgtattcaatctgatgaatgctgtcctatagccgtaaaactgcgacgatgtacccgtgcaccttcacagggatgacgagcgtttcggacgcggtattcacgtagagctgaatgttcatgggcgtggaactgacagctaatgtccttactagtcttgcctcgtcttggaggtcacttgaagctgaatgcgtatgtcgtgaaggagttctaccttacaatgatcgctattgtaatggagaacatggtcatggcgaatatgactcgctagtagacccgaatgtactgaacgcccgacgttcttcn

SEQ ID NO: 8000 - DNA, 369 bp, Glycine max
  unsure at all n locations
aggtcaataatacggaaacattgccctttctggacttcacacatccatgcctcacccgctggacagacttcatttaaaacggttttatcaaatgctngtaaactggtcatgcgtattctcctcgggttaagcagcatcaaatgcgtaataacgtgcgttgttgtgaaaaccgcgttggttttgtgggcatgaatcacgacagacatcgtgtactgctaaagcggaggctntgaataagcgcatttgaatatcggctggctgatactttgctgcttggcttaaaccatgtggcgcgccagataggaacaccagacagtccatctcaaaacgcagttcaatagttggatgggtattgtcagtatcgatata

SEQ ID NO: 8001 - DNA, 464 bp, Glycine max
gagatgtatcggagtggacgcgacagcctgttacttgaaatgaccaatttctcattacgtcaagccgacctgtcagctacggtcaatttattctctaaggttcgtcctgatgatgcaggcaacttatcttatatcgatactgacaatacccatcaaactattgaactgcgttttgagatggactgtctggtgttcctatctggcgcgccacatggtttaagccaagcagcaaagtatcagccagccgatattcaaatgcgcttattcaaagcctccgctttagcagtacacgatgtctgtcgtgattcatgcccacaaaaccaacgcggttttcacaacaacgcacgttattacgcatttgatgctgcttaacccgaggagaatacgcatgaccagtttacaagcatttgataaaacccgtttaaatgaagtctgtccagcgggtgaagcatggatgtgtgaag

SEQ ID NO: 8002 - DNA, 350 bp, Glycine max
agcttcagcacaagaatattatgactgaaaaatgatataacctaaaatcatcacaaaaacatgattcaagggtagaatctataaaattgaaccatagaaatgcaagaacaagtgtagatctaagaattaatcggtttatttttctgaatctactataaacaacaccaaaccacaagataatggaggagatacatggagaaaatgatgaaaaacaaggaattaaagtaaattgactgaacaaaagatagaggaagcaaaagaacatcacttagatgaatatgttcttgataccacatgatgtagctccatgtagagtttgtaggccttggatcttcttcatcaatggagta

SEQ ID NO: 8003 - DNA, 470 bp, Glycine max
  unsure at all n locations
tgtggactataccttcgactgaacacggccatgtttctgtctgggcccggattcaatgcgggctgcagcaccggctccgcttccctaactgtactggaggcggttgcgatggctttatcctctatggttttctggagttntaacatgacctccgagatggaagccatttgatcttttaaggctgatagatcggccttcatctgttcctgcacaccctcttcattatccatttttctggatcgagtgttataggggtgccttggtgttttcttagttatgatgaaattcctaaagaaataaacaacgatgagtatgccaccaaaacatgagtatgcaaatggatgatcggaccacttggatccaccccaagggtttttagataacatgatgagttcagaacttcttaatttataaaaagaacacagctttcatcttgccaagaatatacaaaaggttttacaaaagaacct

SEQ ID NO: 8004 - DNA, 191 bp, Glycine max
tgcggtatttcacaccgcatatggtgcactctcagtacaatctgctctgatgccgcatagttaagccagccccgacacccgccaacacccgctgacgcgaagcccttgaggcccatcgaatataacttcgcgtcatgtatgcttacgaatcattatcgacgagctcgaccttgcttgttattccaggaccg

SEQ ID NO: 8005 - DNA, 403 bp, Glycine max
  unsure at all n locations
agctngactggtaagtttcaactatcacagaaactaatcttttgttgaatnctncatgttattgtattttataaattataaattattgtcctcataatattttggtagtaaaaaagttgaggagaggaataaaagtaaaattggaggctacacaacccccagagtggtaaccttttctctttcgaaatgcgtctcttcaattgttgaacatattatttaatattaaagacttaatttcattccaggggacgagagatggcgatgggtatatttcactaaaagttgagtgaataaattaaatttgaaaaagagagaaagaagtccagtttgcaaagaaatgacanaaaaaacttctcatatatttataaactaaagataactataaatgctanaataataaatg

SEQ ID NO: 8006 - DNA, 196 bp, Glycine max
tcaagcatcatgaatcccatcccggattcggagatgaaatccagatgctacgagtccagactgtctttaggatatgtattaacagaattttttctatacccaatatcgtaatcttgtgctacaaaagaattttctcaaagtttctcagttaccagagtgattactctctggcaatcgatatccagttattagttat

SEQ ID NO: 8007 - DNA, 464 bp, Glycine max
tcttcgtcagtgacctctatgcatgatttcgtctcagtcatcattacttatctcttcttccacgctgcatgtgctactgtatttatattattgtagattactcattgctcatgatatgaaattgttgatcccataaatgctttctgtatattgcctcctactttcaagtgtttatgaatttattcaatttgatgtaaattaaaaaaaaaaagattatcctaaaacactcaattttattcaaatatatattatcttaacaagagatccatgagcaatgaatgttgcgaaatatatggtgtaggatcacgatatgaatgattcattaccctaacgaatcactgtaaaagcaggtaaaacgaacaggtcaataatctaatttcaattctcatatgtttgcattcaaaaacacattccttaacttgaatgtcgaagtatatttctaagtattcactcatcaccatcga

SEQ ID NO: 8008 - DNA, 415 bp, Glycine max
  unsure at all n locations
gatcgattaccgatgaagaccgattgaggaccgtcgaaaaccggtggaaacttttgcaagaatcctaacgaaaaccgtaccggaaccaatccggaacggcctggcttaagatttctttaacggaaccattttttccagccaaattcaaaggagaaaaagtgcctaggggcttgaccctttttcttcttgcattcctccctnattatagcaaaataggggaggtggggtgccgctcagctcgcccaggcgagctcagctcgtccaggcgagcanggttgctttcttcagaagcaccgccttctgaggaatcttctgaggcccaaatggccctggtgctatttgcaccctcattttacctaatacacnnnccctctgctgtttttttggtgatcttttttctaaacgtaccgaaacn

SEQ ID NO: 8009 - DNA, 482 bp, Glycine max
  unsure at all n locations
tcttttggaccttgaacaggcaactaactcctctntcanaaccatgccatgtgctctcgactggtccctttcttcccttcgcaacttgagttcactattgctaccccatagagctccgcgaaatttgttccggccatactcttccttgcgagccctcttggtctcttgttcaagggctcttgcggtaattgcattctcttcccgtaacccggcgcactccttccgaacgtgtgtagcagccaacttgaacttctcctcggcgagttttgcctttcctaactcgcttttgagagcttggacttcttcgtcctcttccggtgcttcaaaattctctttgctgacgacttttaacttggcgagccaatctaaacctcgtatgcgaaccttcagccattcgtggtacccaccaatgatgccattacgaatgcctctaagctcttgatctttccttaacggngtttcccatgccttatggattcttt

SEQ ID NO: 8010 - DNA, 512 bp, Glycine max
  unsure at all n locations
ccccccccccggtaattttgaaanccnttgnanacctcgggatcctcgtagagtcgattggcaggcatgcaagctnntagttgttatatatatatatatatatatatatatatatatatatatatattatacatatanntttttatctgaagatatatntatataagtttacattataattctaatatatttacgttaacgtatgtttacgttatatggaatataatatatntatatatatgtnttaatatgattatgtttaatataattaatggttctaatatttatgtatatatatattacttataaatattcaataacgtatttttaatgcttacgtatcattacgttaatatattcaataagtttttaatatattaattacttatttatatatatataccataattnttataatacaattaattacatatggtatattaatgtgtttactatatataatattatnattatttaatgataggtttatgaatattgctattattaaattc

SEQ ID NO: 8011 - DNA, 408 bp, Glycine max
ggtatcggcgtattcactggagtatgctgctatcagaccactgttgtgggactctaacatgttgataaaaattgctctggaggctgacttcaagcatgatatttattattagagaaaggattatattttttttataatctgatatagaatgtaattatgatttattcaatcatataaattatatctatctactatcgagatcgtgtgcatcaaatattgttctaattgaacgacagttaacagggtgtcaaatgattcacatttagtatattttaaactcttttattacgtcgatgatcatttatatgaacaaaatgtcaaatgatgttgcattgatatacaattttgcatgtgtaatctatgtgaaagagactttcaatccaacatcgaatcttaatgaaacattat

SEQ ID NO: 8012 - DNA, 352 bp, Glycine max
  unsure at all n locations
aggtgcgtagcccaccattntccatagtataatactggtaatgtgtctactatcattgcatcgtttttcgtcattgaggtgccactttgagctgccaggttctccacctttgggcgtatttttgaaagatttgtgccccctttttgcacatgttctgtagttgcatcctatccaaagacattatactgacactgcctaacgaaggcaaccactaggtccttccaagaatggactcgggaaggttccaagttagtgtaccangtaacagctacccagtaagactttcttggaggaatgtatcagtaattccttatcttttgcacatgcccncatctttcgataatacatcttt

SEQ ID NO: 8013 - DNA, 422 bp, Glycine max
  unsure at all n locations
ctccttgtctatgcnttcatctttttgcatctacgaccaatctctgcccttgtcaatgcccaaaatgttacatgtctcattgttgtgacgcgttctgggagtcatgtgattgcttcgagatttgtttataatgttgtgagatatgacatcacgtgccatgagatttgctgaaagtcacaaattagattcaagtgccatgagacttttgtcacaccgctgtgagagttgatagagtacttttattttggtcccccatcattccatggatgtttgggactaaaaaaataatatttttagttggtggaccaaaatcaaaagtgtttcaacattgagggactaaaactaatttaagcccaggctaattaactaagagtctaagaggttaatgaaaaanatctctatctaaaacaactactaaaatg

SEQ ID NO: 8014 - DNA, 385 bp, Glycine max
  unsure at all n locations
tcaaacgatagatacattaatacacgagtatcattgttgcactgttagggttgcggctaaattcaaattagtggtgactggcatcatgctaaatattgccttactataaaaaaataaaaatgaaatacaaaattttgcgcccattttgtgttggcctactagcgtataacgttggtgtcgagcatgatgcaatgtataggatattattttagtcattntgcttagtgttagtgttggggaaaaaatgtggatcaagagcgtgaaaatctcaaattctataaaatatgtacctttattatgtcagtgacacctaattttaccttgcaatgtgtgcacaaaagtggtctatagacatgtgaaagtcactggttgatgtgtgcaaaat

SEQ ID NO: 8015 - DNA, 462 bp, Glycine max
  unsure at all n locations
accttctcacagtgtgctatatcatcatctgcttgggtatcttattggattttttgatggccattgtgaaattgattgttagtactctttgcacaccttcaagttgttaactttgaaagggtctcttgagggtgctgaaagtgtgtgattcatggggcgagtttggagaggctttagttatcattgggacattggtatgtgtggaaaatagaaattgagttttagagaaaacagggtcacgtggatgtggggacatgtagcagaccacacccaaattcttcgtacatgtctgcgagagttgcaagcttgaaaagaanagattcagattctttttttaatggtggatcgcaacaaattcaaaatatttaattattcatatgtagttaataattgtttttgggatctagaaaatgacgacaggaaaatggatagaatgaaacttaggtatcgctgtgatggata

SEQ ID NO: 8016 - DNA, 307 bp, Glycine max
  unsure at all n locations
agctntaacatgtcactatgtgtccagaggacctatcctncaatgagcttaattagtattcgtgcattacacacatgcgttcaatatatggattaaaacactggacgtaagttaataaaacacaatgttttgagtgcatttatgctaagtcacctaaagcacgtcggatctcttatgaaaaaagctatatcttttcaactaccttcatgttctctttctctctcttcaccctaaacacttaatcgtcaccatcactcatcattatgacctttcacttttaaaactctttgaaatctttttgatattc

SEQ ID NO: 8017 - DNA, 484 bp, Glycine max
  unsure at all n locations
tactcagcttggtacacgcggagatttacgtcatctttcgtactcacaagatctgtcatactcacatttgagtcacgctgaccggcggaaatacccgagtggttagccgtataaacattcttcttgctatctgtaagacgaaaagcctgatagcatgcgaagactgacatcgtcttctgcgcccttcgtcaatcgcggccgacaagcccattgacacgcggagatttacgtcatcttcggcgctcacaagatctgtcatactgacatttgagtcacgctgacgggcggagatacccgagtggttatccgtataaacattcttttttgctgtctgtaagacgaanagcctgatagcatgcgaagactgacatcgtcttctgcgcacttcgtcaatcgcggccgacaagcccgttgacacgcggagatttatgtcatnttccgcgctcacaagatctgtcatactgacatttgagtcacgctgacc

SEQ ID NO: 8018 - DNA, 348 bp, Glycine max
  unsure at all n locations
gctgtgattttaactattgaagaaaaataatacactatataaaaaatcttgatatcggtgctcattgtaaaatctatccaaagttccacattcttccgtatccaatactataataaagaatgttttgctggtttcaaagctatcccatcttgatttagtgaccacacaatgctnttttcccaggctcctagttctcttaaacggtgattcttgttctttttaaagagttaatgagatttcataagatgggtatgcaaaatactgggatgttgaatcaaactcaatctgcatcacattcatcattttttttaactatctttgattatgtgcattgatgttaaaatactc

SEQ ID NO: 8019 - DNA, 282 bp, Glycine max
  unsure at all n locations
tctagccaaatggacttaccttgaattaattcctttgatagccctgttgagccttgtttccctttccttgttttgaagctcactacaagccttaaatgaaaaaccatgttatcaccatatccttaatgaattctggagctttggaattagtttgggaataagtgtggggggtatttgtttcattggataacctgttntgatggctatgcttcatgatgtattttgggccatacttgatgtacattgtatattggttaaatgttggacatgctgaatgaaatg

SEQ ID NO: 8020 - DNA, 386 bp, Glycine max
  unsure at all n locations
agcttgtattgtcactcagatcttgactagttatagctttctaaataaaatgagtttatctccacgttttactccaaaaaacagtgcgaatcaagtcactcccacattttatctctagcaggcattgtatgttggtctcgtcctttgtcacgggaagtcggaaggtccatataaccttcttaactgtacacatggngcactgcgcccncaaatgcgcaagtaagaagagataatcttccaggctctcgtgttcataaatgcattcatatcatgcatcgcataagcatctcttcatggcatcataatgaacatatcattcccgcatttgtcccgtatcatattccagcctcacattttgcatgnagtcatacatcatcatgcatatg

SEQ ID NO: 8021 - DNA, 470 bp, Glycine max
  unsure at all n locations
ttgagccanaatcctgactcaccataaaccttgacccagggtgataatgtcaatccttaccctcggaagcaaaaaaagaatagaggggaaatttccaatcaaagaaaaagagaatgaaaatttccaatgaaagcaaaaaaagaaaagaaggaaaattccccaatcaaagagtgggagaaagcaaaaaaagaaaagaaggaaaattccccaatcaaagagtgggagaaagcaaaaagaaaagaaaggaaaattcccaatcaaagaatgggagaaagtaaaaaaggaagaagaagaaggaaagaaagctcctgatcaaggatcgaaagaaaacagaagaaatgtgcagagaggtctttggaccggacaatatctgaacaatacagaattgccaccaaatgaacgantaaagaaggaaagggaaccacgacctaaaatagtcttcttcctttattaccaaccaaaatcccgtg

SEQ ID NO: 8022 - DNA, 380 bp, Glycine max
  unsure at all n locations
agcttggttatggacaatatcaccccacctgacgttcccaaggtctcctgacccccgcaacatatctccaggtaccactctgtggtcaacaaacaaaagtaggaagactgactcttccactctttctcacatcaagcttattggattatggggcacccgtcttaggtggtactaggtggcgatcgggcgatggcgcaaaccaactttcccacttccacaaatcanacataaacacaccatccccagttgtccacctttcaactgagctcacgcactcctacgtagcccttatcctcgttcctctcagcaccgagtccccatcaaccctttccagctttcataatatccaagcaattcaatcccaaatatcatgaaactac

SEQ ID NO: 8023 - DNA, 452 bp, Glycine max
  unsure at all n locations
tcatgatgatgaatcaagttgattcaagttattttgatgatgactaagatgatgacaaaaatatcaaagaatgatttcaagattcagccaacaagttcaagatcaagataaatttcaagtttcatgagaagatatcaagaagattcaagaatcaagataagtttgatttcaagattcaagagaagattaattcaagattcaagagaagaaatcaagaagacttcacaagggaagtattgaaaagatttttcaaaaaacaaacatagcacaattttgtttttcaaaagagcatttctcaaaattttctaagttaccagagtttttactctctggtaatcgattaccaggttcctgtaatcgattaccagttgcaaagtttgatttcaaaagcttttaactgaatttgcaacgttccanatggttnttaaatggtgtaatcaattacaatatat

SEQ ID NO: 8024 - DNA, 478 bp, Glycine max
  unsure at all n locations
aggacccccaccacctcggtgcctggaccttgnnntgcanncnccnngnanttctacgtaaccgtcgagcaccgggaatccttgagtcgacctgcggcatgcaagctgggttcgaggtacttacccgttgaagatcgatgaccgatgaagaccgaccgaggaccgtcgaagattggtcgaaaccttggcgaaattcctaccggaaaccgtaccggaaccgtttcggagccgcttcggttaaaatttcttcaccgaaccatttttccagccaatctcaagagagagagtgcctaagggctgaccccttttcctctcacttctccctattatagcaaatagggagatgatgccgcccactcgcccggcgagcgggttgcttctcagaagcacagctttagagaatatctgggggccaagggcctggtgtattgcacccatttactagacaccaccttgattttttggatcttttgaaaga

SEQ ID NO: 8025 - DNA, 371 bp, Glycine max
ctatgaacttggaaaggaacttgaactatactatagccttctcgtgctggtgtatcttgatattaggcagaggcaattctcaaggaacatcaagctcactttcggataaggttcatcaagttgaatggaaatcttttatcaccctcatcttgttcttggacttaaacctcatgcagagggataagggtataccattataatgattgcatagttggtcatatagggttaattgaaagtatataatttctctatttttttcaggacagatttgtttaataattataaatggattcatagctccttcttgactttcagcttctacagtgcattcatatcaagtgataacattctcttttatgaataataacatg

SEQ ID NO: 8026 - DNA, 381 bp, Glycine max
  unsure at all n locations
gacatgtgcctgagatgcattaaaacctaatctcaccaggaaagctagatgaagctgggatgacaaaccagtcagtgccgaaagatggaatcatagtagagaaagcatggtcattgctcgaggaaaaaggaaggctcttgtacatcatgcaggaaagatatgcaaatgggagatgaatgttgttcaaatacaaccaagggattgtggcacaaaagattgtgtcacatgagtgagaaagggttggagtttctagcagggggatcatttccaaacataaaggccagtcacttgaaggtaacaacgcanaatgtctttcaaagatcgatgaggctggaggagaaaataatctagatctgtcactagatgttgctcacgctgaaa

SEQ ID NO: 8027 - DNA, 249 bp, Glycine max
tgcaacatttctttctacacattacatgccatataactattgttcgtaaacagaatacatagcattatggtgagtctaacaagataaggacacaacatgttactatcttcatttgtgaatggaaaataaatacgaaggaaaattgtcttgcacaaatatgtataatatagcatctattatgggccttcccaaaatcaaaacatagcatctattttggttcgacttttgttgaaagtgtgtaccccccgc

SEQ ID NO: 8028 - DNA, 126 bp, Glycine max
ctgttcaatggcttcaaatggttgcttgtggcgtccttaatttaatgactggtttattattattaattaaattaccaaaacccatgtgaaaatttttttcctcctccttttccttttcccctcctt

SEQ ID NO: 8029 - DNA, 484 bp, Glycine max
  unsure at all n locations
taggagagatatacagacattgtggtgcctaggaagctattaccggagaggaatgtggtagtttattacactgagttcgacaagttcaaggaggaactcgagagaagacactgtgatgagaagttgactgattgtgccgatggctgtatagacattgctattgtgaaggaattttacatgaacctctatgaccccaaggataaatcaccgaagcaggtgagggtgagaggtcatctagtgaaatttgataaggatactttgaacacattcttgaagacccctgtagttctggaagagggggaaaatttgtgtacttattccatgtntgcactcctgagacctaatcctcaggagttggctgctaagctctgtatcccagggagaggattcaagctaaatgctgatgggcagtctttgaagatactgatgaagaacatgaccactntagcttcgacatggagcgttctttccttttctaacctga

SEQ ID NO: 8030 - DNA, 439 bp, Glycine max
  unsure at all n locations
tgagatgaggaagtgttgaagggtgaaacttcctgctnttattgttgaccacagagtggtacctggagatatgtcgcggnggtcaggagaccttgnggacgtcaggtggggtgctattgcccaaaaccaagcttgaccaatcccgacccaacccgggcatagtcggtcagtgagaacctgtgatgtacctaagcaggcgagctcctggcagtcaacagataaaaggaaaacaagaccacaaagcaaggaggcttgtggtggctggccagctgtgaattttgtgtaatatgtggattgtggcctctggtaatcgattaccaaaggtgagtaatcgattacaaggcttaaaattgaggacaggaggctaagatggtctctggtaatcgattaccaaggggtgtaatcgattaccaggcttgaaaacgaagtcaggaaactt

SEQ ID NO: 8031 - DNA, 315 bp, Glycine max
  unsure at all n locations
tgaatctgcggccacatcatggactcctctaaggacaatatcatcatttcttgcactgaattgttgggagttggaagccatcttctcaatcagattcctagccccaacanggatcatatcactaagagctccacccactgcagcatcaatcatactcctctccatgttgctaagtccctcatagaaatatngtagaaggagttactcagaaatcttgtggtgaggacaactngcacacaatttcttgaatctttccagtactcatacaagctctctccactaagttgcctaatgcctgaaatgtctnttctgatg

SEQ ID NO: 8032 - DNA, 405 bp, Glycine max
  unsure at all n locations
actatgaaagctgccaactgaatagcatgttattcaacctttagctttatctattntgttcgttacaggatgcacactttatggtggagctcatgggtcaggcttgtgcattcccactaatgaaacgtctcatgaagttaattacgtgggaaaccggcctgcacaaaattgtaatgcaagcggattttatggatttcaacatggtcaaccttaccagcatcataatctatggataacttaccctggtgattacctcaatagagtccaaggtgggccatctaacatgccacaacaacgacggcctagcttatctgagagaacaacaaagctggaagaaactcttgcttaccttatgcaagtgtcattgactaatcataagagcacagagacagtcataacaaatct

SEQ ID NO: 8033 - DNA, 496 bp, Glycine max
  unsure at all n locations
agacaacaaccggttatttgaacnccatgcgntacactgtatccgttcgagaacntgacncnttagacnaccctagaaacaaacccagactaagttttttttgtgagaactctttctatacaaggtgtggccttgctagcaacctattttgaccacatctttgcaaatttgaggccatgtatatggttagagaaaatcgaacgtgtgttactgactacaatggtattcttcccagatacattattcaaatatatcagttattaccctcccaggaataatttccaaaataacaatacatattagctggtgaacatactcaatgaagagaaaattcgatattataaactagggcttaacaatattagttgtgacaatcatactattgtggaggaagatccatggtatacacctttccaatgaaaagcatcgcataatctgactcctttagtgtgagaaaaagaaaagctacccactttttaaatcggctgctaattcg

SEQ ID NO: 8034 - DNA, 538 bp, Glycine max
  unsure at all n locations
acccggcaatgagacttgaatgacngcnctgatanactcaagcttataacaacacactattaactctgtgtaaagactagtacagatcttgactctcgtgtactcccttactgaggaccttggcgaagacctttattcactcaacttgagactttatcttccttcatctatttatatgctcgaatatggtgctgcgcaacatggaacacgccatcccagttcgtatatatctataccgcacacgtgttcttnatagaacacgcccanngctggaccctttcccatgaattattttaggttctaattagaggcgtagcctatactgaagatactagcgtggacacgctcactggtgcgagaatgaaatgtgcgtatacatgatgaatcagacagcttccatggatcccataggtgtcataactatctaccagggaacacacaattgagacgtacttgccaccaataatattatcccgaatattgtggctacttgctattcaatgaaccgaaaacaattctgattggaaccacgatgacc

SEQ ID NO: 8035 - DNA, 375 bp, Glycine max
  unsure at all n locations
gcaagctcgccgcccagctcgcccaggcgagcaaggttgcttcctccagaaggaacggcccaagtgggcctggttgctatttacacccccatttttactaaatgcaccccctttctatttttttgtaattctttttccgtaacgttacgaaactttacgaattccgtaacgatacttattgtccttctgcaaggttatgaatccttacggattatgtatttactcttttttagctttcgaagaagttacggaaacccccggattgcgcaaaaacacctcttttcgacttccgccacattacggaatttcacggatcgcgcangcctcgcttcttttaatttctgagacgtctcaggacttcatttactgtgcaac

SEQ ID NO: 8036 - DNA, 458 bp, Glycine max
  unsure at all n locations
tataagaacaaaactgccttaatcatttccaaatatgcatgtgatttangacgcatcttcaagaatcaagccaaggctattgtgcaagcaatcaatggggccaaacacaccaaatgattataatgatggatggctcaaattctcacaaaggtaaaatcatcactttcaaattgagctttcaaaactatcatgacatgtagagaagaatcaacgatttcnagtcacaaaatgtctagaactgttattntcaaaacaattacccatttcttgaacatatcctataattcaaagaaaaacatgcaaagtcgtacgtgcacacaaanatgacccaaaatattaaactaaaaatccgacgaaactaacaacattaacaaattaacaaaaccattcaaactagcanaaccaaagaacacttccccccatacttaaacaacacattgtcctcaatgtagcacaat

SEQ ID NO: 8037 - DNA, 325 bp, Glycine max
  unsure at all n locations
agcttatgcgcatacttctttacgaacgttctcttgcacaagacattctattaactaagaaaatgcacccatatacaataaggcacctttcgtacctaaaatatttacatgtactttccaggtggattttgtaccttaataacacgcattttctttgcgtaatttacatacatgcctactcaaagcactttgctatcaaaaatgcatacgtgcacattctgggttttctaatacctatacatacacaaacttcatgatgaatcttgactatctacacaataaggtgctacatntcatgctcttttcaaagttttttttactacct

SEQ ID NO: 8038 - DNA, 453 bp, Glycine max
  unsure at all n locations
ngtgcagatcaaatcactcctacatttcatctctagcatgcatcttctttctttacccactcctcacgtttggttatttcggggagaaacaccataactaaacgcaccgcaagggatccctatcgcaccagatccaaatctagaacgatgggtgatcaagaggagactcaggaacagatgacagccgacatgtctgctctgaaagaacaaatggcctccatgatggacgccatgttaagtatgaagcagctcatacagaagaacgcggccaccgccgccgctgccagttcggctgccgaagcagacccgactgtcttggcaactacgcaccatcctccctcaaacatagtaggacggngaagggacacactgtggcacaatggcagccctcacctgggatacaaccgagcggcttacccttatggatngccgcccaactattcaccacccgtc

SEQ ID NO: 8039 - DNA, 374 bp, Glycine max
  unsure at all n locations
nggtttgacctttcaatatgtaattcagaagactttttctctatgccagggaagttctctgtaaaaacaatctttcgtctactttcggttagttggtaaactaacctcattcaaaagtggaactttctgaggtgatactgtcaaaatcttctgatcactgcaaaaggactctttgatgattaactgtcttcattgctttgtaaggaaaagcctggcagtgtgtttcctataccactggtttgtatcgcatctaaggctacgggctgcaaactatgagagtcataattggcacattatatgtatgtaaaaaaaaaataggacggtgtgtactcactgaaacaattcatgtgatggtatgtccatcaagatctttn

SEQ ID NO: 8040 - DNA, 542 bp, Glycine max
  unsure at all n locations
cgctacggcncttgaccccatgtattgagtgacactctatatacgtgacactatagattactgaagcgttgagctgtgtgcactgccatcttgctctaaattcgtttgacctacagagtagtcacaccgctagactatgtctatagtgagtcagtgataaccttatatgacgtgatagagggctgctatatgaccattaacaagctggagcaatccataccctacccgagcatattcgatcatttacatcatgtaatgttatttgatctgcgagctcctttcttactacacatngaaggtacctatcaccacactgtaaagaggatcagtgaaggtggacatgtgtatgtgtatgataatgagtagaatgtgcactctggttattctatactgagtagagtgagttagggacgaggctcaaactagaagactggtcgcatcatatgtctttactcattaccgggagatgggtaggacttgctnagtattaacatggagctgaggcccatctgttatgactgcagctatagagttctcttatn

SEQ ID NO: 8041 - DNA, 341 bp, Glycine max
  unsure at all n locations
agcttaacactaagaaggtataggccatgattcctgcaactgcctctggactcantttgtggagaaggcctgtgggctcttccgcttccattcttgctcttgccaaagttaacccgcctatctngcatgaatttcttgcttcctagaacttgatcaactacatcaaaccaatgaatgccataattagttagttaattaatactactatatatgttagcaggtacacttcatacataaccaaaatgctataaatattccaagtgtctggccattgtgcttangaacattgtattattgcttactacaactttgtaggaaaagtcagttcctgttaattgatc

SEQ ID NO: 8042 - DNA, 326 bp, Glycine max
  unsure at all n locations
tanacactcgtgttatcgattacgatcgtcctgtaatcaactttaacaaagaggtttaactatagaggaaatcttctaactttagaactattcttctaacccctacatgatgatgcatgatgcacatatgagatgatagagactaagatgccccgcacggtctaacaatcaatacagatgccactcaagagagttgggcatgtaaagaataaaacatcttatagctcttcttcaagcttcaaggctaagtactcatgttgctcctactatgtctaacaatattttcatggcacacaacgtatctatttatatagaagaacatatat

SEQ ID NO: 8043 - DNA, 380 bp, Glycine max
  unsure at all n locations
agctngtgactctnggcaatttcttcaaaactagtcacttaaaaaagttgtgacttttgaaaaaatcttcagaaacaagtcacttgaagaattgtgacttttggaaatgtatnntttcgaaataagtcactggtgtgtaatcgattacacatcaacagatgtgacttttcattttgaattttgaaaattaaaacatttagaagctttggtaatcaattacaagtattgtgtaatcgattacacaacgttaaaatactttaaaactgtttaaacataagttgtaactatttgaaattgaaatcttaacgttttaaaacactggtaattgattactaccttctggtaatcaattaccagaggagtaaactctttgcgtatga

SEQ ID NO: 8044 - DNA, 352 bp, Glycine max
  unsure at all n locations
nnggccttgatttcgggaactaattntctggaactaattaaatagtctttatttgctggaactaatttttatttttaaatttttaagatttaaaaaataaatattgagaagaaaatattaggaattttataattcctaattattaatatgtgctacatattatattataatatttatattagttatttagttcaatatgaagtgatctatttaaatgaacccattagattgtaagaaaattgatatgggcttaagtttggtttattaggaaataatgaagatcttaataggtttaaaacctaaggcatagttatagttcccaatacaccaaatcaataaatagtttctcatc

SEQ ID NO: 8045 - DNA, 329 bp, Glycine max
agcttaaagtatgcccatgtcattcatccctatgtatatgttgttgaagtattggcgatcagaatggccactccttggattatagggatgaaccaagctcatgcttatacaagaaggttcatcacgtcaagttgaaatatggaagtaaccgtctggcacaattgggcaaaagatgaatcgagtcacatcactgcttcgtctactgccaaacatatttacgattatcgatgtccttgttacttacaagttcaccttgacaaagatgtcatggaccatgttgaaaatctcaatttgatcaaccccatatctcgcgtgaaaattcgaaatac

SEQ ID NO: 8046 - DNA, 378 bp, Glycine max
  unsure at all n locations
cttagggttattgcttttgccttaaggagttgtaactcatccatctactcttcttcatgaacctttagtgaccccagaagttcattcatagccagatttttcaagtctttggcttctgttatggaagtgactttttgtctcaaaattttgggtagacttctcagaacttattcgattctttgatgtgttgcatacctttctcccagaacattcaactcattcaccaccgtattgaatgtagtgaacatntcttttatagactcatgtgtctgtatcttaaacattcgagagttaaaatattgacttttgagtcttttacccgaactgtactgtcatgtgatgatttcagtgtgttcaaaacctcttgagcaggttcac

SEQ ID NO: 8047 - DNA, 147 bp, Glycine max
  unsure at all n locations
tgtntactgtgattctatcaattcaatactttatattgagctctgtatcagcttccgtactcaatgctgttattcgagcggccatctatagatgaacacacgaattgatgtgcgattgggctagccttatagtaacccggacatgaa

SEQ ID NO: 8048 - DNA, 454 bp, Glycine max
gagatattccaactctctcatgacttgtgcatactcaaaattttcattcctctttgcaacaacaattgtcccatgttggcccttcccccacttctctagtctttctacatctctcatttgtgtctttgccttgtaatttgactcctcaagcatagaagaaagatggtttgctgtcttcttcgcattcgaaagctcagattctgcttgagcttttgcagattctgcagtccatttgctctccttgtaccttccaatatcccttcttgctctgaggagttcctttgttcttgaagagggcttctgagaattgtgagagacaaaaagaattaaagatttgataaaaaaaaatgcttcaccagttcacaaattgcaaatacataagagaggttcgcttctgttctctgaagctaaacataccttatcatcatagaagttaacagcagcattaactgat

SEQ ID NO: 8049 - DNA, 467 bp, Glycine max
  unsure at all n locations
gctttatccaagggacttaccttgaattaattcctttgatagcccttttgagccttgtttccctttccttgttttgaagctcactacaagccttaaatgaaaaaccatgatatcaccatatccttaaggaattttggagctttggaattgttttgggaataagtgtggggggtttttgtttcattggataacttgttttgttggctatgcttcatgatgtattttgggccatacttgatgtacattgtatattggctaaatgttggacatgctgaatgaaatgttgtttctcanaggctatagaaaaaaaatcgaaaaaaaagaaaaagaaaagcaataaagttgagtgaataagatcttaaatggcacaagaatgatgaaactcttggttctactctctatgtttaatttttatctntacttctttttattctcttattctttttattaatatgcacttaattccc

SEQ ID NO: 8050 - DNA, 428 bp, Glycine max
agactctgacggttggacatcgtatgctgttcagagttcgtcactccaactttgtattatttacagacttgacggatagaaactatggcctgtaaatgacgtcgtagagagatgaccgatggagcattaaacgtgattcaacttctagctgatcaagcactttgcttatcttgcttgatcaacactacgtctgctatgatcactagtccaatcaacttttacttctgttacgttgacggagcctaagacggatgctccaacatcttatgcacagatgatcaagcactcgaatcatgagcttaacctttaatgcctgacataactaccatctatttagccatgcttgatacatcacgactacatacgacactatcatatgctagtttgtagatgcaaattgtgaaacttagtatctatttgtatcaaat

SEQ ID NO: 8051 - DNA, 482 bp, Glycine max
  unsure at all n locations
aggacgcgcnnattggagcccctgcgaattgacncccctgcgtatatacgngacactctacaatactcaaactctgagatcttcgtgcctgtgacgggactggtcttgaaacatttattcacccatctcctgacttgacgatgatatgagctttatacattcttgctttgatcctccggccgatccttagattactgtcattatcttaacggtcaggactctatgacttgttattaacctcctgaaacttcagaataccgcctatggcttctgatacaactcgaactctttatacatgctacgtgttgtaaactactctttttcgctgaagattctctcccggatcggccgcatatcaagctgccttaatgcgagaatctacgtctccgcgctcgaatcgccagagcaagatgtatcgatttcctgattatagactaactcagcctattgaacaaacccaatcgagtctctccctcccaccc

SEQ ID NO: 8052 - DNA, 176 bp, Glycine max
  unsure at all n locations
agcttcatgatgatgaatcaagttgattcaagttgttttgctaatgacaaagatgatgacaaagagcccaacgaatgatttcaagagtgagtcaacaagttcaagatcaagtttaatttcaagtntcaagaaaagaaatcaagaagattctttgatttaaagattcaagagaagat

SEQ ID NO: 8053 - DNA, 83 bp, Glycine max
atctgctcaacaacatagaccacagactcttgcaacaggtgtctgatttctgattcatgcggagctgagctaccaagttgacc

SEQ ID NO: 8054 - DNA, 351 bp, Glycine max
  unsure at all n locations
gtaagctatttaagctgagtctagtcacataagagggatttgaggatgaacctaatttaaggtaatctaaaccctaggaggcttgtttaatttgaccctatccaacaagaaggatctgaggacaaagctggattgattcatctaactaggatcgaggttantaatttaggctacacatagaacacaaatcatgattgttagaaaacatcttatatgcatactggttattgaaagaccacattttactactactgtatttactactgcatttactgtttagacagactagttaattgtctaatcatattataatgttctttacatgcttttctgattaacctgctaacattn

SEQ ID NO: 8055 - DNA, 316 bp, Glycine max
  unsure at all n locations
tcttgcgtagccgctcttggtgctcagaatatcccagaaacaaattcctcttattactagctattctgaattctttagttcctgaatgtacaacctataaattgatgctcgttcccctctttggtttctgcaaaaaagaaaatcaatatccaagaaaacatggatgaagtcctaaagatgccatgtacatgtgtatttctgaagatatagtatttatattccatcaagcatacattgactgttgattacatgtaatagactttntataacatggttgccccaaatcacaattaataagcacaactaccaatctttc

SEQ ID NO: 8056 - DNA, 404 bp, Glycine max
tagtcatgactaatgaagatgtacctctcacttttgtcatccaacttggttctatttcatttggtatgtgcacatgaccaatgcttccaaaaacttttagatgtgaaatgatgggcttcctttcattccatgcttcttgtggtgattttcctcatacacttctttgtggagactggttaaaaaaggtaactggacaagccactgcttcttgccaaaacttctttggaaagttttggtggatcaagtggcctcagaataattaagaaaggggggttgaaattattatttctaaacccttactaattaaaaattactcttcttaggcctttacttatgttgtaaaaaaatattgagttgaagagaaactaacagaaagtaaaagcggaaattaatgcacagcggag

SEQ ID NO: 8057 - DNA, 214 bp, Glycine max
  unsure at all n locations
tatgcgacagtgacgaacttaatgcataaactataccattattggatgtaccatgttccaaatattactctcaatgcaactactntatctcctcgattagtggcaaccacgctggtcgcctcttgcccctggctcgttcaaatgtaacattgatgtatcgtgtatagcatatcatcacacctgcacccctgagatgggtgtatgcctttgtgat

SEQ ID NO: 8058 - DNA, 392 bp, Glycine max
  unsure at all n locations
agcttgtaggccttagatcttcttcatcaatgaagtccnttgcttcttgaagatcaatggcagcggaatggagaaggaggaaaggtgattagagatgtcacttcaaggaaaaaatgagtcaaaatcaagttcaccaccataggaagccatggataagagctagaaagtatggaaagatgagtggagggagagggagaaaaaagagggtaccttagtaatgtaggatttttcagcccttgtattttangacacttatanctagttttgtattaagaaataatttataatttcacatgcattaaatgtattatttgatgtgtgtatgttggtagataaaattaattgaattagaagaagcacaatgcacatgatgtactaccatgtgagatgtg

SEQ ID NO: 8059 - DNA, 312 bp, Glycine max
  unsure at all n locations
tcgagatcttcgtgcctttgacggcgaccggtttgaatccatttattcacgcatctcgtgatttgacgatgatatgagctntattcatcgatgctctgatactcgcgccggtccttaaagatctttcattatcataatgttaacgaccttatgactcgttattcacttccttaacactttagagacatcgcctttggtgatatgtttagaactcggtacttttcaatctatgttacgttgcctttaaactactattgatctgtctgaatgattctctgcacggaatgagcctgctatatcaatcgtagcctt

SEQ ID NO: 8060 - DNA, 401 bp, Glycine max
  unsure at all n locations
aactctattgtgacattttttgtgctcgtcaccagaaaaacatttgtacattaccaattaacatcctcttatatttagctctttcactaattaaaacattcacagcgttccattcatatgtttaaccaatcatatctctacacaacactaaccattaatatgatgaaagtgtactctcaaccaaattatcaccatggaatccgatgcatgtttaataagactagaagagtattcatagcgattgacgacttcgaatatttctatcaataaaatcttaatatgaatctcttttaaaataaatcatagcgctgagctctttatcactatcgaccgacaaaaanttatcatttatctaatggttacaggagaatatgacacgttacataatctctaaacctata

SEQ ID NO: 8061 - DNA, 458 bp, Glycine max
cccaagatattcagttcttactcagaactgtactaagcatgtatactaagtgctattaacagcttgcgtatgcacctcggactgtgggtgacaagtggttgaagtaacaatctattgccctactcgcttcacgagtgctacgctcttggcttatgatctttaagctcctatcactaactatgctgccttggtataccatggagtctcacagactacttagataacatatcagccccatgggaagcatcttcatcttgattacttgtgatacaatgatccattgtacagaccctgtctactcccacgcaaatggtagtcctaccattgcttggtgatagctgcccgcaaacgtgactcatggttgaatctttcgtgagattcttcagaattggcagtggagatacattgcatgaggctgaacgtagactatgactttatcaacagtgattgctccaaag

SEQ ID NO: 8062 - DNA, 446 bp, Glycine max
gttcgaaggacttttccgtcgaagatcttataaccatgaattaccaatgaagaacgtctgagaactggtgaaacccttcgcaaattccctactgaaaccttaccggaatggtttcgaagcgtctcgggtttgattttctttcccggaaccactttttccaagccattctaaagaaaaagaaatggcctaagggcctaaccctttatcactttactttctcacctatttattaccaaataagggagatgcctgccgcccaacttgcccaggccaacatggttgcttccttcagaaacaacattcttcttgaagaatcttctaaaagggccaagtggggcctgttggtattggccccactttttactagacccccccctgcttttttggtgattctttttcgaaagtaccgaaactacggattcgtaccatcctggtttcttccgtac

SEQ ID NO: 8063 - DNA, 366 bp, Glycine max
  unsure at all n locations
gcttgacctgtcaggctaagcgccattngcttctgtaagttttcattngaataaggctaagcgcgtctgtgcgctaagcccttggtgtgtgttgagctaagcaccctgctgcactaagctcaactctctcactatcttttaagtttttgtagttaggctaagcacgccctgtgtgctaagcccgagtgttattcggttgaggctgagctaagcacgccattctgcgctaagctccaactctctttggttntgaaaattgtagacttaggctatgctcagttgtgcgctaagcctactctgcagaanaaaatgttctctgtgtcttcgagctaagcgctagtctgctacacttagtgcctgagtaaa

SEQ ID NO: 8064 - DNA, 430 bp, Glycine max
agcactctattagtgagaaagcttctccttacatggctctattctctagtggatggagcctgctctcacctcttaccctatatcttctgctgcaacaacatagactgagaatcaccattgaaggactttattgaagctcaaagatccaacctccatagaagcttgtcaagaaatatttcatcaagaaacacgtcgaagtaacaacaataacatgaaaagtggagcctaggcactatatagttgtgaccataaatcactcgcttcgagatgtctcttgttagtcttgtgctctgcacaatgatcgttgagttcttcttaaggatgggatgcaatcttaattaatactgacaggatgaatagagagagaacgaaacaatcaaccactctaacaccaggttagtcttctacctctgattatgtttcaactgat

SEQ ID NO: 8065 - DNA, 434 bp, Glycine max
  unsure at all n locations
agcttgtaggattatggtgtacccatcacatgtggtactatgtggcggtcgggcgatggtgcacaacaagttntccacatccacaatgcgcgcataaacccaccattccctgtagcccaccttcaactgagctcacgtactcccacgtagcccatatccttgtttctcttaacaccgggtccccatcaatcctcccaagcttccccaacatcaaagtaatgcaacattcaaacagcacaaactatcacagccaagaaaacagagcaaaggcagaatactctgccaaaacaccaaccaaaatcacagctcttctcacttaaagaccccagtaacaattccttcgttccaattcgttaaccgttggatcgactccaagattttactggaagtctctagtacataagcctacgttttgaccggtgggatctactaac

SEQ ID NO: 8066 - DNA, 303 bp, Glycine max
ctgccagataacatggtatgaactctacctaggattattgctcattgacataataaactaaatcagtgcggtgtgatctgcacgaatgtccttaccatattatagggtgagactcgtacactcggataaccatctgacagtctcaatatataaacgttatgcggggtggcatcttgtgagaagctgatcgtgttaacgtggtctataagcactacggcgtactcatagctgtgatacatctaccttacctacaaacctgaaactgaccgcttatcataacaaaccgaatagggggatgaagac

SEQ ID NO: 8067 - DNA, 449 bp, Glycine max
  unsure at all n locations
agcttgagatgnaggaagtgtgaagggtgaaactttctgcttttattgttgaccacagagtggtacctggagatatgtcgcgggggtcaagaaaccttggggacgtcaggtggggtgctattgcccaaaaccaagcttgaccaatcccgacccaacccgggcatagtcggtcagtgagaacctgtgatgtacctaagcaggcgagctcctggcagtcaacagataaaaggaaaacaagaccacaaagcaaggaggcttgtggtggctggccagctgtgaattttgtgtaatatgtggattgtggcctctggtaatcgattactaagggtgggtaatcgattacaaggcttaaaattgaagacaggaggctaagatggtctctggtaatcgattaccaaggggtgtaatcgattaccaggcttgaaaacgaagtcaggaaacttatggag

SEQ ID NO: 8068 - DNA, 462 bp, Glycine max
  unsure at all n locations
ngtgtattgctgcattctactaatatatggaattgcccactgctttgcctgagaataacaattgcttgaccacaacagcgctggaggcggcaagggacaatggtctttcaaataaacctattgtacacgaacaaacattatatcatgcgttgaccgtgccaaacgaaccagcgaagtcattgcataattgttatactaactatattcaatgtacctgaacaaaatgatttccaaacatgtgaccgacacatatgatgcggtggccagaagaatcaggtggtggttgacttctaagagggaaaaatgtcattgcttgttgtcgggacaacgatacaaggattacgttataccgtgaagcaatcacatatcccatgtccgttatatccatccactntgtcacactaacnctgaatgaaccaaacatacacatgtnnagtaattaaacattgttattaaaaaaaa

SEQ ID NO: 8069 - DNA, 415 bp, Glycine max
  unsure at all n locations
agcttagagcatgtntgtataggagttcaatttaacgcaaccaacgttcacgcaaaagtttcagtatacctgcgttgccgattttgctttgtaaagcatgtttgtctcgttgaacgtggatacaacgagtacccaaacacaatcttaatcaagaaatgatgtaaaagggatgcacttttttttttaaaatgatgttttatagaaaactaaacaacagccaaagaggctagagctaaaaggttacacaaacattacatgagactaaaaatgtcattttagaagaatcaattcttcttaaagagcttaaactaaacttttaggtgaatgctaatgaatgatttcattacatttctaacacttttctttccctggttggtaccaaattttctactctcaaacacattatcaatacaac

SEQ ID NO: 8070 - DNA, 405 bp, Glycine max
  unsure at all n locations
tcactgactactctnttctttgcattgttatcaacatnttaaattagtaaacttaaatatttacatgacaaaaggtggtatttcttcatattagaaagtaaaccttcgtgcagttataaggttgtaagcttgtgacctgatggtcaaatttactaatctcagaagcaaactctcttattatgagagggaaacgtggatacatcttaccctctctatatcctacaatgcttgcaaactngtgtattggtctacccatcattactcacttccattgggtaagtgacatcaaactcttaatcaggttcataaatgtctctctttctccctaacagcttgtagcaagcaaacatgatgatggtttttccttctctaaaaactntcccctttttacctttgtctggtctc

SEQ ID NO: 8071 - DNA, 381 bp, Glycine max
  unsure at all n locations
agcttgagaatggagaatngcactaagcaatcactacgcatagttccaaactcgaaggtggaggacacatgaacgaaaacacaattcatggggctccgaanaaggggttgagaatggagaattacactaagcaatcactacgcatagctccaaactcgaaggtggaggacacatgaacgataacgcaattcatggtgctccgaaaagattgagaatggagaattgcactacgcaatcactacgcatagctccaaacgcgaaggtggaggacacatgaatgaaaacgcaattcatggcgctccgaaaagaatgagaatggagaattgcactaagcaatcactacgcatagctccaaactcgaaggtggaggacacatgaatg

SEQ ID NO: 8072 - DNA, 474 bp, Glycine max
  unsure at all n locations
gacactatgaatctcagctttaacanatgtcttcacaaataatcatcacacagcaganaactaacttaactacccctcatatctcccaaaaccccatacccacgaaatttaagagagaaagaagtccacccaaacctggattttcgaagtcccactcgtagccacgcacttcacgaccccgaaaatgccctcctttcgcgatttggagcagaaatgagcaccaaaggttggagcttttgtggggtttcaatggagaatggaggagaaggaaaaagcaacgtgaggaagagggagagcttctgaattttctgttttggctgagtgaggagagagaaaagctctttggtcttaaataaaaggttttcctctttttctattattttattcaagctctaccacatgtccctatttgattggagcaaaaagggcccactttctctttttgactgtgacccatactcagtcacaaaagtg

SEQ ID NO: 8073 - DNA, 428 bp, Glycine max
agcttataatctcagaacagagttgtttaacatgggaacaaggagataaactctctctttctctctctgtgtgatgttattgttattacatcatcatctttaaactccctttgaaccactgtcaaatgaattatcatgttgaacaaaagtcctttgaatccttcaagctgagttgatcttctcatcaataagcattggaagcttgttctggataggaccgacatccttcaagggcatgtctagaatctgcaatagttgaaaatgacatacatatacaagcactgtgcaaattgcaagtaccaaaaaagagtaaagtagcatagctagaaaaagtgaatgcagaacaatatgttattgcctcattgggtttactcttggtcgattttaccccaggtggaacaccgcaccccacccttctagtttagcag

SEQ ID NO: 8074 - DNA, 424 bp, Glycine max
  unsure at all n locations
nggacagttcagcagaccacaggtttgtggttaggattcttccctcaggaacccaatgagcatatacatccttcaatgtttgaatggctttttggccttctggggtctccctgcctccaatgaggacacggtccggattgaaaagatcttggattgcagttccctcagcaaggaattcagggtttgaaaggatttggaacttgattcccttgccattgtgagtcaaaattttctctatggcctcagcagttttcacagggacagtggatttctccaccacaatcttgtcactcttggatacatcagcaatcatgcgtgctgcactctcccagtacgttaaatccgcggccttaccggctccaagaccgcgagtttttgtcggggtgttgacagagacaaacactatgtctgcctcatagacatg

SEQ ID NO: 8075 - DNA, 444 bp, Glycine max
  unsure at all n locations
agcttctccctttntctgcttctagagctcttttccctaaataggcactatggctactctggaattttgtgccctggccattctgtacaagtgtgtagaagctaacatagaaggtgtaccctaattctacacaagacaggctttaaataggctctgaattcaaaacgttgcgcttagcgccaccctcacgcttagcgtgagtaaggggaattgggcttagcgccagtctcgcgcttagcctggctaaaggcacctgctgcgcttagtgcactaatctcgcgcttaaggcgcgactttgatactgatgctctgccagattctcctttgcgctaagcacgttgaagctgcgcttagcggtggtgtcataccctaatttcatccgggaaccatccgttgttgggatgcgaccctcgtttgaccacttcgaggtacttggcacccatc

SEQ ID NO: 8076 - DNA, 421 bp, Glycine max
taaagtatgcccgagtcattcatccctatgagatgttgtcgaagtattggcgatcagaattgccattccttggattatagggttgaaccaagctcatgcttttacaaaaaggttcatcaagtcaagttgaaatatggaagtaaccgtcttgcaaaattggggcaaaagatgaattgagtcacatcactgcttcgtctactgccaaacatatttaggattattgatgtccttgttacttccagtttcaccttgacaaagatgtcatggaccatgttgaaaatctaaattgattcaaccccatatcttgcgtaaaaattcgcaatacttcaactgtgcatcattcgcatgcatccatgcttttcattggttgcattgctcgttgcattctttccttgaaaaataaaataaaatgaacttaatc

SEQ ID NO: 8077 - DNA, 455 bp, Glycine max
  unsure at all n locations
agcttgtttaaatggatctctcttgatctcacatgatgttaacaactcactttaacctttgaaatttcaagatacgtaaactagagtttgtgagccgtaaaagcttgttccttttcactcataaaagtgagaacacaaggtggctatttatagagaaaacagttgcaattgtctgtaatcgattaaattggtaatgcaatagattatctcaaagaagtaatcgattagattctcactttaattgattaaagtgttcttcccaacacctgaaaagctttgaagaataatgtaatcatttagatttttgatttaattgattaaagtgttcttgatcacttctgggaacactttcaagaacaatgtaatcgattaatactcccacataatcaattaaagcagagactcaagaaaacaaacatggtctcanaagaacagagtaatcaattataggtata

SEQ ID NO: 8078 - DNA, 462 bp, Glycine max
  unsure at all n locations
ngnganaggtngcaagagattattaagagctatccacataatggcattactcaacaaaagctagctcgtattttttatgttggagtgtcctcaattaatagggtgagtttggatgttgcttgtaggggcaacctcatgttaaaaccccatgttggtgaaatcaaaatcattgaagacatgtgttctatgaaataacaacaatcacactagaagaggggttgaatagtgtgtcaatcaaagatcaaatatattttttgttcaactgtaatatcatagattcatatatatatatatacatatatatacacacacacactagaattgtaaaaaaaaaaaacaagtttaatagtccaataaatatatgaagtaagaagtttaaaagggttttcaaatagacaccaaacacgctaaagaaagctaagagaatacttagtaaaaccacttcagagagacatagaaaca

SEQ ID NO: 8079 - DNA, 413 bp, Glycine max
  unsure at all n locations
agctntacattntcgtgaatgtgacaatctatttcttagtggattgattcaccttaacagcccacaaaatcatataagcataattagatgcaacaactcactcatctccaatcttcatatgattgcaccaaatgaaagcccaaacactgatgagaatgttatctcacattcatccaacatttccataaagaactccaagatggaaattggtaaatcatatataagttacaatctttaattgcataattattatatcttgtccttaaatcattcaatgagaatgcatagccctttaattcctagttntttttataaggctactcaagtggtagatcctctcttnaattttttattaaaaaatatgtgatggtaaatattcattttctcattaagttgcaatcttatgtataaaa

SEQ ID NO: 8080 - DNA, 453 bp, Glycine max
  unsure at all n locations
ggcttgtggggcttctatggaggctggatcnttgagaagatttctaaagaagctagagcttagctacacacaccccctataatagctaagctcacctccttgagaagcttccttgagaagattcctaaagaagctagagcttagctacacacaccccctataatagctaagctcacccccatgccaaaatacatgaaaatataaaaaaagtccctatttcaaagactactcaaaatgccctgaaatacaaggctaaaaccctctactactagaatggccaaaatacaaggcccaaaagaaggaaaaaccaattctaacatttacaaagaagaatggatccaaccttgacccatgggctcaaaaatctaccctaaggttcatgagaaccctagggcctttttagtagctctagcccaagcctcttggagtcttctatccaatacccttgggggg

SEQ ID NO: 8081 - DNA, 428 bp, Glycine max
  unsure at all n locations
agctttcttgtagatcaaattccctaattggaatggaatactcaatatgattaatactaataagacactacatatttgcagaccacaaatcaatgcagctatactttctcatttccacaccaatttttgatcatgttattcatttgacaaaaatatgaaattaacctaattgggtgaacaaaaccaataaagcacctgaagactagaacaaaaagtataatggttaggtagagaagaacctgtcgaaggaacagtaaacgacgtgcacctagctcaccactacaaaacctaatgcacgtttcgcaagagctacaatggaaataccatgaaatagttcaaaataccaatngggtgtacattgaatagcagttcctttttcattcaacccaataaagcatcanagttagaggcgataaatagatagtgat

SEQ ID NO: 8082 - DNA, 452 bp, Glycine max
tgttgaagttgaagtggaagtggagtaatataatcaaagagcttccatgggagacaaaatattttagaggaattatggctgaaagtggctgagtgcctaaatcaatgattggttttttttttgttgttgaataaatcaaagattcgtttggtgaaacatgtttttattgaaaaactatatcttgaatgttgttggggctgctttatgattctaaaacaataatttatattgtgtacgtacgtatcacttgaaaagtgcgtttagattgttgtggttaatatattttaattaatgtatatacatagttgttagcggctgtgtgtgcccgggctgtttgcacttgtcatgatatctttattgccggttgaagattatttccattcaatacataagtaagataagcaatatatatatactttttaatattatattctttattattattattgaaa

SEQ ID NO: 8083 - DNA, 392 bp, Glycine max
  unsure at all n locations
agcttgttagttgtgtggagcccacctcaacggtcttgggatatttatgagggcattttgaagggtatgaacaagttgaaccattccaaacagtaacatcttgagcaaagatctttgagtgagaaatctgcattttctgctttaaccctctctgtgagagtgacccacttttgtgttgtgcttggtaatttgtaaaagactttagatagaagtgagatattntattcctgaatggaatccctctttcgaggtgaagacctatattttgtgcaataaacacatagatcctcattnttttttgtaagtctagtagtggctggaaaatttgaaatccaatggtgttgctagtctagttgagggctagaatgaactccagttggagaactgacagt

SEQ ID NO: 8084 - DNA, 328 bp, Glycine max
gctgacagtattataatctaattacgttgccaagtgtgagttggatcttatttggtaaccatgaaacaaattgctctatatagctgatcaatgaaggtgggtaagttaagtttgttcctgaacctatggccatgtagcacttgagaaatattgtggcactgaagtacttgagtaatcttccaaggtcactcgttcaggttgctcttcaaccatgacttctgctctacactctgtagatggacattccctggatgtaggtgaattacaagatgatgactcataaaagtgagcctcttcaaagattgaagctactgttatgttgtgcaaa

SEQ ID NO: 8085 - DNA, 330 bp, Glycine max
gagagtcacctgaggcatgcaagcttgtatggaggatatacttatatattaaaattctttttatgacaactggttttattttaatttttatttttttggctaaataataagtttaaaacctaaatgtagcctttctgtaggtaaaggttgttacagttacccttccctaacccactaggtcacccattttagggggaagtcaggtttcaccattctaatgttaagacatgtcacaagaatgactgagtactaaggacttataaagacttcctaatgaaggaccaccagtaggatttgagccaagaccttttttgttggatgctgttgatc

SEQ ID NO: 8086 - DNA, 449 bp, Glycine max
agctcctacttatgtggcatggcgggtgtccttcactttcttgtcttcaacgctagctctgaccactgttcttccttcccgcgatgcttcttttcatgtctgcctgagtgggcttatagcctaaaccatacttcccacgatttccttgggttattatcaggctagttatgccgccattgtctttgcctaaacccatcccgggttcataaccgttgcccaacataacatcggccaatattaccgccgcatcggacagacaaggttgcccaaagagggagtccacggaggaaatgctgaccacctcaaaagactggaaagcggtttctaacgattcttctgcggcttccacataaggcatggaggatgggcagcttaccaagatatcttcctcgcctgacacgatgaccaagtgcccctccactacgaatttcagctcttggtggagtgtg

SEQ ID NO: 8087 - DNA, 452 bp, Glycine max
  unsure at all n locations
agcttgtatacttngtgggcctctattaagtgctttgtttagaatctattcaatgagcttaaatatgttattaaactaataggattcacacttaaaaaactggaaaaagtatactaaatttgcatgtgggactacctaaatatgtccttaaaataagactacctaaattcaaacctggtggaaaaattgcatgtgggaaatctactcttgacctcttcaacaataaaatagttatgttttaaattataaatctttttggtatagcccatttcaatattcctgcacgtttggtgattattctatgtaggcatgttcaaactagttaaggcggaaagataaacaattataatgcgtgcttgtacgcttgagacttatataactgaagaatcatatcttgatctcacgtgtcttattatggtatggcttcaagggccttaaacttaacacaaaat

SEQ ID NO: 8088 - DNA, 449 bp, Glycine max
  unsure at all n locations
tgaccaactgacctgctaagcgaggttgagttggactaacagtgttgagttatataattgggcatatatggaccaaattgataagcttgttggactatattggactcaagaaacacagttctgaattcaactgagcttaatatagcccgatatttgttaatctatttatattttgaatcaatatgaattcatactaatatagttaaacgggtcaatatggattggcttgacaggccactatacctgtgtggacttcngaatatatgatcatattgcatatgagctatctagacctaaaccatatatcatgcttgacccaatggatgtagccaaactgacccacccattttgctgactatatcgatgggctatacgatgttgtgtatggtgaaaatctaatatgaatatttccactgagtgtgttccctacatgtggcttgaccccagga

SEQ ID NO: 8089 - DNA, 452 bp, Glycine max
  unsure at all n locations
agctntttgtaagccctttcaatgactttttcctcaatcgtatactgggtaattaccatgatatgagacattgacacaaatagtaaataactaggaagcacaacacttcaaaatgacttccaaaccagtgtcaaacacatcttgaaaacctttgaatattcctaccttacatattttaatgattttgagattttgtgccaatacaagatgccacaatgcttagaagtgttttattgtatctacagtgatatgtgcttacttatgaaacatggtgtccttattctaatttggtattggccatttatgccaaaaaagtattaattttatctgttgtacttaggctgagtaatatattntttagaattttctgtagctgcagccaagtgacatcttataactgtgtccagtgctagtattagtgatttctagatagaagcctaactatgatgaac

SEQ ID NO: 8090 - DNA, 455 bp, Glycine max
tcatgtcaaagagagaacgtttttctctgtccaaaagcactctttgagctttctccaatcaacttaaatgcagcttctgcaccagcaaagttgtttttgtcaggatgaagttggagagcaaacttgctatattgcttcttaattattgcatcaccagctgtctgttcgacctgaagaatttcataccaatccatctcattaccatacaatttctgctcagcagagcagtgcacatcacaaacaacaagcatttgagctatattttccagatcaaggtacagctgctgagcctttagagcaactttgcgagccccaacaaaatccctgttttccatcttcttttcagaatgtccttggcccttaaggcctcttctttattgcagtccatcaaagatccagatgggaaaatattatagtggatgctatggccaagtgaagctacatttaatccaaca

SEQ ID NO: 8091 - DNA, 374 bp, Glycine max
ttaagtcacctgcggcatgccaagcttgagccaaaatcctgactcaccataaactttgacccatggtgagaatgtcaattcttaccctcggaagcaaaaaaaaaggggagagggaaaatttccaatcaaagaggaagcaaaaaaggagagaaggaaaatttccaatcaaaggaaaaaaagagaggaaagggaattcccaatcaaagagtgggagaaagcaaaaagaaaagaaagaaaattcccaatcaaagaatgggagaaagaaaaaagagaagaagaaagggaagaaagttcccgatcaaaaaaaaataatatgcagaaaggtctttggaccgtacaatatctgaacaatacagaattgtcatcaaatgaat

SEQ ID NO: 8092 - DNA, 462 bp, Glycine max
ggagatgaggaagtgttgaagggtgaaacttcctgcttttattgttgaccatagagtggtacctggagatatgtcgcgggggtcaggagaccttggggacgtcaggtggggtgctattgcccaaaaccaagcttgaccaatcccgacccaacccgggcatagtcggtcagtgagaacctgtgatgtacctaagcaggcgagctcctggcagtcaacagataaaatgaaaacatgaccacaaagcaaggaggcttgtggtggctggccagctgtgaattttgtgtaatatgtggattgtggcctctggtaatcgattaccaaaggtgagtaatcgattacaaggcttaaaattgaggacaggaggctaagatggtctctggtaatcgattaccaaggggtgtaatcgattaccaggcttgaaaacgaagtcacgaaacttacggagcctctggtaatcgatta

SEQ ID NO: 8093 - DNA, 433 bp, Glycine max
  unsure at all n locations
agcttcctctaccggtgaaaaaacattgtcggttctcgcttgtaaaaaaattgcgcaatgtcggctgaaaaacatcagttggggctgtttaactaccgatgctggctactgttttttctattccacccctgaataatacttggacgatgtcgatttggaaatgttcgatcggagtcatccggtcatgcttctttttaagacctcgatctgtcatcttttcctggccgacgtcggctagcatttttttcgatcaatatcggtgaatcatgctttttgccaaggtgggctaacgttttcgtggctgatgaaatgagagcatgccagtgtcggtcgaaacacaatctcgcacgaaaaaccctagccgacctacattgtaatttttgtaggcaataccgaacagcanaacttcgtctaccataaagaaatattatcg

SEQ ID NO: 8094 - DNA, 451 bp, Glycine max
ttttctgttcggtattgcctaacaaattcgcaatgtagttcgtctaggtttcttcgtgcgagctcaaccgaagttgtatttcggccgacaccggcattttgtcggccaggaaaacattagcccacctcggcaaaaaaacatgattcaccggtattgacagaaaaaaatgctagccttagtcggccaggaaagatgaccgatcgaggtctaataaagaagcatgaccgaatacgccgatcgaacatttcctaatagatatcctccaagtattattcagggattgaatggaaaaaacaatagccgacatcggtagttaaatagccaacattgcgcaatttctttcacaaacgctggccgataatatttctttagggtaaatgatgctttcgttgttgggtgtcagctataaaattttcaatgtaggtcggctaggttttttcgtgcgagctca

SEQ ID NO: 8095 - DNA, 378 bp, Glycine max
  unsure at all n locations
gcaagcttgctcagctagctgatataatcatgcatacttttctgatgatgaccgaggaacaattagggatcaacttgaaacttatgtgcttcacgtgagaagaaatgcttctttttccacttgtgaagatgttcaaagtttggctatgaagatggttcaaactgagaaacatttggtatttccattggtttataaacttattgagctagctttgatattgccggtgtcgacagcatccgttgaaagagctttttcagcaatgaagattatcaagtctaaattgcgcaataagatcaacgatgtgtggttcaatgacttgatggtatgttacaccgagcgggagatattcaagtcacttgatgatatngatattattcg

SEQ ID NO: 8096 - DNA, 457 bp, Glycine max
  unsure at all n locations
tctgccttgaagcactgagcctagcagcagaagagagggagatcacacaccccataagcagaaaacaagaacaagagttacaccacaaccacaactagaacccataacaaaaacacccttcaaagaatgcaccttcaaactcaacctcggagtctccaaacacaagttgacacccctcaaaacccttcaagagtgaaacttgcccncttttcaccttcttcagccacaaaaaaaaaaattccaatgggactcactagccttgtttctcacttcctatgagggcaacaagggtacccactaaacagccacactaagcttaccctcttttgttttattccctctttcttaaaaactctcttttctctctctctctctctctctctccttccactntccatatcatatatcatattatattatattaaattaaataactcgttaaataattaaacaaaaa

SEQ ID NO: 8097 - DNA, 428 bp, Glycine max
  unsure at all n locations
agctntaaggtttctacagngttgctgcggtgactaagctttacttcttttgtttctgttacctatatttttgcccttttaatttttaactcttacaattgttttgccctttcaatttcttgccctttctttaatatttttcttttaattttctccatttttatgtttgtgtaaaattatttcataatttatatataagtatttatttattataaattataaattttagttatataaaataaacattcactaaaatactagtaattgataaatgtacaacttagatttatagaacaacatcacatgatatttgctttaagctcatnagtaaattgtgaaaaagcttaccaataataatgaattcatgtgagtggtgtttctatagttgttattaccctattgcatgaattatcgtaattattgtttac

SEQ ID NO: 8098 - DNA, 355 bp, Glycine max
  unsure at all n locations
gagaatgagagagagagagagaaagagagagagtggccgagaaattgaaggagaataaggagagaagttgaactttgaagtgtgtctcataagtttctcattcaacaaagttgggacaagtgttacacatgtttctatttatagcctaggtcactaaccgtgtgaatttcattntcatttcatgtgaacctaaaagggatattccaagaatatgccaaaggcattttagtatattccctttagatgtcacaagcatggaagttgtggctctagcacataagaagcttccttgagaagcangaaggtagcttccttgggaagcaaggaagaaagcttccttgagaagctagagggg

SEQ ID NO: 8099 - DNA, 422 bp, Glycine max
  unsure at all n locations
agctntctcgctgcanaattcacttcttagttggtgtttttggtttgtgctaaaggtggtgttcgtcattggaagtgcggtaaacagactttgtggtagatttaaggatggcctttgtggataactgggtggtgggtaaagaggtggtttgttattgactgagtaatgacattgttgggtttggtgggaaacttggccgtataagaatggcagtcacagcatgggtttctcccttcatctcaccctctttatttgccccaagtttctaagtcgtcctagtaggatgatcaaatttgcctcttttcggacccacatcgatcctttcactggcgaagaccaaatccgctaagctttgagggtgcgtagcccaccatcttttcatagtagagtatcgataatgtgtctaccatcacgatcatcgt

SEQ ID NO: 8100 - DNA, 174 bp, Glycine max
cttcacaaagagctacatcacccttccccttaaaaaggatttgacctcaaattcagagggtcttaaaactggagaccatggatcaagctgaatggtttgatgatgcccaaggatcacatggatcacatgcttctcaaagctttattccagaccaagaaatttaagatatttaag

SEQ ID NO: 8101 - DNA, 398 bp, Glycine max
  unsure at all n locations
agctngcatgatttacatctccccctttctcatgtaaattcttcttgatatcatcaaaatcttcatgatttacattctccctctttttgatgatgacaaccacctgtaggttaggagcaacaacaaagaaaatatctatttgcatatagttntactcccccttggttttacattgattgcttatatgagacaaatgaagatttcatatttttcatatataaaaagttgtctcataaaacaataaataatttttcttactattttatcttttatctttctctccccctttgtcaacatcaaaaacaaatcatgaatagagaggagaaagatgttaccacttgttgcaatgtatgagaatcaagtgatactcaaaggcattaaaacaatcattcaatatt

SEQ ID NO: 8102 - DNA, 450 bp, Glycine max
  unsure at all n locations
tgttagctntaaggaggtacctctgagatactacatacctacattggttgtgcccttaaggtatttaatgatccttttaacggctgttaagtgagattcctttggattggccatatatcttgcacacaagcaaacacttagcatgatatccggtctacttgcagttaggtagagaagtaatccaatcatacctctatatcttaactcatccactgatttacctttctcatctaagtcaaggtaggttgaagttgcattggagtatatgcttctttgcatttttccatacagaatttcttaattagttatatacaataattggttcgactaaggaaggttccattctttatctgcttgacctggagtcaaagaaagaagttcaattctctaatcatatacatctcanattctttctacatacaacttgaaaattccttacacaaaatttca

SEQ ID NO: 8103 - DNA, 387 bp, Glycine max
  unsure at all n locations
agcttggagatgatgcttcaatggatganaagtatganggagagaaagagggaggggggagcacgaaattgaaggaagaaaaagggagagaagttgaactttgagttgtgtctcacaagactctcattcatcacagttacaacaagtgttacacatgcttctatttatagactaggtagcttccttgagaagctttcttaanaaaacttccttaagaagcttctttgagaaaacttccttgagaagctagagcttagctacacacacccatctaaaaactaagttcacctccttgagaagcttccttgagaagctagagcttagctacacacacccatctaaaaactaagctcaccttcttgacaaaatacatgaaaataaaaaaaa

SEQ ID NO: 8104 - DNA, 445 bp, Glycine max
  unsure at all n locations
gtacagcagatgtcactctactccaaattcttgaaggatatgtttacaaggaaacataagtacattcactaggaaaacattgtagtggaaggaaattgtagcactgtgattcaaaagatccttccacctaagcataaagaccctgagagtgtaactattccttgttcaattggagaagtcactgtgggaaaggctcttattgacttangagccagtataaatntaatgtcactctccatgtgtagaaggttgggagagttggagataatgcccactaaaatgactttacaaatggttgaccgctctattaccagaccatatggagtaattgaagatgtgctggtcagagtgaaacattttatcttcctgacagacttcgtggtaatggatatctgtgaagatactgacattcctgtaatattgggaagggcattcatgttaactg

SEQ ID NO: 8105 - DNA, 431 bp, Glycine max
  unsure at all n locations
agctntgattagtgtatatgttacactaaagttatattggatcttattgagtttcaattaatcattagtgcatatgttacactaaagtcatatattgggtctaattgggtttcaatcaatcattagtgtatatgttacactaaagtcgtatattgggccttgattaggtttcaatcaatcattagtgcgtatgttacactaaagtgatattgagcattgattgagtcttattgggtttcaatcaatcattagtgtatattttacactaaagtcatattggaaagtgttgaatgcataagttacacattgaatcttaataaatcattattgggtcttggttagtgaatatgttaaattaaggcttaattgcaaaattcatcccgctattttgcctatttcaccaaatcggtcccnctatttttaattcacta

SEQ ID NO: 8106 - DNA, 439 bp, Glycine max
  unsure at all n locations
tctcccncaattntctataaatagggggagaagtgaagtagattagggttcagccttcttggcatttctccctctctcgaaattgctgaggaaaattatttccgtgaagaaaatccaagccgaggcgcttccgtaacgtttccgtgagtaattacgcgaagattctcgaccgttcttcaacattcatcgttcgttcttcgttttcttcagtcttcaacgggtaagtacctcaaaccgaggttttcaattcattctatgtactcgtggtggtccacattttgtttcatgtatttttattctcgttttcattcgctttctatactcccttttgacgtgcttaagtcattntatttaagtcatttctcgcctaatctaaaaataaaataaatttccaccgatcgtttgaattgtatcatccgttaatttcggttaaaatgaa

SEQ ID NO: 8107 - DNA, 355 bp, Glycine max
  unsure at all n locations
agctntgagccaaagtcccaactcaccataaacttttccctcaaaaggaaacaaaaaaaaaaggagaaagaggaaaggagaacaggagaaaattcccaatcaaagagtgggagaaagcaaaaaaaaagaaaagaaggaaagttcccaatcaaagagtgggagaaagcaaaaaagaaaagaaggaaaattcccaaatcaaagagtatgaagaagaaaagaaaggaaagaaaattcccgatcaatgatcgaaagaaaacagaagacatatgcataaaggtcttttagaccagaccacatctgaacaaatacagagttactaccaagtagacacaaaagaagggggggaaaaccatga

SEQ ID NO: 8108 - DNA, 457 bp, Glycine max
  unsure at all n locations
nggaagattatggggtacccatcacatgtggtactaggaggttgtcgggctatgtttcacaacaagttttccacatgcactaatggcgcataaacccaccatccgctgttgcccacctccaactgagctcacgtactcccacgtagcccatatcctcgtgtctctcaacaccgggtcttcatcaatcctcccaagcttgcccagcatccaagtnattcaacacccaaatcatcacaaactaacaaaccaagcaaaacagggcaaaggcataatactctgcccaaaacacaactcaaaatcacagctttgcacatacaaataccccagtaacatgtccttctgtccaattcgttaaccgttggatcgactctaaaattttactggaagtctctagtacatacgtttacattctgaccgttgggatctgctaggaaacatacagaactattctgcactc

SEQ ID NO: 8109 - DNA, 507 bp, Glycine max
  unsure at all n locations
ccgcntcgattgggctgagactatctattacgcgacactatgaatactaagcctgtttattgacatcatggttgaagctaattaattttctatttcatttaaagggatatggctgcacgtttgaacaggacgatttaactcgttcccaattagtactggaccaagcggaactacatgccaactgctagacacattcgatggatgatgcataacaggctgtacttagtctgttactggaaatacgatgagccgagcccacgaggtttatgatctgcgctataactctagttatggagagtgttatatttgataagtgtgtaggcgaaccctacatacaatctgctgatttcttgaagcgctttctgtcagatgatgcgaggacgaatgtaaaaatacattgtgattgacattccaattctattgttagtctatattaaaaagatcactctcaaattattacgactaaggaaactaacactacaagttgtgactcacaaatcaattctg

SEQ ID NO: 8110 - DNA, 432 bp, Glycine max
agcttcttagtttcagatgatgcagatgggtttgttttacctcatgcactcctctaatgactatggcatcatttctggcgctaaactgctgggagttggaggccatcttctcaattaaatttctggcttcaacaagagtcatgtctccaaaggctccaccactggcagcatctatcatacttctctccatattactgagtccttcataaaaatgttggaaaagaagctgttctgaaatctgatggtgagggcaactggcacatagtttcttaaatcgctcccagtactcatacaggctctctccactgagttgtctaatacctgagatatctttcctgatggctgtggtcctggaagcacggaaaaaaatttctaaaaatactctcttagggtcatcccagctcgtgatggaccttggagcaaggtaataca

SEQ ID NO: 8111 - DNA, 414 bp, Glycine max
gcaactgactgtagtattacaagatcagattaagattaaaaaaaaaagccaaattgtcccaaacaatgctctctcaagtaggatcaatatctgaaaaatgaaatgttaaatttagaaatctaagtaaatattgattcctaattttttaaatgttggaaagacttggaagacaaaaattgcattaaaatagaaaatgcaaaacatatagtgggactgagacacattagcagcgtttcctcaactcaaaaattataagaatcagaagtaaagagtatgttaagagtgtggtaacatactctaacaagctttgatcaaatgactaatattaattggcaaaaaagatatttagcagatagcccaaccaacttcactatgtctagttagaaattccaatattctatattacctgctcat

SEQ ID NO: 8112 - DNA, 453 bp, Glycine max
  unsure at all n locations
agcttcattcctttntcactcatgtgtccaagtctttgatgctcacatggttgaattattgacagcctcagtaattgctaccatatcctcatctgcaatcatgtaaagagatcctcgcttctttccacgagccacaatgagattgccttttgttaccttccaagctccatctccaaaaggggtgtaatgtccctcatcatccaactgccctatagatattaaatttctctttaaggcaggaatatgtctgacattgtgcaatgtccatagggatccactagaggtcttaatgttgatatcacctcttccgacaatgtcaagagattttccatctgcaaggtaaactttttcaaatcttccagaaacatagttagacaataaatctttagagggagtagtgtggaacgacgcacctgagtccatgatccatgaatcaacaggactatccaaact

SEQ ID NO: 8113 - DNA, 445 bp, Glycine max
  unsure at all n locations
tggttcgaggtacttacccgttgaagatcgaagaacgatgaataacgaatgttgaacgtcgaagaacgggtgaaacctttgcgagattcctcacggaaaacgttactgaaacgtttcggaagcgcctcggcttataatttcttcacggaaacaatttttccaagcaaattcgaaagagagagaagtgcctaaggggctgaaccccttccttcttcactttctcccctatttatagcaaaatatgggaggtggttgccgcccagctctgccaggcgagcacggttgcttccttcannaacaaccnccntctggaggaatattccggagggcccaagtgggcctgggtgctatttgcacacccattttactaagacaccctcctctgctgtgtttttggtgatcctttttcgtaaagttccgaaacttacgaattatgtcacgatac

SEQ ID NO: 8114 - DNA, 415 bp, Glycine max
  unsure at all n locations
agcttattaaccaagatgcatagaccaaaggccacaagtattaccacctatgttggnntagaaccatgacaataccatggaattgaaatcaaccattgcaaacggtagtagattaatttggtgtgtcccaaagaaagtgatgtgtcttcggttcaaatattttttttaacaaatattatctcattactttattatctcttgatatgctgtcacactgacactaaatgttggacagataaccagaaagtatatgtagaacaagagcaacattntggccatattctggtatgacttcatagcttcattataaatttcacaatcagtacatcacaagacacgctcaagaactagtcaaggatacaactacgatacatttcaatgcacataaataagcaataaagcataatgtaacata

SEQ ID NO: 8115 - DNA, 422 bp, Glycine max
ttaccaccaagagagtgtcttagataagaagcttagagaggaatcttcaatggaggaagaaaataagagagagggagagagagtgtggtgtggaaattgaaggataatagggaaagaagttgaactttgaagtgtgtctcacaagtttcacattcatcaaagttgtgacaagtgttacacatgtttctatttatattctaggtcactaacttttgtgaatttcatttacatttcatgtgaatctaaaatgaatattccaagaatatgccaaaggcatcttagagtattccctttagatgccacaagcatggaagatgtgactctagcacatggaaagcttccttgagaagcaaggaaggtagcttccttatgaagcaaggaagatagcttccttgagaagctagagggagggcacatgcact

SEQ ID NO: 8116 - DNA, 318 bp, Glycine max
  unsure at all n locations
agacttgcttccacanaatagtctctgtcgaattacgctgacatctcccggaaaggtgcagatgaccacattggtctctgcgtgtcatcggacttggggtctccgaataacgaggtgcggataaccgtaaagtgctctgcatgccatcgaactcttgggtcgctggatagcaagaaggtgacactaaatagtctcagtcggaagacgctcacagctccaggaagagtgcagattaccacattggtctctacatgtcattggacttgtggtgtccaaatgatgaggtgctaataaccgtaaggtgtctccgcattccac

SEQ ID NO: 8117 - DNA, 451 bp, Glycine max
  unsure at all n locations
ntgatataatgcatcctttgtatttataggtatagaggatctatccacttgaaagtgtcaacaacagactcagtacaatgcattaaattagtacgacataaatttgatcaacaatgaattagtatatatagctacaccttattcaatccaagaatggaaaaagggaatcagtggttaagaatgaacatgggtcaagcttgagtcaggttttttgaagccaaaccgaatgaaaatggttaggttgagtgtgttaaatgtgactgtctcaacccaacctaatcacaattgggttgtgccaaagtcaggtcattagattagatattcggggaaaaatggaagaaaaaaaaacacaaaaataggggtagagtagggaaaaggtaattttgtcccaaatttatgggaggcactgggtaagaattgaaatggtcaaagaaaatattatacacacact

SEQ ID NO: 8118 - DNA, 450 bp, Glycine max
  unsure at all n locations
agcttaagctctacctagggngcatttaagcacttttggtatgcaaagtcacgttttgctgctaactctcctttaatggatcccaaatgaactccaactaaaatctttcaatgttaaacatgaacattgaattaaaaatgcatctaaaggacatatatcaacaatcaaactcattaaacataagagcaaagttggtttaagctttccttacctatcctaatttaatgaacttgctttgagatgaaagaaggaagaaaggattgggttcaagatgcaagctttctttcactcacacaacaactttaaatcatccacaccacccaaaaccaaaaaaccaacagaaatcacatcaaaaccttgaaaacgaacacttttataaacttccaaaagtgctcatgggagaaaaataaaaatggaggaagaaagaggaaagtggagagtttcttacca

SEQ ID NO: 8119 - DNA, 452 bp, Glycine max
  unsure at all n locations
tgtattattgacatcatggttgaagctaattaatttcctttcgtatataaagggatatggctgcacgtttgaacatgatgtatntacttttttccttagtgtctttgtttttagttttactatgttgcagtttttgttgttcttggttgatgcgcctacctcaccttattaatcattatacttataatagaatcttattattcttttggtttaattattggtgntataattttattatttgtatattttactctttatagtttaaaattggtttttttagttcttataatttatattttaattctcttttaatctttntaggttaaaagtgatattttttatttttataatttacatttcaattctcttttagtctatataaaaagatcactttcaaattataaagactaaaaaaaaattaaaatacaaattaaagactaaaaaatccattt

SEQ ID NO: 8120 - DNA, 352 bp, Glycine max
  unsure at all n locations
agcttaaactcactagcattcatatattgtttatgcgtataatataaacccactcagtagtaggcttgtgagactttttttcgaaggtattatcaaatataaaatatacttataaagacatttacgggcatgtaagacgtggcttttactctgaaaataattatccaaacgtggctattgcgagaaaaaaaaacccttgattaaggaatataaaaggaaccgcaacctcaagagctaatgcttccgtattgttacattangctggtgccatctcctccatatatatatatatatcggatcacagatcagaatgcctattaatctattgcattagtgatgaattctactagtg

SEQ ID NO: 8121 - DNA, 356 bp, Glycine max
  unsure at all n locations
cttaaactcttgacactaacaactcttaacacccctcaagcttatgcatagatcttaatgataccgatcttgttgacatcatagcatacccaagtcaaagcctttgtgaataaatttgtaagttggtcaatgcttaacaccaaagaacataaggcagagaacactatggagcatatacacgnaaaaagtatcttaatagggttcctaaacgcataatcaatgtattaagctggtacacaaatttcccagatcaaatgatgcgttagaagccagtctctcatcaacatgatgataatgtaatagtgatgacaaagattagattgtcaaatattcctagaatatagaatctggtttat

SEQ ID NO: 8122 - DNA, 356 bp, Glycine max
  unsure at all n locations
agcnttgagccaaaatcctgactcaccataaatcttgacccagggtgagaatgtcgatccttaccctcggaagcaaaaaaaaagagaaggaaaatttccaatcaaaggaaaaaggagaaggaaaatttctaatcaaagaggaagcaaaacaaggagagaaggaaaatttccaatcaaagagaaagctaaaagaaaagaaagaaaaattcccaatctaagaatgagagaaagaaaaaaagagaagttaaaaagaagaaagctcctggtcaaagaaaccagaagaaatgtgccgagaggtccttggaccagacgatatctgaacaatacagaattgtcaccaaatgaacaaaagaaag

SEQ ID NO: 8123 - DNA, 454 bp, Glycine max
  unsure at all n locations
atccttatggcatgcctncgaactttcacccnccgttgcccacttctggaatgatnntaagccaaagccccctactttttganggnngcaactcccacctttatgaagactatcccccggcaagacgaatgggaaggagatacccatcttggcccccttgctcacctcanagatccatncncgcatgaacnntacccaaccgaacatagtccgccatatcccggnctcacccacacccgtaaaagaatctgttcccttcgcggaagataaaggaaagattgangcgctngaagagaggttaagagcagtcgagggccttggcaatacccattctcgganttgcagattgtgtcttgtgccaacatcgtcatccttccaagttcaaagaccgactttgtaagtcaaaggacgactgtcgaagggcatttcgatgattgcgaagatgggcgtattn

SEQ ID NO: 8124 - DNA, 441 bp, Glycine max
  unsure at all n locations
agcttcttgagaaaactacatggagctgcctctgtataaacgctgcccagccttcgttaaccgttggatcttctcgaaatttggtttgcaacttcacaagacactttaccatgatttaacccgtgggatctttgagaaaatatctggagtgtgctagaagcttccgttcccgagagcatctcttatttaagcatttcagcctttgctttcttgtagcttaggaaaaatcccatttcttcttctttctttcttccaaatccatttctaaagttccaagtactttctccatcacccacaaatcatcatttttctccattgaaaacccacaccgagaggaacccttcaaccgaagcagaatttccaacttggcttgcggnttcggtagagaacgaanaccctaatatgatctttcgttttctttcgagggtaaccatggtctat

SEQ ID NO: 8125 - DNA, 457 bp, Glycine max
  unsure at all n locations
ggggcaagtttgtgccttcaaagtgaggcaacaaactttcctttgtgagtttagctcgcctgggcaaatttttctgcacctcttggctcttttctataaatagccatgtcaagtaagaaaagagggacattggaaggtagagagaaacctgagaaacaccagaaggaggaaggaagtggaaagtggagctcgagcactatagagttgtgaccgaggatcacatccttcgtattattggtaatttcattttgttcgtaatgctttattctatntgatcactagtttcatgaaatttgattttaagtttcactagaaagtactctntgaatttgaactgaatgaatttactctttacgttacattgctaggaatagagcataacattttgattgcaaatagcacgcaattatgattgtaatgttggggtatttacttcatatgcgagggatcaatattc

SEQ ID NO: 8126 - DNA, 301 bp, Glycine max
  unsure at all n locations
caagcttgtccgcanaaatcactgataactgttttaaggtccaacgccttaaacaatcctctntgcttttatcggntaacatggaccgttcgaaagcgtaaaatcaacacatcactttactgcctttcaaaagaactacgtaggtctaattttctcttcgatggagggtacgtaggagcaaaagccaagccgacgtatgtgacttggagggaagtcttttgttatagccgccaagccgacgtgataacgttggaatttatattgggggagagttgtgttgtgttatgaactcttccttagt

SEQ ID NO: 8127 - DNA, 452 bp, Glycine max
  unsure at all n locations
ggcttctacattnttcatggtaccaattggttctttctttgtatagcttggatgattcatatgcgttgaggcgcatctctttaagttcctgtagctttaccttcctcctctctctacatgttgtagagtcaaagttgaggaacttcatggcccaataagcttttatttctaactacccttgtaggtggcatgcttttccgtacaccatttgaaacggngagaggccaatgggtggtttgaaggttgttttatatgcccataggcaatcatcaagctttgcagcccaatccttccttgaagtagctacggtcttttctagtatcctcttgatcctccctatttgaaacttcatcttattcatatgtttgtgaataatagggtgatactactttatgttgaacattatagtattggaggacctttgagagttgagcattacaaaagtgtgtacc

SEQ ID NO: 8128 - DNA, 342 bp, Glycine max
  unsure at all n locations
agcttgactggtctttaactcaagaagaanaaaatgttttaatatttaccttgttgatcattttatccagcatatacttttcactttntatcaattagtaggccattttgattcctgtatacaatttgtattttattctttagtgttgactcttgactcattttttttattctaattggtgtttctccattatacttctgctcttttagaaattctcatagatacattaattaaaaaaaaaagccaatgcaataccgaaaaaaattaaaaaaaaggcaaaaaaaaaagtcaatacaataccaaaaaaaaaataaaaaaagaataaaaaaaaggccatactac

SEQ ID NO: 8129 - DNA, 446 bp, Glycine max
  unsure at all n locations
tgctcanacagacaacaatggtagctttgggatgcattccatgtatctgaaaaggacaataggcttattctggaggaaattatgttaggttctaaaggctacatgaaccaatcaaccttagcagcatcctatctttggatgcaattaccacatgcagattaaacaaaaccagtaattctagagcttcttttgaccttccagactacttcatgacatttctctatgtactntaccttattaatngtaatgatagttatatgtgaaacaattaaaattcttatagtattgaatgctttgtatagaggagttattattcacaccttcattacataatccaaaacgttacctaataaccagtaatttaacaatgaatcaataagcaaaaggaaaccaatcagcacctaacacaaacacaacataccaaagaggagaataatttgctattg

SEQ ID NO: 8130 - DNA, 377 bp, Glycine max
agcttaggaacccaaacttgtagcttcaatgcattgaaacatgcttaaatttggttttagagttagaaaaacatgaaaattatgattttcttgtgagagtttttgctcgaatttgggttgccccatgtttgatactttacataaaggtagcatggaaaacaccttgcaatagtgtgtatacataggtaaatataagaagtatgaaatccctagcaaagtgtgaatgattgtcttcctagatgaatgtatgatagtgtggaatgccttttttgaatgcaaatatgtgcaggatgtaattagttttccaatatgcatataaataaataggagtgaaacagtaaaaatttgtatggtgtacttcaaatgtatgtaagtag

SEQ ID NO: 8131 - DNA, 435 bp, Glycine max
  unsure at all n locations
nntacagcagatttagtaatgacccactaacctagaattaaaataacttaatgcctttaacctagggaattaaaaaaaacttaatggctgagtgtaactgaaattgtggcaaccaaaagtcacccccaacagccaacaagtcagccaccatttggtctcccaaaaggctgatgcctaggttgccaattgggcccttattacaacttgaactaaacctaactaaagcccttttagttgattaacccaaaacatatttttggtcagccaactctacaaggattgggccattatttagacaaactaaacactctaaaattgagacaaggtggtgtcatttagtcctcctccatttgggccatgatacaactcacaaccttggacttttcttcttgaaacttgggcttgtattcaaatagtatggacagcacttgttga

SEQ ID NO: 8132 - DNA, 255 bp, Glycine max
  unsure at all n locations
tcttgtctctctttcttgacttcctcaacgtctcctttacaccttggcttaacgaggcttcatcttgctccttcaagcccttctctacgatatcccacacatcttgagctcctagtagcgccttcatcttgatactcccaattatcatagttgtctttgtgagcatcggcatttggaaaggaaaaccttcattcgccatcttttgaggatctttgagctctgataccacttntgtggaaataaggctttttatgt

SEQ ID NO: 8133 - DNA, 461 bp, Glycine max
  unsure at all n locations
tctcnncctatttgctataaatagggggagaagtgaagaagataagggttcagccccttaggcatttctctttctctcgaaattgctgagaaaaattatttccgtgaagaaaatccaagccgaggcgcttccgtaacgtttccgtgagtaattacgcgaagattctcgaccgttcttcaagattcatcgttcgttcttcgttttcttcagtcttcaacgggtaagtacctcaaactgagcttttcaattcattctatgtgcccgtggtggtccacattttgtttcatgtatttttattcttgttttcatttactttttatacccccttttgacgtgcttaagccatttatttaagtcatttcttacttaatttaaaaataaaataaatttccaccggtcgtttgaattgtatcatccgttaattntggttaaaatgaattccgaccgttcggtcgtgccgt

SEQ ID NO: 8134 - DNA, 452 bp, Glycine max
  unsure at all n locations
agcttcaccttctggtcctactcatagttgtggtatgagaaaacatgctctattttcatctcccactccaagtaggcctccggatcattctttcctttaaatggaggaatgttgagttcaataccatcaattctgttttgtctaagaacaccatcattccctcttctcctcctttcttcttcattatgatctctattctccatttgatccaacctctcatggagcgcatcatcttgttgcttcattaacctctccatatgttgcatcaaagcttgcatttggaattgcgaaagccccactccatcattacgattagtacctgacatctcanacaaaccaatcagacgtatcaagacaattatagttgctggttgaatacctcacccactcaagtgtatcacacaattatggcttttctctaatgaaacactcttgccttttaccactctaat

SEQ ID NO: 8135 - DNA, 237 bp, Glycine max
  unsure at all n locations
cgagatgaggaagcgngaagggtgaaacttcctgctctcattgtcgaccacagattggtacctggagatatgttgcgggggtcaggagaccttgtggacgtcaggtggggtgctattgcccagaaccaagcttgaccaatcccgacccaacccgggcatagtcggtcagtgagaacctgtgatgtacctaaacaggcgagctcctggcagtcatcagattaaaggaacatagaccac

SEQ ID NO: 8136 - DNA, 430 bp, Glycine max
agcttatgctgcaaacatttacaatagacctccttaacctcaacaacaaaatcaaccacagcagaacaattatgacctctccagcaatagatacaaccttggatggaggaatcaccctaatctcagatggtctagccctcaacaacaacaacagcaacctgctcctttcttccaaaatgttgctggcccaagcagaccatacattcctccaccaatccaacaacagcaacaaccccagaaacaacaaacagttgaggctcctccgcaaccttccctcgaagaacttgtgaggcaaatgactatgcagaacatgcagttttaacaagagaccagagcctccattcagagcttaactaatcagatgggacaattggctacacaattaaatcaacaacagtcctagaattctgacaagctgccttctcaagct

SEQ ID NO: 8137 - DNA, 538 bp, Glycine max
  unsure at all n locations
aagagaatagtgtcttattctcncttccttattaccgcncncctcttctttcgctannannnacacaactnctctgtttcttgagactatgcatcagcgacacttgaatgctcagctcacacagttatacttctcagactgagttgtggaagaccatttactaagtatttccgtattagaggacttagatgatgcatggtaatgtgtggagtgctatgatgtcgcaacctagaatcatgctttttacttaccaagcagcttagctcatgaaatgatgcatgttcacatttagcatgtagatattacctattgtttttcaaagaggacactttacccggntntnacgnnacttatttggaagatttcttgttgaatttccccccccccnnccccnnnnnnctnnnnnnnnnnnnnnnnnnnnnnnnnnnnnnnnaannnnnccnnnnngtnctccactattttcttgctattgctcaacatacatatctcactttgaccaagtcaaggttgcactgtactgtcatgtgcctaacaccat

SEQ ID NO: 8138 - DNA, 443 bp, Glycine max
  unsure at all n locations
ctctgcaagtcttagaaacttagtctgttagttgtacaaatttgctatgcaactctcataggtctctataaaatgtacaatgtaactaaaaatgtttgggaatgaaattaaatgtcacactttcgcaaattttacgcaatgctctctttctcttactctctatttctctctccctctatcttttagnttcaattcatttctaatagatgtcatccctctctttttgtgtactcaaagtcagaatctgtaatgtacagtctaatatatgtagaggatatcatagtcactgcaaatgactctaaacttgattagaaactagtttacctatntttcttaanagatcatggagatcttaatttatttttgcgaatngaagcagctaattaagtngatggctcacatatacttactccatctaagtatatgtgtattanggatctttt

SEQ ID NO: 8139 - DNA, 319 bp, Glycine max
tccttaagaagattcctaaagaagctagagcttagctacacatacctctctaataggtaagctcacctccttgagatgagaagctagagcttagctacacaccccctgtaatagctaagctcacccccatgacaaaaaacaagaaaatacaaaaaaaagtccttactacaaagactactcaaaatgccccgaaatacaaggctaaaaccctatactactgaatggccaaaatacaaggcccagacgaaggaaaaagctattctaatatttacaaagataagcgggctcatacttagcccatgggctcaaaatctaccct

SEQ ID NO: 8140 - DNA, 370 bp, Glycine max
agcttgtcacttttttgagtcactctttacagtcttaagtttacttcaattggtgtctgtatagaacttgtcttttcttaatacacttaagcaaactcataaataggcattaattgaaaaggcttatgatttgtgtttagaaggtttgtaataattaaagcatcaagggttttggactcaacaaattttccataacataagatgtaaaaacaattatcaaagagacattggagaacattcaccatacacggatagagagcaaatatgaactaatcaaattgaatggtacacatactgaaataataagggactaaacaataaatatctaaacttcatataactcggtaaaattacctgctacaacaagtca

SEQ ID NO: 8141 - DNA, 391 bp, Glycine max
tgaccaatcccgacccaacccgggcatagtcggtcattgagatcctgtgatgtacctaagcaggcgagctcctggcagtcaacagataaaaggaaaacaagaccacatagcaaggaggcttgtggtggctggccagctgtgaattttgtgtaatatgtggattgtggcctctggtaatcgattaccaaggggggggtaatcgattacaaggcttataaatgaagacagggggctaagatggtctctggtaatcgattaccaggggatgtaatcgattaccaggcttgaaaacgaggtcaggaagctaaggaagcctctggtaatcgattaccaaggggtgtaatcgattaccaggcttaaatagggaactgggagttgatgggagcctctg

SEQ ID NO: 8142 - DNA, 375 bp, Glycine max
  unsure at all n locations
agcttagtcctataccattgttcactgaactctttataactgttggggaacaggtccttaagtttcccacacctaaagtaattcaaggtagtacattaaaagcatattcctgatcctagcaatatttatattcataaataaacatggtaagctgatacatcttttgaaatgttttttatttggaacagtgaatctgtctggatggatgactgatgaagagtttgcaagagagatgattgctggagtaaatccacacattattaagaaacttgaggtaaatttactattgaactgttaagtacataacactantaaacatttatccacttgttaaatttgcagttgataaccttaactcattgcaaattatattta

SEQ ID NO: 8143 - DNA, 421 bp, Glycine max
  unsure at all n locations
tctcaccgggccaccttgatagtgcagtgactatgctgttccttcattatctgataagatttagtacatcctataagcaacataaagtatgtgattaataataatttaactaatgaaaaatcaaagcatctttacatgaactaatttccacgttgaatgatataaaagtgaatactgcataatctgcagtcttgatttgtttagcacctgctctatacaatcccaagtttttgttttgattttttntaagaagccttatagtttatactttatagaggtgtgccaccaggaaactagaattctaagcagagtttatgtctaaagcacttgaaaacctatttaaaatgttgttttgacgattcatttggagtaattntaaattttcctataatttttattaaaaagcttcctatttaataag

SEQ ID NO: 8144 - DNA, 240 bp, Glycine max
agcttataaaatttaaattcacatctttaaaagctgttataaacagtttaaactttgggtaatcgaatacataccttgtgtaatccaatacaggctttgaaattcaaactcaaaatttgcgaattatttcataaatcacatttaaccattggctgttcattaccagagaggaaatatcatatttttgagaatatacatgttcttaaaaaaaacttgtagaaatttcctttagccaaacct

SEQ ID NO: 8145 - DNA, 382 bp, Glycine max
  unsure at all n locations
acaccactgtcgttgtgaacaatggatccatttgtaaaaataaaacctaatgtagagttcacaattgtctgactgcttgtctctcccaagaatgccatagttttttntgtaagagttgggttatgactgaaacttgtggttttttacagtcttangcgatgtcatatatatatatatatatgagttttaatatcagtgttgcattttttaaagattaaaaatacacatacacatgctttcttatgtgttgttaactacaccaatgacgtgacacactttatcttgcatcagatctacatgtgtagtcatgttgtgcaaggtcttgtcacgcactttatgttaatgcagacaacaatttatcatacatgttttttacaatgtg

SEQ ID NO: 8146 - DNA, 382 bp, Glycine max
  unsure at all n locations
agctngcacatgcataaatagnatataagcaatgttttgtgtaagaaggatgcacatgctagtcaaagttcttatctcgtgaaacatgcttatagggtctcttacatgaaatgatcatacctgtggaatcttgccagaaataaagctagtctataaaaacttgtatcacagaccactaaaaaattataagttgtgtttattggactccaagtgatgcattaatattatacaagttaagatatcagaagggaacactttggcaaaaaaccaatactttgtgtaaccattaccttacaccacccaactttcattctntaccattgatatgttcatccttctatccatttgttgtgttcttgattgtcaaccaatgacacatgca

SEQ ID NO: 8147 - DNA, 458 bp, Glycine max
ggcatcaaacaaccgcctatgagcatcatgatatgagctttaacatactgtgctatgaccatatcatcaacatcatgaagttgctgaaaattttgtcgcaaccagcttaaataaatcattttactctttacatacttatcaggtggagtttttcctagtaatgtctaatgagcaacacgtacatcatcggtgaggataccagttactggcaatccatcaatcttcaagcgcaactgtatgcccacatcatgtaaagtaatggttgcctctccatgtgaaaaatgaaatgtgtgcgtctcgggtctccaacgtactaaccacatgctggttaatatcaacttttctgacatttataacatgactgaaaccagctaaagtgaattacatttttacccgattatctatccgatccaagtggatgaaagcgcaaacaaaattatacctcgaacaaatcattc

SEQ ID NO: 8148 - DNA, 452 bp, Glycine max
  unsure at all n locations
agctntgcagaggtcaatcaaaggcatttattactgtaagatctctccaatgctcatgaaagcaattggacagacaagcagtgatagtgaacattaatatcccgataaaattaaagggtaatgttaaaataaataaaagagtaaataactaaatataaattatttcatctaagataaaatatataaatttgtgagagaatcttttaataagatataatgtttaaggattaattagataataaattatattntttataattaaattgatattaagttttaaaatttaggattaatttataattaattctttttagaattaatttatctcactttttatatatttaaaaattaagtttaaattttttatcttttaagaataatttattgcacttatcacttttaaggataaattaactattttagtattatcataaataacaaataacaaatgt

SEQ ID NO: 8149 - DNA, 458 bp, Glycine max
  unsure at all n locations
tgttgagtgctcgaaggatttaattgctctgcttatttggattcttattagtaaaggggccaagctacttactgggcctctattttttacacctttaatgcttgttagtcctgttattatgtattcatatatgcacggccgtttaaactgtcatcgtaactgactttttaatagttgctgtaatgatgggtattatttgcttattggcacagcatgttactctagctagcttagaaaggtgtacggtttggaatttagtgtctgggtaggatttattgattgtagtgtggtcatgtcattatgcagtgtttacagaggtttatttttagttgaactctatcaagttaaggaaacaagagtccagaggtttatttttttgaatgatgagcaacttgatttactggnttcatatcacatcctttgagttagaatgctgatggtctagtagtgcagttaca

SEQ ID NO: 8150 - DNA, 365 bp, Glycine max
agcttttagatgtcttagattgacaattgaatgtatcatctgctgctaccgtaatattagaagttttcttatattaaacgtgccaccactaaaaacaactcatttattcaatattaatgatttggttaccctcgatacaattggactgcttttggtgatacaattgatgatttatatgcttcttacaaattgatgtatgaattagactacatcttagaaacagtgaaggagataaattgatgtacaaattatatcaaatgttaagaacagtgaaggagaaaaattgaagccacattggcaactatatgtagtcatactctcacgtcttaattgtttctggctaactagttgtgaattaattccat

SEQ ID NO: 8151 - DNA, 444 bp, Glycine max
  unsure at all n locations
tgatagaggccgngtggttgactnttcaagagggcggacccttcataaaaacaaagtcgcttgccaatcatggaggggggcggttaatgccatcgaggtgaatgggtcacacgggcccaagcttttggaggacgtaaagacccccagaaggtttatctacaaggccttgcaaaaggtgggcatgattccctgcggcaggcgcagagaagactcttgctaaatgcatccgggtgtactccatgacatggaaacatgttcggcagtaagagatctattacaatggatgatagaccaaggccggcttaaggtcggcagtgagagggaggaggaacaacatgtatacatgcagtcggcagatgaagaaggacctaaaaagcctaaacccttggtaatacacttcactaggaacacggctccccaaagacctcaacacccctcggtagt

SEQ ID NO: 8152 - DNA, 340 bp, Glycine max
  unsure at all n locations
agcttgtaaatgaacaacggaagctctcgagattattaaatggtcataacttatcacacggaagtccgattcagacgcataatatatcgagaagcttgaaaatgaacaatggaagctgtcgagaaattaaatggtcataacttgttacaccgaagtccgattcaggcgcatactatattgagacgctcgaaattgaacaacggangctcttgaaatattaaatggtcataacttattacacgggagtccgattcgacgcatatatattgagaccttgaaattgaacaacgaatgctctcgagaaattcaaatggtcataacttttcaaacggaagtccga

SEQ ID NO: 8153 - DNA, 379 bp, Glycine max
cacacggaagtccgattcatgcgcataatatatcgagacgctcgaaattgaacaacgtatggtgtcgataaattcaaatggtcataactttgtcaacggatgtccgattatgcacataatatatccagatgctcgaaactaaacatcgacagctctcgagacatacaatggtcataacttttcacacggaagtccgattcaggcgcataatatatcgagaagcttgaaattgaacaacggaagctctcgagaaactcaaatggtcataacttatcacacggacgtctgattcaggcgcttaatatatcgagacgctcgatattgaacaacgcatggtgccgagaaattcaaatggtcataacttgtcacacagatgtct

SEQ ID NO: 8154 - DNA, 409 bp, Glycine max
  unsure at all n locations
agcttccatggggtgagttttgtttcccttttcacgctntaattcactccccacaagtaagtgcattttcccttggttatttggctctccattgatgtgttttggtgctttagttgctcattttttgcaaaattcgtgaagcgattcgcatctgaatccatgcttgttttgttgagttgagggtttgtgtgagaaggcattangcctatgttgtattctgaagcaatggggcatgccacattgtccccattctcttgcaatttgtgtccaaacgtgcgccctcgaagtgctcggtgaaatgccccaatgatatatgaatatganntttgcgaaatgggatggtgggactggtttatatatgtagagacagcatangagattcaaaatatgtgcccgaatgcaatttcaa

SEQ ID NO: 8155 - DNA, 331 bp, Glycine max
accgcttagcgacaccttattcttggcttatcgcgactcagtgtcgccaagcgcaattccttacggccataactaaggtccatgaagctaagcgccagtcatggcagctaagctgaattccttgcggcaatgtgagcgctaagagaggccttatcagctaagcgcatgctcctctgtacttaagatgcatcattttagctaagccagccatagcctggcttatcgagagttacaacttttcggatctgcaaacctcgctaagtggtttgatcctgtcgctaaaccaagcctctgttaaaaaaaaaaaaactgattttgaatgtgaaacgtc

SEQ ID NO: 8156 - DNA, 460 bp, Glycine max
  unsure at all n locations
ttggttgatgctatttctgacttaaaaatatttagaggtgagtcttccagttttgcaagttaaggaatttttttagaattatttaattcgagtaataatttttttgttagaatgaaggatcaatgtctagtttaagtttaatagtgctagcaaatagatttatttattgttatcattcacaaaatatttaattgaagtaataattggttttctagataaaaaattaatatgtgaagtttaagcgtattaatttttgtaattaggttttttactttgaagtttttttaattatgtttaattatttacaagccttacaaatatttacctgattcccttctagttttctgaagttagaatgaaatttgaatctatattttaagttaaagttagtagatgaagcaaccaaatacagttatttatttaaaaactactcttggtatgattaatgatntctaatttt

SEQ ID NO: 8157 - DNA, 438 bp, Glycine max
  unsure at all n locations
agcttgcattatgttgagagatagcgtgtggaaattaggtgcgtcagtgaaaatgttatcttgcatggcaggaaagtagtgtaggagaaactaattgctgcaaaccggtgagttgtatgaatcttaattgtgagagaatgactagtatcaactactaatttttgcatgaatctatgaatgctgaatggatgcatgatgtggaaatgatgaaggccatgttgaatttatttttttgttacagagccaaatagccaccttgtatgagtaattaaagtaaacctttgcacccagtaagccaagcatgattgaatattgtcctgaaccctagccaaagtaaataattntatcacaccttgctccaggttttacgaaagcattatcttgatgtgaaatggttggttcaaatttgagaggcggtggtgtagtaaatcatgtaaa

SEQ ID NO: 8158 - DNA, 480 bp, Glycine max
  unsure at all n locations
gcccgcggnnttgaacatgcatagtgctcttaaactagctttgtgggaaacagattcaggatatctccaattgctgacgacactattttttttggggaaacttcaatggataatgttaagctgtgaaggccattcttagaagctatgaaatggtttctggactgagaatcaatttttcccagagcccatttggagcaattgggcaatctgaggagtggtgttgtattgctgctgatttcttaaactgtgccatgcttcattttctttatgtacctanggttgccataggtatcaattcgagaaggaggtggtgtgngagcctataattaggaattcgagctacgttgacaaatggaaccaagaanatctttatggctgcagaatacccaaattaatggtgcttaacagcattgcctttgtctatcagtcttctatcacgggcccttcgcagtgattaatagactaactgccattcaagan

SEQ ID NO: 8159 - DNA, 387 bp, Glycine max
  unsure at all n locations
agctntacagcagaatttagtaatgacccactaacctagaattaaaataacttaatgccattaacctagggaattaaaaaaaacttaatggctgagtgtaactgaaattatggcaaccaaaggtcacccccaacagccaacaagtcagccaccatttggtctcccaaaaggctgatgcctaggttgccaattgggcccttattacaacttgaactaaacctactaaagcccttttagttgattaacccaaaacatatttttggtcagccaactttacaaggattgggccattatttagacaaactaaacactctaaaattgagacaaagtggtgccatttagtcctcctccatttgggccatgatacaactcacaaccttggacttt

SEQ ID NO: 8160 - DNA, 467 bp, Glycine max
caggaactataaaactaagcttacaacatgtggattatcctccagcacatcaacatcctgcatactatgtatatcgtacagtcttcatcagactcttcagtcgaggagttatcctcacctcgcctcgtgttatcactgcaaaccaaatacaaagaacgatcctccatcgagtcctccatcaaatatgtatcatataagtcatcattagtccctaccttaatgtaagatctaagcaaaactggtgccttgactcaaattaagactctagccacatctagatgcatcctattagtagtatactcatttgcatacatatagtcaccataggagctacaatccgatttaaaaaatcatcattccattcatgagtagggacattaagcaatttcacccataccaagttttatggtctaccaagcgagcgagaattccatagaacaatatctacagaaccactcccatcccat

SEQ ID NO: 8161 - DNA, 449 bp, Glycine max
agctataaacctactttatcgagttcctgaatgttgaaaaagtgttctacatgaatggatggttcaatgtctgtgtggatagtggtgatttccagggttgggacaatctcgacagcacgggagttagaagtaaccattgcaaaaagtttgagaactatgatttaaatttcagagaggaagatgaagtgtttcaaagtagtgagtaatgccaagagtttcaacattttaaggttttgtaatgggttttttggctttttcaaaaacaatcattaagtccactttccaaaattgactcaacaattagtgttacaacgtttcgttatgaaaaatactgtgttttatataataataataataataataataataataataataataataataataataataataataataataataataataataataataaatgcatgatatgtcgttcatat

SEQ ID NO: 8162 - DNA, 469 bp, Glycine max
  unsure at all n locations
tctatggaaactgggatcttgagcttcaatgaagtccttcaatggtgattttcaaccatggagatgcagcggaagataaaggagaagatgtgagatgatgtagcttcatgtagagcttgtaggccttagatcttcttcatcaatagagacttttgcttcttgaagatcaatggcagcggaatggagaaggaggaaaggtgattgtagacgccacttcaaggagaaaatgagtcaagaacaagctcaccaccatatgaagccatggataagagcttgaaggtangagaagatgagtggagggagagagggagaangggcatganatgtatgcctcaaatgaggtttgaacattgaagtgtaatttctcaaatgttcanagttgaaaaaatacacacacaaaagcttctatttatagcctaagtgcacacaaaattggagggaagattgaatttctattcaacttcacttg

SEQ ID NO: 8163 - DNA, 332 bp, Glycine max
  unsure at all n locations
agctnggcatcttgctccaactntctttntagctcttccttangtagtgctttaacagatgcaagcactccttcttctagctcaaaaacttccttcttctcaagtgtttcatctaacttggctttctttcgtgcttcgtccaaggatttcttcttagccttagcaaaggctacaacttctttgttgctaatgagagacagagtatgtttggattgaggaatatgatgagctggtgaatgaggttgaagggataaagaaggtgaacgttgaggtgtacgagttttaagaatcgcatcatcagattcttggtcttttggaggttacgagggtat

SEQ ID NO: 8164 - DNA, 449 bp, Glycine max
  unsure at all n locations
tgtagaactatgttggattntccctacgggtgttttttgttccactttttctttgttcaaatatattcaagggaaattcggtttgccggaaagcacaccggatcgtcaagtatttaaaaattaaaacggatgaatccgagtatcgaacacagggaactaatgtttacctgaattaagttcagaaatgaagcattgttgagagaacatgtatgattgataatttcaaacaaaatttaaactaacttttatgctaaaaactataaaaagcaaggtaagtaaaagtgacaacagtaggcagaaattgttgggtctttctaacaaacaagctgatgcatataaatatatttctctaatcaatcagactcttgtgttctatgctgtagcctaaattactaaacctcgatccctcgtcagaccgaatcaatccaagcttcgtactcatatccctc

SEQ ID NO: 8165 - DNA, 446 bp, Glycine max
  unsure at all n locations
agcttaggttatggttcacggtatggttttcttgagcctcagtctatacaccatgcaaaggacagacgtcaagaatgtcaacaatacattgaaacatgggtcaaaggaatcacattgacaagtgtacttaggaccttacttgaatcagtaagtgaaattcatgtcattattgcgaaaaaagtttgcattataagtacctaattatagtttttcgacttcagggcacattggcatcttattgttctgtgtccataggacaatattgatgtttggttttgttctttgcttaagaagcctaatgttaacatcaaggttgcaattaacaggttattcttcaaattataagtaaattaatgtataccaattgtagtatattaacacaantaattttatcttatatacgttaacgttattgtggaaactagtgcaatgaagacattaaccac

SEQ ID NO: 8166 - DNA, 455 bp, Glycine max
  unsure at all n locations
nttatagacactgtaattgggtttaaactttataatggaaaatatcgttgttaatattattcttttaagataaagaaattttagcaggaaaaaaagttcatataagaaaggagacatctctatctatcaatcagccagtgaaaattatttttgtggtttactgcatttcattgggttggatggtatacaatagtattcttgttaacttcttcatttatattgtgacttgagaatgaacttatctcttgtattacatacatgtatcagtttctgaatacataaacttggaagtgtcactccctctaatgaccactatattatatgaaaagttggaaatcccattaccactactagagttgttgaaagagagaaaatagattcaagagatgttgaaacctgtgtcttgactacacaacggagtccattntatatagacttaatgcaataaatacaaa

SEQ ID NO: 8167 - DNA, 421 bp, Glycine max
agcttctgttttcaatttcgagcgtctcgatatattacgggactcaatcggacatccgagtcaaaagttattgcggtttgaatttgatgtgagactccgttttcaatttgtagcgtctgaatatattatgggactcaatcagacatctgacttgaaagtttttgcggttttaatttctaggggcatctgctctgaatttcgaatgtctcgatacattatgggactcaatcggacatccgagtaaaaagttattgtcgtttgaatttgctacgagattctgttttaaaaatggagcatctcgatgtattacgggactcaattggacatacgagtaaaatgttattgttgtttgaatttgcccagagctctcgttctcaatttggagcgtctcgatatattaccggactcagttggacatccg

SEQ ID NO: 8168 - DNA, 205 bp, Glycine max
tgtctcagcgttatgcgagacggagaccaacatgctagctatcatcgccaagtaccaagaagagttaggtctagccacggcccacgagcataggatcgcggacaagtatgctcaagtttacccagaaaaagaggcaagaggaagggtgatcgactctttacaccaagaggcaaccatgtggatggatcggtttgctcttaccttg

SEQ ID NO: 8169 - DNA, 405 bp, Glycine max
  unsure at all n locations
attaggttgttaagtttcttcctaactaaaaatcaaaataaagccttatactaacgttcgtgaattaacgcgttttcagttattagtcgaaacaacancattcacttactatagatcgatactataacactcttaatatattaataaaagaacattaggattgctagcccataggtgacacattgttattgacttgaaacaaatgcatctatggctattctttttcactatacgccgtaaactatgggtgttgactatcttttcaagtataatcacattgtgtttctaactctggcctacatatgggctcctaatcaataggacttatctctgaggctgtctcatctcatttaacttgcattgtaatcataattatatcacaatactttaagttcactcatgtcg

SEQ ID NO: 8170 - DNA, 455 bp, Glycine max
  unsure at all n locations
tcctccaatactcgaccttgactctctatcagcaatgtgtattttctatatttggattgagggggcatgctggctttagattntcctagactatggctactcttgatcttcacctttcggtctattggcttccttgaagattttccacgcattttctttctaaacttggtaatctcttccatctgaatgaatctaacagcccttgctcccaacatgtccaatattgtacgcaatctcttgcacagactatccgagtagggaccaaatttcaatgccataatcattgaagggagtgtgacttttgggctcaagttctgaatcaaaactgagactggtgataacctttcaatgaaatcgtgaaacgatcctccttcttcttacctaatgtcaatgagtgccacaactgttagatggtgtggtatgctcgtcacgtactgagctcccaattgactata

SEQ ID NO: 8171 - DNA, 318 bp, Glycine max
  unsure at all n locations
agctnttcgcanagcttacggtaaaatctgggacttatccatggtagaagtctccacagaggccattgcctcccatgcccagtattatgatcagccgatgaggtgcttcacctttggggacttccagctatcacctatggtagaagaatttgaagagatcctaggatgccctctagggggaaggaaaccatacctcttctcagggttctatccctcattagctagaatttccaagatagtccaaatctcggcgcaggaattagaccataggaagcaagtcgaaaatggggtggttggaatattgagaaaatatttgga

SEQ ID NO: 8172 - DNA, 455 bp, Glycine max
  unsure at all n locations
tgtgtaacccaccatcttttcatagtagaatactggttatgtgtctaccatcacgattatcatctccctttccatcattgggagtgccacttgggctgccagatccctccacctttgggtgtattctttgaaagattcgtgcccctttttgcacatattttgtagttgcatcgtagaatggactcgagaaccattatgtccttccaagaatgcactcgggaaggttccaagttagtgtaccaagtagcagctaccccagtaagactttcttagaagaaatgtatcaacaattcctcatcttttgggtatgcccccatcttccgacaatacatctttagatggttcttgtggcaagtagtccctttgtacttgtcaaagtccagcgccttgaacttgggaatgaccacgttcgggtactangaacaactcttctatgtcagtaaaggcataatctc

SEQ ID NO: 8173 - DNA, 362 bp, Glycine max
agcttagccgggccttctgcggctttaaccagttgtcgaccgagagttcctgggcggtcagcggtggcccgaccacgacctcgacgccgatcgggtcgttctgttcgagttcgtaggcgatgaggatgcgttccttcgtcaacctccggacctcccgatcgatctcggattcctcgtcggcgtatcccccttcaagatcgacctcccttgcgacgagcgtcggcaggtgcgactcgtcgtagagatagacgatcagcgcctcgttgtagacctcgacctgcgtggcccccgggcggatgccgggccatggagcttctgacatgcggacctccggcatcgcgtgtagattcctctcacgccat

SEQ ID NO: 8174 - DNA, 468 bp, Glycine max
  unsure at all n locations
tattaggacctatgaaactcaagctntagggacctcggcgagaggccatgaccgagtttgcggctgaaggctggacgttgcgagcctgaggattgggaatcctcggcggccatttccccgatctccaggaagctgatcgactctccggccttcggcttgccgtcggggccgtgagttagcgtgccttcgtcccgagtcggaccggctccaactcaaccgcctcggcccgctcgggcttcacccaggtcctgaagagcgtctcgtccgggcccggcctgacctcgacctcgtatgcctgcccgacgaccaggcccgggaggacgaagcgtccgtctcggtcggtccgggcctcgcgggcgaaggccagtcgcgaagcattcttcgaatcgtcggggaagacgcgtcggccgtaggtgagcgtcacgccacgcgcaggctcgccggcccggtcgaggaggatgcccctcg

SEQ ID NO: 8175 - DNA, 311 bp, Glycine max
agcttagagatgctacaacttggggggagtgttggaaactacaaaaaatctattagtgctttaattcatgtacttagttcaaatttgctgagtttgagtgctaaaatctcaagtttcttagttcaaatctttaaatcctaaaatctcaacttctctatcattatgacttttctattgccgattacatcaatagttttgactagatttgatagtttatttttatctgcatattttataaaggattaaatgctctgttgtaagacaccatactattttacaaaccacactgctacagacttcgaggtttacac

SEQ ID NO: 8176 - DNA, 452 bp, Glycine max
  unsure at all n locations
tcaggggattgaaattccgcctgacaaacaataaattatgttttgttgtaagtaaataacaaatttagactattaaagaaaatcaacgaagaaaactcaaatacctgaatatcctcccatatcaaatccttctgagcagtagggacttccttccaggtgtcatatgtcacgtcgaccttatcacgagcgacaatccccaaatatgttcttaatttcttcttgtagggaccgtcggccttgccggtagcaggatcgacgttgaccacaggtctttctgccccaggtggtctagtggccaatgatcgtagccgtgtcgccttgcgtgtccgcttcaacgtagatggagacgcatcancgtttgcaggaggaggaggaagaggaggaggaggcgaggcangtggagtatccatggtcctttaaagaaaanaagttgagttagttaatattatcaa

SEQ ID NO: 8177 - DNA, 390 bp, Glycine max
  unsure at all n locations
agcttatccttatggcttgcctctggacttcacttcccgtgccaccccggtaagattaagccaagcccctacttttgaggggcaacttccgccttatgacgactatcccgggcaagacgatgaggaaggagatacccatcttggccccctgctccacctcaaagatccgtccccacatgaactaccccaaccgaacatagtccgccatatcccggcctcacccacacccgtaaaagaatctgttcccttcgcggaagataagggaaagaatgaggcgcttgaagagaggttaagagcagtcgagggccttggcaattacccattctcggacttagcggatntatgtctcgtgcccaatatcgtcattccttccaagttaaaagtaccgga

SEQ ID NO: 8178 - DNA, 460 bp, Glycine max
  unsure at all n locations
ntatgacattgttaatgttttcttactaattgtggtcatttgattntagtattaatcccttttataatgaactcacccttgaaatttttgtatcatgtggttggtacctatgatgatcgcgaacccttgttcgtgggagtagaatgacagcagtagagtacaggattattttagggagagttgtgttttgttaatcaactcctccatagctggttccattattctttntgttgaattgaggatgtaaatcacaatcttaattatatgtatgaacaaatttactttccattatgtgaataatgtgtactaagttactatgcctatatatatatatatatatattcatttaagtaatggtgcgttgtttgggaatgtatatcgtgaaattaaaatntaaaatttactttaatttttcataagcaaattaacagaattttcatttaaaaattgaagatttcac

SEQ ID NO: 8179 - DNA, 443 bp, Glycine max
  unsure at all n locations
agctngaggaagtgatgacttccctttcttaatggcgacgtctgatagtccaccctttttttatgaaccggtgtctatttgaggtcttgggtctctttctccccttgaccaatccagtgtgctcttcttgagcacttgaatgtggccccttcccaactccaccctaaaaaaagatgatggtactcaatgaaccaagaggggaagagggtgaattggttttcaaaaacaaaacttttaaaaccaaagttacaaaagcttcttttatacaaatcgtatcacaaaacttttcatgaactgaactcaatcaatacataatcaatccaccctttatacaatatccttcattaaagttatttcatttttaacaaagatatatctttgaatcttttgaacactgattaatacttgaatgagaaataaagatcagatcaagagaagagata

SEQ ID NO: 8180 - DNA, 446 bp, Glycine max
  unsure at all n locations
aattactttggttcggtcaaaattatttattttaggataatttatttttaccaaaatgtgtaggcttttatttttctttttattactaattatagggatgcaatctttgttttgtaaagccataagtccacttgtatgttcttcagttaattttggaattatgcttttttcaaaattttcgtaaagaaaatctacagttttttctatttggtttagtctgatttccaaagtggaaatcctattgttcataattttatttccatgatcattttctttcttaaagtctggaaattctattttcagaatagtttgtacactagttntgcagaaattcttatagcataaactacagtgagctcttagtgttttgtgtggatatcttttacagaaataacattctttgtgatctggtcctatgtggaattgtatttcatgttcatggtcat

SEQ ID NO: 8181 - DNA, 396 bp, Glycine max
gcttagagaggaagcttcaattgaggaaaagaaagagataggggggagcacaaaattgaaggaggaaaagaaggagagaagatgaactttgaagtgtgtctcacaagactcataatcatcgaagttacaataagtgttacacatgcttctatatataacttaggtagcttccttgagaagtttccttgagaaactttcttaaaaagctagaacttaattacacacacccctctaataactaagttcacctccttgagaagctttcttgagaaacttccttgagaaataagcttccttgagaaatttccttgagaagcttccttgagaagctttcttgagaagcttcctagagaagttaaagcttagctacatacatgcctctaatagctaagctca

SEQ ID NO: 8182 - DNA, 472 bp, Glycine max
atactcaagcttcttagtttcagatgatgcagctgagtttgtagttacctcatgcactcctctaatgactatagcatcatttctggcactaaactgctgggagttggaagccatcttcttaattaaatttttggcttcagcaggagtcatgtctccaagggctccaccactggcagcatctatcatacttctctccatattactgagtccttcataaaaatattggagaagcagctgctctgaaatctgatggtgagggcaactggcacatagttttttaaatctctcctagtattcatacaagctctctccattgagttgtctaatacctgagatatcctttctgatggatgtggtcctggaagcaaggaaaatgttttctaagaatactctcttcaggtcatcctagctcgtgatggaccgtggagcaaggtaatacaaccagtcctttgccactccctctaaagaatat

SEQ ID NO: 8183 - DNA, 456 bp, Glycine max
  unsure at all n locations
agctnttcctccctcttcccacgttgcttttctcttcttcttcctctccattgaagcctccattaaagctccaaaattgctcatcatttctactccaaattgcgaagggaagccattttcggagtcgtgaagcacacctctacgttgtgggacttcgaatttcaggtatgggtggacttcttctcacatgaatttcgtgggtattgggtttttgggagctatgatgggtagttctactaagttaatgccttatggtagttatttgtgaaggaatatgttgaaatcatgctaaacttgacatgtntgatgtgagtaaagctacccattctattttagggttttacgatgatgctttgtgatatttgtatgctgaaacttgtggtagaaaactggtaaagatgatggggagagttaacttacggttaaatgtgagaatggtagtgatgtgagtggaaa

SEQ ID NO: 8184 - DNA, 471 bp, Glycine max
  unsure at all n locations
ctaagcttagtgcctntaggaactgaagaaagaataganagcagaatgttaatgtgataaaacttcatttatatatattcttctgtcttaagagaacaaataaggaacacaaggggtagaaagaactaagaagtaaaactaaccaattgtagggtctgtaacttaccaaccaacanaaaaatcacgggctcgttgagatgctaccctgtctttntctgtanttgtttgaggaaaaatcccaaacgtgtaaatagagataccaacaaatccatgttgnttgtcctgcaaagccacttaagttacttagaaaatgggaacattctttgctatcagtgtccgtatgagaagaataaatgtcaaaaatattaagattgagaagcagataaggatcctacagttataagtttaaattttatgcgtgcataanacctattacattgtccgctaataaaaaaattataacatcacttt

SEQ ID NO: 8185 - DNA, 110 bp, Glycine max
  unsure at all n locations
acctgcngcatgcaagcttgcttgtggagcttctatggaggctggatctttgagctttaatgangtccttcaatggtaatttttcaccatggagatgcagcggaaggcaa

SEQ ID NO: 8186 - DNA, 461 bp, Glycine max
actaagctgacgtttaaaatttaatatacgttgccaagtgtgagtatggatcttcatttggtaaaccatgaaacaaattgcattgtattagctgtatcaatgaaagtgggtaagttaaattttgtgcctgaacctctggccacgcaacacttgagaaatattgcggtttcgaagttcttgagtaatcttccaagttcactcgtcgaggttgctcttcaaccatgacttcggattcaaattctgctggttgagattccccgaatgtatgtgaattataagatgatgactcagaaaagtaagcctcttccaggattggtgctattattctgtcgtgcaaaagctttctttttctttctacgttgtttcttctaaaggtggcttcaatttctaaatccaatggaaccaattcacctgcagaggatctacacatgctaacactaacaggataagcatttaatcaa

SEQ ID NO: 8187 - DNA, 417 bp, Glycine max
  unsure at all n locations
agctntgtgttatcaattacactaatttggtaatcgattaccagcgtttgtttctgaataaatcaaaagatgtaactcttcaaagggtttttgactttttcaaattggttttaagtttttctaaaggttataacttttctaaatggtcttcttgattagacatgaaaagtctataaaagcaaggctttgttttgcatttaaattattctttcaatcttgaacacttattcaatcaatcttttagaagccctaaatctctttgaacttcttcttcttctttgcaccaaaagccttctgaagttttctggttttctaaaccttgaacacttgtgctattcatctttacattctcttctccctctgccaaaaagaattcgccaaagactaactgcctgaattctttttgggtctctcttc

SEQ ID NO: 8188 - DNA, 458 bp, Glycine max
  unsure at all n locations
ntattcttaattttcttgaacttgataattgggaatttgctttatttntgacaatacactntcccattcgtcaatcctcctaccatgtaagtaagatccaagaacttcaagagctagtagtagtcctccacaataagcaactacatttcttgcaagttcattgaagtcttcttttggatttggttctccaaaagcgtgaaaacaaaaaagctcaagagactcattttcgtccatttcctccatttcataaacataatcaactntaaataggttcagtacacctgcatctcttgttgtaatgattattacagatccttgaccgaaccattcacaatttccacataaatcttctaattggcgaatctccttcacatcatcaagtacaatgagcaccctttttcctgaaagtctattctctatcatagttggtcccatcccaatgctatgtatcttgacct

SEQ ID NO: 8189 - DNA, 447 bp, Glycine max
agcttcaccttctggtcctcctcatagttgctgtatgagaaaacatggtctattttcatctcccactccaagtaggcctccggatcattctttcctttaaatggaggaatgttgagtttaataccatcaatttggttttgtctaggaacaccatccctcttctcctcctttcttcttcattatgatctctattctccatttgatccaacctctcatggagcgcatcatctcgttgtttcattaacctctccaaatgttgcatcaaagcttgcatttggaattgcgaaagccccactccatcattaggattagtacctgacatctcaaacaaacaaatcaaacgtaacaagacaattatagtggctgtttgaatacctcacccactctcaagtgtatcacacaattatggcttttctctaatgaaacactcttgccttttaccactct

SEQ ID NO: 8190 - DNA, 458 bp, Glycine max
  unsure at all n locations
tttgagcaattcaaatggtcataaatagtcactcggaggtcttattcangcacataatttatcgagacgctctaaattgaacaacggaagctctcagaaaatttaaatgctcataacttttaactcggaggtccgattcatgcggataatatatcgagacgctccaaattgaacaatggaagcttttgagcaattcaaatggtcataaatagtcactcggaggtccgattcaggcgcataatttatcgagacgctctaaattgaacaacggaagctctcagaaaattcaaatgctcataacttttaactcggaggtccgattcaggcggataatatatcgagacgctccaaattgaacaatggaagctgttgagcaattcatatggtcataactattcactcggaggtccgattcaggcgcataatttatcgagacgctcgaaattgacaacggaagc

SEQ ID NO: 8191 - DNA, 427 bp, Glycine max
  unsure at all n locations
agcttatgcgcatatttccttacaaacgttctcttgcacaagacattctattaaccaaaaaaaatgcacccatatacaatcaaggcagcttcgttacctagattatttacacgtacttccaaggtgtatttgttacttacatcacacacctccttggctaaattcacatacatgcatactcaaagcattttggggtaccaaaaattgcacatgtgtacatcttggtatttctaatacctatacatacacaaactatctacacaataaggtgctacattttatgctctnttcaagtttttgctacctaaagccgcatgcaaattcaagtatatgttcctttgctgactcaaaatgtattcaaataacaggtatacatgttttggtaatgtatcttctttacataacatgcaacatatttatgtatata

SEQ ID NO: 8192 - DNA, 393 bp, Glycine max
  unsure at all n locations
aggtcctttggctcccctatccttttggtccggcaaatcactttaattccctggcaatcatcttattccaaaaaagtaaccgattaaatcctagatctacaccttgtcttgcatttctatgggttaaaatttatagatctactcttgaatcaatgatttgtgtcgattctaagttctatcaattttcagtcataatattcttgtaccaaacctttagatataaattttcttcccaaatattgaatagaaaaaaaaacacaaaaatctaagtgtaatcacttaatccatgtngtcttagaagcatgtttagtcataataatttgcacattatgttctaacgtcggattgaatttgtatttgttgattgaatccagatacatatgtcatgtattc

SEQ ID NO: 8193 - DNA, 341 bp, Glycine max
agcttcaacctagaggagacggaccattccaagtgttggagaatatcaacgacaatgcctacaagattgacttgcctagtgagtataatgtaagtgccactttcaatgtgtctgatctatctctttttgatgcagatggaggagccttggatttgaggacaaatccttttcaagaaggagggagtgatgaagacataaccaagggcaaggaccatgaagcacttgaaggttccatgaccagaggcagacttaaacaagcccaacacgttatagagacaacgctggtcatttgtatagctgccattgatgatgattgaaggcccaagtggagaaagatgaat

SEQ ID NO: 8194 - DNA, 397 bp, Glycine max
  unsure at all n locations
ctaagctgaatagacattcgtgtgaaagtatgacatttgatttttcgagagtttccgatgtttaatttcgagcgcatcgatatattataagcctgaatcggacatccgtgtgaaaagttatgaccatttgaattttagagagttcccgatgttgaatttcgagtgtatcgatatattatacacctgaatcggaccttagtggtaaaagttatgaccatcntgaattcacgagaagctttgttgttcaatttcgagtgtcactatatgtgatgcgccaaaattggacattcgagttaaatgttatgagcatttgaatttctcaagagcttccaatgttcaattctgagcgtttcgatatgtgatttgcctgaatcggacatccgtgtcaaaagttatg

SEQ ID NO: 8195 - DNA, 456 bp, Glycine max
  unsure at all n locations
agcttctaaactntatacaagaatgaagctctgataccacttgttagacatgtggcctcagatatcttaagaaggggggttgaattaagatattacaaactgtttccccaattaaaaattctactttgattctaatgcaagttccaagttcccttaaagatgaatttctaaatgatgattcaaattaaacaatctgaatgtaactgttaagcaacaataaataaaagagtttaagggaagagaaagtgtaaacacagtttttatacaggttcggcaaagtccgttgcctacgtccgatccccaagaaagccgcttgggagttccactatctcgtaatcctttacaccttctgaaacacacaaggacatcccttcctttgtgttcagatgctttacaacaagagactctcagtctcttagccctttgatcagaaagagaggaagaagaaatgatctt

SEQ ID NO: 8196 - DNA, 462 bp, Glycine max
gtcttatttcagcagatgaagatgaatccatggccacatcatggactcctctaaggacaatagcatcatttcttgcactgaattgttgggagttggaagccatcttctcaatcagattcctagcctcaacaggagtcatatcaccaagagctccaccactggcagcatcaatcatactcctctccaggttgctaagtccctcatagaaatattgcagaaggagttgctcagaaatctggtggtgaggacagcttgcacacaatttcttgaatctttcccattactcatacaagctctctccactaagtttccagatgcctgaaatgtcttttctgatggcagtggtcctagatgcaaggaagaatttctccaagaacacactcttaaggtcatcccagctggaaatggacctcagagcaaggtagtacaaccaatccttcgccactccctccagagtataaa

SEQ ID NO: 8197 - DNA, 422 bp, Glycine max
  unsure at all n locations
agcttactctaggatcataanaaatgaatgatataagaatttgagtgagagagataacaatcaacactcgggaatataaaacatcagtatttattattcatctttattgtttacacataacaaacatcaaactacacaataactaacaacaaattttctataatagaaattctaattgaattaactgcctacaagcctaagtatatacctaagttactcttatacaacaattttccaccttaactnggtttaacacacttaatactaacaaagactcaactctgtgtcccttcaaggcaaacaaccaatatcttatctaaacaatacttaaacttgctccttggtaaaacttagttagcatattaccaagattcttctttgtagctatcttctcattttgatcgaagcccttgtaatcatat

SEQ ID NO: 8198 - DNA, 452 bp, Glycine max
  unsure at all n locations
tctaccctggatcgaatggtcacataacacctcttgtaacgtctgcacaggcacaactccttatgaggtgacgtttggaagaaagccatttaactttccagagtatatcaaaggaacatctaacatcgaagcattgaatgcttattgactgacaaagatgccactttccaaacgattcgcaaaaagcttcttaaagcacaggaagctatgaaaaagtaggccgatagcaagaggcgcaacaggcaataccagataggtgattgggtcttgctccggcttcgtcctctccaccagacatcagccaaagggcctcaaatagcttctggtaaactcgcaaaacgattctatggacccttccaggtaatagatcgcattggcattatggcctacaaactgaaattgccggagacagctaanatccaccctgtgttccattgctctaaacttaaacc

SEQ ID NO: 8199 - DNA, 361 bp, Glycine max
agcttataatggtaaaactattgaatatatatatggatattaataattatcttatatattttaaacatataaactaacatatataaaaaactaaaaataattgataaatatattataaaaaatataatatagaaaattataaattataaactcaacaccggtgcatggcacggggtattatgatagtaaattaaatatgaatggttgaatttggtttcaccctaagagacgccatgtcaatggttataattttttttcttctctttttccttcattaatataaattagcttatttgtataaaaataaacaataattagaaatataaatcgcataacaatataaaaattttatatcataaca

SEQ ID NO: 8200 - DNA, 395 bp, Glycine max
  unsure at all n locations
tgtaacttatactggcttatgcgtgatatgtgtgctaacactgaagttacagagcctcgtagttgcactaactgtcattggtaacctacacattcttttgtttgcaggtgacaggttgtaccatcttgtgtgaggctcatgaaacaagccaatgtaatcccattgaagaaaacactaaagaaattcatatatgggaaatcaacagcggcaagggtatactctangaggattttcaggcttctagcaaggaccttatagtcaacaaggatagtggaggtcacaccctagcaatcagttcaacaaagatcagggtggactttcgaatangccaatccaacaagggcctaacatctttagaggactactaagctggaagagacttttgactcagttat

SEQ ID NO: 8201 - DNA, 420 bp, Glycine max
  unsure at all n locations
agcttgcactntntgagtggaataatctctcatataaagttattgtgggtggagcataaagttccatttgatggaacattgttttaaccaaaaaaattgcaacacgcatgaaagcatcttcatcttgaatcttgatataacagataaggcttaaattatgttgtctttcttatttattcggataacttatagatngaaagcatatattaacacatgatgaaaccgtcttcttctttagggtgttcgtggttttgatcaaattcattatcctacaaatcgattcatttaataaagctaatttcttataataaactttggtgcagtcggtttgatttgctacttcgactgatctccattaacaattatgtagttagtcaaaatcatttcatttaaatcgcatactttagatagttgaaaatc

SEQ ID NO: 8202 - DNA, 411 bp, Glycine max
  unsure at all n locations
agaagtagtatatttcaccttcaaaccaattcaatcaactatcaaatatganattacaacacataaaggcgccaatgaaccgaatagcactcaaaaaagagtacatcgcatgctaaacgtgacttacaggaaacgcattatagaccatgtgatgctcaatatcaagcagctccccagtctccaaacacgaaggtctgtgaactggaaagctagttttgagaaactgttccaatcgatgcgcatcgatgtttgatctgtagcctccgtctcactaaaaccaatcagaaccacgttcacttcaagcggaactcgaaacgggacctacacgaaccacagactaaagcattcacacttaatataacacatcaattaattggatagcgaatgtgaatttgatttttgtggtgacca

SEQ ID NO: 8203 - DNA, 448 bp, Glycine max
agcttagaaagacaatacttcattcatgacatcaaataaactttaaagtcatccgcaatattcaaataaaacatatatgaattattggaaaagataaaacacaatgccaaatgtgagtgcataccactagtcatatatcattaaagtaattaagtttaagacacataatcatgaacaacctagagcacgtcaatataatcataatgttcagtcatactaagcaagtgttaaaagaaatactaagtattcaaatgtcataaaaacatagtcaaagacaaggcttaaaaacaaaatataattataatctaaatatattatcagagaatctaagcttaggtttaagtaacaaaaattagttatgaacacatacatggtgactcattacttatcttgattaattaaccactagattttaagtatgatataacaatcatgaacacatatcata

SEQ ID NO: 8204 - DNA, 462 bp, Glycine max
gtcaattcattcttctttagttcgctgtcattcttcatctcgtttacttctagtattcttttcttccgcttttacaagctttcaaccatttatttaagccgttctcttgtttaataattgataaaatgaatttcaaccgatcatttgtgttgcaatctcgtttaatcactgttaaaataaaatccaaccgatcgtttgtactgtaacctcagttaaatcaaaaaactgtaaaataatgataaaataatcaaaatatctttgaaaaaataataataaaataataaaaaaatcaattagacattttactttgaaagtttcctttaaatgagttgataataaccaagtgaaactaaggctaaaatcaactcacaaaccaagctttgcccgcaaaaatcacttgaagttgttttaaggtccaacaccttaaacgatcacgaagaactacatatgtctgagttcctc

SEQ ID NO: 8205 - DNA, 459 bp, Glycine max
  unsure at all n locations
agcttatcttaacacanaaatggcatgctaatctcctccgattagaacgaactcatgcacacgtttaatgtaacacatttatgcacaggggtatgtgtaaaatatcctactatttatgtcaatgtacaaggacatccaacacattctagttaccatacatatatatgtattttttaaaagaacacacattctcatgctcaaggcactgcgtcaaaattcacacctaatcacatcctaaatattttgctatcacaaactacctacacatatttgaagcacatatcataagactttcattggttcactcacatttatttatatgcatattggaaagctaattacgtcatgcacatacttgcatttaanaaggggaatccatgccatcatacattcatttaggaagcgacctcaatattcatttangaagatactcattcacactntgcaaggaatttcatg

SEQ ID NO: 8206 - DNA, 350 bp, Glycine max
  unsure at all n locations
tctaggccttatctcgctgctttatctacctgtaacttactatatgtatgatattttcaaaaccgagtatgtacatcggtcttaaaacgagtacgactactagtttccaaacgtgtatatcaaacgtacatcgttttcaaaatcgagtagcatacgtacatcgttttaaaactgtgtgtttcagaattttttaatattgctctgttttacaaaanaccaaaattaaccttgtaaattaaatcagacacacagacacaacatatatcatctgcatttgcttcaagaggtntagcagaaactagctagtaactattaatgaaaaaatcaatgatactatgatactatcacaa

SEQ ID NO: 8207 - DNA, 353 bp, Glycine max
  unsure at all n locations
agctngaagatgcaatgcngtgaatttagaagggagaggttgcaaganaacttttgaaatatttggagtaagtgtaagtgtaacggctgttacactttacttatccatttttcgaccaactcgcttcgcgagtcaacccactaagcgagagagagacgtttggcttctcgccttctttcttggtgggccgacatgctgggcccaatttcaaattcaaacattttatttgaactatgcttagcgcaaagtagcacactaagcgagtgtgcagataaggaatcctgcaactctcgctaagccgggctcaaggccgacttagcgaatatactgcatcttgcatacagagggggtat

SEQ ID NO: 8208 - DNA, 459 bp, Glycine max
  unsure at all n locations
tgtaggattatggggtacccatcacatgtggtactaggtggctgtcgggcgatggtgcacaacaagttttccacatccacaatgcgcgcataaacccaccatcccctgttgcccacctccaactgagctcacgtactcccacgtagcccatatcctcgtttctctcaataccgggtccccatcaatcctcccaagcttccacaacatccaagaaaaacaacattcaaacagcacaagctatcacagccaagcaaaacagagcaaaggcagaaaactctgccaaaacaccaaccaaatcacagcttttctcacttaaagaccccagtaacaattccttcgttccagttcattaaccgttggatcgactcgaaaattntactggaagtctttagtacataagcccacanttttgaccgtgggatctactagaaaacgtccagaactcactctacattactc

SEQ ID NO: 8209 - DNA, 450 bp, Glycine max
aaactaagctcttaagcgcgggtctgggagacaaaggtcaagtgttcgcgatatgcgattatgatgttccgagtactttggatttggtacgaccatgccctcctgatttccagctgggaaattggcgagtggaagaacgccccggcatttacgcaacgagcataatgtcaacctttacggctttaaaagctctatagttgggcctaggctttagagtttttccttttgttaaggctatgtgtcttttgattttgaatttataatacaaggatctttcttcatctgttcctacgtctctacccattctcattcatttgcatgtttacttcattttctgaaacgacagatccgatgacgagtcccccgaacgtactaatacctgtgacccgactatctactttcggcaagaaatgaatcaaacggaagatgaaggaaacgaggatgtgggac

SEQ ID NO: 8210 - DNA, 448 bp, Glycine max
  unsure at all n locations
agcttcaagaaaaagatggcctcagcaaattccttatttccagaagggaattctatcaatagacctccaatctttaatggagagggttaccactactggaaaacccgaatgcaaatttttatcgaggcaatagatctaaatatctgggaagccattgaaatagggccttatatacccaccacagtagaaagaagttcaatagatggtagttcatcaagtgaaagcataaccatagaaaaacctagagatagatggtctgaagaggatagaaaacgagtacaatacaacctaaaagccaaaaacataataacatctgccctaggaatggatgaatatttcagagtttcaaattgcaagagtgctaaggaaatgtgggacactcttcgataacacatgaaggaactacagatgttaaaagatctangataaatgcactaactcatgagta

SEQ ID NO: 8211 - DNA, 455 bp, Glycine max
  unsure at all n locations
ntggaagcaatcttgtattggtgcttccttcatcattcctgtttatgccttcagcaaccaagtcaaacagtaggggggccaaaggatccctttgtctcaaacctctttgaggcttaaattcagaggttgggcttccattcactagaatagatatagaggctgatgtgaggcaccccttattccatccaatccatatatcatggaaccccattcttctcatcatataaaanaggaattgtcaagacattgaatcataggctttttcgaaatccactttataaagacacacccacacacacacacacacatttcctctcaactaccttatttgcaaccagaacaccatggagctactgtctacccttcacacagacacacccacacacacacacattcacgttgggacacacccactcatactcacacacacacactcactcggacacacacgcaca

SEQ ID NO: 8212 - DNA, 127 bp, Glycine max
  unsure at all n locations
agcttgtgtttttaagggtatacgattataggctcancaaatttatagatataatgactgcctacacgaactgtatcgtggggggtatgaactgctcgacttgaaacttatggaagagaagagcaag

SEQ ID NO: 8213 - DNA, 169 bp, Glycine max
gccccctaaaacaaacactttcttcctggattgacctctatcataccctccttcttaggaagaattcgccctcgaattgaagtcaaaggtgcctacctcacaaagaatcaagtcagtaacatttaaagtggcgctcactccctcaacgagagggtaagcgatcttatat

SEQ ID NO: 8214 - DNA, 325 bp, Glycine max
  unsure at all n locations
agcttatatacccctgtctaatgattatgaagtaagttctaacttttaccatgcaagaaaaacaaaagaacataattaaaactgggttgcctcccaagaagcacttctttaacgtcattagcttgacgcttttacctcaacgggtgatatccaccttgtcctttaacttcaggacctccttaccaccctccatcacttgcaagcagacattctgatctaacataggcttgtcttcttcaaatagatcaaaattgatcttctgatcttcaaaacccatttccaatgtctttcttcctatgtcaactacacagctngtagttaacat

SEQ ID NO: 8215 - DNA, 445 bp, Glycine max
  unsure at all n locations
tggtttgtgagttgattntagccttagtttcacttggttattatcaactcatttaaaggaaactttcaaagtaaaatgtctaattgatttttttattattttattattattttttcaaagatattttgattattttatcattattttacagttttttgatttaactgaggttacagtacaaacgatcggttggattttattttaacagtgattaaacgagattgcaacacaaatgatcggttgaaattcattttatcaattattaaacaagagaacggcttaaataaatggttgaaagcttgtaaaagcggaagaaaagaatactggaagtaaacgagatgaagaatgaaagcgaacaaaagaagaatgaattgaaagcttcagattcaaaaacttaccggtcgaagaccgaagaacgaacgaagaacggcgaagaatcttcacg

SEQ ID NO: 8216 - DNA, 435 bp, Glycine max
  unsure at all n locations
agcttgccttgccccttgatatatttaagggactcatggacactatgaatgaaaaattccttgggataaaggtagtgttgtcatgtattcaaagcccgcactaaggcatacaactccttatcataagttgaatagttaagggtacaaccacttatcttttcactaaaataagcaattggatggccttcttgcatcaacacagccccaatcccaacatttgaagcatcacactcaatttcaatagatttttgaaagtttggcaacgcacgtatgggggcattacttagcttttgcttaagaacattgaaagcttcttcttgtttctctccccattcgaaaccaacatttctcttgagcacttcatttagaggtgctgccaatgtgctataattcttcacaaatcgttataaaaacttgctnaccatgaaactctca

SEQ ID NO: 8217 - DNA, 400 bp, Glycine max
tggctcaatcttcatccttttctttaaaattacagttaagtcaaggaattataaacaatcttagtcaaaatttcctattaattgaacctatattatacaactatcatcgatttttcagaaactgatgttaaacataattggttaacatcggcttttacaaaaaatcaatcctaaccaactcatgttaacattgaattttggaaaaattaaccgcgtattggcttatttataataatttttacgctttatccaattcactcatctccctcatgcttcgtcttcctcacgcttctggcaacctcgaaccctttgtcactctcaaactcactctcgcggcgctgaaaccactatcatcactgtcgctcatgatcatctaggtcttagtgtcacttctcgctct

SEQ ID NO: 8218 - DNA, 316 bp, Glycine max
  unsure at all n locations
agcttcttatcgaaggcaattcttggtggtgaatctccttcttccttggcttattccctagtggatggtgcctcccctctcctcttctccttttccttccgctgcttctccatggngaaaaatcaccattgaaggacctcattgaagctcaatgatccagcctccattgaagctccacaagcaagcttccatcacccttcttcattctccttcttcatctttctaaaccttcattctttaatcctaacttgaacaccattgtatcatcttcattttccatccaaacacattcaaactttgaaccaaataccttaca

SEQ ID NO: 8219 - DNA, 456 bp, Glycine max
cttgacttgagtcatcaagagattataaatatgtgaccatggcatgagtttcaacaataattatcatcatcaatcatctatctttcaatcttctctcaacatcattcaatatctttcaattctttctacagaattttctgattctttttctcttcatctttctaaaagttttttatcgacactttttcttcaaagaaaagttctttgttcaaaaacttgtgttattcatctttttcattctcttctttctttgccaaaagaacgaaggactaaccgcctgaattcttttgtatctctcttctcccttttccaaaagaacgaaggactaaccgcctggaattctttgtgtctctctttcccctttcaaaagattcaaatgactaaccgcctgagaattcttttgattcttcccttccccttaagtaaaacatttcaaaggactaaccacctgagata

SEQ ID NO: 8220 - DNA, 430 bp, Glycine max
  unsure at all n locations
agctntatgngatgtaaagacctgcaacttctctattgatcatgctggagaaggaaatgaagtgcaactaagtgagctagatgagatccgtttacaagcctatgagaattccaaattctacaaggagaagaccaagaagttccatgaaaacttgatagctaaaaaggactntgtggttggacagaaagttttattgtataactctaggctcggactcaagagtggtaagttgaggtcaaagtggattggtccttttgtggtggctaatgtttttccttatggtacagttgagatcaaaagtgaatccacatataagagttncaaggtcaatggacaccggctgaaaccattcctcataaatcccttcttagcggatgtagtggtggaggagaccctcttacttcaccctacttctcttccgccatgactt

SEQ ID NO: 8221 - DNA, 478 bp, Glycine max
  unsure at all n locations
acttagaaactaagcttancatttttcctctcagaagtcaaccaccactcgattcttctacgcaccgcatgatatgcgtaagtcttgtgtttggaaatcattttgttcaggtccattgaaaattcatttactcaaatattttcaattattcaataacttggcttgttcgcttaacttattattgtcatttcacttacaacaggtttatctcaaagatcattgtcccttaccgcctatggcattgatgtggtcaagcaattcatatccttaggcaaaacagtgtccaactacatacgtaggtagaatgcagtagtacttaagcctaatgacaattaaaacaacgcatgtagacctaaacaaacactgaagctgtaacatttatgtacctatatttacgattagatttgtcttgatgtaacacgtcagtattgaaacactaatgaattgttgcaagaacaaatcgatgagctggtccatt

SEQ ID NO: 8222 - DNA, 471 bp, Glycine max
  unsure at all n locations
taagtcacctgcggcatgcaagcttctcagaaaagtcacaaccaacctgaatcataaactcttttatctgttaaaatgagaacacacacattatttaaatttaaataaaaagcaaatgaatcacaaaatagtaactaataatttttcttttgatatagaaagaanttttagctttgaagagatgcccatcctaagcataaagtattataagagcaaatggtttactatcaagtcaaagaattgtagtaccacttacccatgtgatagcttttagcctagtaaattcattaggagaacttgccctctatactaggatttcagccatgcgaccataatctacagacttcaagagtagcactgttcgagtaagaaaatgataaatgaacaaaaaactttgcttttgtgtcaaagtagtagttgaaaatgaagcacaactccattaatcaatacaagcacacgctaacacatata

SEQ ID NO: 8223 - DNA, 267 bp, Glycine max
  unsure at all n locations
ctaagctttgannataatttgcttcaatagggatacacaattttcatgttgatgactatctacgaaaagaccaaagctacaaccaatgtgataaattaattaggtgatggaaaaccctctagtgcaccggaatccccatgcacagtcagagaaaaacctcaagtacaaggaattacttaaattatgaaaaaaaaaccaccacaatatgaaaaaagtgtagcctaaagaaaaacaatgtaaacaccaactaatgcctcctaccccctg

SEQ ID NO: 8224 - DNA, 419 bp, Glycine max
  unsure at all n locations
atgagtccccctatatttcaaaattcactaagtctccataggagagactagaaccatggtctttagagtgagtagcacacttctttaccaatacatccacatgaccatttagatatttggtgcaaaatatagtattattataagttttatgcgaaaataattcaaaattcaaactttattcttttttaatttattatatttntataatcttatatattggcctttaaaatataatatataagattaaattctattgtcgcataaattagaatatgtatagttatataagctttatttttattctatatattatatttttataatcttatggtattttattacgctcatcaaaactttatttagatagtaaagatatagtataacatttatcttaaacttataatttttatataaaatat

SEQ ID NO: 8225 - DNA, 466 bp, Glycine max
  unsure at all n locations
tccatcatttggctatgcatccaattcaaatagcaaataaatataatataataatcaagaaaaaagaataaaattatttcataatagaaaattcaatgcacaatcgagactcatctaaaatcacagtcatcaccatccttcatgttcatcatagaactccatcatcaactcaaactaaaagaaaaaaggtttcaccaaatttaggaattttaaaaatcaatagaaataaaaagtaaattaacaatccattgtgccattatatataatttgtggttaattcaaggattagttagacttagtaatatagtataatgcataaccataacttaaaagaatgatgcctcagaagtttaaaaaataaataaaataaagaataatgatggtagattgaagatttttccttaaatggagtttagctntgcaagaacatgaaagagcaacttgtgtctcctgctagtatgcaaat

SEQ ID NO: 8226 - DNA, 338 bp, Glycine max
  unsure at all n locations
agcttatgaacaagaaagcaaatataatgagcattatgatcttaacaagattctatcttattcattgagcaaaaggaacttatataccgattgagaatagatgcagaaactaacacaaaggcagttaccaagtttggtaccaatctattaaggttcaaaatgaattcggcgggaaaggtagttttctgttagcttgcttccctcgagcttagtggattcagatacgataataataggctcgggttccttgagacagctngattaagagccccccttaagctaggaatagatgttcatcatttccagcttggaacatcatgaattgaatgaagctggct

SEQ ID NO: 8227 - DNA, 433 bp, Glycine max
  unsure at all n locations
gtcttgagatcccaacttacactgactcgtgatttanagcaattaatagtatattagataagtgatgaattcaggtcctatctgttntaaaaaactattntaaaataagtgatatatttgactctttaatgtaatattaatatattttttattaatatctctaataaatattgctttagtttttaaatctaatattaatattattttcttttatcaatctaataagattaattttctaaaattatcattcgattctatctatttattagttctaattaatctgtctaaaataaaataaaacgacacttattttgaaatgaaaaaaagtaatatagaatctatttaacaataaatctaaattaaataaatcttatcctcaaagtcaattttttaaagggaaaattaaatattgtaacatatagtaaaagcacta

SEQ ID NO: 8228 - DNA, 354 bp, Glycine max
  unsure at all n locations
agcttatagagtagtagatcataaatggaataataatttaaataggtgaattaatatatttttaattgaaatagattaaaatagtacatatttattggaatacacaaataatacataaaatttattaataaaaaaatcattattttattaaaaaaaatattttattgaaaatataaaatttaaaaaagaatgcattggactattntaatcaacataaaaattttgaaaatgaaaaaattcaatttctctatgcaaaaacaaaattgtaaaaataaatttttttttttcttcaaacacagaattttaaaaaaaattaaactataaaatataaaaatttaaatttttaaattttta

SEQ ID NO: 8229 - DNA, 454 bp, Glycine max
  unsure at all n locations
ggtcgtaggctactgggaaattccatacgtttgcaccattgtttattctctcttgctgccccaccactagccgtagatcctcatttaaaacctttgaagatgaacattaaaacacaccaattaacagatgttggagaagacaaagatgtcatttatttaaggacaaaacttgcataatttgttttttcatgttcttgttattagcttctcaaattaaatgatgacatgtggattttcttttttgcaacatattgctatccacataccataatttgagttgagaacttgatagtaaaagcaaaatgagaacatgatcacatttgtaaagttttgtcttttatttaactactaataaataaccaatactaaaaattcaaatcatattgaattatatgcaganatatgtttggntnttaagattatctgctggcgttatgtatcctctgcaagttta

SEQ ID NO: 8230 - DNA, 447 bp, Glycine max
  unsure at all n locations
agcttgtangaatatggngtacccattacatgttgtactangtggcggtcgggcgatggtgcacaacaagtttttcacattcacaatgcgcgcataaacccaccatcccctgttgcccacctccatctgagctcacgtactcccacgtagcccatattcttcgttttctcaacaccgggttcccatcaatcctcccaagcttccacaacatccaagcgaaacaacattcaaacagcacaagctatcacagtcaagcaaaacagagcaaaggcagaaaactctgccaaaacaccaaccaaattatagcttttctcacttaaagaccccagtaacaattccttcgatccaattcgttaaccgttggattggactccaaaatttactggaagtctatagtacagaagcctacattgtgaccgttgggatctactaacaaacatccataac

SEQ ID NO: 8231 - DNA, 458 bp, Glycine max
ctttcgattcattctatgcacacatggtggtccactttgtattttgtgtatttctattcttgtttcattcgctatgttataccccctcttgacgtgcttaagccattttacttaagtcattcctcgctcaacttaagaataaaatatattgtcaccggaacgtttgaattgtatgatcccgtaactccggttaaaatgaatttcaaccgttcggtcgtgccgtagccacgttggaaatctgaaagaggtaaaaaaacatattttcatcataaaacatcttttagcaaaataaaacggaaaatcaatcggacgttttctctttgggatttctcattcttaatcgaattgattaaataactaaagtgaaactaaggctaaaatcaactcgcctagtcaagctcgttcataataataggcttatgaagtttgtcattcaatttctcactaagtaaaatgga

SEQ ID NO: 8232 - DNA, 444 bp, Glycine max
agcttccacacacccttcgtttctagaatagtggacttattttaatatgtcgagatatatagcatatgtttttacaatttgtatttagtttttattaagcaaaaaattactcgagtaaaacagaaaagtgcattcctctctatataatagtagtactggtgcttgaaggtggtgaaaaaagatggaaatgggagatttggaatattaattggtggggtattaagaagaatggctgtggcggagttgttgggaatgcagatatagagggaaaaatgcagtgtccatgcttgagaatgaaatagcaatgaacaaaaccaaaatgatgcaactgtgagaggagtgagaggccatgcctgcttcaattgtaacttcaatttcaattttctgtagaggaattaagtgtgcatattccgatacgagtggctgcctttatagacaatgaca

SEQ ID NO: 8233 - DNA, 460 bp, Glycine max
  unsure at all n locations
ntagctggagggggagtgtgttataacagtctttnttagtgttgtcataacaccttcatggtatgcttgagtttgtttgaactcaggttctgcttcaacatttgctagggagaagcaatgataagtctagtcatagcagctctaataccatgcagcttaagagaagaaacgataattcttattgcattagttagttcaagttataaagtatgataaataggaaaagtttattagaaatctgattacaattcanattaatatattaaaacaaaaaataagggtaagagcagatgaatctgattatatccttgcccagtttagtttgccaaagaacacagtcatgaaggtataagcttttccttcttttgttgctttattcttacaactctatgcattaaataagttgcttaagtcatgacatgcatgtttagtactatctccatgtctatatataaattag

SEQ ID NO: 8234 - DNA, 406 bp, Glycine max
  unsure at all n locations
atcactntggctatgcatccaatccaaatagcaaacaaatatatatttttcgtctagaaaaaagaataaaatcatttcatcaaagaaaattcaatgcacaatcgagactcatctaaaatcacagtcatcaccatcctccatgttcatcatagaactccatcatcaactcacactaaaagacaaaaggtttcaccaaatttaggaactctaaaaatcaacagacataaaaagcacattaacaatccattgcgccattatatataatccgtggcaactcaaggatcagttacacttagcaacatagaataatgcataaccataacttaccagaatgatgcctcacaagtctaacaaacaaatcaaatcaagaataatgacgtgagagtgaagattttctcttaaagga

SEQ ID NO: 8235 - DNA, 306 bp, Glycine max
  unsure at all n locations
agcttgtagggttaaagtctcacgattgtcatgtgttgatgtaacatcttgccaaacaaagtcaggttagccataactcgcctgtgctttttcttccatgccatatatagcaaagtcgttgatcctgtcaagtatgatgagctggaaaatgaggccgaaattatactatgccagttggagatgtatttttcccctgctntctttgacatcatgattcacttgattatggatctggtcagagaaatcaaatgttgtggtcctgtttatctgtggtggatgtacccggctgagcaatacatgaagatc

SEQ ID NO: 8236 - DNA, 434 bp, Glycine max
  unsure at all n locations
gctttctggccnaattatatttagtaattgcaactacataaacttatactacagaatactgatccaccttcaaaagtcgaattgatgttgtaagcaattacattcccagtagaatcttcgttcaccacagcctacaagaacaatatatggaatgtatagtgataggttgatgagattcattcctttgaaagaaattcagactgatcatagaatggcactcacattattntgaataagttntgctctctgagcanaattaagtgtattcaatgtttcagcagcgcagctgaaaaagtgaaacggtcaaatttaaagagagggtccagagacaagcttgcctaacaacctcattgactcagatctttatagttgtacccagcacacttgttngaccactgtgagaagtaaattctcatgctgagaaacagtcaaac

SEQ ID NO: 8237 - DNA, 291 bp, Glycine max
agcttaacaaacttagaaatcaagtgtatcatgaattccgaaatatagggggagtaaacgaatgcacattttatctatatacaattgtttgttgcttgcttgaatcttgatttcaggtattgtattgtcatcatcaaaaagggggagattgtagatgcaattggctttgatgttttgatgatgatcatgatgatgtgttgcaattgatgcaaatgggctttttaagattaaaattcaagacaatacttcaagattacaagtcataacatcaagatgatcactagaatatta

SEQ ID NO: 8238 - DNA, 442 bp, Glycine max
  unsure at all n locations
ttgagccaaaatcctgactcaccatanaccttgacccatggtgataatgccaatccttaccctcggaagcaaaaaaaaagaagagaaggaaaatttccaatcaaaggaaaaaggagaaggaaaatttccaatcaaaggaaaggaaattcccaatcaaagagtgggagaaagcaaaaagaaaagaaagaaaattcccaatcaaagaatgggagaaagaaaaaaagagaagttaaaaagaagaaagctcctggtcaaagaaaccagaagaaatgtgccgagaggtccttggactagacgatatctgaacaatacagaattgtcaccaaatgaacaaaagaaagaaaaggaaaccatgacctaaaagtggtcttctccctttgattaccaaccaaaatcctgtgcgctagcgactatttctgcccgcactaaacaaaaacagaaa

SEQ ID NO: 8239 - DNA, 433 bp, Glycine max
  unsure at all n locations
agcttttcctcaagaaaagcagcntttgaagtctcttgatgtaataaacccaagagtgacaacttgttctttcgtctcttggccatagaactctcagtcaagtcctctatttttcttgctagagactttgcttggctctacatgtaacaatatctgtgagaggatccattacacattaaaaaattcaaactaaatttgtcttctttgatactttaaacaaaaataaataaataaatatctgtgttcatatcagtgttcctgccatgactgaataagaggatagtttttatccattactacagcaaaatactccgttaaatcattaaatgtaaacagagtgtatntattttgagaacaattaatacacttcatctcatgtagatatatgttcaaaatgaaggtagccagtgaaaaatccactgctttaaatctc

SEQ ID NO: 8240 - DNA, 455 bp, Glycine max
  unsure at all n locations
ntacattactcctcatgcttctcaccatgtctaataagggtttatttcttcgntctgccacaccattctgatccggagaaccaggcatagtgtattgggcaacaatcccatgttcttgaagaaattttgcaaatgaacctggtgcttgtccatcctctgtgtatctaccatagtactccccacctctatctgatctcacgatcttaatttgttttccacattgtttctcaacttcagccttaaaaactttaaaggcatctaaagcttcattcttagaatgaagtaagtagagatacatatatcgtgaataatcatctataaaggttatgaagtatttcggactatttgcatccatgtctggacaacatatgtctgtatgtatgatttctaataaattagaactcctctttgcaccttcttagacttgttagtttgcttacccttaatgcaatcta

SEQ ID NO: 8241 - DNA, 294 bp, Glycine max
agcttcttttggaccttgaacaagcaatcaacttctctttcagaaccatgctatgtgctcgcgactggtccctttctttccttcgcaacttgagttcattattgctaccccataaagctccgcgaaatttgttccggccatactcttccttgcgagccctcttggtctcttgttcaagggctcttgcggtaattgcattctcttcccgtaacccggcgcactccttccgaacgtgtgtagcagccaacttgaactttctcttggcgagttttgcctttcctaactcgcttttga

SEQ ID NO: 8242 - DNA, 452 bp, Glycine max
  unsure at all n locations
ggctngtggngcttctatggaggctggatctttgagcttcaatgatgtcctttaatggtgatttccaccatggagatgcagcggaagacataggagaagaggtgagaggaggcgccatccactatggaataagccatggaagaaggagcttcaccaccaagatgagccttggataagaagcttggagaggatgcttcaatggaggaaaagaaagagggagggaaagagagagggaggagcacgtaaattgaggaagaaaaagggagagaagttgaactttgagttgtgtctcacaagactctcattcatcanagttacaacaagtgttacacatgcttctatttatagactangtagcttccttaagaagctntcttaagaaaactttcttgagaagcttctttgagaaaacttccttgagaagctagagcttagctacacacacccatcta

SEQ ID NO: 8243 - DNA, 346 bp, Glycine max
  unsure at all n locations
agctnggctgcattgtgcagagttataacattttgattnttcaagttcttgtctgtcgacttgtcttgagccttgcatgttggtttcagggaaaattaattatgttcatttgaaagcagtagtataagatatggtctgaaagtttgaaccctagatgaaattgcttgcattatttctttgtttgataaagtttaataaaactattctcatagcttatttgtcagtcagtgcactttatggaaatgagagcaaaaaggattgtgtttgatttccccaacctgaaattcccacaccactgaatgtggttcacaaccaccattccgtgatattttgcctctttatctct

SEQ ID NO: 8244 - DNA, 53 bp, Glycine max
ggctgcagtaataacataccactatcctgaagaatatatctcttggatatatc

SEQ ID NO: 8245 - DNA, 343 bp, Glycine max
agcttatctcacttttttcttattatcttctcctagaagctctggagaaatttatccaagcatgcccttagtaattattttgctggaggtttgcttgctatacttggctatatttacttttcttttttaaatgtatgatgataatactaatcaatgtttacggatgacaggctcacacagtgcttgagatgaactatactgagcagcaattaacagcagctgtcgtttctgatggattacggcctgtccttgctgccgatgacttgggtataccgtcaagattattatcaatgattaaaaaatgctgggatgcagatcctaataacagacctgcttttgatga

SEQ ID NO: 8246 - DNA, 433 bp, Glycine max
  unsure at all n locations
cttcactacatcaagaatcatcgggttgagtcttctttgtggctctcttactggtttagccncatcttctaaatttattcgatgcatacatgtggatgggctaataccaggaatgtctgccacggtccagcctatagccttcttatgcttcttgagaactgataacaacttctcctcttgctcatcaacaagggaggcagatataattactggaaaacttttgctatcatccaagtaagcatattctacatttgatggcagaggcttcaattctggtgtggatggctggatagtggcagaaagagatggtttctcancctgtacctcataaagaaagtcagaggtattgtgtacttctgacacatgcgtatttctatctgactctatanattcaatctcaagagggtaaacatcagcagacatggtatcaata

SEQ ID NO: 8247 - DNA, 452 bp, Glycine max
  unsure at all n locations
agctntgagggtgcgtagcccaccatcttttcatagtagagtatcgataatgtgtctaccatcacgatcatcgtctccctttttgcacatgttctgtagttgcatcctatccggaaccatatcagaatagtactgatactgcctaacaaaggcaaccattaggtccttccaagagtggactcgagaaggtttcaggttagtgtaccaggtaacagctaccccagtaagattttcttggaaggaatgtatcggcagttcctcatcttttgcgcatgcccccatcttccgataatacatctttagatggttcttggngcaagtagtccccttgtacttgtcaaagtccagcaccttgaacttgtgaatgaccatgtttgggtattaagaacaactcttctaggttagcaaaggcataatcttcacctccttcaatggccctgagcctttccttt

SEQ ID NO: 8248 - DNA, 429 bp, Glycine max
  unsure at all n locations
gcttgtattgatacacacatactgtaatcgattaccagagaagattntcagacaatattctcaacagtcacatcttttcattgtgttcttaaatggccatcaaaggcttatatatatgtgacatgagacacgaatttgctaagtttttttcagaacaaaaaggtcttatcctcttaacaagcaaaattgttttatcctcttacaaattccttggccaaaacactcgtgattcaataaggaattatttgagtgctcaaattgttcaatctatctctttcaagagagatttcttcttctcttcttctttattctgaagagggattaagagaccgagggtctcttgttgtaaaagaattctaaacacaaaggaaggattgtccttgtgtgtttagaacttgtaaaaggaatctacaagatagtggaactctc

SEQ ID NO: 8249 - DNA, 353 bp, Glycine max
  unsure at all n locations
agctntaacctcatcgtctctcacagtctttagatttgggatccaatccaatccttgtgttcggactctcagccacttatgatagccgccgatgatcccattactgcttcccctaagctctctgtcctttcttcacgccgcatcccatgccttgcgaactccttggagtaccctcaggttgtggtcactgaaaccccgtgcgatgaaaggcgtgatgctttcgtctgatggcactcctctcatggggtagccaagctgtcttatggcgaggacgggattataattaatacaaccccttgttcccatcaagagaacatttggacatccttcgcatgaagatagaatcctgattc

SEQ ID NO: 8250 - DNA, 366 bp, Glycine max
  unsure at all n locations
cttagcacttctgtatggtttcagggctttccatcagctctgattaatctgccatatactcagccggtattacgcctcatgagctttctcatatccagcttactggatttagtttgggtgacttcccttttagatacttangtgttcccctcttatcatcgagattaaatgtatgtcattatgctcccttgcttctcaagattactggcctgacttatggatggagcaagaagtctttatcttatgcangtaagttagagttgattagagcacctattcaacgaattgtgaatntctggatggagattctctctttgccgccatctgttctggaccgaatcaacgcttcgtgccgtaattttctgt

SEQ ID NO: 8251 - DNA, 464 bp, Glycine max
  unsure at all n locations
agcttcttgcgtagccgctcttggtgctcagattatcccaaaaacaaatccctcttattactagctattntgaattctntagttcctgaatgtacaaccttcaaattgttataaaaagtctattacatgtcgctgtgttttttaattgtgatttggggcaaccatgttataaaaagtctattacatgtactgaacagtcacctacggtatgcttgatggaatataaatactatatctttagaaatacacatgtacatggcatccttaggacttcatccagctgatgtttgtcgccagtttcatcatccaccacccttttcttctctgccttctcacgtttgttgttgtaatcccatatttatgccttcttcccttcatgtcttggtttatcacaactctagccgaatgtcctatcttcagcacagttgaatctcttgtcttattctccaatgacacactttgat

SEQ ID NO: 8252 - DNA, 414 bp, Glycine max
  unsure at all n locations
tatgttcttctaacagttatatctcttgtgaatgacctctttgaccagacatgaagagtctataaaagcaaggctctgttttgcattnttaatcaatctttctaacaacaatcttgaatacttttgcctttccaatcaatcctttacaagccttgaaatctctttgaagttcttcttcttcttctttgtacgaagagctttctgaagttctctanttctctaaaccttgaaaacttgcgctattcatcctttttattctcatctacctttgccaaacagaagttgccaaggactaatcgcctgaattctttatgtgtctctcttctctcttttacaaaagaacagaggactaaccgcctgaattcttttgtgtcctccttctcccttgtcaaagaattcacaacgacacagtct

SEQ ID NO: 8253 - DNA, 361 bp, Glycine max
  unsure at all n locations
ttaagtcgcctgcngctgcagctttggcaaggaagaagaagattataaattttngcaaagttctctcaacagtggctctaaagaattgttaanaagttattgaaatgcaagtcaaggtcttgcttttatagactcttcatgtctggtcaagataaccattggaagagttataaccttgagaaaaacctcaaaaccattggaagagttacatctcttgattnttattcaaaacttgtcactgacaatcgattaccaaaaccatgtaatcgattacacagagcattttatgaaaagatgtgactcttcacaattgaatgtgaatttcaacgttcagatacactggtgaccgattaccaataca

SEQ ID NO: 8254 - DNA, 353 bp, Glycine max
  unsure at all n locations
ctgcacaagactcttaatatttgaagagtattcttgcggaaccttcaaccgatgaagacactaacaaaaacttatattcttctttatggacaaagtatggcaagcccggggcaagcaaattttggtgccatcagaccctggatgcaactgtgatcgaatccacatatcagctagatcttgatgggtattcaagccatccttcgtcttgccttgaatgttaagaagcgtccccatcacactgtcacatacatttttctgcacatgcataacatcaatacaatgtctaacgtctagatcataccagtacggaagatcaaagagnatggacctcttatttcatatgcaactcttac

SEQ ID NO: 8255 - DNA, 331 bp, Glycine max
  unsure at all n locations
cacaatagagatgtagcgaaagataaggagaagaggtgtctcacaagtttcacattcatcaaagttatgacaagtgctacacatgcttctatttatagcctaggtcactaactatatgagagctctcttgagaatcttctttgagaagcttccttgagaagctagagtttagctacacaccccctctaatagctaagctcaccttctcgagacatttccttgagaagcttncttgagaagctagagcttaagtacacacaccctcttaatagttaagctcacccccatgcgacaatacatgagaaatgctagctacacacatctccctaat

SEQ ID NO: 8256 - DNA, 420 bp, Glycine max
  unsure at all n locations
agcttggaaggaaacaccactgtcgttgttaattatggatccatttggaaaaataaaacctaatgtggagttcacaactgtctgactgcttgtctctcccaagaatgccatagttntttgtaagacttgggttgatactgaaacttgtgctttcttacaaggttaggttgtgccatatatatagatgagttctaatattagtgctgcattttttaaagattgaaaatacgcatgcacatgctttctgtatgtgttgtcaactacacgaatgacatgacatgctttagcttcctgacacccccatcgttgtatctacaaaaagggaaaaaaagattatttactcatcataccacttcctgganaactattgaggttaacccattcaatctcattgatccatcttgtaatgttatcaacata

SEQ ID NO: 8257 - DNA, 326 bp, Glycine max
  unsure at all n locations
gctactntatgctttcagcanagcaactttacaaacttaatcgctcggatgcttatattatcctgaccagtgttactattntaatatatggcatatatggaataatgagaagggtctctgaaagatattntatatacagatgtcctacaatcttccctaacaaactcatccactcaatctcatattatgcaggagtacctcaatgtgtgtccattataaaatatgacggcttatactgtcattcttggtaatgaatagatatgggtctacgatcaaccatacgatgacactgatctccacatctacattggatatcatataaatga

SEQ ID NO: 8258 - DNA, 393 bp, Glycine max
agcttatccggcctctcatcaggagagccttcattaagaaatactgcatgcccaggcaggcacaggagcagctagctacagatgcaccgtcaccgcctctacaggagacaccatccctggggtctatctctgcccacttgcagaggttagaactccagatgcaaacatacatgcaacatgtgactagccagaaggcgactaatatcaagggccaggtgcagctaaacgagactttctaccagtacattatgcaccagcagggccaggaccccagtcctttcccttggcctacccccgagcagtttggtgccacagtggccttgcctagagatgagcccaactttgagacaggggcaagacctataggggcccctagggacgacagaggagctt

SEQ ID NO: 8259 - DNA, 408 bp, Glycine max
  unsure at all n locations
ctggtgaatatgtccacgagttgcatggaggatgagacaggatggagctctacgagacccgcggtgactntgtggcggataatatggcaatcgatctcgatatgcttagtgcgttcatggaaaacgggatttgttgctatctgaattgcagactggttgtcacaatacaaggtggctggctgaatgaatgctacaccaatgtcttggagaatatatgttagccattgcagctcacaggtagtagatgcgagagcttgatactcgacttcggaggagctgcgggagacagcggactgcttctttgactgccaccaaatgagtgaagaacccagatagacaaggaaccctgtagtggatgtttgagaatctttacatcccgcccaatctgaatcactgaaagctcgaagt

SEQ ID NO: 8260 - DNA, 435 bp, Glycine max
  unsure at all n locations
agcttggatcagccatggcctacagttaatgtcaatccagccactgggagaggatcaacccctcataaagagaagtttcatagttatctgggagttgtagcacgagagaaaattcctattgtccactccaattggaatgttgtaccagaaactttaaagaatcttatatgggatgacatttttgtaagtccttatttaagttgacatttgtatatgatttcatataataattgcaaaaatattatatttgactaattgttactgaacaattttgttttggagggcaaatttgacatccccgagggtggcaatgcgaacaagaaggtgatgtcaatggtcgctactcgatgagggcaatttaagtccttcctgacaacaaaatatgtttatgctaatagtcanggtcaagcanaagatgatccttctattaagtat

SEQ ID NO: 8261 - DNA, 411 bp, Glycine max
  unsure at all n locations
tattcctttctcatgataagggatattctatattacttggttgatatggaccaaccttgagataaacacgtcgtatttcatctctttgatcaaaaggaaactcccacatcattgaacgcaatccaggatcttgctctatattaataacatccatatcttctacttcaattcttctacattttaaaggttgtacttcatcaaattaaattaacaatcttgtgtgacatttgaagcttgtggaatacgaataagctgagatgaatcaataatattattgttgtctttcttctttaagaatgaacaaagagttttttgagttgacatcttcaacaatacacctgtagtatatttcttttacaaacaaataaacatacaaaataaaagtaanataataatatattaagttaagat

SEQ ID NO: 8262 - DNA, 556 bp, Glycine max
  unsure at all n locations
cgcgcatgacccctggttgacgcgttgataccctgcattccgcgcacatagatacttcgccgggtagatgtatcacgcgttgaagactgtagatacacaagatcgaacgaggaatctttgaagaactgtcgagaatctacgcgtccttacttgacgaacacgttacggaaacgttacagaagcgtctcgggttggattntattgaccgagataatttttctcagcacattctcatgagagagaagtgcctaaggggctgaacgctattcttcatcacttcttcccctatntatagcaaaataagggagaagcttgccgaccatctcgtccaggcgagcaatggtgatctctccataagaacaaccttctggaggaatcttatggagggccccagtggacatggatgctatatacacaccccttctactaaatgcacgccttattatctgtctgcatatttgttgccgaacgtacagacttactaattacgacgatactgctttctgttccggcggtacgaatcctacggattgtgattactcgcttgcttaagacg

SEQ ID NO: 8263 - DNA, 338 bp, Glycine max
agctggcaagtaccttagataggggttaattaatataacagcaggcctccagaaaatatggatcattaattcgataatatggatgatgtaaattattagttctcctgcagaagtgaaaacatactcactgcttcacaatacaactttttttctacaacggatccacctgtcttttctcccttgtgttaaaatgaatgtgactatgggtgaccatcaaatattccttatttttatccccaatacatagatcaataaaggccagactcaaccttatacaaataaaagtcccaataattcttaagacataatttgtatatagcatgccaaggacatgacac

SEQ ID NO: 8264 - DNA, 414 bp, Glycine max
  unsure at all n locations
gactatatcaaactcattgatgtatgccgtactacaattatgtgcaacacaacagacatggatgatgtgaacaggaacgagacattcaacgtgctggcagaagattaaactacctgaacatgcattgctaatcttctgtctacacttctttcataattctgctaagatcctttatgcactgctgggtttctacaacacatataagaggccaatttccctccattcaagtgtgttaattgaaccacaaggttcacaactagtgcctctctttcttcatacctgtaatgcgagattntccatctttcattgtcttatcatcacagggtaactgaactcgctgtgatttcatcttaattgatttaaccaacgatgataattcatatatatctttcgttgacttcagagcatctaatc

SEQ ID NO: 8265 - DNA, 126 bp, Glycine max
  unsure at all n locations
agcttctatataagctgaaccatnttatcaatattcacatgttgagttttactcagaaacacagagtttatctctgtatttttaggagagtgatactcctacattctttattgattctagaacacc

SEQ ID NO: 8266 - DNA, 409 bp, Glycine max
  unsure at all n locations
actcctacatctcatctgtagcatgcattttctttctttacccactcctcacgnttggttttttatggaaaaacaccataactaaacgcgccgcaagggatccctatcgcaccagatccaaatctagaacgatgggtgatcaagaggagacacaggaacagatgaaagccgacatgtcagctctgaaagaacaaatggcctccatgatggaggccatgttatgtatgaagcanatcatggagaagaacgcggncaccgccgccgctgtcagttcggctgccgaagcagacccgactctcttggaactacgcaccagcctctctcanacatagtaggacggggaagggacacactgnggcacgatggcagtcctcacctgggatacaaccgagcggcttacccttatgga

SEQ ID NO: 8267 - DNA, 402 bp, Glycine max
tggctgttttccaaggctacacgagaaaataaggcttgcaacactcaagtgtttctgctctcgggaaaagaagcatttctcacacaccagaagacatatcgcagatcgaacggtcagatcatggacatttgtcctatgaacgtccagatcaaatttcgagaagatccaatggtaaatgaatgtaggagggcgcttttaccgagacagctcagacaacttccttgagaagctttctcgtgaggcttccttgagaagcttctttgagaggcttctttgagaagctagagttttaactacccacacccctctaataaataaactaacctcctagaaaataaaacatggataaaataacacaacagataaaatcaaacatcaattatcattgctaataatattcca

SEQ ID NO: 8268 - DNA, 473 bp, Glycine max
  unsure at all n locations
atacaagaatgaagctctgataccacttgttagacaagtggtatcagatatcttaagaatggaggttgaattaagatattacaaactatttccccaattaaaattatatttcactttctattcaagttacaaattcccttaacaatgaactcttaaataataattcaaatagaacaatctgaatataaatataaaacaataataaataaaagagtttaagggaagagaaagtgcaaactcagatntatactggttcggtcacacccttgtgcctacgtctagtccccaaacaacccgcttgagagttccactatcttgtanaatccttttacaagttctgaacacataaggacanacccttctttgtattcagaattcttttacaacaagagaccctcggtctcttaatcccttagagaaatagaaagaagagaagaatgaatctctcttgacagagactagatttacaatct

SEQ ID NO: 8269 - DNA, 419 bp, Glycine max
agcttcagagggttacgtcactcctttagcatctgtgatgtatatataataaaagctctctcggcatactcctctgtaatgtgtgaaaaagtaataaatgttatattggaactatattccaaaaggaatttaattggtggcattaagactctccacttacattattagttcattcaatatgggggtgatggaaatattcttggtggtagtgatcgtgaaagatggttgtgagattgatcatggcaataccttcttgaactaaccagtgttacttatcatgggttaccaaacaactgacgttgatcatgatgacatggtgacatttgtacctaacttgtactaattaacgagagttacaaaacatgtgctataattgtaatgaacggaaaggaatttttctttttcaacaaattgcaata

SEQ ID NO: 8270 - DNA, 434 bp, Glycine max
gtatatcgatcttgataatcctttggccaaggaattaatggaagtctatgagtccatgggcgacacattatcctttcaatatgggggctctgcatgacaccatagggtaatctctctaccttctggagttgggactttatggattatgaaatgtcatttgggatcagaatttctacacataattattatatttaagatatgcatgagtttatcttaagcttaacattgaatacagaatgacatcagttaatctaaatctgacagcttattgcttctattacgatgtctcgaaatccaatatatatatgccattttattgtattgccaatcttctgcactccgcttaatttgttgaggcttggatactatatggatgccttattacatcacatgattcttgtctaactaggtcctatacttttacaatcataact

SEQ ID NO: 8271 - DNA, 400 bp, Glycine max
  unsure at all n locations
agcttatgctgcanacatttacaatagacctcctcaaccttatcagcaaaatcaaccacagcagaacaattatgacctctccagcaacagatacaaccctggatggaggaatcaccctaatctcagatggtctagccctcaacaacaacaacatcagcctgctccttccttccaaaatgttgctggcccaagcagaccatacattcctccaccaatccaacaatagcaacagccccagaaacagccaacagttgaggcccctccacaaccttccctcgaagaacttgtgaggcaaatgactatgcagaacatgcagtttcaacaagagaccagagcttccattcagagcttaactaatcagatgggacanatagctacacaatngaatcaacaacagtcc

SEQ ID NO: 8272 - DNA, 446 bp, Glycine max
  unsure at all n locations
gctccttaactgcacaaggctcttaatattngaagagtatacttgtggaactcttacccgatgaagacactgacaaaaacttatcttctcctttntggacaaagtatggcaggctgngggcaagtaaattntcttcccatcagaccttggatgcaactgtgatcgtatgcccatatcagctagatcttgacgggtattcaagccatccttcgtcttgccttgaatgttaaggagcgtcccaatcacactgtcacaaacatttttctccacatgaataaagagtttagtccncattgagcatttcaagaagagcatggagggagtgtgtcacaattcggtgaagcagaagccctttcttggacaataaagagtggaatacccanngtagtggtcttgactatggcaatgacttcgtgcaatgtctggagacaaacaacaaagttcta

SEQ ID NO: 8273 - DNA, 357 bp, Glycine max
  unsure at all n locations
agcttctatataagctgaaccatcttatcaatttagacaagttgagttttatgcagagaattagagtttatctcttttatcttagtgagagcgattcttctaaattcttgagtgattcaagaacaccttggctgtatcaaaggactttcacaacctttgtgtgttgcccttgctggaaagagtgaatctttccttcctttcatcatcacccttgttctttcanaccacaattccagaaaatccacctctgcccagaattatctcgtggccataactcccattttacgcactcaaattaagtgattcttgagcctaaattgaatntcagaacgagacctttcacctgcgtttggaatc

SEQ ID NO: 8274 - DNA, 440 bp, Glycine max
  unsure at all n locations
catgggaccaactcattntatttcacaatgtcgtatctagttcatgtctgatagaccgtacaagtttactagcgatttctaattatgtgggtcattaagtctatcatatgctgacaatagctgagaagcccgtgaatttcttcgggggcggagtaggtgtctgccatcgacttggccttggctaacaatcggagaaaggctagactcctgttcacggcaagagcaaaccgatccatccacatggatgcctcttggtgtacagagtcgatcacccttcctctagcctctttctccgcgtatacttgtgcatactcgtccgccaccctatgctcgtgggccgtggctagacctaacacctcttggtactcggtgatgatagctagcatgttggtctctgtctaccataaacgctgagacaagcgtctcttggaccttgaaca

SEQ ID NO: 8275 - DNA, 420 bp, Glycine max
  unsure at all n locations
agcttctcattntccaccacaagtttatcaatgatttgtcgctgtttcataacatagatccataataataattaataaggctgataattgaagtgaccgaaccattcaaaaagttcaaaaaaaagtacactcctgtttactaaggttgagaataggtcatcatttacaaaatcaattatgatatgacacgttggctacaaaatcaacagtaatcagacaaaatgaaaaattatataccgtctgaagtagtttgttctctggctgcatgagtccagcctacaatatatctttgaatcagattttcatataatatttgattaactcgggaaaaactctcaaaaagagaaaatgagggaaaaatgtaaaanacgaatattctatcatccacattcatactgattgaaaaatgaagatgattta

SEQ ID NO: 8276 - DNA, 342 bp, Glycine max
taaggaagcagctccattgatatcatttaatttatgcaatgcttaagcccgaataagagaacttgtatcacaggaaaagatctaatccaagtcgaattagggatcatactgattgtggtggtaaaactggcttgaagtagccatctgggtaatatccaaaccacgaagtttcctttggtattaaaacagtgtcgtgctcaaactgttaatgtataaaataagattacaaatatataagcttttctcatgaaatcaattagcaatattctattcataatatcacacaaatacattcagaggacttaccatgataagtaccaaattctgctagctactaaatct

SEQ ID NO: 8277 - DNA, 399 bp, Glycine max
  unsure at all n locations
agctntctacactgccagttaacaatgtatgatctctaccttagtttgttgctcttcttagtaagttcttaatcagtgcggtggcattgtccgaaggttcttatcaaattattgggtcattttgtccacttggctaaccatataaaagtatcaataagaattgtaatgtggggtttcattttgttgtggctgtggattgtgctttacttggttttcaagcttgacgagagttacacgccgagcaaagtttccatccatgccggtgatggttttcacaacttgaaggtaaatttttactttattggcttggtgtcgactttgggaacatttttatgagattaagaccatggaactcgtgaagccaactgggtgggtttatgtatccttgtatggagctga

SEQ ID NO: 8278 - DNA, 371 bp, Glycine max
  unsure at all n locations
attctaacctcgaaattcaagaaaacactttgatntattatgttnntgggataaaaatggtcattgaccaatccctattctatgacttgacccaattatctagtgaaggtgtaccatttgaaggtacactgaatgatgattggaaatttgattactttgcgcatgatgcccgccagttggttttcaccaactaagcggatatgaccggaaggctttttgccggatcattggctcttgaaagccgtatccttcactatcttattgtgcgtattntacttncaagatcttcanacattgcacaagtttctaaagaagatcttattgtcatgtgggctttcatactggccaacacattgatggggcacacttag

SEQ ID NO: 8279 - DNA, 401 bp, Glycine max
agcttctcatagaagcttctcaaggatgtttctcatgatagcttctcaaggaagcttctcaaagaagcttctcaaggaagtttctcacggaagcttcctaggctataaatagaagcatgtgtaacacttgttgtaactttgatgaatgagagtcttgtgagacacaactcaaagttcaacttctctccctttcttcttccttcaatttcggtctcccccctctctctttctatacctatttcttttcctccattgaagcatactctccaaacttattatccaagacattctcttgatggcgaagctccttcttccatggcttattccctagtggatggcagctcccctcacctcttcttctttatcttccgctgcatcttcatggagggaaatcaccattg

SEQ ID NO: 8280 - DNA, 426 bp, Glycine max
tgtcagttataatatataccgtgctgagacatcaagacaacattatacaataacaacaagggtgtctgcaatcatcattcacttggacgatatttctagttcaatcaaatagggtcactagtcacaacagcaataatctctcaaccaaaacatcaagataaaaaacaggataatgcataacaattttaagataaaagcttgtcataaactggatgatccactaatccaattgacagacaattataaatggatcattctttcttcttttactggaggagcttcggaatagattgactctctctacgacccatcttattgacgggaattatcactacgttagcggctcactcggttactcgagaatccaaattattctatttcctgactgtagcaatgcatagcggtcaataggaacattttcttctc

SEQ ID NO: 8281 - DNA, 442 bp, Glycine max
agcttgagacccatcttcaagaaatatacaagactcaacacaaggacatgagttcaaatgaaataggtttagtaacagtaccacctatgtttcatacaaacaacagagcgagagtagatttcacttcatggataactaccctgacctcatcattggaaattacactgatggaaacttggtatgatccttaatggcttctaaacttcgactaacttagcttggtttgtggtttgttaatgctactatggtcataacagtataaacacactacaaatagctaggttgttttggtgttggcagttctctaaatgcaactcaatgttgtgtaatagagttagggctgtcgacattacctatttcacgacctgagttagggtttgaggtagagactgtagctatgggccgcttcgctgcgcctgactttgacggacacaatatgcac

SEQ ID NO: 8282 - DNA, 388 bp, Glycine max
  unsure at all n locations
taagttcatgactgcacaatgaaatgcatggaaattgacctgtacgtagtccagattcctcttccaccatttgatatattgattntggtatggacatatttcttctcaaatagagttttcgcaatgagaaaaatgactttcaatgttgtctaatgtgcctaataaactatgttgcaaaaattaaattataatcactcttaaaaataaaaagaggacacgctaaaagaaaataaatttaaatnctaaaaaagccaaagaaataataattaaacatacccataatttcttcatagttgaaaatataattaaagaacagtgatgagaatgatttaaaataaagtataaatggtcacttattaaatngaatttggaagtaagtgataaatat

SEQ ID NO: 8283 - DNA, 312 bp, Glycine max
tgatgagaacttcatgtcatttctcgttaacgttttgccaacactcaggtggctagatgacgaagaattatcttgacaaaggacatgttttaacccagtgctcatctggtgctcattggcatcacatgctacattgctactatggattgtgctaataatagtgggcaacatattgtactgtccatacataatatcaaagtgacgccttgatgagtaagacaagctcctttttcaaatctgagtgcttcgccttagtcatggagaaggtgcagtgtatttatacagtccttatacatgtacacgatctatgat

SEQ ID NO: 8284 - DNA, 381 bp, Glycine max
tctaacatatcgatcgggtgttagtacagaggaactcgtcttactagcacatcaataatgtcttgcctctttttcattcatgttttatatcctcataactctaattcttattcaaacacacaattctatgaataaaagaatcttaattaatgtatttgaaagtcttaaaatttaaaatgtctcaacattttagatttctccatccaaacacactctaaaggaataaaataaaagaagaaaagttgaattacattcatgaagaaaatcattatctccaatttctttttatttatctatacgttgtttaatggaaaccacatactacaatcaatcttcttaattgtaataaaatacctatacaatttctattccttgcctttc

SEQ ID NO: 8285 - DNA, 364 bp, Glycine max
agcttaaaacaataaacatgtccttcttttaattgtctttgggctgggcgaccacgagcaataaagtacttttggcacctacaatatgttgacttcgccaacgctgatattggaatgctgcgacaatctttcaacaacttattcacacattgtgataagctggttggcatgtgaccatatcgccgtccagatgcatcgtaagccatgctccattattcctgtgagattcgtcaatccatcttgctatagctggactcaattgacgaaatttttctaagttttgatcaaacacatgcttgcaaggagtgtacgctgcatcaaatgtgttatcatcaacagctgtacgtatacatgaaactcaaat

SEQ ID NO: 8286 - DNA, 146 bp, Glycine max
atctgatcatcatgacttgataaacgccatatacaaatcaggcacatgaagagggcgagaatgagggacaagcccatgctgtgactgccattcctatacagcccagtttcccaccaacccaacaatgtcattactcatcgaataac

SEQ ID NO: 8287 - DNA, 440 bp, Glycine max
  unsure at all n locations
agcttgcatttggaattgcgaaagccccactctatcattatgattagtacctgacatctcanacaaacaaatcaaacgtaacaagacaattatagttgttgtttgaatacctcacccactcaagtgtatcacacaattatggcttttctctaatgaaacactcttgccttttaccactctaattccccttgagttcttaggcaattcaagagattatggccacaacaaagaacaattcaccaatatgtgtaaggtaaggctagagagacaaggaaaaggttaaccaagaaaaaggctaacaatggttttaggcacaaatgaaggaaataaaattcagaatttaggaattcaagtaacaatccttcatgcaaccaatatattaccttaaagagatttttttaaagtcttaagcatgaaccatcagccaattttttttttta

SEQ ID NO: 8288 - DNA, 457 bp, Glycine max
acatgcctcatgacacctaagcacacttagtggagaatcttgaactcgatattggattagtgggctgaaccatatatgaaattcactaatcataattagtgaaatattggctccacaaattcaatttcaaattcaagtgaaatttgaattgaaattcaaatttccctccaattttgtgtgacacttaggctataaatagaggctatgtgtgtgcatttttccaactttgatcatttaaaaattaaaattcaaattttatagctctcttatagtacaaaatttcgtgcttttctcttgctctcacttcattcatctgcttcttcctccaagctcttatccattggcctctatggtggtgagcttcttctacgctcatcttctccttgaagtggcgtctcctctctctcttccttctccattccactggcattcatcttccaagaagcaaaggaatcca

SEQ ID NO: 8289 - DNA, 475 bp, Glycine max
agcttagctacacacacccatctaaaaactgatctcaccttcttgagaagcttacttgagaagctagagcttagctacacacacccctgtaataactaagctcacctgcttaggaagagaagctagagcttagctacacacccctataatagctaagctcacccccatgacaaaatacatgaaaatacaaaaaaatcctactacaaagactactcaaaatgccctgaaatacaaggctaaaaccctatactgttagaatggccaaaatacaatgcccaaaagaagaaaacaaaacctattctaatatttacaaagaagagtggacccaaccttgacccatgggctcaaaaatctaccctaagggtcattagaaccctaaggccttctttatcagctctagcccaatcctctaggagcctcttgctcatggctctggtaactggtccttttctagggaggatagcatcacattatg

SEQ ID NO: 8290 - DNA, 363 bp, Glycine max
  unsure at all n locations
ctgagaggaacgaggattatggctacgtgttggtacgtgagctcagttgaaggtgggcaactggcgatggtgggttcatgtttaatttgtggatgtgggagagttgatttgcaccatcgcccgatcgccacctattaccacatatgacgggtaccctataatcctaccagcttgaagtgagaaagtgtggaagagtcaatctgtctacctttatttgatgactacagagtggcacctggagatatgtctcaggggtcaggataccttgcggacgttctgtggagtgctatttnccacaaccaagcttgaccaatcccgacccaacccaggcataatcagtcagtgagaacctgtgacatacct

SEQ ID NO: 8291 - DNA, 466 bp, Glycine max
  unsure at all n locations
agcttgtgccttttcacgtctggaatatgaatgtagcatatagatccaaagacccttaggtgctntgttgatggcttcttcccgatccaagcttcaattggagtcttgtcttttacagacttagttggacatctgttgagtatgtaaacagcagtgtagactgcttcagcccagaatgtgttaggtagtcccttctccttgagcatcgatctagccatctccataactgtgcgattctttctctcggacactccattntgttgagaagaatatgcgactgtaagttgtcgctcaatgccttcatcctcacaaaatctttcaaactcgcgagaggtgtactctctgctgcgataacttcttagtacttttatccgttttccactttggatttcagcaagggccttgactttttgaatactccaaagacttcttgattttcttttagaaaatatacccatgtcattct

SEQ ID NO: 8292 - DNA, 368 bp, Glycine max
  unsure at all n locations
ctgaaactcatgatgtaatgttctaactatctatttaatgttattntctagtgttctttttgcttctatctacaattattttacatgcttgtggcttgatcacccatttgtatgtttagttaggttctttagtcttggaaaatgctttaaaaccttataacttgatagagcatgctacaaatctatttgtgtacgaatgaaatacacgactctactatattttacattgtatgtttagtacaactctcttagaacgagtttcgtgatgaatcaagaacaaaaactaagagagttaggctcgatcattcatgtgaagaatcatggtctgagtattgtctcagtgtacgaacactaggataatattaaat

SEQ ID NO: 8293 - DNA, 494 bp, Glycine max
  unsure at all n locations
ggatcttaagcaccgcggctgcagcttgtgggtatctgggccggatccctgaacttagattaatgagttaagcttgtgaacatgtctctactacgccttaattaattttanttatcgtgattgtacgtaaggtgttgattaatttattaacgttttatataaatttcattagtgagataattggtactttnttataccaacatgttgcaaatggatattttccaaatatttactagcttttcaataagcttaatttcttctcttagactgttgattgatagtaggtgaagtctatcttttttttttctcctttgtgtacaagagcgagaatgtttggtaattagatacctgaacgtggattaatgagttaatcttgtgcatttgacaaatatttagtgtgaacatgtctcaactcttatactttaattgattntattatcatngattngtaggggatgatcaatttacatgttttatataaatgtaattattga

SEQ ID NO: 8294 - DNA, 488 bp, Glycine max
  unsure at all n locations
attcaacaataagaggtgcagtttactgtatcaccattaaattaatcactctctaatatgcattaaattagaaaaatatcaggattaagttaaggattcatacccccttaacgtctctatataaatgagcaagttcctagcctattaaacaaaccagcacctaatttcacaaacaagaaaaaacctaccaattacgtgaagtcagtgagtgatattcaaggagatgagtggccaaaactcccatcaatcaaacacctcanaacattattccagttcccttcaaaatcacaagcatggcaaatctgtgatccctagtgatggtgatcacacatcattgcacaggttcatcagctctagtcatcattntgggcaatcgcggaacttcaacatcataagttatgaacaacaagtgtatcaagcaattcagagtgcanaatacactatcgaatggatacaacgcctacagtcttatgaacgagtagtggatc

SEQ ID NO: 8295 - DNA, 444 bp, Glycine max
agcttctgaattgtcctcatctctctgttgtcttatttattcctctaagtaaaaaatgacaatgaaagggacagatacgatggaattcacgggaacatacaatttgatgacggtggcatatttgaaacgtaaatatgtaaggcaaattatattcaagtcgcgtccaatttgtaagaatatactggtttgagtaaaataattttactaaaattttactagttaaactttgactgaatgcatgctgacgccaatctctgtgcatagtacaaatgctacaatacaacatatgcatccctcacagttgcagtgcaagtttaatacaaactataatgtgattattgtataaatgaacacaatagaatcgagtacttaatcgacacaattaaagcaacaagttcagaatattcagatatcaggagttgcagaggagaatagaataataca

SEQ ID NO: 8296 - DNA, 470 bp, Glycine max
actgattgtatacatctctatgctgttaaatgatcttgtttacacaatgtaatattctgtgtgaagatgctgatgtgttttaagagtatatgggaaacaccaattccttcgaagatggctgcttttgtaaggagggttgtgcaggatacgatacacacaaaaaggaactcgaggaggagaaatatctaattacagccagcagactatgtgtgtctcttttgcactctataggaggaacctatggagcatttgatgttaagctgtacattctcatcaagcatctggaataagtgctatgcttggttggcgatacatactgcccaacagatatcctacaatgcacctaaggcaacattcatgtgggatctttggaaagaagttggcggtgaaacggatggtggtatggtgtgcagtggtgtgatctctatggtcacagagaaatattctgcttttaacgatggaacatggat

SEQ ID NO: 8297 - DNA, 440 bp, Glycine max
  unsure at all n locations
agcttaagagcgaanactacggntgctaacttattatcgngtatggaataattcctttcatgtatcttgagctgttgagaagcatangccactacttgtccccactgcataagcactccacccaaacccatcttagatgcatcacagtacaccacanagggttcactcgggtcaagtaacactaaaactggtgcagtggtcaacctttccttaagggtacgaaaactactctcacactgtgcatcccacacaaaagcttgacccttacgagtaagcttagtcaaaggtaaggctagcttagaaaaaccctctatgaatctacggtagtatcctgctaaaccaaggaaactcctaatctcaaacactgacttaggactctcccaactcatcaccgcctctaccttggaaggatctatngctatccctcccctggatataac

SEQ ID NO: 8298 - DNA, 290 bp, Glycine max
  unsure at all n locations
aacagactggcctcaaaatcttatgctcacacatgcacagttacataaaacattgcaaacagttgcttgagattaataaaaaagaacagagattgcacgaaaatcaattcgaattaattgtaagacattataaatcacttacatcgaaactnttgagattgttcttccaagacccacaggagcaatggggatcgatctctaacgcttgggggtaagataaaagaatacaactcttgagattgtatgcgtaatggtgaaaaggttgaattacttagtctgtctctaaacta

SEQ ID NO: 8299 - DNA, 442 bp, Glycine max
  unsure at all n locations
agctntataagtgcgggtctgggagacgaatgttaagtgttcgcgatatgtgaagatgatgttccaagtacttcggatttggtccgaccatgccctcctgatttccagctgggaaattggcgagtggaggaacgccccggcatttacgcaacgagcataatgtaaacctttacggttttaaaagctctatagttgggcctaggctttagagttttcattttgttaaggctttgtgtcttttggttttgaatttataatacaaggatctttcttcatctgttcctggtctctacccattctcattcatttgcatgtttacttctttntctgaaacggcagattcgatgacgagtcccccgaaggtactaatacctgtgacccgtctatcaacttcgagcaagaaatgaaccacacggaagatgaaggagatgangatgtggga

SEQ ID NO: 8300 - DNA, 376 bp, Glycine max
  unsure at all n locations
atatacaaaagttagtcatataaagtgactaacaagcatgtgctaagccgaaatccactaatgcatgttgagcggtccatagtcgcgctaagcacgctagcacaaacaaagccacctatttaagcctaacatcaaattttggagaggattttggccattttctcaacgagcttctgcatgtgagagattctacagagagaacggtttgaatccagagaatttgagaggtntgttgtgcgaagacctgcagagaactgaacttgaagagaaagtcgtcctgagagcttgagatgagtttgtgagtgattgtgacgttagaggtggaggagacatcttcaccacttatatntcttcaatctttcattnntctcttctc

SEQ ID NO: 8301 - DNA, 310 bp, Glycine max
  unsure at all n locations
agcttgccttgccccttgatatattttatggactcatggncactatgaatgacaaattccttgtgataaatgtagagttgtcatgtcttcaaagcccgcactagagcatacaactccttatcactaattgaatagataagggtaggaccacttaactttcttctaaaataagcaatgggatggccttattgcatcaacacagtcctaacccatcatttgaagcatcacactcaatctcaaacgatttatgaaaggttggcgacgcaagtatgggggcattagtcagcgtttgcttaacatagaaagcttc

SEQ ID NO: 8302 - DNA, 462 bp, Glycine max
  unsure at all n locations
agcttcccacacaacaaattcccaatatcctattacaatacaataacacagaaaccctatntctgttcactggttccttcagctgctccttttgcctacttatatgccaagcttcacattgtccgcgttctggattgccatttttgctgccatcatatcacatattctttggtgctgttatgggaacccgatgactgctaagttggcataatattttctgcattacacaatttgctcaagatacaatagtggttatattctctcaagcaaaattttgggattcggcttaccacaatatctgcattgtcctggttagagccacgcttacctttactcactactacataaaagagatttaacaatggttatgattcaagttgtacacacacataaaaaattggtgtatatataaacagaagaaatatatgagatatgtttcaataaatttgaagtattaataaa

SEQ ID NO: 8303 - DNA, 184 bp, Glycine max
gcttcttatggaagctatctattctatatatagaaacatgtgtaacacttgatgcaactctgatgaatgaaagtgttgtgagacaccactcagagttcaacttctctaccttgttcttacttgaatttcgtgcccacctctctctttctctcactctttcttttcctccattgaagcatcctct

SEQ ID NO: 8304 - DNA, 446 bp, Glycine max
  unsure at all n locations
agcttgcattnggaggggttccatctaccgntctaattccttgatgctnggggtatctaggcttttgaccttgacttggtagaacctcttgccggtttgatttgttcccatgcttaccaaagtgagacaaaagctggtgcaaatcaaaactccgatatctcatgggtggggtggatgaatgcatgaaggaatgcctatgacacagatgcaatctangaatgcggngggtccggggaattgtctccttcttagacacaacgtctaggggtagcaaagtgccccaacgtatgtatttaaaacggtgacctgcaccctccgttgatttgtctatagaggggatcaagacagaacccatatgtgatgcatatgcaaaagacgcaatgcgggaatgtgcacagtatgacaatatttaccgaacataagcaaaagggtatatgatactcatg

SEQ ID NO: 8305 - DNA, 340 bp, Glycine max
agatgaggaagtgtagaagggtgacacttcctgctcttattctttgaccacagagtggtacctggagatatgtcacggtggtcaagagaccttcgggacgtcaggtggggtgcttttgcccaaaaccaagcttgaccaatcccgacccaacccgggcatagtcagtcagtgagaacctgtgatgtacctaagcaggcgagctgctaccagtcaacacgatataaggaacacagaccacaaaccaaggaggcttgtgtggtggctggccagctgtgaattatgattgatatatgggatatggcctctggtaatcgattaccaagggtgggtaatcgattac

SEQ ID NO: 8306 - DNA, 381 bp, Glycine max
acacattacaatgactcagtgtctgacatgtttatttcatgactccaacacatgtttatgtgtaaaaatacttccaaatatatgcgtaggcatgtagatgatatgcgtccatagttagtagagatcaaacatgcaactgatgatgagtaggggtgaaaataagttgaaaatttcttagagacctagggtccaacttatttaaggtgtaactcaacttggttgatctaaaacaaaattaaactcgaacttttttaaaaatctttttaattaaataggctagatcataagtcataagataaatctataaggctcgatagatcgaccttgttaataataatcattctaatatgatatatcatattataatttcctttctaaagc

SEQ ID NO: 8307 - DNA, 590 bp, Glycine max
  unsure at all n locations
cggcacgacgcgttgacanccgttggtttgacgcctttgagtaccatcgtcatctacgtgacactatanactacgtaagcttgaggaatatgacactgcacatgctgctctggatgtgggtgcatcttgtatcccacaccccaatgcgtgctgctctgatcacagaatgtgatcatcntactcgcaggcaaaccttattctctctagtggcacgatgatctctatttgatgaagcttatgtgccttttggatatactctttatgttgtcgaatgttctatatgaccaatgattgtatcttgactgtctgaaagggaaaaggtggagtaaagccgcttttggccttgatactgaaatgagcttgaccgacatattgtgttgaacagaagagtgctagtacccctctattatagaggaaaaggccacaccacacgattgttctctctacgactgtcaccatcacgatgatgttctagagaaggcaccagtatcagggctaaagctacattacgtcacacctggtctactctactgcagtgcctatcattgcttgactatatcatatatttgacgaccgctactgccgctgcn

SEQ ID NO: 8308 - DNA, 421 bp, Glycine max
  unsure at all n locations
agcttcctcggggccattcctgcgaagacaaacttttggaaagttagttcacaagaaatataacaatcattacaaacaagggccaaacaacacttcttatggcacgagtgtcaacatgcactttataaaataatcatattggggtcatgctattttatgacacatacgtatttgcacacataaaaattttgtatgaagcattttacgacacctatccatgcatatatttttttttttgacaaaccttttcatgctacatcctatatatatacacacagtttttttggaaggcttcttttgttacctactcacanatacacatatttttgaaaaacaactattacgctacccaatcaacacttttgtaggcacttcatgctatatatattcatattatgcaaggcattttcatgctatatat

SEQ ID NO: 8309 - DNA, 426 bp, Glycine max
  unsure at all n locations
tgtcgtgccttcactgtttctgtctagacccatttcgcgctcatattcgccccataacataacccgagccaccatcaaagcggcaccagataagcgtggctgcatcagaggagattaaacaacacatgcataaagttgggcaacaaggaaaagaaaacacaatccgccaaaggcgagtgaagaaaaaaaagagacaaagatctccagatnttacaagaaacgcacacaagtgcaacgaaagactaatgtataagacaaaaggagtagagcccaacccaagagttgaaaggaacaaaagtactatcaagcctctgaaggttcttactcaatataaccctcacacactctntgagccctctctaatctttctttcatagcccntcttacccctgaccacattacaaacccaataaagcccatgtggat

SEQ ID NO: 8310 - DNA, 419 bp, Glycine max
  unsure at all n locations
ctgcagcttgacagaatcattctaatttcaagatttctgtaaaagatgaactgcccttttgttctgcttgttgtatgggaaagattcatagatttccttctaagttttctcanaccgtgtataattctcctttggaattaatatacagtgatctgtggggccctgctcctatgaattctcattgccaattcagatattatatgtcctttgtagatgcttatttgtggtttacttggatatattttttaaagaataagtctgatgccttgtctgtttttaaacagttcaaatctcttcttttctgtcagaattggggattgttcataggctgacttgtccacttacacatcaccagaatggtatagtggaaagaaagcatcgtcacatagttgaattaggtctttctcttcttagtcatg

SEQ ID NO: 8311 - DNA, 405 bp, Glycine max
  unsure at all n locations
atcgaggagtcaaanatcttatttatgatgattaaaaataaaacttaagagcagctccaacgatacgttgttcactaacatggagatgcaaaataaactcaaaggcagtttcttaaccattggagtactgtatgagtttctcacttcgtgctagtgagttctttgcaaagaaatagttctctaccgcanaagtangtccattgcaataaaaagtaatattattatattaagttaaagtaatgtgaagttcttttttatcatgcatcaatntttctacctttaaaaaatatatccattgcacaataatggcaataaatgaatagtaaattctgttagtgtaaatcgtaacatctttgtaattntctcacacacaacaatctttcaattgcgtctatattgtctctt

SEQ ID NO: 8312 - DNA, 463 bp, Glycine max
  unsure at all n locations
agctnntggggcatatgtactttaagtgagagatatgatatttaaaattggaataataattaatattacgagtaaataacatatacaaagatgattaattnttacataatcaatcacatattatcatataatgtaaattgattgatagtaataataaaaatataaaattcatattaattatgatttaagttctaaacattatagatgatatgataaaaaaaatgtgtataaaaatgagaaattaagcaataatgagagataataaaattgaataatgaaagagagaaagagtgtgaccgtcacagcttccaatagattggtggtgtcgtgcaagtacttgacgacccatgttagaacacttgctgtggtgtcatgtgcagcanagatgacaccaatgagaatatcaacaactcgagactctgtgtgctgctgatagtacatcttggtcttctcacctcgagct

SEQ ID NO: 8313 - DNA, 505 bp, Glycine max
  unsure at all n locations
cgttattccgactacttgtctaaaccactaaccaagcgacatgtatatatgcagctcttgagaaccttattcacaacatatcgttttctgtattagagtatgatttgactatatcttcggatggaatagatgtttcataaactcctttaatgcattctatctatattcatgaatcataagacaagttattctcctcggatgatttggattattaaaaatgtacataatgttatatgtgtgtatgtacgtacgtataagttggatgaggcatttcttatttatgagacttgctngctttgtgtcacggaatatatattgtgatgatatagatgcatgtgtgggcgattaatgcagcatatcttacgaatctattctaatgacaatgacaagagattgtgaacgcttaatggtgcgcataattaaggagcgaacaccganagaccatatcgacctatctatatatatatatgaatcttctccacattatattttgcgttcctatgtt

SEQ ID NO: 8314 - DNA, 429 bp, Glycine max
  unsure at all n locations
agctnttatgtaaaaggatgtgactcttcacatttgaattttaatttcaacgttcaaaggcactggtaatcgattaccaaaacattgtaatcgattacagctctttgaaattaattggaacgttgtaaattcaatttgaaaactttttcaaaacaattttgctactggtaatcgattacagaaatctggtaatcgattaccagagagtaaatactcattggtaaacatgttttgagaaaaatcatgtgctactcaatttttgagaaaaacttttcatacttatctcgattaagccttctcttgattctcgaatcttgagtcttaaaccttgatcttgattcttgagatcttaaaccttgaatcttgactcttgactcttaactttcttcttgagtcttgaattcttcttgagtctatcttgaactcttg

SEQ ID NO: 8315 - DNA, 491 bp, Glycine max
  unsure at all n locations
actctacctttacagctntactatttccactgcttcatattgttctcaaactaccacttgtaggccttgcattctgtcatttgtttatgatttgctgattatatttatcaagaacgtacgagatttgcattgttatccatgatatttctatttcattatttttctttatagatttttaatatgatatttaataatacatcttacttggctacatgctcacagtggtataatattctatatgcagtgttnttttgatacaccagggctcatgttgaattgcggtggatttccttatanggatgtcaaggtccgtgttgaaagtgcttggagttcagtcaatctctatgaagtgctcatagtcatttctgacgttcatagacatattaccaggtcanagggttatttattaaatggatgagtagtcctatactcgtgtttaccctatttcttctatatatagacttgttcgataacttcttataagactatag

SEQ ID NO: 8316 - DNA, 442 bp, Glycine max
  unsure at all n locations
agcttcacatgaagctacatcacttacaatgaattgagtatatcattngctataagatggaaagatgaactagagcctacgtgacatctgctacactctagtggcaacatgaactttgtcacatataaccaagatttggtaagctcagctctatttgttggatggacgaaacttatagagttctatgggctcactagaaatcattatgtcgccttgacccactatggatagagtgttttcctcctcaccatcttcaaaagcagctttgaaccaaaagtttttcctaaatggcctccttgtaccaccaagttcctaactcagtcacttttaaagtcctactcactgagtacaaagtgacttgcatcagtntggtgagtaattaagcactcctatntgtatgtcaaaatttgatatcatataattatctaatataaatttcttt

SEQ ID NO: 8317 - DNA, 404 bp, Glycine max
  unsure at all n locations
acacaggtcttgactgcgatggngagaagattaccattgcagctagtgatgaatggtgggaagccaaaattcaggtatgtattattcaacgaaaatagagtttctgtgtaggccactcttttgttttttatgtgtgattcttgactgtgcggcaaaaattgaagttgcagactgttttttagaaacttgtgtctaaaattttagttgataattcacgtcggttattactctgttactcgttgcaattgaggtagtttacatgcaaacaaatgaatgtgttgatatagtgatgtttcttttaaaacctaatgaaatggaaatntattggcatgttctttattactctatctttattgtctgctgcatgtttatctgcatcgttcggtattgcatacaggcatgtt

SEQ ID NO: 8318 - DNA, 74 bp, Glycine max
ctcctctgtggactctgggaacaatcccgtcatagccaccgttttgaagagcaacttccagctctatggtcgtg

SEQ ID NO: 8319 - DNA, 400 bp, Glycine max
  unsure at all n locations
agctnttaccaattcagagtatactttctattttggagacataaagggaatgagatntgagttttgaaatgcttgaatgcattctaaactctcatcaganaagaaatacatatctatgaacttagggtcaatgatacaatgagaggagaataggtttgtgtactgtatacgttgttcatccgatgagaacaatgaggaggaggaaatagaggaaggaattggaatatcctgagtctcggagtgtcgttggcttctactcgaagaacctttgtgcttctttaatggttccaccatttgagagattntttcanaatttcaatcggttgaaatgaaagagaactgaaaaagatgaagtttgggctttgtggggagtgatttggataagaaatgagtgagttat

SEQ ID NO: 8320 - DNA, 329 bp, Glycine max
atggactcttacatttgaatctgaatttcaacgttcaagcacactggtaattgattaccacaacattgtaatcgattacatcattttgatatccattggaacgctgtaaattcagttgaaatctttctgaagaccattctactactggtaatcgattacaataatcgggtaattgattaccagagagtaaaatctctttggcaaaaagggtttgagaaaaatccatgtgctactcagtttttgaaaaaactatctcatacttatcttgatggagtcttctcttgattcttgaatcttgatcttgattcttggaatcaaaattcctcttg

SEQ ID NO: 8321 - DNA, 438 bp, Glycine max
agcttgcaatcactaagagactcttttaacatcgatagactaagacttagctttcttattgatctttgttttcttggtcttgatttggacttaaaataaaacttgtgtttcttttgtcttggcatcatcaagaccatcatacacatacattcacaaacatcgctatattgtcgtaacaacccattgtcttttgaaccatggatccctcccactcaagttttggtgttatgcattgtaaatcgcaacgtgtctcatcaatcggatgccctctcttacactaaaccaaaaagctccattagaagtcttgtttcatcgtccatcaaattatagtaaactaacagcttttggttatctctggtttccttgggtcactccatatacaactaacaaacttcagaccaagtccgtaccatgtgtttctaggttacaatcttactc

SEQ ID NO: 8322 - DNA, 337 bp, Glycine max
  unsure at all n locations
gcttcattaatanatcgagtcctactagctctagtcctcttcatattatctattctgatgtatggcggccaacttcaataaatccaataaaaggatattcctattatgtcatttttattgatttattttcacattatgtttgctggctgtatccaatgaaattcaaatccgaaatttccattattcttccagtttttaaatcctttgttgaaaaccaataaaatgtcaaaattaaaattctttatactaacaatgatgatgaatacattaagttacggtcgctccttctaacttatggaatatctcatgtaacaacttcccatacccgtgaatatta

SEQ ID NO: 8323 - DNA, 467 bp, Glycine max
  unsure at all n locations
agcttcgaagggctgagagagaccagtcgagagtctaatgcatgatattggaagacaggttgaaggcttgctaaaggtaaaaaaagagtttgtttgaggaattgagcaagacggaagaaaacatgtgggccatcattgaccaatacattgatgtggatggataggttctccttcactttgaatgggattcaagagcttccaagactactagccaaagctaaggcgatggcggacgtgtactcgacccccgaggaagttcatgggctcctcgattattgtcagcaaatgatcgattcgatggcctacataattaggagccgctaaggcggttgtattntcgctttaattntgacaagatgaacatttttgttccttaataaaaaataagtgtggtttaatactatgtctctgcttanaantctacgtgagaccaatgcttcgacaacttatctttagcatgcattcat

SEQ ID NO: 8324 - DNA, 213 bp, Glycine max
agaatatgctcaaacgtggagagacgtaccagcccaagttgtcccacctatgactgaaagggaaatgatcacaattatgggtaatacgttggctacgttctactatgagaagctgatagaatatatgccagctaactctacagacctcatgtttgccggagaaagaattgagttcggacggatgaaaggcacgattgaatatgcctccaacgc

SEQ ID NO: 8325 - DNA, 451 bp, Glycine max
agcttaataaatcaatctatggcttgtagcaagtctcctgccaatggtatttgaagtatcatgatgtcgtcacttcatttggctttgaaaagaacatcatggatcaatgtatataccaaaaggtcagtgggagtaagatttttttcttgtgttatacgtggatgacattttgcttgcaactaatgataagggtttgctatatgaggtgaaataatctctctcaaagaactttgatatgaaggatatgggaaatgcattttatgtcattggcattaagatccatagggaaagatctcgagcgaatttgggtttgtctcaagagacttatattaacaaatttttagagagatctaacatgaaagaatgttcaccaagtgtagctcccattgtgaagggtgacaaactcactttgagtcagtgcccgaaaaatgattttgagcgggaacacatg

SEQ ID NO: 8326 - DNA, 432 bp, Glycine max
ctaagcttcttcccaatccattggcaaataccaatgcaatctgagttggttactctaaaggccaataatacttggtttctcacacctctccctcctggaaagcaagctattagttgccgttgggtctacaaaatcaagtgcaaatcagatggttctcttgaacgctataaagcacaattagtagcaaaaggctacacataacttgaagggattgattaccatgacactttttcatctactgctaaaatgcgtacaatacgttgtttattagctctggcagttgctcaaaattggtcacttcatcaacttgatgtccacaatgcatttcttcacgaagatctttttgaagaaatttatatgtctcttcctcctggttctcagcgacagggggagaacctagtgtgcttctcaacaatcttatatggataaaac

SEQ ID NO: 8327 - DNA, 313 bp, Glycine max
  unsure at all n locations
agcttctatgaaggctggatctatgatcttcaataaggtccttcaatggngattttcagccatggaattgcagcggaagataaaggagaagacgtgaaagaaggcgtcctccactatagaataatccatggaaggagaagcttcaccaccaagagagtgccttggataagaagcttaaagagcttcaatggaggaagagaatgagagagagagggggggggggggcctgctaattaatagtgattacgtacaacaggactgccttgactagttattaactgaatctcaactgtttgggatgccattggagaat

SEQ ID NO: 8328 - DNA, 431 bp, Glycine max
  unsure at all n locations
acaacatccacgcaatntcaacatccgagaatcatgaactatcaaaaccaagcaaaaacaggacagaggcagagnactctgcccanaacacanaccaataccacaactntttcttactcaaataccccagtaacattctctttgttccaattcgttaaccgttggatcgactcgaaaatcttactggaggtccctagtacataaatctacattgtgaccgttgggatctgctagaaaacgtgcagaacccaatctgtactactctcttcacaaccagcacatacaaatcattntctgcacaaagccaaaattctgctacacatttcaacagcaaaattctgcataatagtgcagattattgacatcgcacttgccctcgtccaattntgcccaaattgaatcctacacgtcctacatcatgtataaatcat

SEQ ID NO: 8329 - DNA, 234 bp, Glycine max
cacttttaatgtggaatatttatgcacatgcgtatgtgtagaatatcccactatttatgtgaacgtacaaggacatccaacacattccaactgccatacatatattattttgaacagaacacacaatctcatgctctaggctctgcgccagaactcacacctaatcacatcctaaatattttgctatcagaaactacctacacatatttgaaacatatatcatacagggcttca

SEQ ID NO: 8330 - DNA, 270 bp, Glycine max
  unsure at all n locations
tgtctttagaggttacttcctccttgacatcttttgttntgaatggaattgccatgacaggtttattattactgtntttgatatttggcacgcgatattgtgttgtgggaggtaatttcgattggattaactcaccatctctcacttgccagtttgttatgacatttgctgttggatcacctatgatttcttgtttcccagggtaatctatatcctctttgatggcataagcatgacaccaatcaaagaataggacattaattctgactc

SEQ ID NO: 8331 - DNA, 504 bp, Glycine max
  unsure at all n locations
tcaacttatatcttattaaattaaatatttatccaaantatncacaacagttgaccttgtgcaccatctcgacccggaccctaagtcaccgagcagcaagcaaaaatacattttatatttatttccgagaaatatgattcctgactctgtgatgtntccatgactataaatactgaacgttttaaactctcattataccatttcatgagattaagtgaaaaccttgaatatactattacatataagagaagtgttgactcaacaattgaatggttccagaaatataacgccatcaaattntcataaacaccacattatgagcctatgtgattttctactatgataatatacctgagcgcggcgtccatctaactaatttcagtattactaaaaaatcgtaaccgataactatgaatatgatgatattgcaaccgcatgtgacggtgatgggtacttatatattgaaatgacactatggattgcgtgcttacctactgatgcacg

SEQ ID NO: 8332 - DNA, 292 bp, Glycine max
  unsure at all n locations
attcataaaagttgttgggtgcaccagcaatattgctgcgcgcacctaacatctcccgagaatcaatagtatcataccaagtatgttctgtcttgattgctgtcatgcttattctgtgggggcctacttaaaatctaaatgtccatgtattgatatggttaacgatctaactcatttcagatttaattattctatttaaatccttctatatcatgtctatatnattttagaaattttactttttactccatgacatgactactttcacattctagatgattatattatttaa

SEQ ID NO: 8333 - DNA, 416 bp, Glycine max
  unsure at all n locations
agcttccaatcatgcttctgtacagactntgatcaacactggtgccagcttcatcctttgacagcttcaagtgagtaggtgcaggtgttcttttatggctggaattttccatcccaaacttcttgacaatgttctttgcatacttgctttgtgagaggaacatgaagtcttccatctgcttcacttggagtcccagaaaataagtcagctctccaacaagactcatttcaaattcagattgcatctgttgaacaaaatgtcgaagcatctcattcgacatccctccaaacacaatgtcatcaacatatatctgtgctatcatcaagtttctagcatcttgtttgacaaagagagtcttgtcaattcctcccttcctatacccttgctgagtaagggaactctgtagcctttcatac

SEQ ID NO: 8334 - DNA, 281 bp, Glycine max
  unsure at all n locations
taagcttctagcacaatagacttaccttgacttaattcctctgatagcctctttgagccttgtctgcctttccttgttttgaagctcactacaagccttaagtgaaaaaccatgatatcaccatatccttaaggaattttggagctctggaattgttttgggaataagtgtggggctctttggttcattgaataacatgtttnggtggccatgcattatcatatatttnnagccatacttnatgtacattgcatattggctcagatttggacatgctgaat

SEQ ID NO: 8335 - DNA, 321 bp, Glycine max
  unsure at all n locations
agctntgcggatntggtcttcaccggcgaaaggatcgaagtgagtctgaaatgaggaaaanttgatcatcctgctttgatgaatgcaaaaactggggcaaatgaagaggatgagaatgagggagaaacccttgctgtgattgtcattcctacacggccaaatttcccatcagcccaacaatgtcattactcagctaataacaacccttctcattacccaccacccaatcatgcacaaaggccatccccaaatcagccgcaagacttacctgccacatgaccaatgccaaacaccacctttagcacaaaccanaacaccaac

SEQ ID NO: 8336 - DNA, 429 bp, Glycine max
  unsure at all n locations
cgcaatgaactcggtaagcgagcatgctgcgctaagcaagttcatcagtactcattgtgtatacaggcgttctcggaagaactcgctaagcgcacctaccgcgctaagcgagttcatcctttgaggatgaacactcattgtcgcaacgtgcccttttgcgggcgggcgaaggcgaggctcacgggtgcgctttccaaatgaggaaagatgcgcggagtcgccaccaacgtttatttgtggagaacgtcggacaaaccgaaggacaccggtcaaaatgaatattctaagttcgggagttgtatttacgtttgaggaaggtattagcacctctcacgtttgtctcanaggacaacaacctatctttcagaattgtggcaaatggtgtatcttaactttaagttctttctaatttttgagggcgacaaaagc

SEQ ID NO: 8337 - DNA, 457 bp, Glycine max
  unsure at all n locations
agcttctagccaaatggacttaccttgaattattttctttgatagcccttttgagccttgtttccctttccttgttttgaagctcactacaagccttaagtgaaaaaccatgatattaccatatccttaaggaattttggagctttggaattgttttgggaataagtgtggggggtttgtgtttcattggacaacttgttttgttggctatgcttcatgatgtattttgggccatacttgatgtacattgtatattggttaaatgttggacatgctgaatgaaatgttgtttctcaaaggctaaagagtaaaaaaaaaaaatctaacaaagaaaaagaaaagcaataaagttgagtgaataagatcttaaatggcacaagaatgatgaaactctnggttctactcttcatnngttaattttatctntacttctctttaatttcttattntcttttct

SEQ ID NO: 8338 - DNA, 403 bp, Glycine max
  unsure at all n locations
gcttggcaataacacaacctcgactctcattgagtgtagaacactttcaagtggtgctcagttggagaatagtcatgagctatgatgcaatcctaccccgcaagggcattggatagaaaactccaagtagattgtgccagagatgcaagagaaggccctagggttcttatgagccttacggtagatttctggcgcatgggctaagtacgagcccacttatctttgtaaatattaaattaaggtttcattatttttgggccttgtatttacggctccataatgtatgtagggtaccctacaaatatacgatttttcagcccttgtattttacggcacctagactagtttttgtattaagggtagatntgtaatcttacatgcactaagtggatattngatgtgt

SEQ ID NO: 8339 - DNA, 468 bp, Glycine max
  unsure at all n locations
agcttgaagaagtnttgtcttttatgtgcccacctcttttttggcatttgtattgattattgcatcttaatctctatctatctatatgtacatcatgcatcatcatgtaaaggtaggaagattgtttctaaagttagaaaattcttcagtgcataatactctctattttaatcgattaccaggttgttcgtaatcgattacaagagttgcttgtagcttgtagagagattatagtttcgatttaatcaattacctagtatctataatcgattacatagttcagttgataccatgtctggtttttcatgagtctctgctttaattgattaccaggtgatggtaatcaattactttgttcttaaaagtggttccataagtgttcgacggtcgggtagtgcaccggatcgctcaagtagtataaaacagtaagtgaatactgagtatcgaactctcgagtctcacaacatg

SEQ ID NO: 8340 - DNA, 391 bp, Glycine max
  unsure at all n locations
gagatccaagaaggataaagcagctgaaggaacctgttccgctcctgaatatgacagccatcgttntaggagtgctgagcaccagcagcgcttcgaggccattaagggatggtcatttctccgggagcgacgcgtccagatcagggacgacgagtataccgacttccacgaggagatagttcgccggcggtgggcatcgctggttacccccatggccaagttcgacccaaacatagtccttgagttgtatgccaatgcttggcctacagtggagggtgtatgagatatgcgatcctgcgtgagggggttagtggatcccattcgatgcggatgctctcagccagttcttgggatatnctttagtgctggaggagggccacgagtgcaagta

SEQ ID NO: 8341 - DNA, 461 bp, Glycine max
  unsure at all n locations
agcttctgagagtggtaacaaccaaaataaagtgctatggcctatgggtacagtcagataagaacactcacagaatcaacggtcttcatagcctgaggcccaggaaatgtcttgccagaaccatggctctttggaagtagtcgcccctcaacttcttccccactgattcctctagcaatattccacaaccaagtactgcaatgctgtaaaagctagaatcaggaatagaataccaacagattgcaatgaagacaatcaaatggacagtcatgagtaattaagtaactaaatcaaaactgcatggcatgcaattggagaataacacaaaagttgcaatttaaaatatgagatcccanaaatgaaatcagcanagacagccaaatgatgctttggtagtagatatatataacatcatgtaagaacttagaagacatactcacccagtattgatcccataccac

SEQ ID NO: 8342 - DNA, 374 bp, Glycine max
  unsure at all n locations
tacctggtatcaatctttaagattatttatgaatagttctggatgttagtctcatgctattcacaatgcaattttgacagctacgttgaaattggtcgcgtaatatcaatacttcacattagaataagaattntagatatgattgactacgtaggcttagaataactattgtggtcactacattcttaaaaatgtgtgataactaaccaattctatctcatagctggatcaaggtaggagagaactgtcaacaggacttgattgcatcattgtagtaattntagaccatgggaaattaaattcgagcaaacaactaatgagaagcacaatcaagcattatgcacagtagagaaacaaaagtgcaattatgctga

SEQ ID NO: 8343 - DNA, 439 bp, Glycine max
  unsure at all n locations
agcttagtacacanaggatgattctatatttctttagaatcttntaatggggaggaccaaatgcttgcacatagcttgtaacatcactttcaaagctactcacatctataggaaagacaatcactataacattagagaattacttgagtaaagattctattcttgacataggttttggcctagtctaccatggactttttgtaactcttctctcctttcattaataactttgctcaattcgctacattatcgattattcagagtgggcattgatcccatttgtgtcgtcataccctgcatttatgaaagatttcttttactaggaaagcatctgtttgaccctggacgtgagtcgaactatgttctgtgcttaatcgacattattagatactctnttataagcatcaatatcattattgactactaattatgatattct

SEQ ID NO: 8344 - DNA, 392 bp, Glycine max
tcttgaccaagactactaatccttgactaatctaattaagtgtctttgtttatgaacaagagttagaagacgacaaataagccttctctatccctagacacaacacccttgaggagtttctctccatttctaagttcagaaatattttctaatgacaattcaaattacaacatcaagtaaagggtgatcaaaccaaaacaagcattaatgcatagaagaaaacacttaataatgaataataaacatggattaataatcaaaatataagcataaggataagttcagttacatcaactcccaaaatggataaatctaactacataaccacaagaagaaaataagacaatagatgacagagatgatgataaatggtagggaagtcatggagagca

SEQ ID NO: 8345 - DNA, 442 bp, Glycine max
  unsure at all n locations
agcttgttaacaaatgttcagaaatcaagaattctaatattgtggacaaggttcgttaccagacaaaactaaagtcacttaattcaggagattttcaatattaatattcaagctgacatcgcacaagatgtaaaggagaacttgctcatgtctaatagaattgaattcaagcaatcccttattatttatgttgaggcaacagtttctgttgtttgtagtttattccttcttaaatgattccgtaaaaaaaaaaaaaaaaaaaaacaagtcaataattaagcttttagcctttatttatcattattttgccgccctctgagtttttgctttgctccatctggattattattattttttatttcagtttttaccgtattacttcagttcttgtaaaattgtatcctcatgtggaagaataagaatngtcactttgcacattata

SEQ ID NO: 8346 - DNA, 477 bp, Glycine max
  unsure at all n locations
ntacgttgcatacaagaaacaagagatgctagaagcacagattataacaaagaaacacgaattaagagatagaatattaaagataacgaataaagaatataagcccaagtgaacaaaaagtgcacaattggctaatattgacacgtaagtgccaagcagcggcaccaaaaacttgttaacaatatttggcaagtgaaccagatcaaacaagtagcataaaatagaagtgtaagcattatttaaaagatgatttgattaaaaactaacattattctacccttagattcagtagcagaaaataaaatgtaattaatagaagaacacctatctaggcattcttatcaaacacgtactatgcagctaaattgattaactaatgataacgaaacattgttggggtggacttcttgcacaccattcttcatgtatataacaataataaataacttaaccatacactatcaatatgttcatgca

SEQ ID NO: 8347 - DNA, 468 bp, Glycine max
  unsure at all n locations
agctntacaaattatacagctgatctatagccatcacataattactagatttctaacaatatacatcaaatagttaactagattttgttatactttctttctggtggcagatgtgtgctatgacttggggcaagtgccttctctaccttaaaatttattttggaatatgcattattggtccactaaatatttttaatttcccactaatcaataagttatataaacatggaaaaaaaataaaattttgttacctgtaaactacaagataaaaaattatattattttgaaccccagacctaagaaacccccttactcttttgtctattttgctgttggtatgtgagagtcattgcctatgcataaatttttaataagaaatcagttgtagatagtaacttcttgatttcccctgtaaaatatttcacatttcaatatanactaacactagtatgcaatgagtatgtttct

SEQ ID NO: 8348 - DNA, 420 bp, Glycine max
  unsure at all n locations
tctcagcttcagcctatcgtgcactattggtaaggtcctcaacgaatccgacgtagcacacaacatctcagtcgagggttttgaaggcattgctaatcacataactactaataactatctcgcgtttgtggaagaagagattccagttgaggggagagggcacaacaaagctctacatgtgtctgtcagatgcatggaccatgtcgtcgctaaggtactcatccataatggttcaagtctaaatgtgatgccaaagaccaccttggagaaacttncttttaatgcgtcacgtctaaaaccaagttcgatggtagtatgagctctcgacggtagtcggcgggaggtgatgggggaaatngacattcccattcagataggcccccacacttgccaatgtggtttccaagtgatggacataaa

SEQ ID NO: 8349 - DNA, 461 bp, Glycine max
agcttataaatcaagagatcataaattcaaatttatatggggagtatgggataagtgaacgttctatattgtatatattctatcttgtatcttgatttcaggaattaaattgtcatcataaaaaagggggagattatataagcaaagacattttgatgttttgatgatgccaaaggatcatgcgcttctcaagtttaattcatgacaagaatccaagagattcaagatatatgatcaagataatctctagagatttaggaagggaattccaatttgaaacaacaagaggtttggccaatgaatttaagctaaaatgtttttacaagagattaactctctggtaattgattaccagtggccaaaatactttctgaaatacttttaaaatgtttttagatgtatctgacaacatgtaatcgattaccagcagttgataatatttataacagctattataaatt

SEQ ID NO: 8350 - DNA, 436 bp, Glycine max
  unsure at all n locations
agcactcatgacacatgtgctcatgcttcccttctttgtgagttatagttgcaaaggcatgtcggcatggcatccctacatcaaagttgttaaatcagcacacatgtatgttaggaatgacaaaaaaactataaagaacacaacctgttagttgccatactccacaagtgcatgtccattcacctaaattgacctcaaccttatttcccacatgtggacctcatatctcaggcccatgttatcaccacaccaaatgggagtccattgattancaaaatggaatcctttttctagtcttttatactgcactggacataatgcgccacgttnttcagatagtataaccttgtcggcagncatggttctcatgatataacttctaatttcttcaagcattgtgataataggcttgcatctatactgcagaactctggaa

SEQ ID NO: 8351 - DNA, 458 bp, Glycine max
  unsure at all n locations
agctntggagtttccaagtgccaattcgtcttcttcttttgtccagacttcttctggcttcaattcattagagggctttccttctgtgtccagcatcttgggatgttcccagcctttgatgacagctttccaggttctgctatccagtgatttgaggaaggccaccatccttgctttccagtattcatagttggttccatccagaattggtggtctgttcactggtcctccttctttctccatgttcatcagaatttatctccctagatctcactcagtgatttcgagtgcctgctctgataccaattgaaattctgatactggggacagatgtcgtacaggatgtcacgacatcacgcttcagaacatgcagattgtctttgactgtatgaacaaattaaacaagttaataacacaagagaattgttaacccagttcggtgcaacctcacctacatc

SEQ ID NO: 8352 - DNA, 351 bp, Glycine max
  unsure at all n locations
tttgtattcctcacaatgtattctttgatatccttaataaaatgacatgaatgtgtttccttataaaaaatctctatagtgccatgtaactaatatgaaagtcacaagaggtaaagaatactcaagagaaggttaacaagcggttgttgaaactgacgttcttcacaagaggtttttcattaaagcacacaaagtgccctacttgcttgcagtaactagcagagcactcgtattatactctttggcactcntcatagtcttttttcctctctacgttcaactgtaacataagagtaaacaggaatccgaacaatctaagttatggaaagcttcacgtgacaaagaagttct

SEQ ID NO: 8353 - DNA, 389 bp, Glycine max
  unsure at all n locations
gcttctttgccgcgcctcaacactgaccacaccgttcccctcccaaacatctctctctctctctctctctctcctgtaatgcaactctgagttcagggtttaaccaaggttttgttttgcccaagacgcttatttctaccacctttcgtaggcctaaccattgtattgaaactcaaatattattcatataatttttacaccttttaatttcattgttgtacaaatcaatataaatataatttctcaaataataattatataaataaaacacaaactggttgtggccgcctgtgggcggtaggcgctacctgtgggctgtggctgttgccttcttttcactttttttttttaanaaaaaaaaaatacatactacagtngtcttggttttg

SEQ ID NO: 8354 - DNA, 479 bp, Glycine max
tcatgaagcaactctcctagggtcaaaagtcaaaatatagtccctaaatgttcttcgatgaggatccagaatatgcaccagaataagcctcaatatcctccacttgcaaagtaaatagggcacaaacggagacaaaagggctgggatcagttgaaaagccctggatttagccaatcccttataacaatagaatatgtattatgtaaagtccgttagagctgcacagataaataaaatactactatggaaagaaagaaatgctgcaagccaaaagcacttacttgcttatgtcatcaagatggtcatcaaaatctacaacgtcattccacttctcggatgcaatatagtccaacaagactagatatgctgatggctctttgagagaaaatcgatggttcccatctgactgaaccaactctcagttcttagatgtatccctaacatatagctaaatcataagaaaaggcaatcttggtaat

SEQ ID NO: 8355 - DNA, 616 bp, Glycine max
  unsure at all n locations
ctacacagacgactcntaaacgtgtactcatcgtangactaattctaantttcacaaatanntnannnnnanaaaagaggtttgaaaccctagttgcatccccatagcagnacccgcgannccctagagnncanccgtcggcatgcaagctttacaacagacgcctctttactcctagtttttgaacgatangncaacaaggaaacataagtatattcaccacgacaacatcatatggggaaagagaatgaagtgctatgaataaaaagagccttccacccaagcataaagaccctgcgagggtaaccatgccccgtacaataggacacctcactatgggaaaggcacacattgacccgcgagccacaactaaatagatgcgactctccacgtgcaaaaggtggggagagtcggagatcacgcccactaggaggactctacaacatgctgaccgcgccatcacctcaccaaaatggagtacttgacgatggactgcgcagagtgaaacaacttatcttacacggccgacatagggggaacggagatntgggacgaaactgacatacctcgaagagtgggagaggtatacacgagaactacaaactgatagccgaag

SEQ ID NO: 8356 - DNA, 529 bp, Glycine max
  unsure at all n locations
agccgcggtgagcctgatgacccttgaacgcttgaagccgcgcncatanaaactcagcgttgagcgcagcacacagattctatgtgtgctacactccttatttcagtgggcgtagtatgtctgagaagagaaagtgacaatgaaggatatattggagcaaactctatcctttcaggaggctataacatcaatctaaacgtgctccagctggatttacagctaaaatctcaccggctctaaatttgactctcccacacgcaaatttaccctanctatggatcttanttcactatggccatttgttcttctctctagataggctaacctgtttacatgttgtaaaggatttaagctagggtaactcatatacacccatttacccagaaacagatttacctttcactctcaagcctcctatatacacttatagacacatctacttctacctaggtactctgcttcacctaaagcttcctaacattgcgactaactcacagcacatataaacctaccctgatggcatgtaccg

SEQ ID NO: 8357 - DNA, 347 bp, Glycine max
  unsure at all n locations
agccttttatctatagactccttnttggnttcttggatgcacatgatatcaatnttattagataaggtcagcttcttgatagctgaccatttgataccattacccaaccctctagaattgtgggacagaatattcatgagtcaagttgttcctttcccatcacagcttgtggtgttgttgatatgtcagcttgttttaattcattcttcatgctgactatgttgcctgaattctcttcgaaagtcattcctaaatctctggctacatcccaaaaaacactctcttgggcctccttattctgtttggttgagttgcatggaagggtagggctgagctgaggctgaaac

SEQ ID NO: 8358 - DNA, 223 bp, Glycine max
cactaatggatattctgttacagtaaatctcttagcctgcgatattacacattataaaagatacactggttattaattaaatgcggaaagtacagatcagaaacatacctgctgccattgctatgaagagcctcttgttatggatcttccaagctctctcttactgtctctagatggcgtctcagactgaattcgaatggatgagatcatggaccagattcat

SEQ ID NO: 8359 - DNA, 411 bp, Glycine max
  unsure at all n locations
agcttcacaccatagcaacacataatctaggtatcaaaatctctcaatgcaatggattttcaacgtttgagaaatgaaattgagaatggggttaatttggagcatactctcacctcacacgagtctataacatcaattgaaacttgttcaaatcggatttacacctaanatgttcccgaaccaaaattngactcctcaacccccaattataccctagaaatggctctttattcactttgggcatctgattttctctctagcacagcccaaactttctactaagtcctaaatgaacatgcaagctaggattaactcactntaacctccgaataccacttaatccagatttagccttaccactctcagaacctcactcttctttcactcataacaccatattctgactttcta

SEQ ID NO: 8360 - DNA, 417 bp, Glycine max
ctcatcttggtggtgaagctccttcttccatggcttattgcctattggatggagcctcctctcacctcttctcctatgtcttctgctgcatctacatggtggaaaaccaccattagaggacctcattgaagctcacagatacagcctccatagaagctccacaagcaagcttccatcatcctcttaatcacccatcgtcatagatctggatttggtgcgatagggatgccttggggcgcgtttagttatggtatttctcctataaaaccaaacgtgaggagtacgtacaaataatgaatgcatgctagatataaaatgtgggagtgatttgattcgcactgacttttggagtagaaacgcgggataaactcattttattcagacagtgtatactactcacgatcagagtgacaatac

SEQ ID NO: 8361 - DNA, 386 bp, Glycine max
  unsure at all n locations
agctntaactgaaacattaagtaagttgccaatttatctttctgctattcaaccttcaccttcttctgttttgcaggttgcatgttgtgctatttgtggtggtgctcatgagtcaagctgctgtattcccactgaggatcatgcacatgaagttaactacatgggaaaccaacctagacaaaattttaatgcaagtggattctcaggatttcagcaaggccaaaattataactagtagtatggacagtggagagctcatcctggtaatcaattcaacaaagaccagggagggccatctaataggctgcaacaacaagggcataatctctacgagaggacaacaaagctggaagagactcttgcttagtttatgtagggttcaatat

SEQ ID NO: 8362 - DNA, 466 bp, Glycine max
  unsure at all n locations
tggacttaccttgagataattncttggatagtctctttgagccttgtttccctttccttgtggtgaagctcactacaagccttaagtgaanaaccatgatatcaccatatccttaaggaattctggagctttgcaattgttttgggaatatgtgtggggggtttttgtttcattggataacatgttttgctggctatgcttcatgatgtattttgcgccatacttgatgtacattgcatatcggttaaatgttggacatgctgaatgagatgttgtttctcaaaagctacagagcagaagtcactaatcgataaagacaaagagtagctatacagttgagtgaataagatcttatatggcgaaagaatgatgagactcttggatctactctctatgtgtaaatcttatctatagttctcttatttttatttctcttaatatgcatatatctccccattctcatcta

SEQ ID NO: 8363 - DNA, 458 bp, Glycine max
  unsure at all n locations
agctntgagggtgcgtagcccaccatctttccatttagtgtatcgataatgtgtctaccatcacgatcatcgtctccctttccatcattgggggtaccacttgggccgccagatccctccaccttttgggcgtgttctttgaaagatccgtccccctttttgcaaatgttttgtagttgcatcctatccagaaccatatcaaaattgtactaatactgcctaacaaaggcaaccattaggtccttccaagaatggactcgggaagattccaagttagtgtaccaggttacagctaccccagtaagactttcttggaaggaatgtatcagcaattcctcatcttttgcgtattcccccatcttctgacaatacatctttagattggtcttgggacaagtagtccccttgtacttgtcaaagtccagcaccttgaacttggaatgaccatgtttgggtat

SEQ ID NO: 8364 - DNA, 486 bp, Glycine max
  unsure at all n locations
gctttcttggagaaacttncttgagaagcttctntgagagaactttcttgagaagctatagcttagctacacacacccctctaatgactaagctcacctccttgagaagcttgcttgacaagattcctaaagaagctagagcttagctacacacacctctctaatagctaagctcacctccttgagatgagaagctagaacttagctacacccncncctataatagctaagctctaccccatggcaaaatacatgagaatacaaaaaaaaaagtccctactacaaagactactcagaatgcctcgaaatacaaggctaaaaccctatactactagaatggccaaaatacaaggcctaaacaaagganaaaacctattctaatatttacaaagataagcgggctcatacttagcccatgggctcanaatctaccctaaggctcatgagaaccctanggtcttccctgggatctctggcccaatctac

SEQ ID NO: 8365 - DNA, 343 bp, Glycine max
  unsure at all n locations
agctntggttttcaattacgagtgtcgcgatatcttactgttcacattaggacatccgagtcaaaagttattacgtttgactctttctagagctcccgttttcaatttctagcgtctcgatagattgaagggctcagtcggacatcctagttaaaagttattggcgttcgactattcttacagcttccgattcatatttggagcgtctcgatatattacatggctcgatttgacgtccgagtatgaagctattgtcgtttgacttttcttatagctcgcattttcaagttcgagcggcgtgatatgttacagggctcgattagacatccgagtcaaaaggtat

SEQ ID NO: 8366 - DNA, 291 bp, Glycine max
  unsure at all n locations
atcaacgacataactntaactcggatgtctattggccccttttatatctagacgctcgaaattgaacacggccgcactgcgatgagtcaaacgacaataactnttaattcggatggccgattgagtctcgtaatatatcgagacgctcgtaaatgaaaacagaagctctgagaaaaatcaaacgacaataacgatgtacttcagatgtccagttgagtcccgtaagatatctagacactcttaattgaaaacagaggctctgcgaaaaatcaaacgacaataactcttgac

SEQ ID NO: 8367 - DNA, 206 bp, Glycine max
gactcaatcggacatccgagttaaaagttattgccgcttacatttgctacgagcttccgctttcaactatgatcgtgtcgatatattactggactcaatcgaacatcggagtaaaaagctattgccgttagaatttgttcagtgcctccgctttccattcagagccgctcgatatattacgggactcaatcgaacattcgagtaaa

SEQ ID NO: 8368 - DNA, 325 bp, Glycine max
cgcacccttcttcaaacattcggtcataggacttgctatagtgctaaaattctggataaagcgtcgataagatgatgcaagaccaacgaaagatctcacctccgaaactgttgtaaggctcgggcaagtcttgatagcatccacttttgtttgatcaacggatactccatctttagacaccacatatccaacaaacaccacactctctaccaagaaatcacactcttccctcttcccatagagtaattgtgctcttacggtctcaaatatctgtttaaatgagtgaaatgctcctctatagacttgctatacaccaatatgtcat

SEQ ID NO: 8369 - DNA, 420 bp, Glycine max
  unsure at all n locations
agctngacaaactntagccaaatagcagttgttgttagtgggcattttttnttatccataggaattaaacacaatactaggaggtttacaacactcacacaccctgctcaaccaactaagctggatcccttggttagtaggcatctacacaagttgaataaaatgttttttattctttatttctaataaagacttgaatgaaacacaaatgtgcagtatcctgtacaataatatggtctgaattctgaacagcaattgtgaaacaatttttatataagcttcctaagcttgttattgatttctttgtgttttctcatgcagggagttcgtccctgcgacaaaaggagaagcatcagcgagtatcaatccctatttcctgcaataggattttcactggcaagtacctaaaatttatcatgc

SEQ ID NO: 8370 - DNA, 302 bp, Glycine max
  unsure at all n locations
gcagcttcagtacttgcaagaatgccacaggtnattattatataaactaacacacattagttgcatgaatgtactaaaagtaaacagagacatagtagaatcgaacaggttatttcatcagaattgattccagtaaagcaaagagatgtctgaagtgaccaagtaaaggttatcacttatcaacctttgatttaaagtgggttaagttcatgaggtgctcttttcaaatccacagtatggtatatttacttttccactttacacatctcgcttttcaggatccaaatcctacatccatgacc

SEQ ID NO: 8371 - DNA, 358 bp, Glycine max
  unsure at all n locations
agcttataattataggatagaataattagtntctaactttgntctcatgaatttcttgatttcattgcttctaactctgaagggtaagacattaatatacctctaggtggatgtatatttctctgtgagtaattcattatttgccatattataaatgaaattcttttttctcattttttactcacttttctattgcaggtgcagataagattattatccattatggtggcgacactgctcaaagccaaccactaggaacctatatatggtatacaagttatgctcaaattcattgtgttttactctcatggtgatactgctctttcaggataatcactagactnttattctgcaccag

SEQ ID NO: 8372 - DNA, 292 bp, Glycine max
  unsure at all n locations
gaccacacagtggtacctggagatatgtcgcggnggtcacgagaccttggggacgtcaagtggggtgctattgcccaaaaccaagcttgaccaatcccgacccaacccgggcatagtcggtcagtgagaacctgtgatgtacctaagcaggcgagctcctggcagtcaacagataanaggataacaagaccacatagcaaggaggcttgtggtggctggccacctgtgaactttgtataatatgtggattgtggcctctggtaatcgattactaanggtgggtaatcgatta

SEQ ID NO: 8373 - DNA, 366 bp, Glycine max
agcttattacaatattataaggaatataataaatttgttgatattcaattatgattatttacatcttaaagaaaatcttataatattaaaacatatatgaacgtcaatgggctctcttgttgaatggatttcacaaaaatatttggtaaaaaatacacattagacaatctcacataaatcttgagatttcatatactttgttttcttttattggcaatcgacatgtttccttatcttactcatacataatttcatgtctatatgttgaaagttggagatatttataaggtatttttactctattatcccatcaacaacatgtcctataatgtgttatttgagagatctcccaacttttaaaataca

SEQ ID NO: 8374 - DNA, 386 bp, Glycine max
  unsure at all n locations
taccatggatggttaaacattagttagtggtttgcttctgtcctttangtggtcaagtgtgtttgcttgtgttgagtggctaagccttgtgttatggcttctgcttaatggttaaacatattccaattgtctttgaatgttttcagtcattgtctatcttttgctgatgtatatacggcatgtttcattgtattgcgctctcattatgtacttgtattgttcatcccacgctggaagtgttgagtccaccttctagcttgtggaggggctgttagagataagtcccagatgcattggttgtcctagtcattgactcacttgctgttcttcgggttcgatctggtcaagaaccatcttctgggtcaagatattgtattgtaaatgct

SEQ ID NO: 8375 - DNA, 460 bp, Glycine max
  unsure at all n locations
agcttgccgctagagctgacccatctactgccctaactcttttagactggtgatccctaggctcttgaccttgacttgatagaacctctttttaagcgaaggcgtttgacttgatcccatgttttactaaagtgaaacaaaatctagtgcgaatcaaaactccgacatctatcatgggtggaatggattaatgcatgaagaaatgcatatgatacagatgcaatttatgaatacgggagcccgggaaattgtctccttcttagatacaacgtcttggggtagcacagtgcccgacgtatgtatttaaggtgacatggacccttcgttggtttgccaaagagaggggatcaagacagaacccgtgaacgatgcatatgtgaaaggcacaatacgtggatgtacatagtacggaaatattcacaagccaatataagaanaagggtacatgacacttatgcat

SEQ ID NO: 8376 - DNA, 393 bp, Glycine max
  unsure at all n locations
cctcatcgtccctcacagtctttagatttgggagccaatccaatccttgtgttcggactctcagccacttatgatagccgccgatgatcccattactgcttcccctaagctctctgtcctttcttcacgccgcatcccatgccttgcgaactccttggagtaccctcgcgttgtggtcactgaaaccccgtgcgatgaaaggcgtgatgctttcgtctaatggcgcctctctcatgcggtagccaagctgtcttatggcgagaacgggattataattaatacaaccccttgttcccatcaagggaaacattggacatncttcgcatgaagatagaatctntgattcttctttcttctagcgagggagaccaataacagaacgcccccccatgc

SEQ ID NO: 8377 - DNA, 391 bp, Glycine max
agcttgaacagttaccaatctccaaatgaatcttccctgacaacatgttatcatagagaaacattatcttcaatttaccaagcctcccaacctctctggggagatcaccctgtaaattgttgcgaaacaatgcaagtgtctgcatgttagtgaggatccctatgaaaggagagattgaaccaaccaaagtgttggtttgaagcaatagatcagttagccccaacaacccataaacctcaataggtattgacccattgagaaaattgtttgacaaatcaagttgcttgagtgagtggcaccgacccaactcagctggtatctcaccatgaattccactacctgacatcattaaattctacacacttgtaacattggaacatatggttcttgg

SEQ ID NO: 8378 - DNA, 349 bp, Glycine max
ctccatgtcaacgctcatcattgtgatgtctgtgatgatattagtggtggtgagtcgcaacaagatgatctgttagagtatcacttgaagttctgcacatatcctctgatggcaatcagaacaaggagaagtgaaacagacggtagagagaataagttgtcactaacattctagttcaaaacattgtgtgttgatgtggaatgtcccatacacatgtgcgatttgacatgttagcaatgacgtgctacgtatgcactccacattaacagacatagaaatcactcgatgatatgactaaatagtcatcatatctacacaattgatatttttatactagcagagaaaattg

SEQ ID NO: 8379 - DNA, 338 bp, Glycine max
  unsure at all n locations
agcttattaatatatgatttaaaacaatgattattgaagagtctatacatgtttcctttaatgagtctaatgccattcttccaaggaaggattttntagatgatatcttagattccttagaagatacacatattcatggaaatgactctactgaaaaagatggaggaagcaatgaagattcttacgataatggagttagagcaaataatgaacttccaagacaatggatagccttcagagatcatccccttgaccacattattggcgatatatcaaatggggtaacaactagacattctcttaaagatttatgcaatattatggcttttgtatctatg

SEQ ID NO: 8380 - DNA, 352 bp, Glycine max
  unsure at all n locations
cttcataagaatggatccttctcttagtttgtcttagaagctatcaggaaacactccaagcagacatgtgaagagatcttgaagaaagctgtgattgggtaccaatccatacttctttaatgacagcttccattctagaatagtttcaacacgtttagaaattcccgatctctgcaagttaataatagaactatatatgaatacattgttctttacttctacactacaagtatcaatatgaaagatatatgtgataatctggtatatttgggataaattctacttataagaggagaaaatgatactaanggtaaaacttacatacagtaccatggtatggtaccataagtac

SEQ ID NO: 8381 - DNA, 511 bp, Glycine max
  unsure at all n locations
agttggccgtgtagccggatccttaagcacctgcggctgcagcttgacagtttgngaagaggttntgattgatcaaaaagaagaatctacttcaaccgatatgcccttaggcacggcaatacataacatagaaatcacactcggaaagggtggacaattagctagagcagcaggtgctgtagcgaaactaattgcaaaagaggggaaatcggccacattaaaattaccttctggggaggtccgtttgatatccaaaaactgctcggcaacagtcggacaagtgggaaatgttggagtaaaccagaaaaatttaggtagagccggatctaaatgttggctaggtaagcgtcctgtagtaagaggagtagttatgaaccccgtagaccatccgcatggnggtggtgaagggagggccccaattggtagaaaaaacccgcaactccttgtggtttcctgactcggaagaagagcaaaaatggaagaaattactgatattcgattcttcgcgtcg

SEQ ID NO: 8382 - DNA, 395 bp, Glycine max
  unsure at all n locations
cttctcatcaatggactcctgacgtatacgaatgagtgcggttcgttcgataaattcctatctctntatctatttctgagatgtttggatttttcaaaactccatggacatgcagaagagaaatgctattcccactcggaccaagacataactttacttgttcaaataacaattaaggtgaagcagagtcaggaacaacgaatccctttatgataaacagattcattttgcaagttcgttattacgggtagttcctacaaaggatcggactaatgacgtatacaatacttgaattctcgatgtagatgctacatagttggttctcatccttcacagactacgagtataatangagcatccgtcaacanaaggatcaccctaagatgatcatctcg

SEQ ID NO: 8383 - DNA, 455 bp, Glycine max
  unsure at all n locations
agcttgttttgtgtataaaaaatgatgcatatgttaccaataatgtgagaaataataactctaatttagggggaaaaaggataaattgaaaacaatgaatgatatatgcctaaaaaatgaaacttattagacatatgaagaaatataaaaatcaaaattgatttattaatataatatccagctcaatatttaaccagttaatttatattatgaagttattttttaattaattgactgcgtgacatttgttataaatctgaattagaatatacattattgttatcatttaataagttgaatctagatatatactcgtggtagtaatttgaatgcttaaatcataaaaattatacttattataacgaccttacttatgtatnttttaataaatagagaaataatacaaattattctacttcaatgaaatatacgatatataatattttatatgaaat

SEQ ID NO: 8384 - DNA, 452 bp, Glycine max
  unsure at all n locations
ctaagcttagtcctgttgatctgangttgaaggtaggacccccatacttggggtatccacaactctggcatgctgtcctcttcttgaaatttatatgctcgcaaacaccacacatccaatctcctccagaccagctcattttcctgatcaatatccacacttgaatttttgaattataagaatttttggttccatcaattctcggtgcaaccagataaggactatatgtgcatgtagcctacttacacagtaatgagaaatattattagtccttgttttatgcattatgagttatgacttatgaccctaacttctattaaaggcatgcaattttctatccatatataggttatntgcacaaagaactactgtcttgggtgatagaatactctgtcaagatggcatagcaatcttgtcaagttttctactctactcaatattaatctattcat

SEQ ID NO: 8385 - DNA, 417 bp, Glycine max
ggatcttaagcgactgggctgcagcttataattgctagattgggagggattttattatacaaatttgttttcaatatcaaaagaattcccattgtgattgacaggttgcaggctattagattagattagacaaacttcttttcaatatcaaaataaatttagaaacagagtaacacaggaactttgttttcttgtctcatattttttcttaattacaagtctaacagtagtctaatagttgcatattagtatcctaacttaccttttttttttcttaaccatctcattcatcagggaaaaagaatcctaactaatccacataatttatgcagtgtatacagtcatctatacatcctaaccaaatgacagaagataacaattcaatttagacatcctaaccaaatgaaagcaaaatac

SEQ ID NO: 8386 - DNA, 453 bp, Glycine max
  unsure at all n locations
atgtcagtttactgcaactgacaatggctgcgccgaacccttttcaacctgccactcgctaaatactctggtcctatgctctctgcacattgatgcanaagtactcttcatatctaattctaacctttccattctgaacctgaaagacctgaagatcttggacaccattcaacaaaaaattgtgttttctactccaaatcttagttctctcacaatcaccaattatttatgtttcagtcatcaaccattctcctccacatgcaatctttcgtgtcttgaagaaggaactattcacaccactacttatatatcttactcggtctgtataggctggctgcaactcttcgctaatgtaaagatattgaaactttcttacgataccctgagaatactgaaagtaagttttctttagttaggtttctactctccttttctttntgatataatcctcat

SEQ ID NO: 8387 - DNA, 423 bp, Glycine max
  unsure at all n locations
actaaatcttgtcttttctcgcttgaagctctccaattgtctgtagaagacagctcaaaggactcggcaagccagtctgacgtgagtaagctgttggcagatcagtcctttgtatcttctatccttgcatcggtatgtctataaatccagtaaatgttccgtgttctttaaatgtattgatagaatgattgacaatatgttctgcactgaataataattcgtgcttctgcagcttcctggggttgacccaaatgatccatctgtcaaagaattgctggcttccttgcaaaatcagtctgaggtaggttttcttttatggagaataatcattgagtctgaagagaatctcttagaatatttcacagggggcatanttaaattagcttacctagatagccttgactcctttcatctctccctctt

SEQ ID NO: 8388 - DNA, 493 bp, Glycine max
  unsure at all n locations
atgataaatctttatatataaaanagtagacatgacggtattattgtaatttaaatcttgccgctcattttgagggtacatgcaattaattctatcacttcttttgtttccataatcagatttttaaaacgtaatttataactaattntgattacgattatttcttcttcttttaaaatataagaatggttaaatacttaattgcccattctaaattctcataaattatttcttattttccgttntatattctatgtagtgtgtaaggattttaacaaattagtgtgttagtgatcaaggttctctattaatatgagttcttataagtcacattgtcatttagtttgtttcctttcaactgattgtaattatcgtatgtaaaaatcacgatgttggaaatggatgatggttggtccgcagctattgttgttcaaaanaaaaatattngcgggacacatggtncactagtgagaactatgcatatcttatatac

SEQ ID NO: 8389 - DNA, 468 bp, Glycine max
agcttaatgattatgtaattctctttatactgtttctctggaagaaattatgcttagagataaagatattagaattgtttcactattttacttttatagtaaatgtaatcttattctattgtttgagtaatacacttttaagtgaaacaaaatctgtgtaaaactgacggatttgggctgttttctaaggagaaggtatgcattccataataattataagtggtacaagaataatgtttcttccattttatctatgcaagtaattcttgtttattgtttatcttcagctctttactaatactagtatatgctggttaatttcaaggtatatagttagaaagagcataaagagtgcagaagacatagttcgtttccctttccaacagaatgccaccatactttacttatcgcacactgtgtacagaggcagagagaatcttccattacttactgggcactatgtaagtt

SEQ ID NO: 8390 - DNA, 312 bp, Glycine max
  unsure at all n locations
ctaatgtgtgttcccgtatgatgcacaagttgataaaataatattnttcattttctaaaaattaatttaagattaaatatatctttaacagatagtacagttaattatattatgagaaaaaagtcacgcattgacatatataaatgtgtattatactcttacttttttttaacataccactcttttctttatataccactctgagctgattatgtaaaagagttaagctcaagtttttcttttaatttcatatattacatgttaagctcattcttttaattatcttatataaaaacattgattaaatattat

SEQ ID NO: 8391 - DNA, 443 bp, Glycine max
  unsure at all n locations
agcttgcattnggaattgcgaaagcctcactctatcattatgattagtacctgacatctcaaacaaacaaatcaaacgtaacaagacaattatagttgttgtttgaatacctcacccactcaagtgtatcacacaattatggcttttctctaatgaaacactcttgccttttaccactctaattccccttgagttcttaggcaattcaagagattatggccacaacaaagaacaattcaccaatatgtgtaaggtaaggctagagagacaaggaaaaggttaaccaagaaaaggctaacaatggttttaggcacaaatgaaggaaataaaattcagaatttatgaattcaagtaacaatccttcatgcaaccaatatattaccttanagagatttttnttaaagttcttaagcatgaaccattcacccaattttttntttttt

SEQ ID NO: 8392 - DNA, 362 bp, Glycine max
  unsure at all n locations
cattccacccaaacgcacccttcttcaaacattcggtcataggacttgctatagagctaaaattctggataaagcgtcgataaaatgatgcaagaccaaggagagatctcacctncgaaactgttgtatggctcggccaagtcttgatagcatccacttttgtttgatcaacggatactccatctttagacaccacatatccaagagacaccaccctttcaaccaagagatcacacttttccctcattccatagagttnttgtgctcttaggggctcaaatatttgttcacatgagtgaaatgctcctctatagatttgctatacaccaatatgtcatcaagagtaacaacaacacacttac

SEQ ID NO: 8393 - DNA, 361 bp, Glycine max
agcttgtagaatggctagacatgatacatgtcttggtttggtttggctcaaggataaaagggatgccccacattatttccatgacacatatgcaaaaatgatgatttggaaactttatgcaaaactggtcatgcatgcacctatgtggacactcaagtgtcaaatttttatggtcatgtgatgctagggctcaggattcatttcctctattatagtcaacccaacgtttccaaaatatgttcttttatcaatttgcgcattcatccgagtccatattgagcgtctgggaaaatctttacagcattcacccttcacgtgtatacacattttttcaaaaactaactatgatcagtgatatttt

SEQ ID NO: 8394 - DNA, 306 bp, Glycine max
  unsure at all n locations
agctgacccatcaactgccctatactctttagactggtgatccctangctctcgaccttgacttgatagaacctctttctaagcgaaggcgtttgacttgatcccatgttttactaaagtgaaacagaatctagtgcgaatcataactccgacatctatcatgggtggaatggattaatgcatgaagaaatgcatatgatacccatgccatttatgaataccggagcccgggaaattgtctccttcttagatacaacgtcttgnggtagcacagtgcccgacgtatgtatttcaagtgacatggac

SEQ ID NO: 8395 - DNA, 147 bp, Glycine max
agcttgcttctacagcttggagattgtatgtatgtactgcttgttgccgaaccagtataaaatactggcgtctgtcttcttctctccctacacatctttatctttccgctagcgcactgtttagattatctgcttttacattttggt

SEQ ID NO: 8396 - DNA, 373 bp, Glycine max
  unsure at all n locations
gaagtgccttatgaatcctcccgtacttatgccaccagtacctggaaggcctctcatattgtacatgacaatcttatacgagtcaatggggtgtatgctgtggcaacatgatgaatccggagagaaagagcgcgctgtttactacctaagtaagaagttcacgacctgtgaaatgaattactccctgctcgaaagaacgtgttatgctctantatgggcatcccatctcctacggcagtacatgctgagccatactacctggttgatatccaagatggacccggttaagtacatctttgataagccagctctcactggaagaatcgcccggtggcaagtgctgctattcgagtgtgatatagtctacgtcacc

SEQ ID NO: 8397 - DNA, 397 bp, Glycine max
  unsure at all n locations
agcttgttactatgataagagcatacctgttgtttcctgaagtccaagtacaagactttntgtcaataatatcaccaaaaactatcacattaacaaaatcacagcctctaagatttcgacaaattattaggtagccttgaagcattatgtttttatgattctaatctaccattctctttatatataatacataactatattttttaatttgtaatttatttataatattcaattatgttatgtaaaaaaatagttaaaataattaacattataatgattttagactatctaataatttctagtaagattttaatgtataacaaacctggaagcacagaaggctaccacataatccgtcccagaacaagtgaaaatactagttggatcatcataagca

SEQ ID NO: 8398 - DNA, 392 bp, Glycine max
  unsure at all n locations
atctcataataatggaatctttacaaataatggtacacgtactagttatctttttttaaaatttaaaatattnttttataaaaaaaaccgtattntaacaaatattggttttggtgttattttaacaaatatagttggacatacatgattataaaaaatggttatataaaaatttctatctataacttcatttgtacgggtgngtaaagtgggctgacccaccccgcttaaagttcgcccgcattggcagcggactgtgtctgtccgtcccgcattcttacactgatcaaataaatagatctgtcccttgctcgtgaacnccgcgggtcacatgagcatgtntgcangcataacttttaaagaatntcaatcttaatanaaatacaacataa

SEQ ID NO: 8399 - DNA, 394 bp, Glycine max
  unsure at all n locations
agcttgaagtgagaaagtgtggaagagtcagttttcctacttgtattcgttgaccacagagtggtacctcaagatatgtcgcgggggtcaggagaccttgnggatatcaggtggggtgctattgcctaaaaccaagcttgaccaatcccgacccaacccgggcatagttagtcagtgagaacctgtgacgtacctcaacaggcgagctcctggcagtcaaccgataaaagaacaaagaccacaaagcaaggaggcttgtgtggtggctggccagctatggatcttgagtgatatttggaagatagcctctggtaatcgattacaaaggatgtgtaatcgattacaaggcttaacaatggagacaggaagttaagatggcctctggtaatcgatt

SEQ ID NO: 8400 - DNA, 364 bp, Glycine max
  unsure at all n locations
tgaaggtgtgtagtccaccatcttttcatagtagaatactggtaatgtgtctactatcattatcatttnttctccgtcattgaggtgccacttgagctgccaggtctctccacctttgggcgtattctttgaaagatctgtgcccctttttgcacatgttctgttgttgtatcctatcccaagccattataccgacactacctagcgaaggcaacaattangtccttccaggaatagactcgggaaggttccaagttagtgtaccaggtaacaactaccccagtaagactttcttggaaggaatgtataaaaaattcctcatcttttgcgtatgcccccatctttngacaatacatctttagat

SEQ ID NO: 8401 - DNA, 369 bp, Glycine max
actaagctcacaccatgccaaaatacatgaaaatacaataggaagctttcttgagaagcaaggaaggtagcatccttgagaagctacaggggggctactcacacctctccattagcaaagctcgcccccatgccaaaatacatgaaaatacaatggtaagcttccttgagaacaaggaaggtagctttctttggaagcaaggaagaaagcttccttgagaagctagaggggggctactcacaccccttcaatagctaagactcaccccatgccggtatacatgaaaatacagacaatgtctttactacaaagattactatgatgccctgaatacaaggccttaaccctattctactatggtacccctaa

SEQ ID NO: 8402 - DNA, 425 bp, Glycine max
  unsure at all n locations
tcatcaagacaaacatctaatcattccaatccactcaattcatacacttgctcaatcaattcattctcaaacactcatttcatacaaaacaatccactgcataacattttcaatcagctcactgttcaaacaagctttctgtacaagcaatcaaacaactacactacaactgacatttaaataactgaaatctaaagaactaaaacataaagactgaaatttanatgactgaacataaatcataaaataactgagataaactaaatcgttcaaattgcacaaaattacatgtcctgctcctgtgattgctcccgtgcatgctcattgagatccaacacctgagcagctggtgaatcctgaggaataagctgctctagctcaaatagctgtgcanatggcatggaatcatcacagtatggtactgg

SEQ ID NO: 8403 - DNA, 467 bp, Glycine max
  unsure at all n locations
agctntatcaaatttcccttctaataagttttgtattccaagactttcggtttggtatgtatgatttcctagtcttggaaattagtggtataattntcaaggggatacctgtgactcgattggtgaaataggatctctcttcaaaaaagcatgttttttttaccattgcaaaaagaaaagattttgttgcgaatgaacaagatatcgagaaattgtccatacgtaaaatcataattattgatacaggccttttccacgtaaaaagagaatcttttgttacaatagaagcagaagtgatattgattattcaagaatcgaagtcaatttgctttatacatttacataatatatggcataatagagcctgcgattctttgatttgatgtctagtcaaatntcaaggtggaagttatagttctgaatttatccatgttangatgggaaaatgtgaaaaaaagttggatatg

SEQ ID NO: 8404 - DNA, 439 bp, Glycine max
  unsure at all n locations
acatccgatgacttagtccaactggacaagtaacatgtctagaaacctctttaaggataagctcaatatactggtattcaagtatactcccgttcctgctgggagttaaggtgaagttattacactaaataactcatggatgacatttataggtttacctgaatggatagatatacaatgatttaccaaccaaattggattaagatntaaaaatatattatgttgctattcttttcattgacttgtaactataaattgcatgagattctttcagatcttacaacatcattaaaatgtaaacaataaaatcatgattataattncttatgaataagaatcttataaatcattatattctgtataactaattagaaattacatacattttctatgccagaatagttttagaaatctcaatcaataccttcttaattcaacg

SEQ ID NO: 8405 - DNA, 284 bp, Glycine max
  unsure at all n locations
agcttcttctagacttatctcctcactactagataatacactttcaacatcggttatttagaacattctacatcggttctaaaaccgatgttgaaagtgacgatgttgaatgtatgaattttaacatcggttttggagaaccaatgttaacatacatatgacaacatcggttctccaaatacccgatgttaaacacaatgaacaacagcaaaaaaagtgcaggcatgatgaacgttgacatcggttnttcagtaaaaccgatgttaatatgttagtttaacatc

SEQ ID NO: 8406 - DNA, 361 bp, Glycine max
  unsure at all n locations
atgtatatgtttggtcgaagtgaatgataaatctaagttgtctcttatatcatgtgaagtaacgaatgcttgaagttactttattaggctgtttctttntttttttttaccgatggggtgcaatttttttcactatttttcaaatgggagtagtgtttgaattatttttcaaaagagggtgagttataacagtgttgcgactttagagttttcaagtgtaacacctgttatgactttaattttttttaactaaaatagaaaataattctacaattttagtgtaattttttttgacttcaaagatataagtttcttttttcttttccactactctgacagtgtaatatatatatatatgatt

SEQ ID NO: 8407 - DNA, 343 bp, Glycine max
  unsure at all n locations
gctngagatgaggaagtgtagaagggtgaaactttctgcttttattcgttgaccacaaagtggtacctggagatatgtcgcgggggtcaagagaccttggggacgtcaggtagggtgctattgcccaaaaccaagcttgaccaatcccgacccaacccgggcatagtcagtcagtgagaacctgtgatgtacctaagcaggcgagctcctggcagtcaacagataaaaggaacaaggaccacaaagcaaggaggcttgtgtggtggctggccagctgtgaatcttgtgtgatatatgggttatggcctctggtaatcgattaccaagggtgggtaatcgatta

SEQ ID NO: 8408 - DNA, 436 bp, Glycine max
  unsure at all n locations
tatgccaaaactntcattatattcttcggatatagtatcttcaaagcttgagtgttgaagtgaccaaatcttcaatgccataaccatgaatcatcaattgtaactctcatggcaatgccagtattagtagtatacttaaagcttattggaaaaaacttatatttcctttctccattttaactntggcaatctcttgccttttgggtatttttatcatagataatgcacgtatcttcttcaaggtgaagataatagcctttctccatcatttagccaatgctcaagagattatctttatgatttggaactagtaagacatctttttatgatctcttacctttctttgtctncaccatgacagtgcacttttcttttgactctaccatggtggtcatttccaattgaactntgactctgacagtggtcgcaatttcct

SEQ ID NO: 8409 - DNA, 468 bp, Glycine max
  unsure at all n locations
gatctctgagtcacctgcggcatgcaagctnttcgattcattctatgcacccatagatgttcacattgtgtttagtgcatttnttctcgtttagtttactttttataccccctgttgacgtgcttaagccattttacttaagtcgtttctcgcttaacttaaaaataaaataaatatccaccgaacgtttgaattgtattatccattaactttggttaanatcaattccgaccgttcggtcgtgccgtaaccacgttggaaatcaaaaagaggtaaaaaataatataataatcaaaaagacatcttttattgaaataaagcggaaaatcaattggacattttctctttgggatttctcattcttaatcgaattgattaataactaaagtgaaactaaaggctaaaatcaatccacctagtcaagctcgtccacaaaaataagcttttgaagttcgtcatttcattttc

SEQ ID NO: 8410 - DNA, 294 bp, Glycine max
  unsure at all n locations
gagaagtgtagtagattatggttcagttctttacgcacttctctctctttctaatatgcttatgaaaattgtttgcgtgaagaaaatccaagccgaggcgcttccgtagcgctttcgtgagtgattctgcgaaggttntcgaccggtcttcgacggtcttcattcgttcttcatcggtctttcatcttcatctggtatgtacctgagaccaagcttgtcaattcattctatatacccgtggtggtccacatgtggttccatgtatgtttattctcgtttcatttactctttata

SEQ ID NO: 8411 - DNA, 351 bp, Glycine max
ccaacttagttgattgagaccgattgggatacatgatgaggttgtcttttgcgggtatagctatgatgaattttccttcgagtctttgacatggtgggctcacacgagagattccgttgtgtgcacgatatgaaggaatcttgatcataacattttgagatgaagatttcccactttgccaggtatataaatacggcaacgcttaaaactgctacagcacgttatattatgtgttaatttatatgtgatgcaaccgaaaacaccaatgaatgatcaatctatcatcgtcaatccatagataagtaggagggtgatactctaataatgtcggttactttattgtattatcac

SEQ ID NO: 8412 - DNA, 430 bp, Glycine max
  unsure at all n locations
tgaatctggaagttgtccactgatacgtgatgcacttggaattctggtttcgacgaccagagcctccaaaacggtgatgaaatgaaataactcacaaaagataattctcatattcatccctctttctgtgaatcattacatctatttatactgattcttataacagaattgctattctatggaatattcacgattcaagtcttgtacaattatctcccacntctagtaattgctctaacagaatgcatatatgcctttaataccatcccgcccctttcagatgtaatctctgaggtacgttggtctctctacccttctcttgggcctctgctctttgttttctgaaattgcttggtgcaccttatcctgctggctgttaatctgcattgctagttgcacctcattctgttgattgtctccctctgctatg

SEQ ID NO: 8413 - DNA, 364 bp, Glycine max
  unsure at all n locations
agcttgagatgaggaagtgttgaatggtggaacttcctgcttttattgntgaccacagagtggtacctggagatatgtcgcgggggtcaggagaccttgtggatgtcaggtggggtgctatttcccaaaaccaagcttgaccaatcccgacccagcccgggcatagtcggtcagtgagaacctgngatgtacctaaacaggcgagttcctggcagtcaacagataaaaggaacaaagaccacaaagcaaggaggcttgtggtggctggccagctgtgaaatttgtgtgatatatgggttgtggcctctggtaatcgattaccaagggtgggtaatcgattacaaggcttaaaaatgaagacagg

SEQ ID NO: 8414 - DNA, 360 bp, Glycine max
  unsure at all n locations
cttgtctccaacgcgagctntgaccactgctcttncttcccgcgatgcttcttttcatatccgcctgagtgggcttatagcctaaaccatacttcccacgattttctttggcatttatcaggctagttatgtcgccgttgtctttgcctaaacccattccgggttcgtaaccgttccccaacataactcgggccatcattaccgctgcatcggacaggcaaggctgcccagagaaggagtccatagaggaaatgcttaccacctcacaagactggaaagcaggttctaacgattcctctgcggcttccacataaggcatagaggatgggcagctcaccaagatgtctttctcgcctgaca

SEQ ID NO: 8415 - DNA, 420 bp, Glycine max
agcttctcaaggaggtgagcttagtttttagatgggtgtgtttagctaagctctagcttttcaaggaagttttcgcaaagaagcttctcaaggaagttttctcatgaaagcttctcaaggaagttatctagtctataaatagaagcatgtgtaacacttgttgtaacttttgatgaatgaaagtcttatgagatacaattcaaagttcgacttctctccttcttttcttccttcaatttcgggctccccccttctctctttcttttcctccattaaagcatcctcttcaagcttcttatccaaggcaattcttggtggcgaagatccttcttccttggcttattccctagaggatggagcctgccctctactgttctcctttgccttccgctgcatctccatggtgtaaaatcaccattg

SEQ ID NO: 8416 - DNA, 393 bp, Glycine max
  unsure at all n locations
ctccccaattntctatanatagggggagaagtgaagtgaataagggttcagccccttaggcacttctctctctttcgaatgtgcttggaaaaattgtttccgtgaagaatatccaagccgaggcacttccgaaacgtttccgtgaggaatttcgcgaaggttttcgaccgttcttcgacgttcttcattcgttcttcatcgntcttcagtcttcaacgggtaagtacctcacaccaagcttttcgattcattctatgtacccgtggtggtccacacttggtttcgtgtattattattctcgtttcatttactttctatacccnctttngacgtgcttaagccattttatttaagtcatttctcgcttaacctaaaaataaaataaatttccac

SEQ ID NO: 8417 - DNA, 320 bp, Glycine max
atccttacgcgatgtgcacacctttcattgcgatctctaaacactctggcacgctccccttctacatgcgttactcatataaaagaagaataaaactattgactgccgtacagaagcaatgtcctctctcatatcaaatatgatgcatatccatcacacatttgaggcgggctttaacctagtcggacatctatttcaagcatacaaaaatatttgctctcgcttacatcatgtatactaaaaatatgaatatatacatacatattacatgtttgtaattatacacttaagatagtctatacattcatttatgatcttat

SEQ ID NO: 8418 - DNA, 342 bp, Glycine max
aattcatttttatcgtttttgtaaaatacttggatgaataatacaattaatattacgctacattgaaatgtgactttatgtataatgcatactctcacttatcactacaaccaatatattatacataaatatgtactataatacactacacctttatgattctatgctatgcaattactaataatttatacataatttgatataatatacaatatcaaccattatcttttacaataaaatattactatacaaatctatataaacatatgataactatcctatgattttattttttaatcctaaacttattcatttaacataaactataatactattgacgta

SEQ ID NO: 8419 - DNA, 326 bp, Glycine max
agcttgtaagtatttggtttataatttgcctgttccattaagcttttaatgtctctagaggttacttcctcgttgacatcttttgtcttgaatggaattgccatgacaggtttgctgttactgtctttgatatttggtagttgatattgtgttgtgggaggtaattccgactggattaactcaccatccttcacttgccaatttgttatgacatttgttgttggattacctatgatgtcttgtttccaaaggtagtctatatcctttctgatggcataagcatgaaaccaatcagagaaaaggacattaattttgactctatcgac

SEQ ID NO: 8420 - DNA, 393 bp, Glycine max
gcttggagaaccaagcctatcagaatgtctttcgaaatatagatgggaatagaggtaacaatggcggtaatgacggaccgaggcagaaccgggttgagggagtaaagctcaatgttcctcccttcaaaggtagaagtgatccagatgcctacctgcaatgactacactgatgcgcagaaagtcaagctagcagcagctgaattctccgactatgcccttgtttggtggcataaataccaaagagaaatgttgagagaggaacagtgagaggtacatacatggactgagatgaaagggtgatagaaaaaggttgtgccactactatacagaacctgcgaagaaactcaagggctgtccaaggaattaaccgtggagaatattataaagatgaat

SEQ ID NO: 8421 - DNA, 166 bp, Glycine max
gtccgcaagaattacaggaagatcttagagtcgaccatagcttagatatccatagaagccattgcatcgctcagcccatactacgaccagcctctgagatgcttcacgttcggagatgtcctattattacccaccattgaagaatctgaggacattctatgatgtc

SEQ ID NO: 8422 - DNA, 531 bp, Glycine max
  unsure at all n locations
cggtttgantcattccgtcgtcgagctncctagagncgacctggaggctgcgagcctcttccctattttttctattaatangggggagaatgtgtttaagaanagggttcaaccccttatgcacttctctctctctcgaatttggtgaagaaaattatttccgtgaagaaaatcccagccgaggcgctttcgtaacgtttccgtgagaaattacgccgagattctcgaccggtcttcaagattcatcggtcggtcttccgtttcttcagtcttcaacgggtaagtacctcaaaccaagcttttcaattcattatatgtacccgtggtggtgcacattttggttcatgtattnnttattctcgtntcatttgctttntatacccncttttgacatgcttaagccatttatttangtcatttctcgcttanatctannaatanaataaaccttcaccgatcgtttgaatgtatcgtcaatcattttgttaaatgaatctgaccgtcgtagtgcgtaccacgtggaatcaaaaa

SEQ ID NO: 8423 - DNA, 438 bp, Glycine max
  unsure at all n locations
tactaagctctgtaatttatgattganacctgcagtagtcccatattgatttatatgaatgaactcttaaacccgaaagccatatataactggactcaaacactggtgtacacatacggtttgatatataggaagcttcacatccagaaagaatgtaatttctgttgcaagacggacaaaacgaaatcaaacttcaatgatatattaaaaaatagtcaatgaaatacataattaacattatatatactgatagaaaaatcgatagaacactcaattcttgccacgatttattaaataaagggaaataatgtctggtacgaaggttaatgctcgaatattatacacgaagtatccttggcgggtntccgttaattccttaattntattcatttcttgagctatatgattatccaatcaaaacaagacanatacgattcg

SEQ ID NO: 8424 - DNA, 275 bp, Glycine max
  unsure at all n locations
ttcctcttttttctttatctctttttgcangccctgcagaggtaatatcttctacgtctgtagtatccccaccacctaaagatatatcatcattggttggttcactttccacagatctaatggtatctgctctagtttcatcagctgagagaacattctagagccatcaaccagaaacccaaaagggagaagggaaaggaaatgaaaagaaaagttagaattagacaatgcagctagaaaatagaaataccaacaaacatggacctatggacatg

SEQ ID NO: 8425 - DNA, 497 bp, Glycine max
  unsure at all n locations
tactaagcttgcacccagctcgcccaggcaagctcggttggcttctccagaaagtaccgctttctggagaacatcctggaaggcccaagtgggcctggttactatttgcaccccccttgtttactaaatacacccacttgcctttntttgctaattctttttccgtaacgttatgaaactttacgaatttcgtaacggtacttgttttccttccataatgttacggaaccttacagattatgtaatcatcccttttttgcctttcggaatgttacggaactttacggattgcgcactaacactctcttttaatttccagcatgtcacggaacttcacggattgtgctacaatgctttcttttgacttccggcatgtcttggaacttcacgaattgcctaacgatgggtgccaagtacctcgaagtggtcaaacgagggtcgcatcccaacaatgggatagtcccggacgaaaatanggtatgacaatgattatatga

SEQ ID NO: 8426 - DNA, 270 bp, Glycine max
  unsure at all n locations
aaattgttcaaatcgtgtctcaatagaattaattgattgatctaatatgtataaaaaaatactcaatatgaacagattcttcacgtgaatgtgtaatgtcattactaatattttcatcacaatgagggtttctatgaattntacgttnttcaccgaaatttggctctatatccatttcgatagccattttttatgtggattctaaagtccatgcaaaccccgtttccctattgtgttttaaataagtgataagaccttttaaatgatcta

SEQ ID NO: 8427 - DNA, 481 bp, Glycine max
ctaagcttaataaaatgtgaaattctacatcggcaaccaaacataatgtagtttaatgaacaagagacagaactcggtgacaagttactgacacatagaaataggtaaattgtatcagcacattactgtagaagaaagcgaattctgatataaaaaaaaatggtaattcagacaaaaattttcacacatactccggacatgacgagaagcaattgaatcagcaagccaacaaaatttctctatctcattacataagagatatctgagaaattatgtacgtacacccaattctcttaattataaggtctgactatgaatcatttaatattctgtattaaatacttttaattatttaaaaaaaccaaaactaaataaactgagctctttatataataaaaacactctctatgttatctaagataaattgattagtttgcttaaccataactttagcatacttgccttaattctgatatgcatg

SEQ ID NO: 8428 - DNA, 402 bp, Glycine max
  unsure at all n locations
caaaaaaatttcttggacttttactgctgcttttggttccctgttatatttcttggacttggttactcaccttgatgacttgaattatngcataatattctgggtggtttcctggttttggctgattctcttattggtgggtaatcaaattaagaaataaaatgattatggtgttcaacaataaagcaacatcagtaattagtacgtataagtaattagcatttgaacttctttggtacctttgaactgcctgaagcgttaattaattagctggggattcaagtcttgaaggagattgaaaaatcgttcatggccaagagaacaaatgctatctnccttagacctttcanntgtgataatacaatacatatatattatatttataatttatcatagatatat

SEQ ID NO: 8429 - DNA, 490 bp, Glycine max
  unsure at all n locations
ntctcaattaagaccaatcactcaactatggtattctttcttctgatgcatccacaagctactatacctagtattttaaacctatgcaggttttagttagtattctctgttagtctcggttggttgtaccaccactcagtattctaaacctcttcaagttgcactcaatattcgctaagtctttataacctctatccaagtattatttcaaaaagtctcttcaagtttcacacccaaagtaacaactactacttgacccaaacaacagttgttgtgttcacaccaacttaagaagcaataattcccgtggtgatcttctaagttatttcctctatcttaaggagctcgaacactatgcaattcgagatttccttntattgtgactcctctgatgaaggtgtttacaaatattctttctgaatatgatcaatgacatgtaaagtttaaacttgacgatgaaacaagttgcaacaaggtcaaatgagttgtt

SEQ ID NO: 8430 - DNA, 460 bp, Glycine max
  unsure at all n locations
agcttctcatccaccanaaagccaaaaagtaaacgtaataaccttcagttatagtatcgcttaatttgttttgaggagtgggagtttattatataatgactcgtaaaaaatgaaagcatatactccatatagtgatcttgatctatttggaactgcacatgtaatgagaggaaggcatgagcatgacccaccttgctttataatagcagtagtagtttattatgtcagccaacaccgcanataccanagaaaagaatcatgcttcatttccctaggtgtttgggaaaagtcatcgccacaatatagtttacatggaaacattaaattagaatttggtatagaaggagagggagacagaaagagagatgtggtgatggacccacccacgtgcaggccccatgaactcgatcgtcactagtcttcatgcgccaccacaaccgaaggaaacctatatactatg

SEQ ID NO: 8431 - DNA, 324 bp, Glycine max
tgacaatctaatgtagctcaacgctcctttggagtggcacgaatgatacacaatacacattctcattgaagattagatatccatggagtgacttctatgacactacaagagaagaattattgaacatggcaatataggcaacatatatttttatcaaatctttcacattttttatcaatcaccgccaattgttaatttttttgttagaatattaacgtgaagatttgaacctataacctctatcccttggtctttcattctctgaatgtcaattatcaaacacatcttatcagttgctttcagactcattttatatgccgatta

SEQ ID NO: 8432 - DNA, 317 bp, Glycine max
  unsure at all n locations
tcactcaatggataatgtattaccttatcttaatcactcaagaatgactcttggcatctcatggaaatcgtgtacatcaagcccacaattagtattgtttccatttgaattntctactataaatggttaaagtacagctttgcaaaaaatggatattcttgtttttttatcaaaactagtaaatactatcctaaacaccttgattactgtgctaatctccctagaattaagtgtaaccaaagtgaacctcacacagagatcactctcacatagagctaaattacactgtcactcagtgtacaacacaactttgtcat

SEQ ID NO: 8433 - DNA, 475 bp, Glycine max
cttcttccgcgtacgtgacttctcaccatctaatgcataggtgcagtggatattagataattgaattgactaaagctatttgtatgaattgactaacgctttattcacatttataattaggcatttactggatgtccatggcttcgttgaaatatatttaggatataggtatacatgttttctatgtaaatccatataagtatataaattttttatttgatatatatgtataccatatatttatctaatgatatgtttgatattattgttattattttatattaatttatatatatatatatatatatatatatatatatataatgaactctatgtgaatattttaatatatttatgttaatgtttttagtacgttaattacttatatatatattaatgtgtataatacatataattacttacatatatatataatgtgtgtaactatctatgcatgtatatatataatatatat

SEQ ID NO: 8434 - DNA, 242 bp, Glycine max
catgcaagcttgcaagttcattggttgttgatccacatattatctactccacgatgaggcaagtcttacttgaaaaatatggaaccataccttcaaatgatatgcaattgtatctggctaaaagaaaagtgcttaacacaaataatggtatacatgatgtatcatataatgatttgccaccatatgcagctgctgctccacataacaattgaagaagtataatcaaattgagtatggagcct

SEQ ID NO: 8435 - DNA, 501 bp, Glycine max
  unsure at all n locations
cagttgggcctgatgacgtacggaacataaatactaagcttgcatgtctgccataaaactcggctgtttgcattgataatgtatcccgaatcaagacaagcaccacgtagagatagagctgactgagatcgtattagatgtcattttcatgactataatccataccgacctatgcattgaatgtactaatgccggacggatgaagtctcactacatttgttgcagtgcttgatacgctacgataatgttattgatgcatgcgaaggaccagatcgttcatgttggaagttaaaggatgataacatacttatccgcgcgtacacgttcacgtttatatgttccatatgtaccccaccgtgacagattgcgatccactatccaataaaaatgcggctaatatgatcgacacaatatacttattatcatactgaactcatatatatgacaagtgcggacccgcatacatcactcgacgaattacgtattcaacatattgatccn

SEQ ID NO: 8436 - DNA, 276 bp, Glycine max
  unsure at all n locations
taatacaagatcttttgctcatctgttcttgcgccttcacccttcctcattcattngcatatttatttctttctgctgcgatacagatccgacgacgagtcctgtgaaggtactaataccatggacccgactgtcgatttcgggcgagaagcagatcagatggatgaggaagaagacgacatagggttatccccggagatggaaaggatggccgcccaagaggaccgagcattgaagccgcaccaagaggaaacggaggtcatatatcttggtgct

SEQ ID NO: 8437 - DNA, 488 bp, Glycine max
tattgaagatcctaacactgtccagagattcaaataatatcatgaaaacctaatgcacaatatgttataccacatacgcagcacacttttgttgatttatcatttaagaatgaattcaacatcatatctttgaataaccttttaattgattttctatcatccatgagcataaaactgaatagtttatcttcccacccccaaggagaattcatgttttaattactttacttttcaccatgatgatgttcattctataatcttatataagtaaaataaaattactttataatctcaccttcctggtctttactaaaaattaaatacaataaaatttaccaaaaaaaatgtaactgcaattacttcatcaataaacaaaaaggaatttcaattagaaatacgacattaaccaaaattgtgagattacaaagaattagaataaaaaacaagtggtatacaatcgtcaactaatcactcttacaaagtttaca

SEQ ID NO: 8438 - DNA, 295 bp, Glycine max
  unsure at all n locations
gctatctttntcctganaaaaaaatcaaataataacatgccctacttccctaaaagtgtgcatttttaagtgtttgtgccatgaaaagtaaggaatagcaagcaaagtacctcttttgaaatcccgaattgggagaaatcttctgcagcatttgccatcctgcaagcaattgtagcagagaatgatgatgcattggtttttaaattggaaaagcgcgtggtgaaaaaaggaatgaaaaaccttaagaagggtgaaggaatcgtaatcgggtggaaagtcgaaacctttttttttt

SEQ ID NO: 8439 - DNA, 435 bp, Glycine max
ctatgtggccccatccgatttcctggaatttgttcttctttgtgcatcttctttgatttgattaagtcttcattttatatgcaagatagcttacgaaacaagttgaagtataattagtcgggccaccctctctttctattatttgattgctattcggcgttgttatgcatttaccttctctctcttttattcatttgatcgtgtgagttgtatacaagtgttgcatactactggcagcaatttcttctttacacgagagaaagagcgagaaaacacgccccgtacaaatttcaaggcctggaaataaacttcttgatgcatactaactacttatcgacccactctatattgggtaccctaacttgctactactgtcgcgtgtatgcttatggttgtttctacttctccatcgacgcttgaatgctagctacactt

SEQ ID NO: 8440 - DNA, 429 bp, Glycine max
  unsure at all n locations
agcttggagaggatgcttcaatggaggaatagatagaatgacagaaagagagaggggggagcacgaaattgaaggaagaanaagggagagaagttgaactttgagttgtgtctcacaaaactctcattcatcaaagttacaacaagtgttacacatgcttctatttatagagtaggtagcttccttgagaagctttcttaagaaaacttccttgagaagcttctttgagaaaacttccttgagaagctntcttaagaaaacttccttgagaagcttctttgagaaaacttccttgagaagctatagcttagctacacacacccctctaataactaagctcacctccttgagaagattcctaaataagttagagcttagctacacacacnctgtataatagctaagctcacccccatgccaaaatacatg

SEQ ID NO: 8441 - DNA, 395 bp, Glycine max
tatttcgatgatgccaaagactcaagtcaagaatcaagattcaagccagtcttatgaatcaaagagtcgttctatctggaatcaacattcaagtgaagaatcatgagaagactcacgatattcgagaacatcaagaacagcatcgagacaagtataaaaagaattttttgaagaaaagattgaatagcagaatttgtccaacagaatttttgaaagaagaatcttttatcgaagtttttactctctggtaatcaattaccatgacgcagcaatcgattaccagaagcccaaaacaagtttataaatattttacaaagtagctatcgattaccatgggcctgcaatcgattaccaatgtttttgaacgttggatttcgcaattcaagagtcaccac

SEQ ID NO: 8442 - DNA, 245 bp, Glycine max
cttctttgagaagctacatccttatctatccacccctctattaactaaattaacttccttaaaaataattacggatgaaaataacgcaacaaataatcaaacatcaaacataattactaataatatatagatatatatatcagggtgttacacatcatatattgagacgctcgaaattgaacaatggaagctctcgaaaaattaaaattgtcataaattttcacacggatgtgcgatcaggcaca

SEQ ID NO: 8443 - DNA, 383 bp, Glycine max
  unsure at all n locations
tctgttgttcaactttgagtgtctcgatatattatgctcctgaatcgaacatccgagtganaagctatgagcattcgaatttcttgagagcttacgctgctcaatttcgagcgtctcgacatgtgatgttcctgaatcggtcccccgcgtgtatagttatgaccatctgaatttcacgagagcttccgctgctcaatttcgagggcctcaatatgtgatgtgcctccaacatcccagtgaaaagttatgacaattcgaatctctagagagcttccatcgctcaatttcgagcgtctncggatattatgcgcctgaatcggacatccgagtgcaaagctatgaccatccaactctcttacccgcttcatagttcgatttccacc

SEQ ID NO: 8444 - DNA, 373 bp, Glycine max
  unsure at all n locations
agcttatccagaggatgtgttttatttacattcacgtgttntagaaaaagccgctaaatgaagttctcaattaggtgaaggaagtgttgaatgacagtttggggtttctcggagcttacaatgggtgagtctgcttgatggctggatttgacatcaaattggatcaatatcacgaataaaaatatctgagttatctaatcgattataaagcaaacgtgttgtggaaaaacgtttgaagacacggactgtgttttattccatcctgagtgcagttgttacagttgttgtttgctatcacgtatgggtttggctatgataatctaagtgacacttacaaatgaagatgaactccactctaatagttcacgtattg

SEQ ID NO: 8445 - DNA, 436 bp, Glycine max
tctacttcatagtctaccacattcatatgatcaattcatcatcaacattattgtcagtcgtctaacctttgatgatgttgccagaactattcctaaagaagaattctaacaaaagaataagaaagatacgcaggaaaattccaagcatgcaaaggctttaatgatgacgaaggtagatcaatgtaatgtggctctaatgggagttaaaatcatggcagatcaaagtcttgaagaagaaagaacctcatatactataattgtggcaggagatgacacttaaagaaagattgttggcctaaaaagagtggaggagataaactatagagaatcgagctctcaacgttgtgttgctagcacctcacataatatggaagccatgtgtagtgaaacaccaattggttttagaggtggaagacaacttcatgatcgttggata

SEQ ID NO: 8446 - DNA, 341 bp, Glycine max
  unsure at all n locations
aagaaaaaaagttacgagttgggacaagaccttgcccaattcatgaatgtcacaccaaaatcttgaaaactgattggaagtaaaacttgcatcttttataaaattccattattatttgaagggcatataaaaaaaatgttcatagtagaagaatttacactatttaattaaaaaatgtttttctaaaaaacacccacatttaaaaatgtagaattgattacaaaaaanaatgtagaatcaaatttataataaataaatatacagaaatacggaatgcgagggaaaatatccattaaatatatatntagctntatacatgttgataagttattagttattta

SEQ ID NO: 8447 - DNA, 469 bp, Glycine max
agagtgagtcattatgaaacatattcttgttaccctactatctttttgtatagtggaagaatctccatattagagaattataatcgtgtgctcctattactacctttaattactaagtgcctatcttagctttcccaacagtaataatagagtttagttgtgaatttgagaaaaagaattatgcaccttaaaaagttttatatagtcattcaattataattattatatatgataagtttattaatttttataataattatcttaaaatagttcaaacataaatctatgattgaatgactctaaaattattgtatatgcattacattctctgaattgtgatagattagttgaccatttactaaaattgaatgtaacttttatctattagtatcgtaaaaatctacaccttcaagtcaatcaatcaaaaaccattgttagtatcatattttacaatagctatgggcatgat

SEQ ID NO: 8448 - DNA, 556 bp, Glycine max
  unsure at all n locations
nnccccagggaggtcagcgacctanagtacgagncnnccntanantnngancnnganngcntgccagactctaacggcacagttggccgtctaaccggaacntggtttactttcatcattaatgggcntaaagcaatcanaggcttgttatagcctctaattctataaataagagaccaaattaccgtttaagtgagcaccggctcgcttagccgcatgcaccaaaaattctacaaaactaaattggccttgggcttaacgagacagacttgcttagcccagacttattctcaatagaggcatgctatgcttatcgagcgtggcttatttctccaaaatttcttagttccctgttagaaacttcagcttgaccatttgttgtggatggtatggtaggctacttgtgtggacattgaatgccttancaccttctgaagctggttgttgaaaagtgagagccccatcctgattangacccttgacacccaagcgagcaaaatactttcttcagacttactataatttacatcgtctttgggcagcactgctcacccat

SEQ ID NO: 8449 - DNA, 188 bp, Glycine max
  unsure at all n locations
tactaagctgctgtgttacatacctgctcacgatcagtgngcggatcttctttctagccaccctcatccaccagatttcagcttattagggacaaactcaaggtgtttgagctctctgaagctcacccaccttaagtttggggggggggggcctcccctcatcctactcacttttacctcccctcctc

SEQ ID NO: 8450 - DNA, 454 bp, Glycine max
  unsure at all n locations
tccccgacgagcttcttcttcgcgaggcttctctggcagcccttggacccatttgcattcgaggtaggtggccttcttcttagctttggttttggtatgcactacattagggtaggttagtggaaccttatggtagaaaacggaaccttatgatagaaaacgaaaccttatggtagaagacgccngaaaaatggcgacagcttggtgacggtggctcctttccgaagacccgttaggggttcttctggaacttccggaagatttccgaaagaatagttgttctggaaccattgaaacgtctttcagaagtactggtctttcngaaagctcccggaacacctattccgataagttccggaacaagtggttgttcctgaaacattccngaangaaggttctttccgatgacctttcanntggttccgaagcacttttcggaagagcccttctttct

SEQ ID NO: 8451 - DNA, 436 bp, Glycine max
  unsure at all n locations
ggataagagtagtaaatgatgaagtgatacctttaggcaatgatgcactgccatgaaattcctgaatgccttcacaaatatcagctcccatcgtgctccaacaagctttgaaaaaatcgaagttgaagctgtatggtccaaggcttttgtctccagcacagcttcaaacaattgctttgatctcttcacaagaaaatggagcttctaaccaattactatcctcattgcttatctgtttgaaatccaccctttccatctggggtcgtgaaacatagttctcctaaagcatgttagaaaagaagcgtttaacttctttcttaacccctaccacatcttcaatataactgcatcagaattaacgcactntagtttattcttctgacattctgttcaaaggcaagagtggaaaaattgggtattgataatcccaagtttc

SEQ ID NO: 8452 - DNA, 311 bp, Glycine max
tttcgagcgtctcgatatactactgtacacaatcggacacccgagttaaaagttattgtcgtctgaaatggctcacaacttttgtttcaattacgaacgctttgatatattacgggacttcatcggacatcccagttaaaagtttatgtcgtttgaatttgcttaaagcttctgttttcaatttcgagcgtctcgatatattaccggactcaatcggacatccgagttaaagtttttgtcgtttgaattttctcaaagctctctgtttcaattacaaagcgtctcgatattctacgggacacattcggaca

SEQ ID NO: 8453 - DNA, 488 bp, Glycine max
  unsure at all n locations
ntctacaaaatcaaacgaacaataactttaactcggatgtctgattgagtcgcgtaatatatcgagacgctcgtaattgaaaacagaagcattgagcaaattcaaacgacaataactttttactcggatgtccgattgagtcctgtaatatatcgagacgctcgtaattgaaaacagaagctctgagcaaattcaaacgacaataactttttactcggatgtccgattgagtcccgtaatatatcgagacgctcgtaattgaaaacagaagctctgagcaaattcaaacgacaataactttttactcggatgtccgattgagtcccgtaatatatcgagacgctcgtaattganaatagaagctctgagcaaattcaaacgacaataactctttactcggatgtccgattgagtcccgtaatatatcaagacgctcgcaattgaaaacagaagctctgagacaatcaaacgacaataactttttactc

SEQ ID NO: 8454 - DNA, 362 bp, Glycine max
  unsure at all n locations
agcttcatggngtttcctgaattgngttatcaaattactcaggtggttatttgagcaattatgcaaaattttattttctttcctcttcccatctcatgtgttggaataaactatactacacggtttctctgggttttgatcttttcttcttcttttgtcaattttcttgctttgttgcagcatgaagtttggtctaatgtatagattcttcttgtctgtttcttttttgtaggatttgattactactggatgcctgacttgagttgtgtgaagtgatgaactgtgttttatgctcgtttgttttcaattgtttctcacgatgtgttattgggagggttgtagtgctatggagtntatatgtg

SEQ ID NO: 8455 - DNA, 98 bp, Glycine max
tttttaaagggtaaattactcatgtgatctctatagtttcaagattcttacctctttagtctctatagtttgaaagcggctgttttagtccctatagt

SEQ ID NO: 8456 - DNA, 375 bp, Glycine max
  unsure at all n locations
agctntgagcanattctaacgatagtaactcttttctcggatgtccgattgggtcccgtagtatatcgagacgcacaaaattcagaacaaagcctctgagcaaaatcaaacgaaagtaactttttactcgtatgtccgattgagtcctgcaatatatcgagacgctccaaattgagaacagaaactctgagcaaaatcaaacgacaataactttttactcggatgtccgtatgaatcccgtaatgtgtcgagatgctcgtaattgaaaacggaagctctgagtaaattctaatgacaataactttgtactcggatgtccgaatcgtaatatatcgtgacgctcgtaattganaacagaagctcttagcatattct

SEQ ID NO: 8457 - DNA, 488 bp, Glycine max
  unsure at all n locations
cttcattntcaattacaagcgtctagatatattacgggacactttctgacatccgagtaaatagttattgtcatttgaatttactacgagcttctgttttcaataacgagcgtctcgatatactacgagacacaatcggacatccaagtaaaaagttattcctgtttgaatttgctacaagcttccattttcaatttcaagcgtctagatatattacgggacacaatcggacatccgagtaaaaagttattgtcgttaaaattttctaagagcttatgttttcaatttcgagcgtcacgatatattacgggacttaatcggaaatccgagttaaaagttattgtggtttgcatttgctacaacctttcgttntcaatattgagcgtctcgatatattacgggacacaatcgaacattcgaataaaacattaatgtcgtttgaattgctatgagcatctgttctcaataatgagcgtctcgatatacta

SEQ ID NO: 8458 - DNA, 379 bp, Glycine max
  unsure at all n locations
tggcagtatcatgctccttctatacctgcgcgtttgaatgtcgtatcggtgttgatacaacctgtgtgcacccaaatcatgtcgacaaacaccatgaagacaataatagcttatttttcataatgaggttctcgttgatgttatgctcctgctaagaaacctatatctggttttcttgtcaacaacattgttgtcgtgtaagcttgtgacattgacaatgggacacaactgtcgtaaagttgacgacacacattatctttctcattctatgttcctaaaggttttcattcttgacaaaagaatttggtggtggaacacatgcttgtcgtatcngatgtcatataagcgacgatggtactggccagaatcatgactataa

SEQ ID NO: 8459 - DNA, 292 bp, Glycine max
  unsure at all n locations
agcttgtaggattatggnggacccgtcatatgtggtactaggtggcgatcgggagatggtgcaaatcaactctcccacatccacaaatcacacatgaacccaccatccccagttgcccaccttcaactgagctcgcgtacccccacgtagcccttattctcgttcctcttagcaccaggtccccatcaacccctccaagctttcacaatatccaaacatcatgaactaccctaaaccaagaaaacagggcagaggcaaaaaaactctattcaaaacacattccaataccaca

SEQ ID NO: 8460 - DNA, 459 bp, Glycine max
  unsure at all n locations
tcttgcgtagccgctcttggagctcagaaaatcccaataacaaatccctcttattactagctattctgaattctttagttcctgaatgtacaaccttcaaattgttgctcattcccctctttgttttctgcaaaaaagaaaatcaatatcaaagaaaacatggatgaagccctaaggatgccatgtacatgtgtatttctgaagatatagtatttatattccatcaagcatacattgactgctgattacatgtaatagactttttataacatggttgccccaaatcacaattaanaagcacaactaccaatctttcagagtcctttggttaatttgacttgtctccttctgtggtggggttctaattaataatattatacttttgccttccaaaaaaacacttatgactaatcctcttttcattaatcctattctgtatgttattggatacaagatcat

SEQ ID NO: 8461 - DNA, 418 bp, Glycine max
cgatgatcctcgtaccgcccgcgtccttgagtcacctgggctgcagcttaacattcatttcagcgttagattattacggactcatcaacatcgagtagatgttctggcgttaaattgctcggcctccagcataaatatcagcgctcgatatatacgggactattcatacatcgaaaaaaagttgtgcggttgaacttgctaaaattcacatcatctcgagtgctcgttatatacgggccaatatacatcgagaaaaattattgtcgtggatcgcattagcttcatatcatacacggctgataatacggactaacaacatcaaaaaagtatggcgatgatttttatacttacattaattgacggttataatacggactcataattccacaaagttttgtcgtacttgtaactcccatct

SEQ ID NO: 8462 - DNA, 426 bp, Glycine max
  unsure at all n locations
ntaagcaaattcaaacgacaataactatttactcggatgtctgattgagttccgtaatatatcgagacgctcgctatcgaatgttgaagctgtgagccaattcaaacgacaatgactgtttactcggatgactgattgagtgccgtattatatcgagacgctcgaaattgaatgttgaagctctgagccaattccaacgacaataactttttactcggacggcctattcactgaccgattatatcgggacgctcgcaattgcatgttgaccctctgagctaatacaaacgacactaactctttagtcggacgtctaattgagtcccgaatataacgagacgctcgaaatagaatgttgaagctctgagccaattcaaacgacaataactttttactcggatgtctgattgagtcacgtaatatatc

SEQ ID NO: 8463 - DNA, 362 bp, Glycine max
  unsure at all n locations
agctntagtcaaacagaataatccanaaatgtcttagaattgggtgttgaaaaagcataacaagactttctgtgattggtttaaagatacaatctttgcagatgagaatgctttataaacattaagaaagctagcagatgggcctaaaagaaatgttataacttgacaaggatacgacataaacaagtattcattttacacaaaagcacaagatgacaaaagttcaatgcataacagcggggtcaccctaagggctgaatctcaacactttgcaagtgtcaatgacgccaatccctgtgtagcttccattcctttacttgggttcatagatgaaaattgggagcttaactatgtgaaatttg

SEQ ID NO: 8464 - DNA, 460 bp, Glycine max
  unsure at all n locations
tgcatggatttacattctccnctttctcaagcaaattcttaattcttcttgacatcatcaaaatcttcatgatttacattctccctctttttgatgatgacaaccacctgtaggttaggagcaacaacaaagaaaatatctatttgcatatagtttactcccccttggttttacaatgattgcttatatgagacaattgaagatttcatatttttcatatataaaaagttgtctcataaaacaatagataatctntcttactattgtatcttttatctttctcttcccctctgtcaacatcaaaaacaaatcatgaatagaaaggagaaagatgttaccactctgtgcaatgtatgagaataagtgataccaacaggcattaaaacaatcattcaatattaatcaagcaaaaacaagtacactaacacatcaatcaaacacaatcaaacaccatcaatca

SEQ ID NO: 8465 - DNA, 218 bp, Glycine max
  unsure at all n locations
tcttcattcttcacatgtacgtacgttctcctggacttgattttctaacataataataaaacacctgtttgatagatttattattagttattattatccaatattttaagtatgttgtgtggtttaaatattctatgtgatttaagactcagattctattntaaataggtttaattactattttagtccttgaatttgaagagtgtattttttttagt

SEQ ID NO: 8466 - DNA, 231 bp, Glycine max
caaccgttgctgggacaattgtttccgcttacatagtatacttcagttcgcaaacagtcattcattattctttgagtgtttcttgcgaatagttagaatccatatattatgtcttgacttggatagatgctgctctgtatagctgcttcttgtttgcgacgctcaacttcctcgggaatttagctccatctgatctagagattgaagctacttgtctgagatgcatcacac

SEQ ID NO: 8467 - DNA, 297 bp, Glycine max
  unsure at all n locations
agcttatggatgctgcagntatattaacgtcatatatgactctgatcactttttagatactttgcactcattagaaagctagtattttgcagaaacctcaatattgtcgatacatacaatgatagggcagcaggagttaaacaccatgtgtaaattaatattatgggtcctattactttaataacactgcttagactctgccatattaatataagaactcacattcggaaagttgctatattttggttagcttttcatccacctgcatagagaattattcatatacatatgcattaa

SEQ ID NO: 8468 - DNA, 185 bp, Glycine max
caacaagctgagtgggtaaacgcgcagagatagattctgcaccctttatcattcaggaacaacaagttgagtgggtaaacgcgcagagacagattctgctccctttatcattcaagagcaacgaggcgggtgataaacgcgtagagacagattctgcaccctttgtcatttagatttcacaaagt

SEQ ID NO: 8469 - DNA, 479 bp, Glycine max
  unsure at all n locations
tctagccaaatggacttaccttgaattaattctttgtagctccttttgagccttgtttcccttttccttgttttgaagctcactacaagccttaagtgaaaaaccatgatattaccatatccttaaggaattttggagcttttgaattgttttgggaataagtgtggggggtttttgtttcattggacaacttgttttgttggctatgcttcatgatgtattttgggccatacttgatgtacaatgtacattgtatattggttaaatgttggacatgctgaatgaaatgttgtttctcaaacgctaaagagtaaaaaaaaaaaaaaaaaatcgaaaaaagaaaaagaaaagcaataaagttgagtgaataagatcttatatggcacaagaatgatgaaactcttggttctactcttcatgcttaattcttatctntaccttcttctattttcttatttttcttcttaatatgcacttat

SEQ ID NO: 8470 - DNA, 365 bp, Glycine max
atctctgcaaaagctgctcctcttgctgcctccagagttcttttcccgaaataagcactatggtgtgctttggaatctatgcaaatcatctacttaccctaattctgcaaaaaaataggctttaaataggctctaaattcgtaacgttgcgcttaacgcaagtaagtgggtttgagcttagcgccagtcgtgcattgagcctggctgaagacaactactgcggttagcgcactgatctcgcacttagtgcgcgaccttgatattgatgccctgccagattcttctgtcgcgctaagcgggctgaagctgcgcttagcggtggatgagcgcttagcccactgatgagctaagctcaactgtcactt

SEQ ID NO: 8471 - DNA, 492 bp, Glycine max
  unsure at all n locations
ntacatgaattntattaacataaaaaatttcttcaatcatagtacctttgatatatctaataattctcttagctccttgtagatgactaacgcgtggctcctcaatgaatctgctaagcaaactaactccaaattatctggtcttgttgcaaccagatatctcatatttccaatcaaactcttatatagagttgcatccacctttttttccttcaacatctcttgtcaactttagctcttcttcaactagtgtggaaacatgctttgaattttccatctcgaatttcttcanaatatcacatgcatacttcctctaggagatgaanatcccaccatctcgctaattgacctcaatgccaagaaaatangacatcaggcctaaatctgtcatctcacaacatcttatcatagcttccctagattctgaaatcaactntgaattcgtgtcagtgaagattagattatcaacatacagacacacaatgagaatat

SEQ ID NO: 8472 - DNA, 294 bp, Glycine max
  unsure at all n locations
gctcctgaatatgacagccatcgttttaggagtgctgagcaccagcagcgcttcgaggccattaagggatggtcattttttcgggagcgacgcgttcagatcagggacgacgagtataccgacttccaggaggagatagttcgccggcggggggcatcgctggttacccccatggccaagttcgacccagacatagtcctttgagtttatgccaatgcttggcctacagtggagggtgtatgagatatgcgatcctgggtgaggnggttagtggatcccattcgatgcggatgc

SEQ ID NO: 8473 - DNA, 467 bp, Glycine max
tctacttatgtggcagggcgggcttccttcaccttcttgtctttaacgcgaactttgaccattattcttccttcccgcgatgcttcttttcatgtccgcctgagtgggcttatagcctaaaccatacttcccacgatttccttgggtatttatcaggctagttatgccgccgttgttttttcctaaacccatcccgggttcataaccgttccccaacataactcgggccatcattatcgctgcatcggacagacaaggctgcccaaagagggagtccacggaggaaatgctgaccacctcaaaagactggaaagcagtttctaacgattcttctgcggcttccacataaggcatggaggatgggcagcttaccaagatatcttcctcgcctgacacgatgaccaagtgccccttcactatgaatttcagcttttggtggagtgtagaaggcacaactcccactgagt

SEQ ID NO: 8474 - DNA, 347 bp, Glycine max
agcttataagtgcgggtctgggagacgaaagtcatgtggtcgcgatatgtgaagatgatgttccaagaactctggatttggtccgaccatgcccttctgattttcagctgggaaattggcgggtggaggaacgtcccggcatttacacaacaagcataatgtaaacctttacgggtttaaaagctctatagttgggcctaggctttagagttttcattttgttaaggctttgtgtcttttgtctttgaatttataatacaaagatctttcttcatctgttcctggtctctacccattctcattcatttgcatggttacttctttttctaaaacggcagatccgatga

SEQ ID NO: 8475 - DNA, 431 bp, Glycine max
  unsure at all n locations
ctaagcttgagccaaatcctgactcaccatanaccttgacccaggtgagaatgccaatccttaccctcggaagcaaaaaaaaggagaagagaaggaaaatttccaatcaaagaggaagcataaaaaggagagaaggaaaatttccaatcaaagagaaagaaaagaagaggaaaggaaattcccaatcaaagagtgggagaaagaaaaaagaaaagaaaagaaagaaaactcccaatcaaagaatgggagaaggaaaaaaagaagtaaaaaagaagaaagctcctggtcaaagaaactagaagaaatgtgcagaaaggtcttttgaccggacgatatctgaacaatacagaattgtcaccaaatgaacaaaaaaagaaggaaaggaaaccacgacctataatggtcttctccctttaattaccaaccaaaat

SEQ ID NO: 8476 - DNA, 443 bp, Glycine max
  unsure at all n locations
agcttcttatccaagacactctcttagtggagaaactccttcttcttagcttattccctagtggatgacgccttccactcatctcttctcctttatcttccgctgcatctccatggtggaaaatcaccattgatggacattattgaagctcaaagatccagtctccatagaagcttcacaagcaagcttcgattagttagaccacaaatttcattttatttaagggtaaaatataattctaaggtaaagtttcgcctttttttatcgttacaagcataatattataataatcacttcaaaaagtgacaacataantaaaagagatatatataaccatttattaattacaatcataatgtgttatacaataaaattatcaaaataacatctttcattacctagtaaacatgatcatgtaccatcattacaattatccaatatat

SEQ ID NO: 8477 - DNA, 272 bp, Glycine max
cccggcatagtcggtcagtgagatcctgtgatgtacctaagcaggcgagctcctggcagtcaacacataaaaggaaaacaagaccacacatccacgaggcttgtggtggctggccacctgtgaattttgtgtaatatgtgagatatggcctctggtaatcgattaccaagggtgggtaatcgattacaaggcttaaaaatgaatacaagaggctaagatggtctctggtaatcgattaccaagggatgtaatcgattaccaggcttgaaaac

SEQ ID NO: 8478 - DNA, 317 bp, Glycine max
cgctactagaacacacaggagtccacttataagtaagggatgagattatcgtaattggggttagaatgaacatctgtaggaatccttacggtatcaaattgaggcttattttgggatgtctattgtatcgaaattttgcctgtatgatcatgtaaaattgtgtgaggggtttactccccatggattgagaaacattgttgttcaattcgtttgtgtttatgataatattaacgtgataaatattgggatcatgaaataatgattgacaatatgtataagtgataaatttaatatgtgatgaattgtgggacaacatg

SEQ ID NO: 8479 - DNA, 460 bp, Glycine max
  unsure at all n locations
tanagggattatttagatggaattcttctagtataactttattcaatgatgccatactcatatccatatgatctattcttgacaacagaaatctattgctcaataatgtgagatcctgtcccagcaatgaatacaaatatatatgtgatcattatattaaagcaaatacagtttacggcccaagacaaaataaatagatataacgcccacacaaagtgtcattcagcaaaaacaagtgtaaaattatcctagaattagcaaccaaattagtagttctaaagagaattgtgatatttacgcttttgtaccaagtaaagtaaattatgaaataccttctttctattctattttcattttctttagcctgacagcctcacataaaattaataggaagtaaagttcataaggagcttgacactactcaacctcaggagattcacgactatcatagcaaaataac

SEQ ID NO: 8480 - DNA, 570 bp, Glycine max
  unsure at all n locations
ttatattcactgntcantcaccaacttaatgattctaaatcttcnttacacctctntcttcntnncccgcgcagggtgatgcnttgatctactancccgcgacctnnananncnacctgcaggcatgcaaactaggactatntaatctgataagctctataatttttgagccaccatttaattaaaaaagtaggttaggccagactttatgtaagccaggacgtaagcccctgctcgcatggcccggcctattctcacccctaagaatagggatttcggaatacatcggcaatccacaaataaatatgccaaagacctattccaaaatatttacttatggcatcggattggcacactacatttatggcacataagactacatctgaaaaggaatgagtcaagccgaacaaagctcacttcatggcgtggtggccaagcacacatagcaaaacctgctttgaactgggcgcccaaaggaaaggaagtgacgtgtcggtctgaccgacgaaagaacgcagaggatattaaattatgagggcggaacaatttctaacgagattcctttaatcn

SEQ ID NO: 8481 - DNA, 362 bp, Glycine max
  unsure at all n locations
actatacaatctcaaccttgggaatagcctacatatcacgttctgtgcgcgctgtattgtctaatccaatanaaagcacacgttactaactgaaactaaggtgcgtgtggattatcgttgaaaccacgctgcacagagaaattgcatgttccaacgcaaaaattatcaagcaactatgctgtagctttcatacagtatgttgcagctgggttcaattgcttctcaaacacacaccaagtgccaacagagttcgcattacctgctctgacaaggcggcatcatcatccaagctatgagaggtcactttctcagtaatatgaggtccatttgcttcaagtatcatcctctcacgaaaaataata

SEQ ID NO: 8482 - DNA, 338 bp, Glycine max
  unsure at all n locations
agcttctcccgcaattttctataaatagggtgagtattgaagtagaaaaaggttcagccccttaagcacttctttctctctcgaaatagctgaggaaaattagttccgtgaagaaaatccaagccgaggcgcttgtgtaacgtttccgtaacgtttctgtgagtgatttcgcgaaggtttttgaccgttcttcgacgntcttcattcattcttcatcgntcttcagtcttcaccgggtaagtacctcaaaccaagctttgtaattcattctatgtacccgcggnggtccataatatggttcatgtatttgtattctcgttntcatttactctttatac

SEQ ID NO: 8483 - DNA, 475 bp, Glycine max
  unsure at all n locations
tctacttatgtggcagggcgggcttccttcactttcttgtctctaacgcgagctttgaccaccgctcttacttcctgcgatgcttctcttcatatctgcctgagtgggcttatagcctaaaccatacttcccatgatttcctttggcatttatcaagctagttatgccgccgctgtctttgcctaaacccattccgggttcgtaaccgttccccaacataactcgggccatcattactgctgcatcggacaggcaagcttgcccaaagaacgagtccacggaggaaatgcttaccacctcacaagactggagagcgngttctaatgactcctctgcggcctccacataatgcatagaggatgggcggctcgacacgatgtcctcttcggctgatacgatgaccagatgccctctcactacgaattctaactgtcggtggagtgtagagggaacaaccctcactgagtggatccat

SEQ ID NO: 8484 - DNA, 440 bp, Glycine max
  unsure at all n locations
ccatatattatataagatctgaacaagataagataagattggatgaaataaaatctccattagactagataagaatggatgaaataatctctcaatgaaataaactcctcatcagatcacaattaataaaataaaattgtctgctctcttcaagttcaagcccaattcccggatccaagcccaattgcttataattctccctgaattaaaataaaaacacacaattagtccagtaggccccaatgataaaaatgcataattaatttaaccattaaggctaatcggtaattaaaatggtgacaaacacggctacgaaatangagaaaataatgacacctctctttgcaataaatgccactctactnncgaattcttgaagatatgttgatgatgaaaatacatacctccccccgacactttgttgggaaagcacctgcccg

SEQ ID NO: 8485 - DNA, 385 bp, Glycine max
  unsure at all n locations
tgttcttgattgttcctcagttattctacacgcatggagacatttacttggccttcattcaactgcccttgggcttgacggccacgctcaacaaagtactttcgagacctactgtacggtgatttcgccaatgctgttatgggaatgttgcgacgatcctttaaaaccttattgaatcattctaagaggctcgatgtcatgtgggcatatcgacgcccttctctatcgtacagcatcgaccgtttttcctttgagatgcgatcaatccatgctgctatggctggactcagatcacaaattttctgtaaattgtgatgacgacatgtgatcgcatggagtgtccgctgcataaacttagttatgaataacagttntaactatctat

SEQ ID NO: 8486 - DNA, 489 bp, Glycine max
  unsure at all n locations
taagtcacctgaggcatgcaagcttgataatgatcccctatcaatgataattctatattatatatagtggagcagctatttgtgaagaataaatggtatatgtacgaacaataattttttttatatgttgttatttaatcagaaatgattatacataataaatttattaatatttataataattaaataaaaagttatattaatattttctttattaacgctatatattgtaaatttgacactaataatacatgtatattaaactcattntgaaatcttgaacgcttactcattctaggtataatgtcacactgaatgtttggagtaacaagaggtgaaatccaagacaaaagttntatgatagggagggaaattangtatagagacctatatttaagaattatgatcaatagtaacttctaaattattggtatagaatttatcaagtcttttttaacgtaatagtagcatagagtagagtttatgata

SEQ ID NO: 8487 - DNA, 270 bp, Glycine max
  unsure at all n locations
agcttgtcctctccgatggaagaataccgtgacatatgtctcctgggccttataaaggacaatgaagtcaaagtcaacctatgcttgtacctactncatgccaattgaatggccacagcaacccaagttctccaccctggtgagtaataccttgcacttctcttcaccttttccttaacaaatgtgtacctgaaatgttgtgtcacatacttcacgtcctgtgctataaggccgaacgcctcggtggtttccaacgtgatgagtgtggat

SEQ ID NO: 8488 - DNA, 287 bp, Glycine max
  unsure at all n locations
tacccttcacagtcgacactgatgcttctgcaaacggaatggtggcaattctgtcacaacatgactcacccaattaaagcttttcatgaaaccctttactcagaaaacgcatcgggcgtctacttactgaacacagctgantcctactcccacctgggtgaagaaatggcgactatatattctcggacacagcttcacacatcttaactgatcatcctagcttgatacaagctatgacccacgtcgcccaaactctacagaaccatacctacttagtgcgattaatg

SEQ ID NO: 8489 - DNA, 353 bp, Glycine max
  unsure at all n locations
agcttctaagtcattttctgcttatctctcacacttaactnngaaacccttttgttcattactaaacaagctaaaatcacaatcacaagcaagatgtactatctacatgctagaaagaaataaaatgagaaaagagaagggaaagaaaagtcgggttgcctcccagtaagtgcttctttaacatcactaccttgacgcatcatcctgatatccacgatccaataatgttcccacttccaagaccttcttctcacgtcttctttcttccatcacatgaaccttatgatagatattccggtcaggtggctctctatcattacgaaatagatcaaagctgatcttctgatcttcta

SEQ ID NO: 8490 - DNA, 309 bp, Glycine max
  unsure at all n locations
tatggacaataaaatacgcggtattgagaagagcattttgaaagaagcttctgtgcctgatgctgagaaagatgttncactatcttacaccccgaatgtttctgtgcctgatgatgagaaagatgattctacatcttccggcctaaatgctgagggactccctttatccacgggagaagaatcaacagaagaagaggatttagccctaaatgagactcctgtaacgcgggcgcctgaagctgctgcagtgaactaatgacctgtagacattaatgtgtgaagaaccattgccacacgtggccctcgttt

SEQ ID NO: 8491 - DNA, 360 bp, Glycine max
aaagctaaaattcattcatatatcttagaaaccaaaatcagcttctatctaagagaaaatcatcttcaaagtaggtcacttaatcatgaaaaactctaagtttcatattggacaaaataacctcatgagcccctttcttttcctatatatagaggagaccaacaaaccatatatgaccaaagaattaagtggaattagtgttaggcaagaagctcctcaatcaatatttttatatttccttttgagttttcaaactcaaggaatttagacggcttgagaatgtgttttaaatcacaatcaagtttttgtcataataagaagtgtcgtggatatcatggtggacaaagccattgggtcaat

SEQ ID NO: 8492 - DNA, 487 bp, Glycine max
  unsure at all n locations
tagcgtgaaagaggcatactgagactcaactctctaatgaatacatcataagcctgagtatctcattgttgggagcctgacagaccaacctcttgtaatataactcttccttactatctatttaatgcaatcctgcgttttattgttcttttatgtgatttgttgctgttgattgttgtctggcaactcatactcatgcattgtttagaaaataatacattgaaatatggttattttctaaagaattgggaaaggacatcaatatgaaatcattgctaggaataaactgatgtttgtttagcctatttcatgcatctttattcttaatctaatttactattttatctctactaaggaattcgggaaagaaaatagataaattangcttatcatgcggcgaacccaagatagagtatcatagtagaggtgggtganaaccgagataacattagatagagaaaaattattaaagtcgcatcacaagtag

SEQ ID NO: 8493 - DNA, 226 bp, Glycine max
gtagtcaaagagaagttcaagtccatagccatcaaagtctgaagagagtatgatgaactaatggacgtcaatatggtcaccgatgaagccttggaatgagaaacccagaatgcccgaaaggaagaacacgaccaaaacaagttttgaggggctttatatggcagcaatagtgagctcaagctccgaagaggtgaaaggaatcatcacgggtcataggcatgatctg

SEQ ID NO: 8494 - DNA, 463 bp, Glycine max
tagcgctcaataatgttcttgtgaattcgagtaactaacctgcgaattcacaagacacgatttcacacgagtaaaagacaataaacccatacaaaaaagtggattacaagtatcatataaagatttatgattttcgcgttataaagtcgaaattactttcacgacttacttttaaacaaaaattaattcacaaaataccttatttaataattttgaaaaaaattatcccaaatgataacaaaaacccatgtagcaccttcaagttctacggtcacctctctcatttatagaaccaccaagattgaatttacagccattgcccatagatcaaagtacctcagctttctgaatgtctcattggccatatctagttccggaaaaactcttctctatttatctattggaatcttcaccaaaagagatatagacacacaatcttatgagtcctaagtctgacccatag

SEQ ID NO: 8495 - DNA, 328 bp, Glycine max
  unsure at all n locations
tgcaagctggaatcatttatcctatctcctacagccaatgggcgagtcccgtccaggtagtcccgaagaagaccggcctcacagtgataaaaaatgagaaggaggagttgattcctactcgggtgcagaacaggtggagagtctgcattgactataggaggctgaaccaagttaccaaaaaggacaattttcccctgccattcattgaccaaatgcttgaacgcctggcaagaaaatctcactactggttccttgatggtttttctggttatatgcacaatactattgctcctgaggatcangaaaagaccacattcacctacccctt

SEQ ID NO: 8496 - DNA, 479 bp, Glycine max
  unsure at all n locations
ctcagcttctaaggaagttntctcaagaaagcttctcaaggaagttttctaagaaagcttctcaaggaagctacctagtctataaatagaagcatgtgtaacacttgttgtaactttgatgaatgagagtcttgtgagacacaactcaaagttcaacttctctccctttttcttccttcaatttcgtgctcccccctctctctttcttttcctccattgaagcatcctctccaagcttcttatccaaggctcatcttggtggtgaagctccttcttccaaggcttattccctagtggatggcgccgcttcttacctcttctcctttgtcttccgctgcatctccatggtgaaaaatcaccattaaaggacctcattgaagctcanagattcagcctccatagaagctccacaagcaagcttccatcaagtggtaatcagagcacaagagcttcaagtaggtgctccttanacctccatt

SEQ ID NO: 8497 - DNA, 345 bp, Glycine max
  unsure at all n locations
agcttgatgtgtttgttgaagctaataaaattatgctcaatattgaggtaacaactttccatttgaggtattntatgcgtttcttcctgcatatatctgaagccacccagaatgaacagtttcacttttgagtctgattggttcttttcgtgcaaactcggttccatggccaagataatgtctaccaggcatttctagccatattgaagatgcacaaagacggaaacaggactcccctgcagcttacgaggaggttagcctaatattttatggcagttttatattggtccttctatttttcttacacttcttttgggaaactcatttaattatttattgaacttc

SEQ ID NO: 8498 - DNA, 466 bp, Glycine max
tgaagtgaacacgatatgacttttgtacaacacacaaaaaggatgcctgatagatcaaatatatgattcttgcctacgaacttaataggatatgatttttgtataggaatacggtgcgataggatatgatttttgtttggttaggaacgtaaagtaaaaaaaacctgatagaaaaaggatatgatctttgtataggaatgtaatacgatatgatttttgtatagcaatgtaatacgatatgacaggatatgaattttatttgctctagaatacaggaacgtactaaaagataaaagaaacctactatgaatagaacaaggaatgttaatagaaatacgagaactaatacaaaatcatgagaaatagaaaggaacacctgactcacaccttgtaattaaaattttacttaattatacgaatggaatctgctcgtttcttaaacaataatatacgtatctatatatat

SEQ ID NO: 8499 - DNA, 146 bp, Glycine max
  unsure at all n locations
gtaactaactaactaaaacaactaacactaatatatagagtgactactcacaaggaatggatgggccttgattangctcatctaatctatttaantaaactaactacacaacacaaaacctaaactcaacccaattattcaagtga

SEQ ID NO: 8500 - DNA, 90 bp, Glycine max
atgatgatgctcgtgatgtttatgtgctgaaatttatgatggacacactgctacagatgaagggtagagttaacctacggctagaaagcg

SEQ ID NO: 8501 - DNA, 347 bp, Glycine max
agcttatatagaaagttcgttcctaatttctctattattgcatcacctctcaatgagatagagaagaagaatgtggcatttacctgtggtgaaaaacaagagcaagcctttgctttgctcaaagaacagcttactacggcacttgttctatctcttcctgacttttctaaaacttttgagctacaatgtgatgcttctggagtgggagttggagctgttttgttgcaaggtgggcaccctattgtcttatttagtgaaaaacttcatggtgcgacccttaactactccacctatgataaagagctttatgccttaataagagcactcagaacttgggaacattacct

SEQ ID NO: 8502 - DNA, 382 bp, Glycine max
taagaggtatgacggtgctaatggatgttttccttgatatcttatggtagaaagattgtttaagaaggagtgcccttttgatatcaccttttgttgcaaaatgattctccttcttaataatcttcttggaggaatccttctcctctctttccttccccttggcctctaaagacaaggccttactatccttgcttttctagtttttcttccttatccctcttacctttcatagttagtcgatctttggccacctgtgaaggtgtttgacgatgctacacatatacagtgccaagatgggtgaggtgtattccactcgatacgccatctgaaaagatcttcatataaatcgacatggccttcctagaagaatatgtcctgcctc

SEQ ID NO: 8503 - DNA, 168 bp, Glycine max
agcttgacttggcgatttgattatacccttatttttactttagttattagccaattcaattaagaatgagacatcccaaagagaaaatgtccgattgatttttgtgcttcatcttactaaaagatatatcttcttataattatattattattatacctctttttttta

SEQ ID NO: 8504 - DNA, 342 bp, Glycine max
  unsure at all n locations
cttcgtcttacagacagcaacaaataatggttatactgttctccactcgagtatttccgccagtcagcgtgactcanatgtgagtatgacagatcttgtgagcgcggaagatgacgtaaatctccgcgtgccaacgggcttgtcggctgagattgacgaagggcgcaaaagacgacgttagtctttgcgtgctatcaggcttttcgtcttacagacagcaccaaataatgtttatacggatgaccactcgggtatttccgcctgtcagcgggacttaaatgtcagtattacagatcttgtgagcgcggaatatgacgtccatctccgcgtgtcaaccggctc

SEQ ID NO: 8505 - DNA, 313 bp, Glycine max
  unsure at all n locations
agcttcggtattcaatntcgatcgtctcgatgtattacgtgactcaatcagacatctgagtaaaaacgttattgtcgcttggaattgctgaaagcttcaacattcaatgtcgagcatctcgatatatttcgggactcaatcagacatccgagtaaaaagttattgtcgtatggaatttctgagagcttcaacattcaatttcgagcgtctcgatgtattatgggactctatcagacatctgagtaaagaagttattgtcgttggatatgtgccagagcttcaacactcaatttcgagcgtcttgatgtattac

SEQ ID NO: 8506 - DNA, 436 bp, Glycine max
  unsure at all n locations
tgcatttggaattgcgaaagccccnctccatcattatgtattgttcctgctatctcanacaaacaaatcaaacgtaacaagacaattatagttgctgtttgaatacctcacccactcaagtgtatcacacaattatggttgttctctaatgaaacactcttgccttttaccactctaattccncttgagttcttaggcaattcaagagattatggccacaacaaagaacaattcaccaatatgtgtaacgtaaggctagagagacaaggaaaaggttaaccaagataaaggctaacaatgtttttacgcacaaatgaaggaaataaaattcagaatttaggaattcaagtaacaatccttcatgcaaccaatatattaccttacagagattttnttattaaagatcttcaagcatgaaccattcagcccaatttta

SEQ ID NO: 8507 - DNA, 268 bp, Glycine max
aaacatgctctatattcatctcccactccaaggaaggcctcggatcattcttttcctttaatggaggaatgctgagtttaataccatcaattcggttttgtctaagaacaccatcattcccttcttctctcctttcttcttcattatgatctctattctccatttgaaccaacctctcatggagcgcatcatctcgttgtttcatagacctctccaaatgttgcatcataacttgcatttggaatcgcgaaaacccctctccatcatt

SEQ ID NO: 8508 - DNA, 518 bp, Glycine max
ccgtgtgcatctgtcctacgaacagaacactaagccttactcgatgtgcggcgtgcgcataccacatagatactctgcatatttaacagacgacgctctccacagagccatatggtgatgacgtcttcactatcgtgtaacactgcggcgcaagacagtattgagatatcttgaagaacgtcaactgcaattctccagaaattcacacggatttaagtgtgaactagcatgtaagaccctcgcgcatactatatgcagactcttacaataggagccgctatgttcctaataacactatcaggttatgactcttaatgtcgcaggccaaatcacgcacctgacttatgtcgaggctggcagtctaacaccgagaactctctagagatctcaatagtattagcgtgcaactccgatgtgcgcttcgagcccatggaacctcaccatcccacaggattgcgaccgatgctctaagacaatatatggtctctctttcacatgatggccacaaagccctgtcg

SEQ ID NO: 8509 - DNA, 411 bp, Glycine max
  unsure at all n locations
agctntgatgttgttattgcaggcaatatcacatatagaaacagcttatgctttcgttggagagagctctgcaaccaaatcctttatagagaacatggaagaacaatatcttatatgcaaaggggaggcacttgtgaagggagttaggatagggatatatcacacagagagtttctattctttggctctcattgtatgggttggagttgttgtggttagagccgaaagagcaaccccataagacataatgactgtcgtgatgagtattctctctggtgccatgtaaggaagacatcaccttcacgattgtttagaatggagaaaatggttaataattaataactaagtaacaatagtctccttgtgaattgcatatctctcacttacgcatcaccagacatgtnnaatatt

SEQ ID NO: 8510 - DNA, 312 bp, Glycine max
  unsure at all n locations
agcttctccanagaacacaggatcatcatcatactgcaggatatccacaggaaccttgttcttccccaccaggaagcttttgaaacatgtttgagatacttgttgcctcataaaccctgttaggccttcagccactaaatcaaagagaaaaggggccaaaggatctccttgtcgcagccctctttgaggtttaaactctgaagtagggcttccattaacaagaatagatatggaagctgaagagaacaggcctttatccatctaatccatctctcatgagaccccattctcttcatatataaatgagaaatt

SEQ ID NO: 8511 - DNA, 294 bp, Glycine max
tcttgaaccctcaccgcgcactctttcataatacggagactcctgacacccatcaagtgtacccctttctatgctctctggacatgaatacgcctggttggtttgcaccaaccacgcggatatgaatggaaggcttcttgccacttcattggctctttaaagtcgcatacttcactatattattgctcgtatcttactccccagatcttcaaaccttgcacacgtttctgaagaagatcttatagtcatgtgggcctttcatatcgaccgaccaagcgattgggccacttaacc

SEQ ID NO: 8512 - DNA, 405 bp, Glycine max
agcttgccgatatagcagagcttgctgtgagagagtatccaagtgagcgtccacctatgtcagatatagcatcttggttggagcaaactgtgaaggacggattgatcttatagcattaatcattgccctgtgagaaacttgtttcgaattttgatccatccacaatatcttctttttcataaatttctgtgagtaatgctctcttctgcgattgtaaaatgttttgagtttgttgtaaattgcttatctcctttgtagtagttctttgggtttacttttcctaatcttcacgaagtgaaggacatggcattattgcaacatacacacattgctgtgaatttttttcctctcatataagcctaagaccattttcagcatacagatagaatcaattacatgtcaaca

SEQ ID NO: 8513 - DNA, 375 bp, Glycine max
tctctagcgtggcgtgcgtatgatgatctacttcagatgaattatactctggcgctgatcgaagctgtgctattagatgctgagcaaaaaagatcgcacaacaatgcgttgcatgaatggctgagatatacacagcatgtgttccgcgatgcccaaaacatattccacgattttgagtgtgaagcattgcacaaccgcgttgtcgacactcacggtagcatttcagagaacgcgcccggtcttgactaataacactatcatttatcgccttacaatgacgcatgagatacaagacattaacatgaggctgaggaatgtcgcatatgatagattcgcatttgttggccttgacatcattggtggtgatacacgtgt

SEQ ID NO: 8514 - DNA, 463 bp, Glycine max
  unsure at all n locations
ttgagcaattcanatggtcataaatagtcactcggaggtcctattcacgcacataatttatcgagacgctctaaattgaacaacggaagctctcataaaatttaaatgctcataacttttaactcggaggtccgattcaggcggataatatatcgagacgctccaaattgaacaatggaagctgttgagcaattcaaatggtcataaatagtcactcggaggtccgattcaggcgcataatttatcgagacgctctaaattgaacaacggaagctctcaagaaattcaaatggtcataacttttaactcggaggtccgactcacgcgcataatatatcgagacgcccgaaattgaacaacggaagctctcgagcaattcatatggtcataacttttaactcggaggtccgattcaggcgcataatatatcgagacgctcgaaattgaacaacggaagctctcg

SEQ ID NO: 8515 - DNA, 366 bp, Glycine max
  unsure at all n locations
ctcaatagtgtaatggttggacacatcacaaatgatagtaccactttgttaccatattacaattagagttttaagtacaataagaaaagaaaagagacgaaaatactaagaaattgatattgacttgacatgatgtgatttgctaaaatgtgtggatatgatatataaaatcaaaagcatcaaccctttttaaggaaaaaaatcataaaatattagaaaacatttaaactaagaaaatagaagataataaggaaataaagaaactaatcctaaataccaattaaaatgctctatgatatgacaaagatnactatggatattttcatatactttaccaantattagtctatgtaaagcaagaatcat

SEQ ID NO: 8516 - DNA, 493 bp, Glycine max
  unsure at all n locations
aaggtagtcatacctcacaatatatatatatgtatgtttatgtagaaagataccttggatatgcatgtatgtaacaaaaaatatacttcacaaaatatatatatgtatgtttaggtaggaagataccttagatatgcatgcatgtaaacaaaaaatatacttcacaaaatatatatttgtatgtttaggtaggaagataccttagatatgcatgtatgtaaacaaaaacatacttcacaaaatatatatatgtatgtttaggtaggaagataccttagatatgcatgtatgtaaacaaaaaatatacttcacaaaatatatatatatatatatatatatatatatatatatatatatatatatatatatatatatatatgtgtgtgtagggacgaagataccttatatatgcatgtgtgtaaacaaananatacttcacaaaatatatatatgtatgtttaggtacgaagataccttatatatgcatgtatgg

SEQ ID NO: 8517 - DNA, 352 bp, Glycine max
  unsure at all n locations
gcttatgcgcatacttctttacgaacgttcacttgcacaagacattcttataactaagaaaaatgcacccatgtacaatcaaggcaccttcgttacctagattatttatatgtacttccaaggtgtatttgttacctacatctcatgcacttccttggctaaatttacatacatgcgtactcaaagcatttggggtaccaaaaattgcacatgtgcacattccggtatttctaatacttatgcatatacaaactttgtgatgaatcttggctatctacacaataaggtgatacatttcatgctntattcaagtggttttgctacctaaagccgcatgcaaattcaagtatag

SEQ ID NO: 8518 - DNA, 476 bp, Glycine max
  unsure at all n locations
actaagcttgcaactcttacaacanagatcgatcattntgaagtaattcacttagtatatataatttgtgcaagttgttgttgttggtgttgtgcaatttgtccttcgtgcaatctccattatgatgtttcacatcagattctaaaactcaactttcaacaaaaaaaaagcatctccaaatgttttcaacttcattcgtgtaacgaaccctcagtaattgtgattcatatggaagatgagatgttgccttatgtacaaaattgatactacaaactcaaagcaagtaatcctgatgtagtttctgctacaacttcattctgattctggctnttcatagtagtctctaatgcttcctcttagagagaccttcttaatgtctttgatactctttcaaaaagagaaattgggggagtcgccactaacatttatttaagacaaacatatggaaaacaaacaataaataacgaatgatctac

SEQ ID NO: 8519 - DNA, 442 bp, Glycine max
  unsure at all n locations
acgtgatagttgcnttgtttttctttatgttgtaattgagattgagtctagatttgcatttaccaaaagcactttgtgtgaatgtaagaatgtatttggcttctcttaaattttttatttgttattctggcaaatgttagttattagtttgtgagttctctcacttcatttcttcctttaatcaccaaaccaaccttataacttctttggtttctcttagttattaacaagaaaatcaattattgatatttgaacatgttcatgatttgttatgcatatacacataacattatgagctctttgantttntaattaatgactgagataacttaatttaccctttagagtgaattgctcactacaaaggagctagatcttgtanggaatgaagctntangtctatacactggtttttaattttactttctgtataacaatcatg

SEQ ID NO: 8520 - DNA, 486 bp, Glycine max
  unsure at all n locations
tctagggattaaacataattaagggtattgaaaaacaaatatttaacagaaacattgtatgattctttttcttgggaattccaacggcatgaatgagttgataattggttgattttgatccacaggtcactcaattgagatttgaagccaaggctccaattatgtggtaaattatgactattattgttggcaacacctaaaggacatgacaacttcacgacgagcatttaagatagatagaacaatcttggttcagatctggctggagagactgcagcagccatggtagttacttccattgtgttaaggaaaaccaacccacattactctcacttgcttctacaccaggccatgcaagtgagtcattactcaatgctttgtgtcctagagatcacaattgaatgcactattatactntgaattaaaaataaaatagattagtactgcaggtataattcaatctacgtatagtatatatatactact

SEQ ID NO: 8521 - DNA, 299 bp, Glycine max
  unsure at all n locations
ctacttgatccacatgggctctattgtgcttgttactcggtcacgggtaagagggccgtgaaagaaaggattataggctcacagagtgtttgagggttatattgagtaaaaacctcaagagcattgctcgtacctttgggttggactctattccttttgtcttatacattaatcttccatcgcacttttgtgcctttcttgcaaaaaatgaagatcttttgcctctctttctcttcactcgcctnttgcagatangatttattatgttttttattgctacccaacttcatgcatgtgtt

SEQ ID NO: 8522 - DNA, 379 bp, Glycine max
atcttaagtcacctgcggcatgcagcttaacatttcaattcgtgcgtctcgtatgttactggactcaatcagacatccgagtaaaaagttatggtcgtttgtattggctcacagcttcaacattcaatttcaagcgtctcgatatgttacgggactcaatcagacatccgagtaaaaagttatggtcgcttgaattggctgagagcttcaacattcaatttccagcgtctcgatatgttacgggactcaatcagacatccgagtaaaaagatatggtcgtttgaattggctcagagattcaacattcaatctccagcgtctcgatatgttacgggactcaatcagacatccgagtaaaaagttatggtcgtttgtattg

SEQ ID NO: 8523 - DNA, 469 bp, Glycine max
agctgaccttctggtcctcctcatagttgtggcatgagatttcatgctctattttcatctcccagtccgagtaggcctccggatcattctttcctttaaatggaggaatgctgagtttaataccatcaattcggttttgtctaggaacaccatcattccctcttctcctcctttcttcttgattatgatctctattctacatttgatccaacctctcatggagcgcatcacctcgttgcttcattaacctctccatatgttgcatcacagctcgcattcggaattgcgaaagccccactccatcatcatgattagtacctgacatctcatacaaacacatcaaacgtcacaagacaattatagttgctgtttaatacctcacgcactcacgtgatcacacaattatggctcttctctaatgaaacactctagcctcttaccactctaacttcccttgagttcttacgca

SEQ ID NO: 8524 - DNA, 271 bp, Glycine max
  unsure at all n locations
agtgaactttatagcgggggtgatcacagaatggaaggatattccagttgagcttttgatgcagattttgtcacttgtggatgatcaaacggttatgatagcttctgaagtttgtcgtgggtggagagaggcaatttgctttggcctgactcggttatcactctcatggnacatcatctgtttttttaccttcccttctaatgctttatttcacttttgaggttattatgcttgtggaggcagtgaatattgaaaagggtgattttttttt

SEQ ID NO: 8525 - DNA, 474 bp, Glycine max
  unsure at all n locations
gaagaagaagaagttcaaagagattcttggcttgtaaaggattgtaatgaattgattggatagaaagattctttataagattgaatgaataattgaatccaaaacaaagcctcgcttttatagactcttcatgtctggtcaagaggaccattttgaagagttataacttttagaaaaacttacaaccaatttgaaaaagtcgtaacccatttgaagagttacatcttttgatttattcagaaacaatcactgataatcgattaccaaaacagtgtaattgattacacaaagcttttatgtgaaaggatgtgactcttcacatttgaatttgaatttcaacgctcaaaggcactggtaatcgattaccaaaacattgtaatcgattacaaatttctgaaatcaattggaacgttgtaaattcatttgaaaactttttcacatccattntgctacaggtaatcgattactatagag

SEQ ID NO: 8526 - DNA, 407 bp, Glycine max
gcaagcttggcttctacttttattgccgacgttttatgatgtatacaaacatgccactcaactttatcatataacattcataaaactaatatatatatatatatatatatatgcttggccaacatacacgcctggtcacgaaattacagtgctttaatttggaagagaggattgaaattaattcaggatgtgaattgcgaaatatagaaataaactaatcagcgtgcaacaaccgggtttaccttggctgagcaattacttgtgtgagcattataaattctcttacacttactttaattcttatgggaaaagaaactaatctatccacaagtaagtcattgatttgaatgtattacattcgaacttttagtgactatttggattccaatctgaaaaaatgtgacgat

SEQ ID NO: 8527 - DNA, 475 bp, Glycine max
gtaatcttcattacctaatggtttattatgctcccattttggactatatgtcatcaaagactaaaatttgtgctataaaggcatgcatatctatgaggacagaatggaatatccaacaatcgctactatctctgtagataaatgaaacggaagctacatttatttctggtggcctgaacatgctagtaagtaattccattgagatctgaccactatatacatctttaatgagatatatccaccaataccggagagaatcagtctatgaagaataatattaccatgatgcaatacaacaaagtagaagaactggccataacttcattcgtgctaaattaattaaaccaaatacatatttaatgggtataacttaattgacaatactagatagagctcgcgggaaaaaaactaccatacatttccataaatacattcttgtgaagggatgaaacatgttaagatgtgcgactaagat

SEQ ID NO: 8528 - DNA, 342 bp, Glycine max
cttatctctcacatggatttcggttttctgataaagaaaaaactaaccctccctttggaaggaaagttgtggtattatgaggaagatttagaaaaatacttccaatcattccaaaagaaagaagataaggtgttgttcatgctagcattaattcataataatctttgcctttatgtaaggttcttactttaacaaaaaatatgagtcttcaatcaaggtcttctaatgaacatgtttcttaattgaaagaatttgtaaattgggtgtggatattggaatgaaactattggtgagattcatgacaaagaaaatgccattgacattccatcttatatgcttatt

SEQ ID NO: 8529 - DNA, 441 bp, Glycine max
  unsure at all n locations
agcttccttaagaagattcctaaagaagcttgagcttagctacacatacctctctaatagctaagctcacctcctcgagatgagaagctagagcttagctacacaccacctataatagctaagctcacccccatgacaaaaaacatgaaaatacaaaaaaagtccttactacaaagactactcanaatgccccgaaatacaaggctaaaaccctatactactagaatggccaaaatacaaggcccagacgaaggaaatgcctattctaatatttacaaagataagcgagctcatacttagcccatgagctcgaaatctaccctaaggctcatgagaaccctagggccttcccttggatctctagccaatctacttggagtcttctacccaatgcccttgcggggtaggatggcatcatttggcacataactaanatttcat

SEQ ID NO: 8530 - DNA, 317 bp, Glycine max
cactttcttgtgtacaacgcgagctctgaccactgtccttgctttccgcggcgctgtttttcatgtccgcctgagtgggcttatatcctaaaccatactctccacgagttccttgggtttttatcacgctagttatgccgccattgtctttgcctaaacccatcccgggttcataacccgttcccaacataactcgggccatcattaccgccgcatcggacagacaaggctgtcccaagagggagtccaccgaggaaatgctgaccacctcaaaagactggagagcggtttctaacgattcttctgcggcttccaca

SEQ ID NO: 8531 - DNA, 257 bp, Glycine max
  unsure at all n locations
agctttcttgctctctttggtctccatctaccttgaagntgnatgttctccatctaaccatcattttgtctaaggtcgagcatcgtgttcgtcgcactcgagcatcgtcagaagtctgtgcttcttctccttcgccacctcacgtaggtatgtttggtctaatcctgtatgaagtattgattgcattcatgtatcgcacacttagtgaactaaacatggctagggtatctcatatttaactcgagcatcgtgacaac

SEQ ID NO: 8532 - DNA, 395 bp, Glycine max
cctgtattggccttacctgaatctacaaagactattttagtggaggcggatgctatatgagtgggggtcagagccgatctcataccagatcaccattgcatagcctttataagtagaagcttaaatgttcagcaacaatccatgtcaacctataagaaggaggtactacctgtggtgcttgttgtacaaaagtagagacattacttattacctaagcagtctgtaatgaaaactgatcacacaagtctccagtatattcttgaccagagactttccacagctttccaacacatatgcgtggtaaaacctatggaatttgatttcattattgaatacaagcacggaagtgagaaccaagctgctgatgcactctcaagagttgaatgtgctactat

SEQ ID NO: 8533 - DNA, 413 bp, Glycine max
  unsure at all n locations
agctnttcgattcattctatgcacccatggtggtccacattgggttttgtgtatttctattcttgtttcatttgcttttttataccccttcttgacgtgcttcagccattttacttaagtcatttctcgcttaacttaaaaataaaataaattttcaccgaacgtttgaattgtattatccgttaacttcggttaaaatgaattccgaccgttcggtcgtgccgtaaccacgttggaaatcaaaaagaggtaaaaaataatataataatcaaaaatcatcttttagtaaaataaagcggaaaatcaatcggacgttntctctttgggatttctcattcttaatcgaatggattaataactaaagtgaaactaaaggctaaaatcaattcgcctagtcaagctcgtccataaaa

SEQ ID NO: 8534 - DNA, 415 bp, Glycine max
ctcttaatttcattctctttctcgagtctccttaccaattttcttcaaagaatgataaaggtatgaaatgttacacaattaacaaaataccaatttaacaatttcagatcaaataaaacaaaattagcattactatccatttcaaccattgaactaattcattaatagaaggataagttaccttaaaacgctggaaaaaaagttcctgatgatcttttggaattgctcccgatgtagaaggcttaatggacaatgtgacagcctttgctgcaaccttagatggatgcaacctaaatacaaaaaataatttgtgaaaaactaaaagatcaaatgatgtatcatatataatgaacaataatgtaaattttgtaatacttacactccattgataagtgtaatcatacgacgatcattg

SEQ ID NO: 8535 - DNA, 333 bp, Glycine max
  unsure at all n locations
ttatgtcacatccttccatctgaatcttggtgattcatgtttgaatctatatgcattccactggacatgcatagcacatttacatacactgctgaatgataaactgtttgacctcactatcaaagctgttaatgatncttaatggtttccattttttgatagggggccaagtgaatgggatgcctttgaatggatgcatgttgagtgctttcctaattagatacagctggcttgcttgttacctcagaaagaaataatttangaagttaaatntcaaggtcacttgtctatcttttgaagttttaaatttaataatttatgacttctgatcat

SEQ ID NO: 8536 - DNA, 495 bp, Glycine max
  unsure at all n locations
ntanacttgttcttacttgataatggttatagacttatagttataattnttaagcaacaaacaaaagaactcatgtgagaattgactcatggtcaagaagatgttctatttattttaattactatcaatttagaatttatggtgaaataaaaaaataaagcaacctgttaaactcggtagaatgatagaaaatttagataatttatatggcatcttaagtatacatcttattatcaccattatataaaacaaataaataaaattaacaaaaggagaaaataatttatctgccaaccatggattttttttttatacttttatctaatcataaattaacatatacaataaaattgttgattnttttatagtaattattttcaagttatagttatcataattnttaattaactgatagtgtaaaattatatattaataaaatataaattaaattcattaacaaaagaacattataaagtgtctgtgcaaaatgaaatg

SEQ ID NO: 8537 - DNA, 259 bp, Glycine max
atataaacttcttcaaacaaatctctattcaaaaaagcattattaacatctaattggagaagacactagtttctaacagcaacaacacagagcaaaactcttacagtggtaagcttggccattggagaaaatgtatcagagaaattgattccagcttattgagtataccctttggcaaccaatcgagctttgtatctatccacaaagccatcattttatatttaaccttatacacccatctacaaccatacatgcttat

SEQ ID NO: 8538 - DNA, 496 bp, Glycine max
  unsure at all n locations
actaagctatcttgaactaaccaagccctctggtatggtaatcgattacaaggaatagtaatcaattatcaaaccctaaaacatagttntttctataaaaacttactattgtttactcataaaacctacacactcattgtaactattatcaacaacaattaaagatccaaaatagacattgaaaaacaagcatcataaacttcttaactacaatcatcaagcacaatcaaaaatacaaaaacaatcatcaaaacacaaacaaagacaatcaacgacaatcattaatcttcaaacaacaattaacatgactatcaaaacacaatcaaagacaatcattaagccacaattaataataaccatcagaaacaaactcaaatataaagaaagaaaataatcaaccgatttaactatgtatctaagtcattgctatctaaaagtcctaattctcttctaatagcaaagaaggtttctttggggagaggttctgtaaagatat

SEQ ID NO: 8539 - DNA, 333 bp, Glycine max
  unsure at all n locations
gcttataactctntcgaagcaatcctccaacccttgcctatgaatcactctgcttgcatgagccttgtcagagctctgtataacctgtgggaataaacatgacaccaacattatgctgaagagaatatttatgaattaggtcctatttttggtcattaaacaagaacaaaggaacttacaacttttcgaacaggcaagcttagcaaaattcccctgagaacagggtcagggttcagcatatcatatggcaatctcccatgaacaaagctgctcaacacacactatatactttttggatttcattatatttaacatgatttctacgattaaaat

SEQ ID NO: 8540 - DNA, 502 bp, Glycine max
  unsure at all n locations
atactcagctagaagaaataagactagtggctgaggatagatgattagtatctctggcggtttaagttatatgagtgacaacaactctgtacaatattntgatgcacttcaagaacacacacttgagggttttaatctaataagaaagtttgagacggaattcacctaaacttaaatntttataaaatggatttatagaattattaatttgtgatatcgacgatactaaaagattatatatattacgatagaaaatgttattatattaatttattgaaatgatagattttgcttgtatggccgaagttatggccacaaatatatattttagagaaaattattaatttttgaaagtttatatgtaacttgaaaaacttagccaattgttataatgtgaacttatgcttggtattcgactggcgacgattgttagtggagtcggggactgtaacttaccttctagagcctatattattaccataactgtgatgtaatcattata

SEQ ID NO: 8541 - DNA, 339 bp, Glycine max
  unsure at all n locations
tcatccataaccaatgcgtaatccgaatccactacactcaattgaaattagatcatttcagaccaatcaacatagttcaacccactgaactngattcttaatttactaaaagcaaacatattaagcatagctgtatacacttaaaccaactcacataccttaatgctttgagaaaacttaatggattcaaactacattaactctaatcatgcatctaagttcaccgttgggtgataaataaacacatatccatattaataatgatgcgaattaatatactttaatgggaaataaatcatattattcttgacatgcatgttttctctggaaacacataca

SEQ ID NO: 8542 - DNA, 486 bp, Glycine max
tatctctagaagacaaataaatgagtttctttgtactctcaaattagtttatgcactttatagaaactctcttctctcatatatagctcctttaaagatgaacaaatttctaaaaattaacttatataatttatgtagaaactcttgattcttctttttcttaaagcgtatatgaaaaaacttaccaaaaaagactctgtcattaagaaaaaattatgaagcttatccgttggttttgttttattataagctttttatcttcatgtgcgttgttccctgattcgtagtaattgctaatgtaacatgagtttaatggaacatattgtcggtgtcaaattacagaataaagaaagtagaaaatcataactaataagactcttaacccagtaaataaactaatcttatagcttgatttgtaattaaataatattatacaactacttttagttattgatacatagcctatcctatcatcttacatttcat

SEQ ID NO: 8543 - DNA, 330 bp, Glycine max
  unsure at all n locations
gatatttcttgcacatcattttctttatttgataacccctggagtgagtagggttggtcacaaacttcatctacagcataaaagtcacctggaattttattagcaagttcatccacttttaatctgtatcttgttggtcaacaactagcagccagtcctgaaataagatagaaatgagatatcttatggtagaaacanaacacatatactctatgtattaatacaaagataaaaaagagtgtacaatcactagttaattaagtgaatgcctaacaaaatgaacgctgctgaaggaaaacaacaatagntactagttaggaattggtaatt

SEQ ID NO: 8544 - DNA, 290 bp, Glycine max
ctctggtttctctgctagggtttccaagtgttaaagagtatgttaatagatcgaagtctgcattccattgtgtgcatgccatgagtatttctcccttcccgaatattaatttaaaaatcccgacggtgaagatgtggataaatgaattatgaacctggcgtccaagttttacaaagatccaacggttaacgagtctgagaccgatgtttgattgtagttttactggaatatgttgggtatatgtggcggaaaaagctacggtgtgaatggcatttatctcacctgaaaca

SEQ ID NO: 8545 - DNA, 342 bp, Glycine max
  unsure at all n locations
gtcctgcttatattctaacctggataactctgnagatgcatggatcttcagacagactcaaacatatatatcatcatgatataataatttgtgggcaaaaaactctgcgcacaaaagattaataaatataatggaacacacataaattaactatactgcgaaaaaaaaaaaaaatacagaaacatttacattatttagcaccttttagttacatttatttatggaaatacaccccaagacagattactgcttaacaggattatttgtttggttagttaactcattaaattatatataactcataattatttatttatcaaatatttnttatgttaaatcaac

SEQ ID NO: 8546 - DNA, 486 bp, Glycine max
  unsure at all n locations
catagtctgacatgaatatctaaatataaagttatatctattaaagagtccacataggtgacctcttgatttgcaatcaaatgctctaccactaancgataaacccatttgatattttaatcatcgatgatatactagatttgcaagccagaaacaaaattcatttttgagaagaagcctattgttccacgggaagttgtgcgtaaggccatgatggaaagcagttgcaaacgttcaagcttgtttatgaggaatctatgatccactgctgagctatgtatgaacccatttgatgttttaaaatcaataatattctatttaatgaaaatgttactttggaaaagaaaaaaattaatacaaagggcccaaccgggttcgaaccggtgacctcttgatctgcagtcaaatgctctaccactgagctatggacccaagttactgtcagaggcagatttaacacatnatagtaattgtccattgttatgg

SEQ ID NO: 8547 - DNA, 315 bp, Glycine max
gcttgtaatcgattacacatatactgtaatcgattaccataagagaatttcagaaaatattctcaatagtcacatctttttatttcattcttaaatggccatcaaaggcttatatatatgtgacttgagacacgaatttgctaagagtttttaagaacaaaaaggtcttatcctcttaaaaagtaaaatcgttttatcctcttacaaattccttggccaaaacacttgtgattcaataaggaattatttgagtgctcaaattgttcaatctatctctttcaagagagatttcttcttctcttcttctttattctg

SEQ ID NO: 8548 - DNA, 487 bp, Glycine max
tctacacatacgagatatttcagctcaacttaagaagctaaaggttgatatgtctgagtccttcctagtgcactttattttgaacacccttccgcatgaatatgggtcgtttaagattctctacaacacacataaggataaatggtctatcaatgaattaatgatcatatatgttcaggaagaagaaacgcttgtaatggagatgggtgagagtgcattgctgacaactgcttatgggaagaacacagaaactaagtctcacgctaatcagaagggaaatggtaaaataccacctctcgctgatattaagaaggtggcaaagtgtttcttttgcatgatgaacggacacatgaagaagaattgtcccggattccataaatggtctgagaagaaagggtaatcaatctcattagtatgttatgaatctaatatggttagtgctaatattaacactatgtggatcgagtatggatctactattcatatc

SEQ ID NO: 8549 - DNA, 401 bp, Glycine max
  unsure at all n locations
atgcattcgggcacctactttgaatctcctatgctatctctacatatataaaacagtcccaccattccaatttcgcaaaatcatattcatatatcattggggcatttcatcgagcacttggggggtgcacgtttggacacaaattgcaagagaatggggacaatgtggcataccccattgcttcagaatacaacataggcctaatgcattctcacacaaaccctcaactcaacaaaacaagcatggattcagatgcgaattgcttcacgaattntgcaaaaaatgagcaactaaagcaccaaaacacatcaatggagagccaaataaccaagggaaatngcacttacttgtggggagtgaattanagcgtganaagggaagcaaaactcaacaatggaagc

SEQ ID NO: 8550 - DNA, 322 bp, Glycine max
tcggacgaacgacatatctggcgccaatgaagacggagaagatgatagaaaagcccgtgttgtgactgccattacaactacagccaagttgtccaccttcccaacaatgtcattactcatccaataacaaaccttgtccttacccaccgaccagttatccacacacgccattcctaaaattaaccacacagcctacctacctgcactttcaatgacagacaccacctttaggcttaaccaacacacctcccaagaaacgaattgtgtcgcgagaaatccttataattcaccccaattccagagtcctatgctgacttgctcc

SEQ ID NO: 8551 - DNA, 427 bp, Glycine max
  unsure at all n locations
catatgtatatttataaatcttaaggcgaaatgcatacaagaaaacagacgggatttgattcttgtgattaaccctgcttcccaagaacacagccgtaaattcaggtgagcaggttattttctttaccatgaccatcggcaaacaacctgcatgttccaagacaaatattatgggttctactctatttatcaaacattaagcacaaagcaaatttaatctaaacaattaaaaagaaggatattcttgatgataatacatgggagaaacaaaactcatggtgtttctattgagggtggaagacaatcatgccnatttgatttcatcacacagatgcaggttcctagagcatgaaaatatgccaaaccatcctttaatatcaaagtggcactcttactgttccttcagcagagaagatattacttagag

SEQ ID NO: 8552 - DNA, 471 bp, Glycine max
taaagtttgtaggcctgaggattctctattatctctctcacacgcacatatataatagttctatatataataatatattcatgctgataggctcgttggcgtatttgacttcgacaagtttcttcgcttgtttataaaccttaattcaaaatagacttattataaatagacttttgtgacaaatctaactcttaaacaactcagactagacttaacaaatcaataaatagtttctttgagtaatattagattctattcttttaagtaagattttatatttaagttttattgatagaaaaatatgattggaagaaaaaatctcattaaaaatagctcattaggttctttgatagagattaattatcgacaaaactaataaatactctattccaatagcataattaagaaaaataaattaaacttaacaaggatatataataggcaaatgagttacgctagactttgtaatta

SEQ ID NO: 8553 - DNA, 442 bp, Glycine max
  unsure at all n locations
agctttaagtaaagagacaaaatgctatatagattttaaatatgagaaatatataatcatttatatcaaaagatgcatgagagttaagaaatgattacatttatcccttacaacaagagaacttagtcactcatgacaataagcgacatgggattatccatggtggggaagaagatggatgaagaaaacacaaaaacagtacaaaagttgcaaactgttacaatgatgaaagcaaaagggagggagaatctatctatattcacgggttagacctanaaatacataaacaacatttccatttcaagtgtaaatccactcagccatganattttggcttgaccatatgccagtttttattcttccagaattttgttgaccaagttgatccgtttgaagattcaacacatcatagttgctcgccaagataaattctccatcttca

SEQ ID NO: 8554 - DNA, 430 bp, Glycine max
  unsure at all n locations
tgtcctnctttcatggtctacctaatacgttntcatgttccactaattcagcattcaatccctccaagaccacctnccaatcattntctggttgctgatccaacccttcaactagaaccaacacctttacgtcacagtacttgcattcgtaaaccacaagaaaagtatggtttttcgaacctttatctttgacaacaactttaccatatattcctattacttcttcatataaataggcaatggagcataaatgttggtgggatgctattaaaactaaaattcttgcactagagaaaaatcagacatgggacattgttccatgtcctccatcggttaaacctcttggcagtaaatttgtattcactatanagctgcattcagatggatcaacatattgatacaaggctagatcggcttgttcttggaaata

SEQ ID NO: 8555 - DNA, 309 bp, Glycine max
  unsure at all n locations
tctgtctactgactatcaattctaatngcaagntcacattcttgttctttctttgtctaacatacacacttgttcaaactcatgaaaaggaacacaaactccatcacaatcatccattcaattcaaaataaaagcatacaaccattttcacaaatcaataaaagtgcttcactgccatgtcatcaaaatcaagccaaactgttccatatgcttcagaataagcaaaccaactacccaaaaataaaactagcagtgtatataaacataaaagagatactgtactanaaccataattaaaataataataaa

SEQ ID NO: 8556 - DNA, 416 bp, Glycine max
tgagacagagggagagagagctgtctgaaatctttgggctgattgaggagagagaataccgctttttggctttaaataaaggagtttctctttttctattattatatttaagctatgccacatgtctgcatctgagcggagcgaagagggcccactttctcttttgattgtgacccatactcagccactgaaagtgagaaaagtctgacctttgaaacgctaaaatcctagctcagattgcatgccgtttctctgattacaactactcgcgtatctctacgttcgtcggggccagctttctaaagttagcactatatatatcataacgctcagaattaaaccccgagcgtggctcataggatggtttcgttaaatatatagtcgcgcgcacaatgatgatgctacactattactta

SEQ ID NO: 8557 - DNA, 353 bp, Glycine max
  unsure at all n locations
agcttccaagaatcaagatcaagattcaagactctttattcaagaatcaagagaagacttaaacaagataagtatgaaaaagttttttcaaaaattgagtagcacatggatttttctcaaaacatgtttaccaaagagtttttactctctggtaatccattaccagattattgttatcgattaccagtatgcaaaatggttttcaaaaagctttcaactgaatttacaacgttccaattgatttcaaaaagttgtaatcgattacaatgttttggtaatcgattactagtgtacttgaacgttgaaattcaaattcaaatgtgaagagtcacattctttntacaaaaagcttt

SEQ ID NO: 8558 - DNA, 620 bp, Glycine max
  unsure at all n locations
cttcacttcgcattctctctactcctaccntantcttcngtnttgatatnatttttatctttnnnnnnnaaggccccacggtgttgctttcgtggccgctgcatatacgagacactatacaaaactcangctttaataataatggcctccaccacactctatttcctttaagatattctataacacagcctcctaatctttatggagaggagtaccacttcttgcagacccgcatgctaattctcattgacgccatcaacttaaacattttggaaaccatccaaagtggaccttatgctcccaccatggcggctggtaatacaacaatacacaaaccttcagaagagtgtgctctagaacaacgaagaatagtgccgtacgatttaaaggctacaaacatcatttcatttgctacgaatggatgaatattttatggtgacaaattgtaagagagataaagatatgtgggacactcttcaatctacacattagggaacaatcgaggtccacagaactatgataaatactctaactcatgagtgaattatttacgatgaccacaattgacagtgtaccatatatgcccaatagatttacacatatctcttatcttcttgccg

SEQ ID NO: 8559 - DNA, 256 bp, Glycine max
  unsure at all n locations
gcttatagtcattacttgttgagaaccttaagccatagtctattgtttcatttatatagtggagaatatcatttgtggccttgagatagtagtgggcggagtctccattttttggcctttgatataaaatgtttggtcttatgcacatcaaatatcacaaactacccaccaaactcttgaaatttgtagcatccaccttttatgcttcgtcaaactatgataacttcattntgcactccaccggagttctaattgg

SEQ ID NO: 8560 - DNA, 481 bp, Glycine max
  unsure at all n locations
tcgattacatagttatttttgagacaatgactgatttattcaggagtctctgccttaatcaattaccatgtgatataatcgattacttctctttctataagtgtttcagaagtaaacaagaacactttaatcgattactttgagtatctaatcaattatattgttcttgagctgtttctagtttcttggaagaacactttaatcgattaaaaagataatctaatcgattaccttgtagatttaatcgattacaagcggttataaatgttttctctataaataaccacctcgtgttctctctaataacaccacattttgagcttctgaatgagctaggatcacgtgctgttattagttcaagaaagaagagaagaanagtgcttagaaactgtgactcacaacttctatgctntgattatgaagatcttnttgtcatacgtgagttgtgctactttcttgagttcaagaagacacctcattt

SEQ ID NO: 8561 - DNA, 150 bp, Glycine max
ctgatgatgcggcaactaacattaatatccaaggtattatataaaatgaatatatatatatagatagatagatatttccactaattcctagaagtggaatgttgtacacacctgtgggttaacctctacattgttctggtcactcttgac

SEQ ID NO: 8562 - DNA, 461 bp, Glycine max
tcttatccaaggctcatcttggtggtgaagctccttcttccttaatgtatggcgcctcctctcacctcttttcctttgtcttacgctgcatctccatggaggaaaatcaccattaaaggaccccattgaagctcaaagatccagcctccatagaagccccacaagcaagttttttgcaatctccttcaagaaaagagagttatatttccgacatacttggtgagtatttaagaaatattgtaaattatcctattgtgtaagattaagatcattgtagtcctacttcatagcggagatattattctagactcggtcccataattcttatctttcatactgagggggtttgccacgctaaaatttcttggtgctgatctttgtctcttactctcttaatatattttactttctgctcatcttaatcacatatagaggagaatttatttttgctatctcctaac

SEQ ID NO: 8563 - DNA, 341 bp, Glycine max
acatgacaatggatgacagatgatattaaattcaatcatagaagaacaggtaattctatatatgctaaattagaagttattacccatactcacaatggttattactatactaatcacaggtattcagctgattgaaaaggaaacaatccatctatgcttgactgaaattgaaaatatgctgcaagccaacagaaaaagcctatgagattttcctttgatgccatacccaataagatatgcaggcaacccacaccataataagctcatctacaatgaaatggcatatgacaaacaaatactggtggcagaaattaacagatcctaccattcattgacaagta

SEQ ID NO: 8564 - DNA, 495 bp, Glycine max
  unsure at all n locations
tccttgagaaaattccttaagaagctntcttgagaagctntcttgagaaacttacttgggaagcttctttgagaagctttcttgagaaactagagcttagctacacacacccctctaataactaagctcacctccttgagaagcttccttgagaagcttccttgagaagctagagcttagctacacacacctctctaatagctaagctcacctccttgagatgagaagctagagcttagctacacacccctataatagctaagctcaccccatgccaaaaatacatgaaaatacaaaaaaaaagtccgcactacaaagactactcanaaggccctgaaatacaaggctaaaaccctatactactagaatggtcaaaatacaaggaatgaagcccattcaccttgatccaccaaagccttttctttctgctcccaagttcttcttgggattccgaccaccccatttctatttggtttactcggccaattcttgact

SEQ ID NO: 8565 - DNA, 365 bp, Glycine max
  unsure at all n locations
actttctcttacctggatacatttattatattttttttattggtgcaaaatattcatttaaatgatttttggcagaaaatttggcttccgatcactttttgttttatcaaaagaccttgtttctgatagcttacttaaaagtacccaaatcccatttcatttgaaaataatggtatctaatacctcctttgaaatattactctctttaaagaaaaattaattaagtactctcagatatatcagaatggggagcctcatggagtacgaaatttnttatcaaaaaattacttaaatagttttattatgtttggagaaaatacaatattcttgtcaccacattagtatttaattccagattttcatga

SEQ ID NO: 8566 - DNA, 357 bp, Glycine max
tactcaagcttgcacatatactgtctgttaaagggtttcaatatctaacattgtcttctttctgagtttcagatactggaaattcctcattctgctctcagtcttgcggctcttggccgaggtatggttatttttcttctcttccttctctcgctggataggggtcccttatttttatttttaatgcgaaagtggaatttattgcttcttttttaataaccatttgtttgatgttgttttaaaaggttctatttgaatgggtgctaattgtgtgtggatttcgttcccacttttattgtgcttatgttttgttagaatcccccaaccttgcgagctattttttaatcccttgttatg

SEQ ID NO: 8567 - DNA, 364 bp, Glycine max
  unsure at all n locations
agcttctaaggaagtattctcaagaaagcttctcaaggatgctacctagtctataaatagaagcatgtgtaacacttgttgtaactttgatgaatgagagtcttgtgagacacaactcaaagttcaacttctctccctttttcttccttcaatttcgtgctcccccctctctctttctctccctctttcttttcctccattgaagcatcctctccaagcttcttatccaaggctcctcttggtggtgaagctccttcttccatggcttattccctagtggatggcgccgcctcttacctcttctnctttgtcttccgctgcatctcgagggtggaaaatcaccattaaaggacctcattgaagc

SEQ ID NO: 8568 - DNA, 422 bp, Glycine max
  unsure at all n locations
agaccctgttggacttcttcgggtccactgggtgtcttgcatgcgcgatccctgcaaacaatagatgaaatcagaaatcagttgagcgatgtgcatacttacctatgatgacgtgaccttgccgggggggtacgggcaccctgtangactgataaaggcccgtaaccagagctggaaaccccagggccctgttggacttttccgggtccactgggtgtcttgtgggtgcgatccctgcaaacaatagatggtatcagaaatcagttgaactatatgcatacttacccatgtcgggacgacacagaccaactgatactttctcanggggagattggcatcgcggtcgctgggcagaatattgctaagtagcaatgtcatctatgtaagagtggtcatgttggtgcgcatgatccgcactcgtc

SEQ ID NO: 8569 - DNA, 328 bp, Glycine max
gcttgcatgcaattcctggattcagatgtgatttattggttcacttattggatcatgcgatcccttatgaacttttcatcaactctaaacatcttggtgatccatttgaggcaaaactgaatcttcttatatgtgaaaactctactctaagtgtttcatcttctcctactctatctaaagattggatatcttgccatcatgtataaattaattgtgtagattttaattttcttggtacgatttatagacatgcatatagctaatgaatgtcattcaagtaacaattgcaaaggtggtgtctaattagtctacctcttgatttagttct

SEQ ID NO: 8570 - DNA, 441 bp, Glycine max
ctcaagcttgtacaataatggaatcaagattaacttggccgtttttttcaattatgttctaagaaatgagacctaatcgcttatgccataatgctcttgagtttgtattatcaattctacgcttacaaccacgcaattaaaggattcaccataggaagctacagtatcatgtaaatatagattatcgttaaccaagagtgaaccagttccaacaatatctgaattaatagacaacatgaacatattgttctcaaatgaacacaaataacccaatttgttcaaataataaactgaaaccaaatttcgtctatatgacagcacaacaaaagtgtctttcatatccaaataagaactactacgtattaataatgtatagtgccctatagctgtcactttcaccgatttaccatctccaacgtacattcatctttcagaatcaat

SEQ ID NO: 8571 - DNA, 334 bp, Glycine max
  unsure at all n locations
agcttgatgtcattcaaacacactatgttaccttatgaaactaaactgccttgttatgtattgattcatatgcgatataatttgtgtaacccgttactaaccaattaatattatcaagtactcgtttggttaagcaaggaaattagtggtccaacaaaaatcatttacgcgtgccgcaaacatcattatgataattgacaacacataatgacatgcatgcgtattacagtttgagcgcgacaacacattggctgacttaagtacacattgccgacaacacattggctgacttgactacacatttacgcgtgtctatntttttgtaaacaaagtt

SEQ ID NO: 8572 - DNA, 431 bp, Glycine max
  unsure at all n locations
cgcttgccttagcacactntacttncatctatttcagactatattatttatacgggttggacaaaatgtttccgaagactaatatcatattgttgattaccttgtatatgtaacaatttaccttattattgtggagtttggcattgggtgcataaagggctcgatgacataaaatcactttacaaacatcttctttctactcatcacatctacaacaaatagaacaatatatccctatttgctgatgagtacataatacatttgacttgtttttgccaatatacggatgagttcatcacatttttcttattttggcatcaaaatattattatttaagataaaatatgtgttacatgttattctatatcattatgtgatgtgtcggtttatgatataactatgttcttcctactcgagatatactcattttt

SEQ ID NO: 8573 - DNA, 469 bp, Glycine max
  unsure at all n locations
agcttacagcaaatgatagaatgtctatagttttatcatttgacaatttattggtattatatgtcttatccttcatatatatagactctcttttttcatctttttcaactgtgaatttttacataattcataaattttatttgataccttgcatagcattgcatttagcaaatacaatttaacatgcttggtttataagtattgacacaaaaaaggcttatgaaaataccttgtattgcatgttgctagggcttattaaaaatatcaaataattttacatgtgtctgtgaaatcagacttattaatgatgcgataaattatgtaactatcatgtctctcgttgatgttgctaaaaaaattgtttaggaagtatanggattaaaagtgcattttgcaaaaagtttaaagatcgagaacataattaacccatttaaatattatcaatanaataaccttaaatttaaaatac

SEQ ID NO: 8574 - DNA, 394 bp, Glycine max
gagcttgaataattgaggaatagctcaacccatttacgttctttaggataccattctcgtgttccaacttacaagactatcaactgtatatgcaaacaataattttacagattctttcacgattatttaacgaatttacggagcagaacagatctgtggcacatcttcaatataaatattatcaatgccttgtccaaaccaaaattgagatcgatggtttagctgacaaattcttcttctgtttaacctatgtttctgactacaaaatgtgtatttggtgaagacctaactatgaagcttccaatctatgccgactttatagatttctcaatataattattatttcatatacaagcgatattcacgtggttgagactagctcacaacttagaga

SEQ ID NO: 8575 - DNA, 237 bp, Glycine max
  unsure at all n locations
atcaatatctgaaaaatgaaattgttaatttagaaatctaagtaaatattgattcctaattttttaaatggtggaaagacttggaagacaaaattgcattaaaatagaacatgccaaacatatagtgggactgagacacattagcagcgnttcctcaactcaaaaattataagaatcagaaagtaagagtatgttaagaagtgtgtaacatactctatacagctttgatcaaatgac

SEQ ID NO: 8576 - DNA, 511 bp, Glycine max
  unsure at all n locations
tcggacctataaaactaagctgggtatctccttcttcactacatcaagaatcaccgggttgtgtcttctctgtggctgtcttactggtttagctccatcttctaaatttattcgatgcatacatgtggatgggctaataccaggaatgtccgccagggtccagcctatagccttcttatgcttcttgagaactgacaacaacttctcctcttgctcatcagcaagggaggcagatataatcactggaaaactcttgctatcatccaagtaaccgtattttaaatttgatggcagaggcttcaattctggtgtggtcggctggacagtggtagaaggagatggtttctcancctttacctcataaagaaagtcagaggtatgtgtacttcctgaaacatggttagtcctatctgactctataanatcaatctcaagaggtaaaacaccaccaccaggcatgcaatcaatatcactctcagattcactctcagcatcaaagtcagacatatga

SEQ ID NO: 8577 - DNA, 430 bp, Glycine max
  unsure at all n locations
agctntacattagaatttagtaatgatccactaacctagaattaaaagaacttaataccattaacctagggaattaaaataacttaatggctgagtgtaactgaaattatggcaaccaaaagtcacccccaacagccatcaagtcagccaccatttggtctcccaaaaggctgatgcctaggttgccaattaggcccttattacaagttgaactcaacctaactaaagcccttttagttgattaaccaaaaacatatntttggtcagccaactttaaaggattgggccattatttatacaaactaaacactctaaaattgagacaaagtggtgacatttagtcctcctccatttgcaccatgatacaactcacaaccttggacttttctccttgaaacttgggcttgtattcaaatagtatggacaacac

SEQ ID NO: 8578 - DNA, 505 bp, Glycine max
  unsure at all n locations
tattaggacctataaaactcagcttggtattgctgcattctactaatatatggaattgcccactgctttgcctgagaataacaattgcttgaccacaacagcgctggaggcggcaagggacaatggtctttcaaataaacctattgtacacgaacaaacattatatcatgcgttgaccgtgccaaacgaaccagcgaagtcattgcataattgttatactaactatattcaatgtacctgaacaaaatgatttccaaacatgtgaccgacacatatgatgcggtggccagaagaatcangtggtggttgacttctaagagggaaaaatgtcatgctttgttgtcgggacaacgatacaacgattacgttataccgtgaagcaatcacatatcccatgtccgttatatncatccacttgtccacactaacctgaatgaaccaaacatacacatgtaagtaatttaaacattgttattaaaaaaacataacctaanaacataccttt

SEQ ID NO: 8579 - DNA, 422 bp, Glycine max
  unsure at all n locations
ttaagtcacctgcggctgcagcttaaaattgaataaaacgttcagaaactgctggtaatcgattaccatatatgtgtaatcgattacacagtgcaaatttttaattcaaattntaatagcttgtgtaaatcaattttggccactggtaattgattacatcctctggtaatcgattaccagagagtaaatttcttgtaaaagactttttaacttaaatttcttgaccaaaccttttgctacttcaattggaattcccttcctatttaatataccttctaagactctaaagactgtcttgatcatccatcttgaatatctntaatttctttgtcttgaataaagctttgagacgcatgtgatccttttgcatcatcaaaacatcagcttgatccttttgtctacacaacgacccatgatggtta

SEQ ID NO: 8580 - DNA, 412 bp, Glycine max
ctataaaactcagcttgtgaatcgatacactaatttggtaatcaatttccagtgattgcttctgaataaaatcacaagatgtcactcttcacatagttcttgactttctcaaattggctcttaagtttttctaaaagtcataactcttctaatggttgccttgaccagacatgaagagtctataaaagcaaggctttgttttgcatttcaatcatcttgaacatttcatacaatcctttacaagccttgaatctctttgaacttcttcttcttctttgtaccacaagctctccaaagttttctggttttctaaaccatgaaaactcgtgctattcatcttttcattctcttcctcctctgccaaaaagaattcgccaaggactaaccgcttgaattcttcttgtgtctctct

SEQ ID NO: 8581 - DNA, 290 bp, Glycine max
agcttatcaccttgaagaccatgtttctttctgattgtgtgaaagacgatagcaaggcatcagctgctacatatattcgaccgagaaggaagaacagagcacccacatccctcaatgactttgtctgagcaagattgctgagctggataacctgttctgctgagctggacatctaaggatctgagccttgatcctgtctgccattactacgaatattctgtcatttcttgtaagactcgacatcatagaaatacaaattttgttattgtaatccattataaataccatct

SEQ ID NO: 8582 - DNA, 277 bp, Glycine max
  unsure at all n locations
tcttctttccactcttttcattttcaaatttcaaaacatttccagttcaaattccaaatcgcagtctacagttcggctatgttgcaggctatgcccattctataatctgatatgattgattcacgttgacgaattattgtgattgagagagcctatgaaacattatgcaatattgtcagtaggtttcgatttcacttcatttctagaatccatttttttgcataaatcataagctnttgatttcacctcattttctaaattcaagtggatatactat

SEQ ID NO: 8583 - DNA, 420 bp, Glycine max
  unsure at all n locations
ggtatcctatgtntganattaaataaacttaagttaatccattatattctaagttactaatctttatctacccaattataccatagtaacttaacttcatttcaaaatgttatcaactaaccttacccgaaacctcatttgaaacgagccttccccggaatttatggacctcacagttagggatctctttatccctgtgagtagatgttggaacagggacctaacttaacttcatttcaatatgttgttaactaaccttacccgaagaccttttggatgctatgttggataggccggttattgaagagattctaatagtccctatattactacatgatagtgaggataatacgatatgtacgtggagtaaagatggtgttttctctgctcgatctgcctatcacggcgctaggaatatgg

SEQ ID NO: 8584 - DNA, 491 bp, Glycine max
agattgatgcatcagtcccgggactcttagagtcgcctggagccttccaacctcttaggtagcttctgggtcacggtcctgttatactcatcatcttggctaacacaaccttaaggcctctgaactgtgaactccaataatctttaggtgccaatatggatttttcaagagatggtcttatctgaaacttgagaagtgtcatgccttgcaccaaaccaagggtgttcggagatatccatatattaccttgcatcatctacatattattccacattgtaaaatcagaggtacgaaaacaatcatacaatgatgaattaaaaatattccatagggtcatttgtgacaaatagcagattgcaagttccaaaagaaatttggttggggcaaacacttaacattttgtagagctatcaccactaacccaaaatgatgaccttctatggtccttatccaacattgaagaaaatagatttttctagctagtatggagg

SEQ ID NO: 8585 - DNA, 479 bp, Glycine max
  unsure at all n locations
cgcagtaagtatgaaaagcaatattcattgttgagggattaagtgcgctgctcaatagcctctttaactatgcactaaaatttttgtgtccggtctcccatgtcacatcatataattaatgtctttaccagggacatatataaaacaatatagacaaccaaattaaaaaatcaaaattaaaaaaatatcaacaaaaaggtgctaactattgtaagaaatctttcaatttccctacgtttctagattttaaacaccaattataatatcaatgaccaaatcaaataaagaaattcacaaacctcattaagcaaagtcttgagagagcagtcaaatgtgcttttgtaggatgaatcccccatcatcctggatttcacctggagaattatgagcatggatataacgcaacccttgatcatacaagtagaatgtgcttattcatacgaatntcaccaatattgttaggaaacttcaatagttct

SEQ ID NO: 8586 - DNA, 368 bp, Glycine max
  unsure at all n locations
tgctccttaaacctncattaattttttgctttaccttctcttccattgttgtttcttcaatttatctccttgtatctcctcacatgtcttgtgctaaatgttgttaacacgattctttagagtttccactgattaaacttgctataaaagctagatttgattttctatggttcaaaattcttgttcttgttcttgaaccacgaattgtgttgagtttaggttcctttgagttttgtcttgttattttttgtggctgaaacctaaaccataaaattcttacaaaaatattaaagtagaagaaaacctcaaaaatctagagtgacttgttcacctattgtagttntgtcatagaagtcatgtctagtcat

SEQ ID NO: 8587 - DNA, 456 bp, Glycine max
  unsure at all n locations
gttcttaaaaaaaagaataataagggtagaaactaaataggtgccataagtgcagttagaacaataaattgaggctgaaaaaaaataagcctagacagaataagtggaagcttttctaggataaatgctctcttataaccctaatttttgaaataccattaaaaccataatttctttaattagccaagccaaattacaggccaataaaattccttagtgatccaccaaatgtaagcatgataactttaactgagatgaggtgcaaaattgggaacattaattgtaggttgtagaaactatcaacactcatccaagacacttgtgcacagagagaaacactanagccttgtgaggaaaaagtgaggcaagccgaccttgatgatttctgctactgaccaattctatctcaatggttgtttatgcttccattgcaagatcatggcaaatacaagaagc

SEQ ID NO: 8588 - DNA, 347 bp, Glycine max
gctaacaacacttaatgttcaatgccccttcgttactatgtgttcaactaagcaatgcattaaagacatgttaatttaattgaataataaatgcgagtctttattacgaggtgtgactaattcatctaatataataaatgggcggattattcacggagtagttgaagacttgatttattctagactattactttttgctgaacaactgacctcaataacttaagagggggtgaattaattaaattttaaaattttcccgctaacaaattctaacccccttttaaatgatacatgattgactcagaatgcagaagaagaagaagaaacaatcaatttaataatcgtct

SEQ ID NO: 8589 - DNA, 396 bp, Glycine max
  unsure at all n locations
tgatgatgacaacttatgagtttttaaacacacacacacacacacacacactttttgctagtcgatcactcacataaatttccattctccccctttgtgtttgaatttatgcttctcttaaaattaagttgattactcatgtgagttcttgatttaatccatatttctctccccctttggcatcaacaaaaagccacagtgcgttacaagtataatacaaacatatactattaatcgttcacaaggcatacattgaagaatataaacccatcatgaagcaagaaacctccttagatcagatatatagaacaatcacatagtcatgtagcatagatcataattggtcagtcatactaagcacatattataaagaaataataagtgctcanatgtcat

SEQ ID NO: 8590 - DNA, 255 bp, Glycine max
acctttctcatttatcatatcccatgtgttcaggaagctcatgcaatcatttcaataacaaatcttaacctttctgaagcatttgtgtacaagaaccataacatgagttattgctgttggtaggatgtggaggttccaaatgtttcctgagatgatattggaggcttatagaatgtcaagagggagctttatgaggggcacacttgcttttgatattccatacctttaatatgttgcacatgtacattttaatta

SEQ ID NO: 8591 - DNA, 317 bp, Glycine max
gagtgtcgctgtcagcgacaattgtatattgaacaccatatctgcgtatgagatgtttccaggtgaacttttctacctcgctggctgaaatttctcacaatggccttgcctcgatcaacttattgaaataatctatggcaaccaataagaatttgacctatcctgtgacttttggcaatggttctattatgtccatccctcacatggcacaaggccaaagggagcttacgatatggaggttgtcatggcgtatgcatggaacatctgcacattctatgcatcatatgcaccttcttgtgaagtcaatggtgacgacc

SEQ ID NO: 8592 - DNA, 256 bp, Glycine max
tataaaatcatttgattttaacatcaagcaccccttgacaatctgaatcttgagttgaatcgctggagagtatgatcacagagggattgctcttgtccatgtttaatcatgggatcatttatcctggtgaggcagaagacggacaaaatcacaaggttggggtcatatgatccagtttgggcaaaacccctttttctccttcaaacaatttcctttccatatgtgactatgtgacttctctaacctaatctccatc

SEQ ID NO: 8593 - DNA, 188 bp, Glycine max
  unsure at all n locations
tctctctctattccctatanatagggcgaggagggaatatcttctctgttctaccctcctggtctctgcgaataacttataattactgagatacattgtttccatgaataacatacacgccgaggcgcttccgttatgcgtccgagacgctcccgcgggtgattccgcgaggattatccaccgttctt

SEQ ID NO: 8594 - DNA, 315 bp, Glycine max
  unsure at all n locations
cgctgagttctttgttagtaccgaaactctaggaggaggccaagaaactactgtgtaagaatttctttttttccttgttagtgttcttgatttgtgaatctcacttaaattttgagcttaatatgtggcatgcattgtgaatcacatttttaatctttatcagctaagttgagttgtttatgtatgttgtagggcctttcaaggagaaacgaagcaatgagcttaaattctaatagctcagaatcacatataattntcacatttgtcattgagtctttgtgtaaggtactggtcaaatttgtaattctacctaac

SEQ ID NO: 8595 - DNA, 449 bp, Glycine max
ctaatgtgttctcccttgtagaactactaactgcagtaacagttgcagcccaactatccagtagtgatgacaatagaatcaatgccttcacctcatcctcaaatttaatctgcacagattccaattgggcaagaatagtattaaactcattaatatgatcagttacagagataccttctcccatcttgaggttgaacaaccggcgcatcaagtatactttgttggctgctgacggcttctcgtacatatctgataatgccttcattaagcctgcagtagtcttctcgttcacgatgttgaacgcgacgttcttggctaatgtcaatctgatcacgccaagagcctgtcgatctagcaagttccattcttcttgcttcatgtcttctggcttaacccctgataagggctgatacagctttttctgatatagataatcctctatctgcatc

SEQ ID NO: 8596 - DNA, 525 bp, Glycine max
  unsure at all n locations
cattatgatgcatcgatctcgaccgggatccttaagtcacctgcggcatgcaagcttgcaaccaaatgctcaccactattatatgataaaccttcagattctttcatataaacctcctcctctaaatcaccattaagaaaagttgntctcacatccatttgttgcaactcaatgtcaaaatgagcaactaattccaagattatatgaagagaatctttcttagatactggagaaaaagtctctttgtaatctattccttccgtttgagtaaatcccttagcaacaagtcttgtcttgtatctctcaatgttgcctaatgaatctcttttggtcttaaagacccatttacatccaatggccttngccccattangcaactctacaaggttccaaactttgttactctgcatggaattcatcccatccttcatggcatcataccataaatttgactctttacaacttatggcttgatcaaaagttcaggatcattttcagctcaatatatagtcagttcttgcaaaa

SEQ ID NO: 8597 - DNA, 466 bp, Glycine max
ttgatctcaaatcttgaattgtataataattatatatatgtgtttatacgatccttcttatatacgcgttaattgtcattacaaaccattgcattggtttcaattgcaaaactcacgtgaattgccaaacctcaaattgattttttttttcgtatgaataattcttatggcctagattttctaattttggcattcatagcaacatcacacccttgtgtgctttggttataataattaacaatatgtgtgtgtgagtgtcacatagatatatgagttggttttcaaatgttctaatagtctaaacgaatttgcaacgcgaaaaaggttaatacattacaggcttcccttgaaggtgcaatatatatgtttaatacgttaatcattgtgcatattaaatcggctgaccatattaagcattgcgcatattacatcgggaacggattgcagcagtaaatatattgatatg

SEQ ID NO: 8598 - DNA, 306 bp, Glycine max
  unsure at all n locations
gcttcgatatcaatttcgagcgtctcgatatattaccggactcagnccaacaaccgagtgaaaagttattggtcgttgaatttgctgagagggtccataatcaatttcgagcgtctcgatatattacgggactcaatcagacattccagtaaaaaagtattgtcggttggatttgctcaaaaattccataattaatttccagcgtcttgattaattacggcactcagtcagaccatccgagtaataagttatcttccgttcaatttgctcaaagcttcggtcttcaatttcgagcgtctcgacata

SEQ ID NO: 8599 - DNA, 337 bp, Glycine max
  unsure at all n locations
ctgagcanattcaaacgacagatcactgtttactcggatgtcttattgagtnccgcaatatgtcgagacgctcgaaattgaagaccgaagctctgagcatattcgaacgacacataactttttactctgatgtctgactgagtcccgtaatatatcaagaagctcgaaattgattatcgaagctctgagcaaactcaaacgacaataactttntacttggatgtctgattgagtcccgtaatatatcgagatgctcgaaatggaataccgaagctctgagcaaattcaaacgacaataactttttactccgatgttcgattgagtatcgcaatatat

SEQ ID NO: 8600 - DNA, 335 bp, Glycine max
gaagctttaacctcattgtctctcacagcctttagatttgggagccaatccaatccttgtgtccggactctcagccacttatgatagccgccgatgatcccattactgcttcccctaagctctctgtcctttcttcacgccgcatcccatgccttgcgaactccttggagtaccctcgcgttgtggtcactgaaaccccgttcgatgaaagggcgtgatgctttcgtctgatggcactcctctcatggggtagccaagctgtcttatggcgaggacgggattataattaatacaaccccttgttccatcaagggaacatttggacatccttcgca

SEQ ID NO: 8601 - DNA, 378 bp, Glycine max
agcgttaggatcggaagagtgactatgataatctattatggccaacggaaaaatgaggggttgattgtcaatgcaatttgggggtagctctgctggcttcgacgtcattggcaaaccgcggaatggtttgagtgtggaacaatggaaaatatggtgaattcgtgctccttttggtacttgcaagcggtacgccatgggacctattctctctatgatctgaaatggcccgtaatacctctttgctaatttgcccatactagccggagttccttttgtcgatgtttctcggtatggtcggagcttgactataacccagtcaccacattcataattgaccttgtgccgcttcttatcagcatatgtcttcatacatgcttg

SEQ ID NO: 8602 - DNA, 395 bp, Glycine max
  unsure at all n locations
agctngataacacgcagagactaacgtcgtcttttgcggccttcgncaatcgcggccgacaagccccgtgacacgcagagatttatgtcattttccgcgcttacaagatctgtcatactgagttttgagtcacgctgacgggcggaaatacccgagtggttatccgtataaacttcttggtgtctgtaagacgaaaagcctggtagcacgcaaagactaacgtcgtcttctgcgctcttcgtcaatcgcggccgacaagcccgtngacacgcggagatttacgtcatcttccgtgctcacaagatctgtcatactgactttngagtcacgctgaccggcggaaatacccaaatggttatccgtataaacttttgcattctgtagacgaaaagctt

SEQ ID NO: 8603 - DNA, 546 bp, Glycine max
  unsure at all n locations
ccgtgtgcctgttcactgcattacggacctttaaactaagcgtgtcgcgtgttgacaacggccatatgtacattgtgtctctgcgagctaacatcgcggtgacgagcttactagacaagctataaactctcatacctgatgaaccacatcgtgttatatgtcgacagatgaggcgtgactcaatatgtaaactctgacggtatcgttgcggagcgcaggagatatcgcacgtacctatctctgcatgtngaccaggccttgtgcatcagngagtgcactaaggcgcgcagaacgactttagtacatacgtgctaaaacgcttgttaagccacccacagtcttaagtttatacgggtaaccacccaggtatttgcctcctgccccgtgacaccacaactcaatctcacagatctagcgagcgccgaagatgacgtttatattctccgtggcatcagccttgttggccgcacatgacgattggtctgaatacgacatcttctactggctctatcaagatctgagactacggcaacaactatttaaccg

SEQ ID NO: 8604 - DNA, 362 bp, Glycine max
gctttgtatgccctctcccacttgcggtgatttcttcttcggcaaaggcgagatagttgttggcagtgatattattgaccagcccttcgaaaccttctaccgagatgtcttgggccacatgggcctcgttcaaaaccttcactattagagcccgatgaggctcggagctcatgagtaactccaacagcgagaccctggccggggttttgttgtgctgttcgataaccttgaattcgctctgctgaattatacggaggaactcactggcttcctctagtgacacctcctttttaccatcctttttctccggaagacctttcgcctgaatatctttattcgaagagaggggtgcttcgtcatct

SEQ ID NO: 8605 - DNA, 322 bp, Glycine max
acaccaacacattggcgcggttataattgatatatcaatgcgtatatacaacttattattcttgagagtatacagcacaagatcccagaaaaaataatactctggagcagtgacagcagaaagaaaaggactaccgcagaatatttatgatgacctagaagatgttctcgagcgtctgggaattggtatcatcactataacccgcaattcgtttgaattaccagtaaattgaaaaatgacttgtattacatttcacatttgtagtgtgtcctataaagataagacattaaattgccaaggcagacacataagaaaaaagact

SEQ ID NO: 8606 - DNA, 391 bp, Glycine max
  unsure at all n locations
tgtgagactcactaagggcagaccttaggttatgcgagcctctttagaatctactaggannatttctgtcttgcgttttagagagactcaccaacggcggaccttgagtttgatgagcctatgagactcagcaagggtggacctttggttttatgagcctttggagattcgaccagcgacgtgtccgacctggattntggtgagattcaccaagggcagatgttagtcgtcttatacgactaacgttttgtataaaannactttacaaaatgtatataaatccccaattatagttctttggtggattgtaataaatttgcttgtttgactatgtcattaaagcctcctatatggataatgtaaatttcttaattcagcaaaatgacaattg

SEQ ID NO: 8607 - DNA, 126 bp, Glycine max
tacagttggagagcaagttcaacactcttatgttttccttgccatcagatacataagaaaacgcttctattctattctcgaggctttctgctcacatcaccaagcacagatctgaagcaaacaaga

SEQ ID NO: 8608 - DNA, 460 bp, Glycine max
agcgttagataaatgaaactattaaagatataatttatgatgttctcaacggataaaaaaaatgatataatgaaggtgatgttttgctttatcaaacctgagtgatcctgagcttgagtaagtataccacccaaaaacacaacgaagaaagtcatcggcattctgtaagatgacagatatactagcaccatgtgctgactctgacctgaaacggaaacgtattggctgacaaatcggatcattgaaattatatatgattacttggaccatccgaatcaatatcacactcagtaaattaatcactgtcaaaacagtgcaatgatatcaggtcgacttgtcattatatgttaataggagaaatatactttttacaaacataaaggacaaaacattatcttttgtcaattctggatccaaatatcacgatgtacaaatttaatgactaaatttggtatatatc

SEQ ID NO: 8609 - DNA, 505 bp, Glycine max
atgaatctggatttcattgtgccaaagactcaacaatatgataagcatgctctaaacaatctggatccttttctgcatctatggcttcacaaattccataaataaggtcctccccctgcaagagagtcaaaaaaatgagttattatagagataaaagtcagatcttggccatcatattttagtttattatattagttggatatcttattctctgctcttgtacttcatcattttataccgccaataatatttattggtataaaaaacaattgagtaaattgcagtatgtacacctcaatttatgcaaaagaagaaagatacactgctattttcaaatactgcagccacatttgagagctaaatgcttctgtaaatattctctgcagttctctcaagatattaaaagagacaattgtttttccagaataagctaatccaaacacgctcataagatgtaattaacattagaagaattcacattcttcagacatatgactgtatattc

SEQ ID NO: 8610 - DNA, 436 bp, Glycine max
  unsure at all n locations
agctntctacaaagggttttgaagctaacctttgattccatgtgatcattatatgtaagcacatatgttgtctttatgtcaatatagacatcgtacgtcagtgtgcatgcatgctacctagccctagccttctcgaacctaaaatacaagaagcacgttaacgaagaatccatttaacagttactatataaatttctccaagtaaaaagtacatttgtataaaatttataaaattctactattaacttatctgttagtcagtgtttatgctaccatttttccaaccacacacttgacacaagccaaattattttccttcatttccgacaatttttattttattttgttaaactcttcaccttaatgagaatatactggattgacatttgaaataaaattgaatgcaaatcaattatcttattatagccacaccaat

SEQ ID NO: 8611 - DNA, 482 bp, Glycine max
  unsure at all n locations
ngagcttaaatctaaactcagttattcaaatgagataagctcatgctgtatatgtttgataaaagctcacaaacaacttgtgtttgtgtatgtgtatattctatacaaaagattgtcattttaaatgagaaaatgtatgtatactaataataataatttatttattgttattacttagtaaattgttatcttattgatttattactgtctactatttacgtaacgctacttttcaaagagtttctttactctcttcaacttctagcataaagatatgtactcaactaaatgctaaattaataaacatagaaagaatacattggagaaaatttgaggtacgaaaagaaaattattgttagaatttagaatatgttgaatagtaactgtcatgttgaatgttntatgactgaaagttagcagttacatattattaaatatgcgtaatacgggaatagagggatatgtgtgtatcggtttctagt

SEQ ID NO: 8612 - DNA, 424 bp, Glycine max
agcttatgacaattgaaattctcgagagcttccgaatacgtgtgaaaagttatgaccatttgaaatttttgagagattccgttgttcaattttgagcgtctcgatatattatgcgcctgaatttgacttgcctgtgaaaggttatgaccatttgaatttctcaagagcttccgttattcaatttcgagcttctctatatgtgatgtgcctaaatcagacatacgggttaaaagttatgaccatttgaatttctcaaaagcttcggtagttcaatttcgagcatctcgatgtattatgcgcctgtatctgacatccgtgtaaaaagttatgaccattttagtttatcgggagcttccgcttttcaatattgagcgtctctatatgtgatgcgcctgaatcggacatccgagttaaatgttattac

SEQ ID NO: 8613 - DNA, 450 bp, Glycine max
  unsure at all n locations
gtgagacagtgtggaagagtcagtcttcctactnttatttgttgaccatatagtggtacctggagatatgtcgcgggagtcaggagaccttgtggacgtcacgtggggtgctattgcccaaaaccaagcttgatcaatcctgacccaacccgggcatagtcagtcagtgagaacctgtgacgtacctaaacaggcgagctcctggtagtcaaccaataaaagaacaaagaccacaaagcaaggaggcttgtgtggtggctggccagctatggatcttgagtgatatctagaatatggcctctggtaatcgattaccaaaggtgtgtaatcgattacaaggcttataaatgaagacagaaagttaatatggcctctggtaatcgattaccaagggtgtgtaatcgattacaaggcttanaaatggatacaggaagttgagatggcctctag

SEQ ID NO: 8614 - DNA, 321 bp, Glycine max
tatatcaatggggcatttcaccgagcacttgatgggcgcatgtttggacataaattgcaagagaatgggggcaatgtggcatgccccattgcttcaaaatacaacatacgcctaacgccttctcattcaaatcctcaactcaaaaaaatcaagcataaaaacaacccaaaactgccccacaaatataatcacattctcataatttggagcaccaaaagatgaagaaaatataccaatgggaagctaaaaacatcaaggattgaatacttacttgttggagtgaatagaaacacccaaaacgaaagcaaacacgatcaaagt

SEQ ID NO: 8615 - DNA, 400 bp, Glycine max
ttcattctttgtgttatgagcctacatcagacaattggattattgatgtttctgtcacaatcaagtgattgttgacatctccatatgtgtgtacaatgtgattatgttttcgtttctaggattcatttggaatatttgttgttgattatgaataagtgaccaattcttttgatttaaaattttcgtctcctaatcaatcgaatattcatcttgtacaatgtgattatgggttgattaaaattttcatctcctaagtagcttgaatcactcactgagacactcagtaagttgctagcatagttacaagcggctcaaccctctcattcagctgttatgcaagttggaggctatagtatatgtcgagggagctcatgaatctggctgtggataccccaagatg

SEQ ID NO: 8616 - DNA, 403 bp, Glycine max
  unsure at all n locations
tcanaccacagcatcacanaatctaggtatccaaaaccgctcaatttagtggattntcaaggtttgaaaagtgaaattgagaataggggtaaattgaagcanactctcacctcacacaagtctataacatcaatttaaacttgttcaaactggatttacacctaanatttcaccgaatcaaaatttgactcctcaacacccaattntaccctagaaatggctcttgccttcactttggtcatttgtttttctctcttgcacagcccaagctntctcnataagtctaaatgacatttcgaactaggagtaactcattttaacctctatttaccactgaatccagaattagccttgcaactctcanagcctcactctttttttcactcatacaccacattctcac

SEQ ID NO: 8617 - DNA, 433 bp, Glycine max
agcttgagctcactggtgctaccccttaaagctccacgaaatttgtcatggccatgctctttcttgcgagccctcttggtttcttgttcaagggctctagcagtagctgcattttcttctcgtaacccggcacactctttccggacgtttgtagcgaccaacttgaatttttctttggcaagtcttgcttttcctagatctgtttttagagctcggacttcttcatcctcttccggagcttcaaagttctcttcgttgataatctttaacttggaaagccaatctaaccctcgtgtacgaactttcagccattcatgataaccaccgatgatgccattacgaatgcacctaagttctttatctttccttaacgggctttcccacgccttatggactctttgtataaccttgaaactttgtacgccgaaatctc

SEQ ID NO: 8618 - DNA, 435 bp, Glycine max
  unsure at all n locations
tcactcctacatctcatctctagcatgcattttctttctttacccactcctcacgtttggttntttagggaaaaacaccataactaaacgcgccgcaagggatccctatcgcaccagatccaaatctagaacgatgggtgatcaagaggagacgcaggaacagatgaaagctgacatgtcggctctgaaagaacaaatggcctccatgatggaggccatgttatgtatgaagcagctcatggagaagaacgcggccactgccgccgctgtcagttcggctgccgaagcagacccaactctcttggcaactacgcaccatcctccttcaaacatagtaggacggngaagggacacactgnggcacgatggcagccctcacctgtgatacaaccgagcggctacccttatggnattgcgccaactattaccacccat

SEQ ID NO: 8619 - DNA, 442 bp, Glycine max
  unsure at all n locations
agcttcccagatccgatcatggaaggacttagttactgccttcattaggcagnaccagtacaatacagatatggctcctgatcggaatcagcttcagagtatgactaagcgagagcatgagtccattaaggaatatgcccaaagatggagagatctcgcagcccaagtcgtaccgcccatgacggagagggagatgatcacaattatggtagatacgttacccacgttctactatgaaaagctgataggctacatgccatctaactttgcggatctcgtcttcgccggagaaaggattgaatccggactacgaaaaggcaagttcgaatatgcttccaatgtggcccccaacaacaacagaagagccccagtagtgggcacgaggaaaaaggaaggagacgcccacgcagtcaccaccgccccgacgtggatgaaagcaccc

SEQ ID NO: 8620 - DNA, 468 bp, Glycine max
  unsure at all n locations
tgtttcgaaaccacccattggttctgataggcttgtgagaggcatgtttagggactaaatcccacacttcattccttttaaaatgaattaattcatcgtgcatagccaacaaccaatgctcatcatgaaatgcttcatatatggttctaggttcaatctgagaaacaaaagttgtgttcaagatccttaaccttggtttcatcttcaagtgcagcttgcgtatcctaaaaacctgcttcttcattttccaaagcattttcttgaacaaaagagccagtttcctcacgaataatatttttaggttcttccacacacaaagttctcctattaagcactctataagccttgcgttgtaatgaataaccaagaaagattgctcatcagttttgcatcanattanaaagagatccttttcattattaaatcaacatttacatcaaaccctaaatggatatattggttcttcat

SEQ ID NO: 8621 - DNA, 443 bp, Glycine max
  unsure at all n locations
agcttcattcctttttcactcatgtgtccaagtctttgatgccacatggttgaattattgacagcctcagtaactcctaccatatcctcatctgcaatcatgtaaagagatcctcgcttctttccacgagccacaatgagattgccttttgttaccttccaagctccatctccataagtggtgtgatgcccttcattatccaactgccctatggatattaagtttctctttaaggtaggaatatgtctgacattgtgcaatgtccatagggatccaccagaggtctttatgtcaatatcacctcttccgataatgtccagagattntccatctgcaaggtaaactttcccaaatcttccaaaatatagttagacaataaatctttagaaggagttgtgtggaacgacgcacctgagtccatgatccatgaatcaacaggacta

SEQ ID NO: 8622 - DNA, 473 bp, Glycine max
  unsure at all n locations
tctatagaaggttcgttcctaatatctctacaattgcatcacctctcaatgagctggtgaagaagaatgtggcatttacctgcggtgaaaaacaagagcaagcctttgctctgctcaaagacaagcttactaatgcacctgttctagctcttcctgactgttctaaaacttttgagctagaatgtgatgcctctggagtgggagttggagctgtattgttacaaggtgggcaccttattgcttattttagtgaaaaacttcatagtgccaccctcaactaccccacctatcataaagagctgtatgccttaataagagccctgcaaacttgggaacattaccttgtttccaaggaattngtcattcatagtgatcatcaatcacttaagtacattagagggcaaagcaagttaaacaagaggcatgcaaaatgggtagagtacctagagcaatttccatatgttatcaaatac

SEQ ID NO: 8623 - DNA, 191 bp, Glycine max
agatgaggaagtgttgaacggtgaaactttctgcttttattgttgaccacacactggtacctggagatatgtgacgggggttacgacaccttatggacgcccagtggtgtgctattgcccaaaaccaaacttgaccaattcccacccaacccgggcatattcggacaacgagaacctgtgatgtacctaag

SEQ ID NO: 8624 - DNA, 206 bp, Glycine max
  unsure at all n locations
gctgaaccatnttatcaataaacacaagttgagttttattcagaaaagtagagtatatctcntttatcttagtgagagtgattctcctaaattctcgagtgattcaagaacaccctggctgtatcaaaggactttcacaacctttgtgtgttgccctcgctggaaagagtgattcttttcttcctatcatcttcaaccttggtctt

SEQ ID NO: 8625 - DNA, 446 bp, Glycine max
  unsure at all n locations
agcttgtacaaatagattcgtgcataatattcttcatcctgtatggtccatatatatcctctcatcgctgtatctagcattatattagccgccactccttcttgggtgagcccgaaagcaatttttcatctgagagtgaatcctgatgcatgggcctggtcttgggatcattgatcagttaattaattctacgaccgagaaaacattntctaatttcttcaaggtcaatatgacgtagattccttgcacgatcctctataacattattttctctgctcttctccaaagatttcttctttaggcgttgatcttgctggtacttccttagaggttcacctccaattatatatgtactgcccatcattntagcatgagcagatgcctcatgaggggccatctgctcttccatgtactatctttgagtttcacctccaatcacagctttt

SEQ ID NO: 8626 - DNA, 487 bp, Glycine max
  unsure at all n locations
tcatctgcactcatggatcccaaccaggtaactcaacatttctgcataattcttagatctggtttaatctagtttgtttcgttcaatttggtgcgtcgatttgatttttgttccttggggaaaaatctaatcacacgcttaatttcctctggtgattcagtaatgccatttattttctgctcgatttttcaatttttgcgctggataggatttaattaaatgattgatcgtgctattgaatgttgattcctttcagatttaggtgattaattagattctcttgtgtgtgtggtgcagcccgtgggtgaaaactacgccaatcccaggacttgcttctttcatgtcctcttcaaggtttcttttacccaattaattgtgctctttatcatgtctatttatgcaagccattttcactttattaaggcatanctctttctttgtatcctctctcaagctgcagccttggcatttacattctctcggcctc

SEQ ID NO: 8627 - DNA, 398 bp, Glycine max
  unsure at all n locations
agcttgtgcttgttntatntaaattcctaggatcatgagcaactaggtgtgtcctactattacttgagaaacaaaggtgatcaaataacaagaagagattttaaaaggtactaggttgcctcctagtagcgcttctttaacgtcttgagctggacgcttgatggcttgtcggtcactgacccagtactttgcttacctttggctctggacttggtcgcctattgctcggccatgggtcgtaagcaacgctctaacctttttgtggatgagctgaggtgaactctaaaggtgatagcggtgcgtctgttgcccgctgctggccatccccaggctactagggtgtttcgccctgcgcctgcctggagacgcagtacttcttgatgaaagctcgattagta

SEQ ID NO: 8628 - DNA, 314 bp, Glycine max
atactcagcttatgatgatgaatcaagtggattctagaccatttaataatgactaagatgttgactaaaagcccaaagaatgatttcaagattaaatcatgaacaaattcaagaatctagagaagtctgatttctagattcacgaaaagatgaattcaagttccgaaagaacaaatcgagaagacttcacaagggaaggatggtaaaataatatcactataatgaacatagctcagttttgtctttcagaagagatttcacaaaagtttctaaattaccagagtgtttactctctggtaatcgattacgagtgg

SEQ ID NO: 8629 - DNA, 459 bp, Glycine max
  unsure at all n locations
gcttatgcgcatatttccttacgaacgttctcttgcacattacattctattaactaagaaaaatgcacccatatacaatcaagacagcttcgttacctagattatttacacgtacttccaaggtgtatttgttacttacatcacacacatctccttggctaaatttacatacatgcatactcaaagcattttggggtaccaaaaattgcacatgtgcacatcttggtatttctaatacctatacatacacaaacttcatgatgaatcttgactatctacacaataaggtgctacatttcatgctcttttcaagtttttgctacctaaagccgcatgcaaattcaagcatattttcctttgctgactaaaattgtattcaaattaaagggtatacattnttttgtaatgtattttctttacataacatgcaacatatttatgtatattttttgtgagaca

SEQ ID NO: 8630 - DNA, 399 bp, Glycine max
  unsure at all n locations
ctctctatttctctcaatcgctcttcattcttctgtatctttccacttctattctaccattgtattgcacaaatataatggattctccattgacgatgatcatgtagggctaaaaaattaatcgatctaaggatccactccaagcaaagctgaatttgagtccttgctgggttttctactctctgtgaatgttattctttctcttcaatcctatatctgttttacatgagtgcgattatgtctaggattgaaaatggattaagctatggattcgatttctaatgtcaaaagttaatcacatattgnttggatgatngcccactctcatntgcgatttccaacaatttagagattagattcgattgaactgtctctaatgcatatgagtgaactttcaca

SEQ ID NO: 8631 - DNA, 458 bp, Glycine max
  unsure at all n locations
agctntgtacattgtattatttgaaactaatagtcaagtatgtgccatttaaacatcacattatcatgtttgttctcttttcgagatatttcaatcattgactgtgttgactatagattaatatgggtgtggttgtgactgttatttatagttgctaggtcctgttgtggtctttcttcttcaagagtctatgaataatttgccaacttcagtggcggaaattactcctgcattgcttcttaaagatgctgcttatggtgctactgcttatgtttattacgaactctcaaactacttgagttttaaagactggtaagttcatagctactatgctttattgacgtaagttatccatatttcgatcttgccattcctaaaaattgaagatcagttaattttgttgtgtctggactctggtaaccctaataaatcacagccacccactggtaatggaactc

SEQ ID NO: 8632 - DNA, 483 bp, Glycine max
  unsure at all n locations
tgctctcgttgtagcggtggcggcaacggactaagcctttaacggcccactatatagctgggtatgtgcatttgtccatgcttcaagcccaaatgggtcttggacaagggagaatgttagaaggcagttgcgatttacacttttcccatttactaatacactccattntctgattttataattttttaacacaaaataatcccattccagaaaataatcaaaagacaaataaggttccttcaatcacaaagactcactctcttactcaactntnttcaatcattgtgcttctagaacaagatcttgattntgattattatgagaatagtagtcaaaatgagagcacgacaatcaaggtaggcattatttctttatttgagactctnttgtttatgtaagagataagaatatttgttgtttgnngttttgaattgtaagctagtgagtgattgngtgagcttgaacttaaatataagtgtactg

SEQ ID NO: 8633 - DNA, 238 bp, Glycine max
tgtaatcgattaccccttcggaactttccgagatggctcccaagagtccctactgtatatattgtattatgtatggcctccctggtctttcaatatattaccagacatgcaagttccaagttcaagtctgatgagtcacaactttttatatactagttgtgtgatccgattcaaccattatgtaatcgattaccatttgcgaatgttcgataatagctcccgagagtccacctattca

SEQ ID NO: 8634 - DNA, 285 bp, Glycine max
  unsure at all n locations
actcaagcttanacacattccaatttatgtttaccccagtgaactacctgtcttttaatttaacctcgctcctctttcatgacaccatcgtcaatgaatctatctaaagatatcaactgtacacgaatacgcataagctaaaattttaagttcagtcgctcaaacccagcgtgtcagcccaatctataaaaccttcatgcttttcagcccacacattctagttgtctaacattacacatccccaagaagaaacatgaattacgactagctntcatatcatatcaa

SEQ ID NO: 8635 - DNA, 464 bp, Glycine max
  unsure at all n locations
agcttcaagccaaggccagactctcgtgcatgcataggcttctcaagaaaaaaaatgcctaactcacccaaaaaatctgatttcaagcttaaattggtgggttggtctgtgttcgtgcgcttagcgcaaatcataatcgcttagtgtgcataagtggattttggcttagtgcacttctgtcgcttagtggatgagttgaagtggtgcgcttgatgacctggagcgatgcactcaacgaacctgataactcatcttcttctggattcttcttcgggcttaaccactgagtgtcgcgcttagcgaatgctcactaagccagaagattggcttagcgagaaggtgaaaacaacacatttgccaatttgcctaattaacctgaaattgagagaaattgattattaaacacacaaaacaaaagtataaattatctattacctatatttaacananagtacttataatat

SEQ ID NO: 8636 - DNA, 361 bp, Glycine max
  unsure at all n locations
cattggtgtatattgatctcctcttggcgctctaaattgtgggaatgtgctcaaatatgtggggcaattctggatagttttcttgcttgattaagttgaattgcgggtttgtatgagatggccctaggcctataatgcattttgaagtaatggggcatgccacattgtccccgttctcttgctattgatgcctaaacgcgcgcccaccaagtgttcggtgaaatgcctcaacggcattagcgcgtgactgttgtanggaaacaacccatggtgcaatgtggtttgacatatttttggacatgcattattttcaaagactagagtatagcccccatatgcctacgctacaactatatttatg

SEQ ID NO: 8637 - DNA, 383 bp, Glycine max
  unsure at all n locations
agctnggctgtcttcctattcatccatcaacatgtagaatgcttattctttccatattgatgatatgtcttgatccagctttaactcttgcttgtgcattcgagtttaatgatccatttgtgcatcccattttacctgatgaaaagaagagagcttcagctgctagatctgagcttggttctttgtatgggggttgtggtgaccagtttgctatagtagcagcatttgaatgctggcataattcanaggaaatgggtctagaatcacggttttgttctcagtactttgtttctcaaagcattatgaacaagttatctggaatgcgtaagaatttagcagcagaactatatcagaatgggcttattcatgggcagtttacaagc

SEQ ID NO: 8638 - DNA, 496 bp, Glycine max
  unsure at all n locations
ggaaccttgatngaatttccatccaatgttggagaaaggttcttgtgtaaagtatagatgtcaaagagggttaaagaaatgttaatcttataaaatatgatcttgtaaacaataaaagattattacttactttttgctaacattttcggtagtagttatcgctatgttcaaagtaagcattgtttttttatattgattactagtgagagtttccatgattntcttattattgttggaagtaatcattgataanaatgtttaagaaggaaaaaaattatataaaaagtatgcaaaatactagaaaggaataatttcatgtgaaaaagtgattttgatatttataatggttttgaagtaattaactaacaaaaatagacactccagtaataataacataacgttcatgtatctttntctctagctaacttaatttggatataacataacgttctttaataacannatatngacatcattgactttgagaaaaaacaca

SEQ ID NO: 8639 - DNA, 370 bp, Glycine max
  unsure at all n locations
agcttcatgatgaatcaagattgattcatagaatttttgattataacaaaggtgatgacaaaaagctcacaggtcaagaacacttcatgataacaaagatgatgatctcaagaatcaaagaatgagttcaatatggttcaagtggaaattagatttcaagaatcaagattcaaggttcaagcttccaagaatcaagatcaagattcatgactccagattcaagaatcaagagaagacttaatcaagataagtatgaaaaagttttttcaaaanatgagtagcacatagatttttctgaaaacctttttaccaaagagttgttactctctggtaatcgattaccagattattgtaatcgattaccagtagc

SEQ ID NO: 8640 - DNA, 254 bp, Glycine max
ttggacaactgctgtttaagcttcttctggcaagttgtctgtggtggacaagcttttgatcttgcaagccaaattagacctgtcaagtggatgaagtccttatatatgatgattcaacccttttctgatcattggaggatgcattgaagacaaatgtttcgttttgtcttttgctacacgcgagagcaacacacacgtattactcttgcatatgtatcactcatggagggggtgtgtactgaagatgcaataca

SEQ ID NO: 8641 - DNA, 409 bp, Glycine max
tcgattactagaagtttttacgtttttaacaacctttagaaatttgaatttaaattttaaagcctgtaattgattacaacttgtgtgtaattgattaccaacatgagaattcaaatttcaagtctgaagagtcacaactcttcagaaattaactgtgtaatccattacaacagttatgtaatcgattaccaataaggaattttcgaaaataactcccaagagtcacaactgttcaaattttttttgaatggtcatcaatggcctataaatcaattaccagacatgaaaattcaaatttcaagtctgaagagtcacaactctttagaaactaattgtgtaatcgattacaacaattatgtaatcgattaccagtaaggaattttcgaaaataactcccaagagtcacaac

SEQ ID NO: 8642 - DNA, 498 bp, Glycine max
  unsure at all n locations
tgaggaagtgtggaagggtgagacttcctacttttattcattgaccacagagtggtacctggagatatgtcgcggnggtcaggagaccttgnggacgtcaggtggggtgctattgcccaaaaccaagcttgaccaatcccgacccaacccgggcgtagtcagtcagtgagaacctgtgatgtacctaaacaggcaagctcctggcagtcaaccgataaaagaacaaagaccacaaagcaaggaggcttgtgtggtggctggccagctgtgaatcttgagtgatatataggatatggcctctggtaatcgattaccaagggtgggtaatcgattacaaggcttaaaaacgagatcaggaagctaagagggcttctggtaaacgattacaaaggggcgtaatcaattaccaggcttagaaatgggactgtgaatgtgaaggggcctctggtaatcgattacacagaggaacaggccatttggtatcaattaccagttata

SEQ ID NO: 8643 - DNA, 436 bp, Glycine max
  unsure at all n locations
agcttcggttntaaatttcgagcgtctcgatattttactggactcaatcggacttccgagtgaaatgttattgtcgttagaattagctacgagcttcggttttaaatttcgagcgtctcgatatatttcgggactcaatcggacttccgagagaaaagttattgtcgttagaattagctgcgagcttgggttttaaattttgagcgtctcgatatattacgggactcaatcagacttcctagtgaaaagttattgttgatcgaatttgctacgagcttcgatttggaatttcgagcgtctcgatatattacgggactcaataggacttccgagtgaaatgttattgtcgttcgaatttgctacgagcttcgggtttaaaatttgagcgtcaccatatattacgggactcaatcggacttccgagtgaaatgttatt

SEQ ID NO: 8644 - DNA, 403 bp, Glycine max
  unsure at all n locations
tgtagcagantagaactacaataactnttcactcggaagtccgattgagtcccgtaatatatcgagacgctcgaaatttaaaaccgaagccagtagcaaattcgaacgacaataacaattcactcggaagtccgattgagtcccgtaatatatcgagacgctcgaaatttaaaaccgaagctcgtagcaaattcgaacgacaataacaattcactcggaagtccgattgagtcccgtaatatattgagacgctcgaaattttaaagcgaagctcgtagcaaattcgaacgacaataacatttcactcggaagtgcgaatgagtcccgtaatatatcgagacgctcgaaatttataaccgaagcctctagcaaattcgaacgacaataacatttcactcggaag

SEQ ID NO: 8645 - DNA, 441 bp, Glycine max
  unsure at all n locations
agctaggttgcatctaacctcaataatggaagatttagttatccattttcatgggtagcctcaaaatacatggaaggtggaagaagatgaagaatggaggcaaagggaagctttctccctcgcggagattgtagagacgtgccaaatgaaggaccccctcttctaaatgatagtcaaatcctatttatacaagagccaaaaattctattttaagtgacttttagctgagttcaaaattttagcttcagctaaagtgcaaaacaacttaagggcgaaagagaatctagctccaacttccaaatttagctcacgcttccagatgtgtttttgcttgctgtcagaatttagctccatcttcattccttagctcaactaaattgaagtccccctcctcaaaatagctctagagattntctactatccactccatttctacaaaaa

SEQ ID NO: 8646 - DNA, 336 bp, Glycine max
aaatcatccctcgcaattattgtaccgcgtggttggtacctgtgatgatcacgaatctttgttcgtgggagcagaatgacagcagtagagtacgagaagtgagattcttttgtggagccgtcgagctgactcgatgacgttgagattatattgggagagtcgagtgttgttaatcaactccttcatagttggttccataactcttgttgttgaattgaggatgtgcatcacaaatgtaattatatgtatgaacaaatttactttttattatgcgaatgatatgtgctgagttactatatatatgtgtgcgtgcgtgagtgtatgagagtattcact

SEQ ID NO: 8647 - DNA, 444 bp, Glycine max
  unsure at all n locations
agcttgacagtattacaaatctcaatatacgtcttcaagtgtgagtatggatcttcatttggtaaaccatgaaacaaattgctctgtattagctgtatcaatgaaggtgggtaagataagttttgtgcttgaacctctggccgcacaacacttgagaaatattgcggcaccaaagtacttgagtaatcttccaaggtcactcatcgtggttgctcttcaaccatgactttggcttcaaattctgttgtttgagattccttggattntggtgaattagaagatgatgactcagaaaagtgagccctttcaaggattgatgctactgttctatcatggaaaagctttctttttctctcagagttctttcttctaaagggtgcttcaatttctaaatccaatggaaccaattcacctgcagaagatctacacatccaaacacttaca

SEQ ID NO: 8648 - DNA, 388 bp, Glycine max
  unsure at all n locations
ntataagtgcgggtttaagacacgaaggccaagtcgccgcgatatgcgaggatgactccccgacgagatcgganttggtacgaccatgtcctcctggtttctgactaggaaattggcgagtggaggagtgcccagacgtttacgcgacaagcataatgtaaccctatgtagctctaaaactctacggttgggcttaggctatagagtttccttttgttaaggcattatgtcttttgctcttgaatgtataatataaagagctttcttcatttgttcctgcgcctctacccattctcattcattntcatgtctacttctttacgctcaagacgctagatccaacgacgagtccctcgaaagactaatacccgagactcggccgtcaatt

SEQ ID NO: 8649 - DNA, 445 bp, Glycine max
agcttgagaggattgatggtgacccggtgttgttagaaacgaggatatgggctacgtgggagtacatgagctcagttggaggtgggcaacaggggatggtgggtttatgcgcgcattgtggatgtggaaaacttgttgtgcaccatcgcccgaccgccacctagtaccacatgtgatgggtaccccataatcctacaagcttgagatgaggaagtgttgaagggtgaaacttcctgcttttattgttgaccacagagtggtacctggagatatgtcgcgggggtcaggagaccttggggacgtcaggtggggtgctattgcccaaaaccaagcttgaccaatcccgacccaacccgggcatagtcggtcagtgagaacctgtgatgtacctaagcaggcgagctcctggcagtcaacagataaaaggaaaacaagaccacaaagc

SEQ ID NO: 8650 - DNA, 473 bp, Glycine max
  unsure at all n locations
acaatggttttaaaatgtggctcataaacttggaatccctatccgacacaatgctcctaggaaatccatgaagagtcactacctctttgaataaaagatacaccacatgacaagaatcatccnctttgtgacatggaatgaagtgtgccatcctagaaaacctatcaacaaccacaaaaatcgaatctttctcctcttggaccttggaagaccaagtacaaaatccatggaaatgtcggtccaaggggaggtaggaattggaaatagagtatacaaaccatgatgcatgactntagactttgcgttatgaacaaaanttgataatatcatgtttcattntaggccaaaagaaatgttcatgcaaaatgttcaaagtcttttaaactccanaatgtcctggttaaccccctttatgagcttcacanatcatgagttcatganaggaactttgaggcaacacaatcttttatttt

SEQ ID NO: 8651 - DNA, 444 bp, Glycine max
  unsure at all n locations
agctntgcatgtctagtgattctagagagagaaaggtccgagttcaagagagttttgagatattttgttgtgtgacgatctacagagactagagcttgaagaggaagctgttctgagagcttgagatgagtttgtgagtggttgtgagatcctagaggtgaaggagacatcctcaccactttgtattttgcaatctttcatttttttcttctctttggtgaaaggaggcttcctcgttatggaaagccaaaatcctccgttggatcttccctgttggtacttgatgtaaatatctttttatctatttaatgatgttttgtgtgttctctatgctatcagtttttcattctactatgcctttaccatgatcacgtagatgcatgctttgttagggtcattcaacagtggaaactagtctaattctgatgaccttgataggacaag

SEQ ID NO: 8652 - DNA, 535 bp, Glycine max
  unsure at all n locations
ctaagcttctnactnttnttttggctgagtgagtgaggagagagagaacgcggctttgtgttntaagaaaagggctttctctntnttttttaaaagatgtgccacatgtcttcttttgagtggagcaaaaagggcccattntttctcttgatgtgactcacactcagccacaagaagagaaaaatctgaccttttgaaatgctaaaatcctgcctcagtttgcgtgtcgtttctctggttccagtccctcgcgtttctctgcacccgtcggggccagttnttgaaagtaagcaatatatatatatcaaaacgcttagaatgaaaccccgagcgtggttcagaggttggttntgttaaaatttaagttgcacgcaaagacaataattttagactaattaattgagaattaacctataactatccagttatggatntctcttccgtaattagcctaacccgcgtatctttccnccaatatacctacttctaccaggagtatatatatatatatatatatatatacactgaataatac

SEQ ID NO: 8653 - DNA, 399 bp, Glycine max
  unsure at all n locations
agcnttatgagagagtcaaagatcaaatggagaggaaaaattataactatgctaaacaagccaacaaagggagaaagaaggttgtcttcgaacccggagattgggtttgggtgcacatgagaaaagaaaggtttccggaacaaaggaaatcaaagcttcaaccaaggggagatggaccatttcaagtgcttgaaagaatcaatgacaatgcttacaaagttgagctgcccggtgagtataatgttagttccaccttcaatgtctctgatttacctctttttgatgcagatggagaattcgatttgaggacaaatccttctcatgagggagagaatgatgaggacatgaccaagagcaagggcaaggatccacttgaaggacttggaggacctattgaca

SEQ ID NO: 8654 - DNA, 444 bp, Glycine max
  unsure at all n locations
acattgagatgctataaattgagatatggaagttcttgagagattcaattggtcataacttttcactcggatgtcagattcaagagcaaaatatacagagacgctcgaaattgaacaacggatgctctctagaaatntaaatggtaaaattttttcacatggatgttatattcagacacataatatatcgagacgttcgaaattcaagaattcaaaaattaaagttctcaagaaatatagagatgaaaaattatgaccatgggtgtacgattgagacccatgatatatcgatatgctcaaaattcaaaaattggtccaattcanaaattcaaagagccctaactntngacatgggtgtacgatngaggcccatgaaatatcgagaacgctcgtaatgaaaaattgaagttcttgagaaattcanatagtcataacatttaactt

SEQ ID NO: 8655 - DNA, 424 bp, Glycine max
  unsure at all n locations
gctttacagcagattntattaatgacccactattctattatttaataacttaatgccattaacctacggaattaaaacaaactaaatggctgagtgtaactgaaattgttggcaaccaaaagttacccccaacagccaacaagtcagccaccatttggtctcccaaaaggctgatgcctaggttgccaattgggcccttattacaacttgaactaaagcccttttagttgattaacccaaaacatatttttggtcagccaactttacaaggattgtgccattatttagacaaactaaacactctaaaattgaaataaagtggtgtcatttagtcctccatttgggccatgatacaactcacaaccttggacttttctccttgaaacttgggcttgtattcaaatagtatggacagcacttgttg

SEQ ID NO: 8656 - DNA, 503 bp, Glycine max
  unsure at all n locations
ggtagtattatggggtacccatcacatgagggactaggtggtgtgtcgggcgatggtgcaaaacgattctccacatccacaaatgacgtataacccaccatcccctgttgcccacctccaactgagctcacgtactcccacgtagcccttatcctcgttcctctcaacgccgggtccccatcaatcctcccaagcttccacaacatccaggtaattccacatccaatcatcatggactcacaaaaccaagcaaaacagggcaaaggcagaaaactctgcccaaaacacaaaccaatatcacagcttttcacatacaaataccccagtaacattttcttcgttccaattcgttaaccgttggatcgactcgaanatattactggaagtctctagtacataagtctacattgttaccgctgggatctgctagcaaatgttcataaccccatatgtactacccttgtcacaaccagccatacactagcgattttctgcacttatac

SEQ ID NO: 8657 - DNA, 350 bp, Glycine max
  unsure at all n locations
agctngcctcanagaggtccaggaaggacaaggtggccgaattaactagttccgctcctgagtatgacaatcaccgctttaggagcgttgtacaacagcaatgcttcgaggccatcaagggatggtcgtttctccgggagcgacgcgtccagctcagggacgacgagtatactgatttccaggaggaaataaggcgccggcggtggacatcactgtgtactcccatggccaagttcgatccagaaatagtccttgagttttatgccaatgcctggccaacagaggagggtgtgcgtgacatgagatcctgtgtaaggggtcagtggatcccgtttgatgccgacgctatc

SEQ ID NO: 8658 - DNA, 503 bp, Glycine max
  unsure at all n locations
acatctcccctntctcaagcaaattcttcttgatatcatcaaaatcttcatgatttacattctccccccttttgatgatgacaaccacctgcaggtgaggagcaacaacaaagaaaatatctatttgcatatagtttactcccccttggttttgcaatgattgcttatatgagacagttgaagatttcatatttttcatatgtaaacaaattgtctcataaacaatagataattnttcttactattttatcttttatctttctctccccctttgtcaacatcaaaaacaaatcatgaatagagaggagaaagatgttaccacttgttgcaatgtatgataatcaagtgataccaaaaggcattaaaataatcattcaatattaatcaagcaaaaacaagtacaacgacacatcaatcaaacacaatcaaatacaatcaatcatcaaatatttcanatcanattaattaaattaacaatcaactaactatacacaataatttct

SEQ ID NO: 8659 - DNA, 511 bp, Glycine max
  unsure at all n locations
ngatgaacctgatgcntcgagatccgtagagtcacctgcggcatgcaagcttgcggaagctcttacaagctggcctgcaatctgtcattatatgctaggctgcagccatcatcatgaactatgatgtgcactatctgcccatgctcatatatatagatatatatatatatagatatatatatatatatatatatatatatatatatatatatcagcaaactaaggctgaggatcctttgtgtgagcatagttacatactcacacatttcaagtggacagacagcgtaataagttntacacactcactaaaacaccacacaccatgtgtgatacgtctattgactcttaaaataattatcttagagtaaatcaaacggtgatttatgagcggatgacagtataaaactgttntacattatcaacgcacaggcattattttgcagtcatatggcatattattaagaagctcaccattgaaaaccataagttccttgcgctcaaagacacgaan

SEQ ID NO: 8660 - DNA, 349 bp, Glycine max
  unsure at all n locations
atgcctacaaatgaggaaatccatcanactatcaagtttatggtgagtctcacagcaccaacactggatgggtttcatgtnttgttcttcgaacatcattggagtgtaatggggagagatgtctacaatttcactagagctttcttttaggatccaacaaaaattgctgaagtgaaccaaacttttttaactctgattctgaagaaatgtgaggtcaattctattaaagatatcagacctcttagactttgtaatgtgatttatgaagctatgactcgtcttatctctcaacgcttgagaccaatgatggtgaaattagtgggtcatttccaatctagccttaccccaa

SEQ ID NO: 8661 - DNA, 434 bp, Glycine max
  unsure at all n locations
agctngaagaggatgctttaatggaggaaaagatttagagaaggagggatcacgaaattgaatgaataanagagggagagaagtggaactttgaagtgtgtctcataagactttcattcatcaaagttacaacaagtgttacacatgcttctatttatagactaggtagcttccttgagaagctgtcttgagaaaacttccttgaaaagcttctttgagaaaacttccttgagaagctagagcttagctacacacacccctctaataactaagctcacctncttgaaaagcttccttaagaagattctaaagatgctagagcttagctacacaaacctctctaatagctaaggtcacctccttgagatgagaagctagagcttagctacacaccccctataatagctaagctcacccccatgacaaaatacatg

SEQ ID NO: 8662 - DNA, 442 bp, Glycine max
  unsure at all n locations
ggtagaatggctagacatgatacatgtcagggtttggttnggttcaaggataaaagggatgccccacattatttccatgacacaaatgcaaaaatgatgatttggaaattttatgcaaaactggtcatgcatgcacctatgtggacgctcaagtgtcaaatttttatggtcatctgatgctagggctcaagattcatttcctctattttaaatcaacccaatgtttccaaaatatgttcttttatcanattgtgcattcatccgagtccatttcgggcgtccgggaaaatattcacagcattcacccttcaggtgtacacacacattntccaaaaattagtgaattntttcaaagaaaagttggaaatcatctcttttcanaagcgtgttggttnttcagctagaaaacttaattttcttcttttttttctttnttttatca

SEQ ID NO: 8663 - DNA, 424 bp, Glycine max
  unsure at all n locations
agcttccatgggattcatgtcttttattattttattgcctacttgaaattgaacaaatctgtttaaacgtaacatgaattcattattagcccctcgcttaacatttctagttaataacatcctgcatatctttaacatcctacattagatatgggacaaaatatatttgccctcatgaatatattttatgtttgctctttgataattattttctttaaattcctcataaaatataattttatttgtaattcttataaatcagtagtgaattttgggtttatttcttgatattttttatatttattattaattttttttcaaaggaactaataacaaatgaattttttatcagagtaaataaatttttttctaattaataggaattaaaaaaaggttntaagaataaaaaattgttatttttatc

SEQ ID NO: 8664 - DNA, 408 bp, Glycine max
tctgtccctgagaaactggttcccagaagacaacatggagtgtagattgctgtaaaccctagccttgcaacaagttctagggaagtagacacggagatggacaagaaaatccgcagtatggtgagtagcattttgaaagaagcctctgtgcctgaagctgatgaagatgttccaacatcttccaccccgaatgtttctatgcctgatgttgagaaagatgttccaacatcttccggcccaaatgatgaagtactctcttcctccagcaaagagagatcaacagaggaagatgatcaagccgcagaggagacccctgcaccaagggcaccagaacctgctccaggtgacctcattgacttagaagaagtcgaatctgatgaagaacccattgccaacaggttggcacct

SEQ ID NO: 8665 - DNA, 433 bp, Glycine max
  unsure at all n locations
agctattnccatgggtcgagcggtcttataatatattatggaatgcaggcacaggcaccactccatttgagataaccttcgggcggaagtcctttaattttccagaatacattgcggggattgcaaaggtggaagctatggaagatattctatcagaaagggaggccaccttctaggcaattcgaaagaagctcttgaaagctcaagaacgcatgaagacatatactgatatgaagcgccgggaggtcaattatggctccgatgactgggtcttggtcaagctccgaccatatcaataaacatctgctaaaggaacacaggccattacaggcaaattggtgaagaggtattactggccattccaaattaaagagaggataagcccagtggcataccgcctacaattgccgaacggagcgcgaaatcaccctgt

SEQ ID NO: 8666 - DNA, 409 bp, Glycine max
  unsure at all n locations
atgttctgttatcaccgtaacattaaattcaatgttaattataaccctatcaaccatttaaagctagtatatctcatcatcaggaatatctggngttaggaatttcctgggatctttacttatttcttcatagtttagggttgatttcaccctttctggcactggcatgagaggaataatgctatctctatcgattacaccatcaataattccgtattccactgcttcaattggagacatatatttatccctatcaatatctctttgcacttgttcaaatgagcgtccagtgaaacttgatataattcttgtgatattattcttgttgtgcataacttctttagcctgaatttctacatctatagcttgtccactagcacctcctagagggtgatgaatcataattcgt

SEQ ID NO: 8667 - DNA, 433 bp, Glycine max
  unsure at all n locations
agcttgtctcagcgtttatgcgagacagagacttacatgttagctatcatcgccaagtacgaagaagagttaggtctagccacggcccacgagcatagaatcgcggatgagtatgctcaagtatatgcggaaaaagaggctagaggaagggtgatcgactctttacaccaagaggcaaccatgtggatggatcggtttgctcttaccttgaacgggagtcaagaacttccccgattgttagccaaggccaaggcgatggcagacacctactccacccccgaagagattcatgggcttctcggctattgtcagcatatgatagacttaatggcccacataattagaaatcgttaggaaacttgtatggtctcttagaccttgactagatatgacttcctttttgaaatanaatgagttggtcccatgttcctac

SEQ ID NO: 8668 - DNA, 500 bp, Glycine max
  unsure at all n locations
tacctcgacaccaacagtgacaatggcagcgagagtggcagtgagaaagaagagtcgcanaaggaaccaataatattaaggtgtggaattgcgagactggcagtgacaatggcagcgagatgcggaggcacggagttgcgatgaagacgatgacgcgggcgacactagagttgcggcagagacttgaatgaattagggcgtggagccaataatatttttaaaaattgagtcgttaacatcggtttttccatcaaaaccgatgttaacaaagtgatgtttacgttaacatcggttntttttataaaaaaaaaattgatgttaacttataatttaccaacatcggttntttcaaaataccgatgttaaggaagtgatgttaaccttaacatcgattntntaagaaaatcgatgttaacttatcattntccaacatcgganttttgaaaacggacgttgcgtntcatgtaacatcggttctcaaaaccgatgtaacctactat

SEQ ID NO: 8669 - DNA, 446 bp, Glycine max
  unsure at all n locations
agctctcaccccataattcccccatatttgggcttatntgctttgaaccaaaatttccttttatgaatgatgctctcctacaacctaagataaggtagaaggagataaactatacaggctcaaggttcaatcaaacaattatactttcagctcaaaatggtgcaagggataaatcaatcatgcacgaggtaagctttttagctaagtggctatcttcaatccaaacatggccttcatcatctttaatttcacgcattcattccatactcaaagattcatgcaaaaatcattactcaatgttagtcgttctctcacaattaaagatcacactctcaccgggttacggctaatgcgttccttcacaatcaacctgacaaaccaactaacattttcattcatgatcctcattccatgttctttctcttctaatgattgcatgctcattc

SEQ ID NO: 8670 - DNA, 343 bp, Glycine max
  unsure at all n locations
ttacatgcccaactcctttgagtgacattgtattggttgttaacttgactgttgcattntattacatttgatatctgttctgcattgtgcatcatcatagtgcgagtaaagaaaattttttaagttagaaaaatttcttcagatgcaaaaactctcagttttaatctattatagagttcgtcgaatcgattacaagctgtctgaagcttanaaagttaagtctcatatcggtttaatcaattacaatagtattttaatcgattacactgctgtttgagacaatgactgattnttcaagagtctctgctgtaatcgattaccaggtggattaactcgatacttc

SEQ ID NO: 8671 - DNA, 170 bp, Glycine max
  unsure at all n locations
atggaatacttactcgttggtgatgatcanaagcgcttaacggaatcataaaatgcgagaaaggatgaccctatggctgccaatttgtcaatcccgtgggtatggctgttgaaaggtggggaaaagaagtatctgaatgtataaacgcccaccctttcgtcattattata

SEQ ID NO: 8672 - DNA, 445 bp, Glycine max
  unsure at all n locations
agcttaaccttgaactactatgttgcttaacattgttagagataggggaagcaacatgatcaacatggtgaacaacctanaggctatagcttgaagctcaaggaaaagcttgaagaatttttggcttttacatgcccgactcccttgagtgacatttgtattggttgttatcttggttgttgcatattantacatttgatatctatattgcatcatgcatcatcatggttagtgagaagaaaagtttctaagttagaaaagttacttcaaaggaaaaaattatttgttttaatcaattacagagttgtcgtaatcgaatacaagaagctatctaaagcttaaagagttgagtctcgtatcgatttaatcgattacagtagtctcataatcgattacactattgtttgagtcaatgactgatttattcaagagtctttggtttaat

SEQ ID NO: 8673 - DNA, 413 bp, Glycine max
  unsure at all n locations
tgagatgaggaagtgtagaagggtgagactctctgctcttattcgttgaccacagagtggtacctggagatatgtcgcggnggtcaggagaccttgaggacgtcaggtggggtgctattgcccacaaccaagcttgaccaattccgacccaacccgggcataatcagtcagtgagaacctgtgatgtacctaagcaggtgagctcctggcagtcaacagataaaaggaacatagaccacaaaacaaggaggctcgtgtggtggctggccatctgtgaattttgattgatatatgggatatggcctctggtgatcgattaccaagggtgggtaatcgagtacaaggcttaagaatgaagacaggaagctaagatggtctctggtaatcgattaccaaggggtgaatcgattacc

SEQ ID NO: 8674 - DNA, 459 bp, Glycine max
  unsure at all n locations
agctntacactntntcctctntagggnngatcattatcttattcatattatcgnattatcactattggttntgtacattcaattcttttactatgggtattcgctttttaatatgtggttgaataactttatttttttcctctaataggtttatttaaaggatgatgctccactacctcttgttgcactgcaatgacattgctcattcatgagatattccatacttatattgaatacaatgtttcaactctttatttctaactaaagaacatgaatattcagtaaagtggaaatatgtattttcattgtgtattgtgaaggcataaccctacaacaaaatggaaatacatttctacttgtattctgaagaatgaaaatgtatttctgtcaaagataattttgtaaaacaatccataaaaagcatgagtgtgaacttagaanaaaatgggatggaaataa

SEQ ID NO: 8675 - DNA, 450 bp, Glycine max
  unsure at all n locations
agctgctatggaggctggatcttngagcttcaatgaggtccttcaatggtgattntccaccatatagatgcagcanaacgcaaacgagaagaggataatggaggcaccatccactacggaataagccatggaagaaggagcttcaccactgagaatgtgccttggataagaagctcgaagaggatactctaataggggaaaagatagagagaaggtgggagcacgactctgaaggaatactagagggagagaagtggaactttgaagtgtgtctcataagactttcattcatcatagttacaacaagtgttacacatgcttctatntatagactaggtagcttccttgagaagctctcttgagacaacttgcttgagaagcttctatgagagaacttccttgagaagctagagctgagctacacacacncntctaataactaagctcaca

SEQ ID NO: 8676 - DNA, 310 bp, Glycine max
  unsure at all n locations
tttaaatttatgatttaattnnttttgaggtggagttgatattgagaaggaggaantaanagatttgagggtaaatnntttttaaggggaagaaaatgatgnaatnttttntaggaagggannagtnattagaagtatgagnaagagggtttaagagaattgggttagagntgntgaaaaagggggtagggtttttatgaanntnaagatagatttttgagnnnatggannaatgttgggttnaattatttttgtanatattaaantaggatggtattatatttggtnnttgtatttagggttnnataat

SEQ ID NO: 8677 - DNA, 421 bp, Glycine max
  unsure at all n locations
gacactatgaaactaagcctatctagttataatggattcactggaggaatagtggacactacactattcanaaagggctagaaaggaaanttgttgattgttcaaatctatgtagatgacataatctttggtgcaaccttagaaaagatgtgcaaagagttttctgggctaatgaaaggtgaatttgaaatgagtatgatgggtgagttaaagttcttgctagggcttgaaatcattcagaaagatatgatggatatttatccttcaagaaaaatacacaaaggacatacttaagatgttcaaaagggatgaagccaaacctatggctattcctatgtatccttctctagtcattgataaggatgaaagaggtaatgatactcgtaaaaagataactgctagtagaccagatattgtattt

SEQ ID NO: 8678 - DNA, 446 bp, Glycine max
  unsure at all n locations
agcttcttccttagccattgtagtttactatggtttgtctcattctacacctattggattttggattatggtgtttgtaatcatttaactagtaatccttccttttctcaaaattattattccccaaaacactagatcataccattctcgctaacaaccaatggctntaaggtattatcttgttgagaaatctgaggggataaacaccgaggatatttacaccaaagggttactaatataagtgagtctaacatcacaccttaatccaaaatcttaaggataaagtttatgggtcctatccttacttttcaaccttcctattcctacccgatgtgggacctcattttacacttatacttcaacaatctccccctcaaatgtaagtctcttccacatggtagcttccccctcgagtggaagtcattntcaatccatgagtacctagt

SEQ ID NO: 8679 - DNA, 340 bp, Glycine max
  unsure at all n locations
acactccagctcttataagacacccctaccttgcaagtattntgttcaataatgtgattgaagcaaattttttattagatctaattaaataaatgtttagtattntgttctttcctattagtctgttgatagctaactggaataaaagaaaagctaaggtcggaccagttgatagctaattggaataaaagaaaagctaaattgcagggaataactatgatatctttgtatttcatcattacccccttttatagccatctcatacaagatattntgctaagtngttataacagaattatgaaattgcataaccacacaggtatcaagtaaaacgtggaaa

SEQ ID NO: 8680 - DNA, 358 bp, Glycine max
  unsure at all n locations
ccgagactcgcgctccctgttaatgtttcggtagtttccttttatcagnttctgggccacccccctgatattggaagagggccaactgtgcgagcacgacagagagggaggctgtcagatggctattatgcataccggggcaagatttcacccgtaccgctgcaaagagacaagtgcggaccatgcgcaccaacatgaccactcttacacagatatagatgacattgctacttagcaacattcttgccagcgaccgcaatgccaatctccccctacaaaagtatcagttggtctgtgtcgtcccgacatgggtaagtatgcatatggttcaactgatttctgataccatctattggtt

SEQ ID NO: 8681 - DNA, 441 bp, Glycine max
  unsure at all n locations
gggagaggatgcttcaatggagganaagaaagagggagagaattagagaggggggagcacgacattgaaggaagaaaaagggagagaagttgaactttgagttgtgtctcacaagactctcattcatcaaagttacaacaagtgttacacatgcttctatttatagactaggtagcttccttgagaagctttcttaagaaaacatccttgagaagcttctttgagaaaacttccttgagaagctagagcttagctacacacacccatctaaaaactaagctcaccttcttgagaagctggagcttagctacacacacccatctaaaaattaagctcacctccttgacaaaatacatganaatacaaaaaaaagaagtccctactacaaagactactcanaatgccctgaaatacaaggctaaaaccctatactaatagaat

SEQ ID NO: 8682 - DNA, 294 bp, Glycine max
  unsure at all n locations
agctngagatgaggaagtgttgaagggtgaaactttctgctttntattgtgaccacagagtggtgcctggagatatgtcgcggcggtcaagagaccttggggacgtcaggtggggtgctatttgccaaaaccaagcttgaccaatcccgacccaacccgggcataatcggtcagtgagaacctgtgatgtacctaagcaggcgagctcctggcagtccacagataaaaggaacaaagaccacaaagcatggaggcttgtggtggctggccagctgtgaactctgaatgatatgt

SEQ ID NO: 8683 - DNA, 377 bp, Glycine max
tgtcacatcagataatgtcaaaaatcgtatcattttattgagaatcgggcatggtattgtaagtgacatccttggccagagtggatttgattgggatggcactaagcacatgatcacagttgagaatgaaaatgcttggaatgaatattgcactgtaagtattctttctttaatatgttgctattcgctattcaaagtagattggatttgactttttctttgtttccaatcgcataaatcggctaaactgtttcgattcaggtgcttcacaattgggatgatataagggatttgtgtgctaaagatagagccaccggtcatggagctgaaactgctatggatgctgatgaagcgatgagtatagaaacaaatgaagt

SEQ ID NO: 8684 - DNA, 317 bp, Glycine max
gcttttgtttacaaagaatttttattctgtaccctcgggttttgcgccgcagcgtgactcaaaagtagtatgacagatttgtgagcacggaaagacgtaataccggtgtaacgggcatgtcggcgcattgacaatgggcacaaacgacgtagtctctacgtgctataggcttttcgtttacgacagaaaaagttatcggattgtagtgcttactctactgaggttaaaggtggctagattttgtaaacatagccttaacatgaagaactggagttgtgacatgatgtcacgtatgtaagaataaacggccgacatgc

SEQ ID NO: 8685 - DNA, 470 bp, Glycine max
  unsure at all n locations
gcttgtgacacgtggagattaggttatcttccacgctcacaagatctgtcatactgactcttgcttcacgctgacggccggaaatacccgagtggttatccgtataaacttcttgcattctgtaagacgaaaagcctgataacacgcagagactaacatcgtcttctgcgaccttcgtcaatcgcggccgacaagcccgttgacacgtggagatttacgtcatcttccgcgctcacaagatctgtcatactgactttcgagtcacgctgacgggcggaaatacccgagtggttatccgtataaactgtttgctgtctgtaagacgaanagcctgatagcacgcagagactaacgtcgtcttctgcgcccttcgtcaatcgcggacgacatgcccgttgacacatggagatttacgttatcttccgcgctcacaagatctgtcatactgactnttgagtcacgctgacggg

SEQ ID NO: 8686 - DNA, 432 bp, Glycine max
agcttgttgaaattgccatgtttggatgagttattcatacccattctgttttacggtttatgtgatgatgtttgtgatgtttatatactgaaattgctgatggaaaactgttagagatgaagggtagaactaacctatggttagaaagtgggaatgtgatgttatgagtggaaaaagagtgaggctttgagagttggaaggttaagtatgaattctgtgataaatggaggataaagtgagttaatactagcttgaaatgtcatttatgacttgggagaaagcttggactgtgctagagagaaaaacaaatgatcaaagtgaacaaagagccatttctagggcaaaattaggtgttgaagactcaaattttgagttggtggaattttgggtgtaaatccagtttgaacaagtctaaattgatggtatagactt

SEQ ID NO: 8687 - DNA, 420 bp, Glycine max
  unsure at all n locations
ttatgatgatgcttgtgaggtttgtgtgctgaagttgcttatggaaaactgttagagatgaagggtagagttaacctacggttagaaagtgagaatgtagtgctatgagtggaaaagagtgatgctttgagagtttgaaaggttaaatctggatttggtggtaattggaggttaaagggagttaatcctagtttgaaatttcatttacgactgtgggaaagcttgggctgtgcaaaggagaaaaatgaatgaccaaagtgaaggccagagccatttctagggtaaattgtgtgttgaggagtcaaatattgatccggtggaattttatgcgtagaaccagtttgagcaagtttagattaaggttatagacttgtgtgaggtgagaagttgctccatatntaccccattctcattttcact

SEQ ID NO: 8688 - DNA, 419 bp, Glycine max
agcttaggaacccaaacttgtagcttcaatgctttgaaacatgcttatggctaggaatccaaaatttggttttagaattagaaaaacatgaaaattaggacttgcttgtgagaatttttgctcaagtttgggctgccccatgtttgatactttacatagaggtagcgtggaaaaagccttgcaatagtatgtatacataggtaaatataaggagcatgaaattcctagcaaagtgtgaatgattgtcttcctaaatgaatgtatgatagcacggaattcccttttgaatgcaagtgtgtgcataatgtaaatagcttgtcaatatggataaatgtgaatgaaacaataaaaaaatttgtatgatatatatttcaaacactatgtaggtagttgtaaatagaaaatgttcacgatataaa

SEQ ID NO: 8689 - DNA, 385 bp, Glycine max
  unsure at all n locations
nttccanagtggtcttcggcattacatttaagctcgatccattgtcgataagtacctttgcgacaacgtggtccatacatctcactgacacatgtagagccttgttgtgtcctctcccctcaacgggaatctcttcttccgcaaacgcgatataattgttggtggttatatgattaacgataccttcaaaaccctccactgagatatcatgtgctacatgggcatcgttaaggaccttcatcaacagcgcacgatgaggctnggagtttatgagtagttcaagcaaagagatccttgctggagttntattcagttgctcgactaccttaaactcgctttgttggatgaggcggaggaactcatgggcctcttccaaagtcactat

SEQ ID NO: 8690 - DNA, 450 bp, Glycine max
agcttgtatctagccgccttttcaacctaaattctaaatacaaaatcatacttgtttgtttctcttctttcaccaaatctttcatattgtttatatttgcaatgctagcaaaaatataataatattccacattttttaaatcaattaatcattttatcatattaaattctctaatttaattaatcatcaaatattaaaataatttctttaatagagattagaacacttgtttgtgtataaccccgtaggttcaatactaatcggatgatatattaatcaaattaatatactaatcaaggtaggcgtctagcaacactccttaacgtccggatagcatgaagtaacattttactttcaagaaccattagaagagtagtgtaataatttcttccatctttacagctttgggttaactctagagtatgatattactgtcaaacccttttgagt

SEQ ID NO: 8691 - DNA, 356 bp, Glycine max
  unsure at all n locations
cgcttttntntttccgactctgaagtcatattttcttttatgtttaaagatctttgttataggatattntatttactcgtattttttgttttgttttcaattcttgaaaaaattgtcaataattttatttatttcattattaaataaatattcttcattttactagttattatttttatttaatatcttgtatatgttttttatatgattttatttaatacgttatatatttttttaatattttttaaaaatattttatataattatttagtcaagttctgtttaatatattttgtatatctaacacttagataacttggtaatcctgttatcggatctaatgtattcggaaatga

SEQ ID NO: 8692 - DNA, 455 bp, Glycine max
  unsure at all n locations
agctngccctgctaaaggattgcttgtaactagcatgcactggtgcatgtgcgcatcatatgctttggtttggtctgtgaaatgaaattttggatgagccatgttggttctctggtttaggaagtgtcaaatgaaatttgctagtagttttctgctcacgtgttggagcttttatgcaggctttggagcaatttctgctagcaatttcctttgcatctatacaattntcatgacagtaaggaactattgatatggactaggaccactgttaaatcttatagcagtttgtagagtttgaaaaataatcacatgatttaatgtcctgtttcttctctttctcttataaatttattataaatttacacattgttttggagctggagtttcatgtatttgagcttcgaattagagagagaacaaggaatgaccattactaanagcaaaaaaatatgtca

SEQ ID NO: 8693 - DNA, 344 bp, Glycine max
  unsure at all n locations
atcaaatcttatcttatccagattgtattccatccagactttattccgtctagattttatttcgtccagattntattttatccatcttatcttatcttgtccagattttattttatttcgtttatgggcttggacttaaaatagatttgtaagctntgtggctaagaacctcatccatacattttttaatagtatgctctctttattttcttttgatatactttgtgttttaacgacttgaattcaatatgaatttgtttatcaattatttgtggagttgtacattacttatatgaaattttataagtttattgttttagttagatttcactacgttctaaaat

SEQ ID NO: 8694 - DNA, 453 bp, Glycine max
  unsure at all n locations
agcttccattgttcaatttcgagtgtctcgatatattatgcgcctgaatcggacctccgaatgaaaagttatgaccatttgaatttctcgagagctacctttgttcaatttcgagcgtctcgatatattatgcgcctgaatcggacctccgagtgaaaagttatgaccatttgaatttctcgagagcttccgatgttcaatttcgagcgtcttgatatactatgcgactgaatctgacctccgtgcgaaaagttatgaccattttaatttctcaagagcttccgttgttcaatttcgagcgtctctatatgtgatgcgcctgaatcagacctccgagtgaaaagttatgaccatttgaatttctcgagagcttccgttgttcacatttgagcgtctcgatatattatgcgcctgaatctgacatccgagtgaaaagntatgaccatttgaatt

SEQ ID NO: 8695 - DNA, 409 bp, Glycine max
  unsure at all n locations
tatgcacggaanatgtaattatgaaattgagatgcccgaagattcaccatttcctagttaaccatgcattaggtaccatgttcaattattntgtttttaagtgaaacgggtttatgatcccaacatggttggctcgtggtgcctaacacatgaaactaagaatgtagtgtgaagtttcacgcttcccccttttttgtttttgttttgtagaggaaaacgcaaggatgagcaaacatganaacaaatggtatgcaatctggcagatcaaaaagtttgttgaacgcatatgcatgatgatgccatgactcatgcaaaatgtgaggctggaatatgataacggacaaatgcaggaacgatatgttcattatgatgttatgaagagatgcttatgcgatgcatgatatgaatg

SEQ ID NO: 8696 - DNA, 455 bp, Glycine max
agcttgtagaggatgcttcaatggaggaaaatatttaaggagagaaagagagaggggggagcacgaaattgaaggaagaaaaaagggagagaagttgaactttaagttgtgtctcacaagactcttattcatcaaagttacaacaagtgttacacatgcttctatttatagactaggtaacttccttgagaagctttcttgagaaaacttccttgagaagctagagcttagctacacacacccctctcataactaagctcaccttcttgagaagcttccttaagaaaattcctaaagaagctagagcttagctacacatacctctctaatagctaagctcacctccttgagatgagaagctagagcttagctacacaccccctataatagctaagctcacccccatgacaaaatacatgaaaataccaaaaaaatccctactacaaagactactc

SEQ ID NO: 8697 - DNA, 225 bp, Glycine max
  unsure at all n locations
ntagttgacagatatgttaaccaagggacttcccacggagtatcttcaagaaccttattgcaagctgtgaatgatagatatgcattcaccagcttgagggggagtgttgtgatacattccataattaacacagattntattatgtacagattctattccattgtatttctttccttaattaggttgcttgcagcatataaataaatcttgtattcacttctttgt

SEQ ID NO: 8698 - DNA, 451 bp, Glycine max
agcttgacttgatataatgctcatctatctcttgatttcatgatggacatagcagtagtctgctttgacaggttctttgtctttttttggcttctgctgctaaaccggtgactgaattggatatctctgtttcggcctttgagtgagcactcgcgattattgtgctccgcgctggatgcgcgctttcctaatgtattattgtcttgcggttgcacaatgaaaatgcatcgcgaactcattgattatttgatctcagaatccactttattttaaagaggaggcttgaagtatgcatttcctatgataaaagagtaatactgaatagctcggttttgagctttagagggggggaaaaacattaggtggtggagatccttgtttccaacttgctgagtattttgatgactaacacatcactaatacctgtgatccaagcaaccaaaaacctact

SEQ ID NO: 8699 - DNA, 449 bp, Glycine max
  unsure at all n locations
tgcgaggctgcaagtgtagcatatatgcacaacagcctcaccgtagaaatcccacgtgagagtgaaaactcaacagctatgagaatgttgtctctctacgacaacattgctagaagacatgttcccgccaaactgggacagttctctgcgatggtggttcttgatttgtcggagaacaagaatagtggaccgctgccaaccgatgccagcaagggacgtacactctaggacttggtcgctcttgataacatgttttctggcgagataccacacagttatgcgaactgcatggtgctgtcgaagtacaaagtgatctgcaaccgtatggaggggtccattcccgctggactcatcaggttgtgacacgatacaatcattgatttgagtagcaacaactntaccggtccggctcctgagattaacggacattctagaaaattatctgagct

SEQ ID NO: 8700 - DNA, 456 bp, Glycine max
agcttacatctaggaaaacactggcttagaatgatgtgcttcatgttccctctatcaaagttaaccttatttctgtagcattgtggggagaggttggggtaaagatatcctttgagtctaataagatagttatgactaataataatgtatttatggggaagagatattgtgatcagggtgtctttgtactcaatgtttctgaagtgattaatgagaatgcatcttcttatgcttacttgattgattcttatgatatatggcatgctagattaggacatgttaatccaacttatgttatgaaattgcaacaatcatgtttaattaatatgcatgagaaacacagtaagaaatgttaaatatttgttgaatcaaaattaactaagaaatcatgtccttctgtacaacatgaaattgaactgctaggcttaattcattatgatcttgcatatttaaaac

SEQ ID NO: 8701 - DNA, 389 bp, Glycine max
gagctctctaatctccaggttctaagtgccacacaccctagacactaagcaccaatctagtgctaagcctaatatgttctagcactaagccttaagcgagaagaagacaacttgttctttggcctcttaggaataagcatggagggcttatgcgttgagtatgggatcatggaccttgttcatgacagtgatgaatgaattagacttaggagtctaatttaacatgcgctctgaatttgtgttttaattgttataattataggccctttgttatttcttctctaaatttgtgttttaattggtgaatggtatgtgagtgtttatgaatgctaagattctttatgaatgttatgtttgtagtggttgagactattctcacccttttcctc

SEQ ID NO: 8702 - DNA, 402 bp, Glycine max
tgcctacaacaatctttaaatatttatgtaggaataataaatcaaagaagttactaatgacaaaaaaatcaaagaagttaaatataaatttaattttgatcaagaaatgacaaatgaaaattaatgtgtttttgaaattgccaagagctgattgaaaatgtaaatttatgcacttcgattcaaaggtcaaggtaaaaaagaaatagaacattacatgtaaatttaatgaaaagaataattgaattgttttggttaagatgacgagttagaaaggaggaagtgaaattttcaaataacttttttatataaaactattcaaggatgatataaaaactatttttaaaatagttttagctgagtgtcattaaaataattgttttattgaaaaatagtagtagatgt

SEQ ID NO: 8703 - DNA, 384 bp, Glycine max
  unsure at all n locations
tgcagacatgggacatcgtatagtatatatgattcacgatcttgggacagacggttttcaacaagcacatgcacccttgtatgacaaaatacaaagtcattcaaagaagtctgtgtattcgaggtgcacatctttcacatagttgtcagcggtgttaagtctggccaacttgaaggcatgatttgcatggagtgacaagagcttcatcaaattgtttgtgttattgaanagcatgctttctgaggataacacattgccgaggaatcactatgaggcatagaagattgtatgttccgtgggaatgcagtaccagataatctatgcatgccctaatgattgtagtttgtacataaatgattntgtagagatgcgtacatgtcccat

SEQ ID NO: 8704 - DNA, 450 bp, Glycine max
  unsure at all n locations
agctttgactngagtcatcaaaagattataaatatgtgatcatggcatggatnttttaaaaaataacaatcaagaaatctatctttcaatcttctctctcaacatcattcaactctttcaacagattttttctgattcatcttctcttcatctttctaaaagtttttgttcaaaactttttctttcaagaaaagttctttgataaaaaacttggtctattaatctttntcattctcttctccctttgccaaaagaacaaaggactaaccgcctgaattcttttgtgtctctcttctctctttccaagagaattcaaaggacctcgcctgagaattcttttgattcttcccttccccttaaacaaaagatctcaaaggactaaccgcctgagatatcttttgtttcccctttacaaagattcaaaagactaaccgcctgagaattctttgt

SEQ ID NO: 8705 - DNA, 433 bp, Glycine max
  unsure at all n locations
ctcagtagtagtataattggcttgggcatcatctaaagtcctagaagcataatatatcaccctgcgcaatttatcaattntttgagcaaggacagcccccaatgcataatttgatgcatcacacataagctcaaaaggggctgtccaatcgggtgcctggatgatgggggtggtagtcaacgctcttttgaggcaatcaaaagcctctttgcatctgtcattaaagtcaaactccacctccttttgcaacaagttggacagtggaagggctactatgctaaaatcccttacaaagcgcctgtagaatcctgcatgaccaagaaaagatcgcacctctcgcacacaagaggggtaaggcaattgtganataacagaaatttntgcaggatctacttcaatacccttattggaataatgtggctanaactatacc

SEQ ID NO: 8706 - DNA, 450 bp, Glycine max
agcttaaagtatgcccgagtcattcatccctatgagatgttgatgaagtattggcgatcaaaatttccattccttggattatagggttgaaccaagctcatgcttttacaaaaaggttcatcaagtcaagttgaaatatggaagtaaccatcctgcaaaattggggcaaaagatgaattgagtcacatcactgcttagtctactgccaaacatatttaggattgttgatgtccttgctacttccagtttcaccttgacaaagatgtcatggaccatgttgaaaatctaaattgattcaaccccatatcctgcgtaaaaattcgcaatcttcaactgtacatcattcgcatacatccatgcttttcattggctgcattgctcattgcattctttccttgaaaaataaaataaaataaaataaaatgaacttaataattgttatcaaaaaaa

SEQ ID NO: 8707 - DNA, 252 bp, Glycine max
  unsure at all n locations
ctataaaactcagcttgtggagtatgggatacccatcacatgtggtactatgtggcggtcgggcgatggtgcacaacaagttntccacgtgcacaaatcgcgcataaacccaccatcccctgttgcccaccttcaactgagctcacgtactcccacgtagctcatatactcgattctctcaacaccgggtgcncatcaatcctgccaagcttgcccaacatgcgagtaactcaacattcaaacagccaaaat

SEQ ID NO: 8708 - DNA, 450 bp, Glycine max
  unsure at all n locations
agctngttggagaatgttgaaaactgtgggaggtttggtttgggttacaagcctacaagtgcaaacaaatggaggattgctttggaaaggaaagagaaatgcatagctcgtttacaagggagagaattgcaggtggagagggtccctatttgtcacatcaatgagagctttgtgagtgcagggtggatgtacgaagatcaggttgctatgttggatgaacagaccgatcaagatcagccaaattgggtgcaaccatgtttgctagactttggattgaaaaattggtagatcatagagaaacccaagatttatgtttctgatttgatgtaattaagcatttccaggtcctattgctatgcctaaggctttaggattcacatattgtcaggcgtacttttcttttcaattccagtgatcattaataaaatgcattntaaagacatatcccct

SEQ ID NO: 8709 - DNA, 458 bp, Glycine max
  unsure at all n locations
tagccctagaggggatggaccttntcaggttttggagaggatcaataacaatgcctataggttggacctcccagaagagtatggagtcagcaccacttttaacatttctaatttaactccttttgcaggtggagctaatattgaggaggaggaactaacagatttgaggtcaaatcctcttcaaggggaaggggatgatgcaatcctccctaggaagggaccaatcactagaaccatgagcaagaggctccaagaagattgngctagagctgctgaagaaggccctanggttctcatgaaccttagagtagatttctgagcccatgggccaaggttgggtccaattatctntgtacatattagactaggatgtcanttatattggtccttgtatttanggctccatattgtangtagggtaccctagaaatatangaattttcagcccttgtattttt

SEQ ID NO: 8710 - DNA, 261 bp, Glycine max
agcttcttgcgtagccgctcttggtgctcacattattccataaacaaatccctcttattactagctattttgaattctttagttcctaaatgtacatccttcaaattgttgctcgttcccctctttgagaatgaggaggatcttcataggacttcatacagctgatgtttgtcggcaatttcatcatccaccacccttttcttctgtgccttctcacgttcattattgttaaacccatatttatgccttcttcccttcatg

SEQ ID NO: 8711 - DNA, 475 bp, Glycine max
  unsure at all n locations
tccttgagaagcgtagagttagctacacactccatctaatagctaagctcacctccttgagaagcatgcttgagaagctagagcttatctacacacacccctctaacagttaagctcaccccatgccaaaatacatgaaaatgcttagctacacacacccctttaatagctaagctcacccccatgcctaaatacatgaaaatacaaaaaagtcccaactacaaagactactcataatgccctgaaatacaaggctaanatcctatactactagaatgaccaanatacaaggccaaaaagaaggagaacctattctaatatttagaaagaagagtggacccaaccttggcccatgggctcagaaatctaccctgaggttcatgagaaaccttggtgatgttctcttggcttctctatctttgtattctgggaagtctctntaattccttggtcttcatacgaatctctatgtata

SEQ ID NO: 8712 - DNA, 407 bp, Glycine max
tgcaagctttgcatcctagaataaccaatatattttgtagcccaacctcattacaagccaataaaagttcttctgattcaatttgtgtatttctaactttatggtaagagatgaagtacaaatattggacctcttgttagttgttattgctaaatagcttaaacacatatgattgagttgtgttgcttactaacatgttctcttctctagttaagcatctttccatgaaatttgtctcctacctagcttcaattagttgtgttgcttactaacatgttttcttctctaaaaaactgcatgtcttgtgaaaagcaattgataaagacattatgtttcatttgttatcatgtgattaatattttgtgaaccatacacctttgtacagaatcattgcattgttttatcac

SEQ ID NO: 8713 - DNA, 368 bp, Glycine max
tgaatcacaaatctgaacctgtcgacagactctgtggtttatgctcctctgccgaccaccacacagacctttagccttctgtgcaacaatttgaagcaattgaacagcttgaagcttatgctgcaaacatctacaatagacctcctcaacctcagcagcagaatcagtcacaacagaacagaacaattatgacctctccagcaacaggtacaatctcgggtggaggaatcatcccaaccttagatggtcgaatgcttcaccacagcaacaacaacaacaacaaccttattttcagaatcctaatggcccaagcataccatacgttcctacaccaatccagcagcaacaacagcaacagccctagaaac

SEQ ID NO: 8714 - DNA, 448 bp, Glycine max
  unsure at all n locations
agcttgagcaaattagtcatgcaatatnggtggattagttntttttttttatttttctagttttttcttatctttttccatatttgagttagcttctgacataggcatttgtggcctaacatgctctttataaatgtgtgtgctataatgacatttaattaatagaggataattcaattaagtattactatgccttgttatttcttagctgtgtttagtttcaacaattgatactatccaatggctttcacgggcttcagattttttaaaaaaagtgtgtttgagctgcgatggaattgagttataatagtaataacttatatgatcttatctgaagtttaaacctagacttttcagagacataaggtcatgtcttttttttttcaaattgtttaaaagagtcactgcactcgttgatggaacaaacgcagtcttagttntacattct

SEQ ID NO: 8715 - DNA, 325 bp, Glycine max
  unsure at all n locations
actcttgggctaancactangaagaatccacactaagatcacttgtacatgttctctaatcacaccgtttcatctctctaagcgcaccgcttcagctcatccgctattcgagaaacgctcactaagccgaaaatcactaacgtgcgctaagcagttcgcacgtgcgctaagcgcacgatcatgaacacggccacctatctcagcctgtaatcaaaatttgtgacgggagtttggactgggattcacaggtttgcatagttgtggtttctagagagagacaagtccaacttccacacagttttgagagatttactgcgtgaagatc

SEQ ID NO: 8716 - DNA, 452 bp, Glycine max
  unsure at all n locations
agctnganacatgtgccttagtgtaaaagaaccgttgtgagtagcaatggatgtctacattcaaatttttaccattttggtaataaattttagactttgaataaaaagaaaaaaaagtgtgtttagcaattttggtgaaataatttaatttaatataaattaatgtgctaatgatcaaactagaatgttactaacatgtgattacttcacggtatttcagtaagctgtagaagccttatcaaaggcgtgcattcaacattaggtaaaattataacatttcaatcaacaatataaaatatagtaatccaacatcttaaggaagtttaactataattcttaatgaccagtcattattaatttcatcatatacttgactatctattcccaatcacaagctaatgttacattgtctatttcataacatagtctaagttttagttgaattaactact

SEQ ID NO: 8717 - DNA, 505 bp, Glycine max
  unsure at all n locations
tctagctgaagctgaactntatccttctccttgctaatatttgaatcaaagtgttagtttacaattggaatagaaatcagcatttgcaactagcacctactgggcagataataaacttcaaacaaattatacatttgacatactataaaacttgtactcacaaaaagattaaacagatgggattgtctttgtgtgtgtgtgtgcgcgcattgtgcatgtttttatggnggtggtggaacatgaaagatgtattgtacacatacattgtaagtttactgtcctagcattgtatctttttttaaaggaaatcttattaagtctcgtggaagaatctaacaatgtgagcctttcccaaaaaagtatatgaaaccacacacaaacacaggatgattccaggacaaacatgtaaacttcaccttccagaaaactggttagtaaaccaggcatcgtggtttcccaatataactgctntagcanattcaagaatcacaacactcttaatgac

SEQ ID NO: 8718 - DNA, 431 bp, Glycine max
  unsure at all n locations
agctggcttgtgaagcttctatggaggctggatctttgagcttcaatgaggtccttcaatggtgattttccaccatggagatgcagcggaagacaaaggagaagaggtaagaggcggcaccatccactagggaataagccttggaagaaggagcttcaccaccaagatgagccttggataagaagctcggagaggatgcttcaatggaggaaaagaaagagagaggggggagcacgaaattgaaggaagaaaaagggagagaagttgaactttgagttgtgtctcataagactctcattcatcaaagttacaacaagtgttacacatgcttctatttatagactaggtagcttccttgagaagcttctntgagaaaacttccttgagaagctagagcttagctacacacacccatctaaaaactaagctca

SEQ ID NO: 8719 - DNA, 438 bp, Glycine max
  unsure at all n locations
aagctataaaactaacnatgttntaacatcttgaaagagaagatgaggatctcaaganaattcatcaagctcatttagttgattntatcctggaaaccacttcactgggtgatgtacaagacacctttgtttgtaggaggtcaaggcattactagacgaaaaggtatccagtggacgataaattcttcttaaggattttcaagacttagaagaaaggttgaaatccttaaccatgactcttgaaaattcagaagtagaacacaaggaaccccacagacaaatctagtcatggtttcaaaggcaaaaaggttgtgcatggtgaagaagttactatttgttatttctatggaaaggtgggtcatgagactcataaatgcaaggacttctctaaaagggcaacccatcaaagggttcgttcaatgcttaccaacacccatg

SEQ ID NO: 8720 - DNA, 462 bp, Glycine max
  unsure at all n locations
agctngaaggtcaagtcttgtttattgcggaatcttaatgtcttcatatattaaacatgccagacaggtatataagtttcacaaacaacttacattttcatatattggaatttatgaaaagtctgttaattggataaatcttaacgctaggaaaaataaagatttatgataaggaataaaagtgtgctgaaaaaggcagggaaaataagcaacatggctcatatacttcatattctgtttatccaccgggcgcctttggcctcaagaagtgtggcaattcctttcttttcccttcatgcattgcggactactcacagtttaagccaacaatatcaaactaatatacacatctttctctagtaattcaatttatttatcattttatacccctcctccgatccttcccacattaagatgcagcatattataaacacaagatctttagatgaattgtgcatattt

SEQ ID NO: 8721 - DNA, 462 bp, Glycine max
  unsure at all n locations
aggctgttgtcaccttctcgctaagccaatctgttgtcttagcgagcatctgctaagcgcaacactcttgggctgagcacgaggaagaatccagaagaagatgagttgtacatgttcgctaagcacaccgcttcatctctctaagcgcaccgcttcagttcatccgctaagcgagaaaggcacgctaagccaaaaatcactaacgtgcgctaagcagtccgtacgtgcgctaagcgcacgagcatgaacaaggccacctatttaagcctgaaatcagattgtgtgaggggagtttggactgtgattcagaggtttgcatgattggagtttctagagagagaaaggtccaagttccagagagttctgagagattntactgtgtgaagatctgcagagaccagagcttgaagcacgagccggcttgagagtctgagatgagatagtgagtgattgtgagatcct

SEQ ID NO: 8722 - DNA, 485 bp, Glycine max
  unsure at all n locations
atcctctgagtcacctgcggcatcgcaagcttcgcgaaaacctctattntatgaagcaaatagggcataatttgacctcaaaacactcaaattctaaacgaatagcacaaaacatgtgatcacatcatggggaacaaaactcctcaatcaatttcaagaaaacatgcaagaataaaaaatccccaaatttctaggtttctaacattcaaagccaaacactcaattaaaccatccaattcacatcagggcattaattgaaatgtcaaacatgagaaattcgttgttatcattgtacagacataattaaaatgcatagaacaccccaaaattaaccccaatttgatcctctaaggatccctacacatgttcactctaaccccaattgcgataaactcatcccttacctctatgagggcacatgtgtgtagtccagcaactatagcggcatctctagtggttacctacgataaactcatccattaagt

SEQ ID NO: 8723 - DNA, 487 bp, Glycine max
  unsure at all n locations
actcagaaactaagcttttatccaggctcatcttggtggtgaagctctttcttctatggcttattccctagtggatggcgcctcctctcacctcttctcctttgtcttccgctgcatctccatggtggaaagtcaccattaaaggacctcattgaagctcaaagatccagcctccatagaagccccacaagcaagtttccatcaaccttacgaaaagaaaacaagtatcgctatgaaattcgtaaagttacgaaaaaagaatcaccaaaaaaagaaaaagggggtgtatttataaaaaaaagggtgtaaatagtaaccaggcccacttgggccttccagattcttcctccaaaaggttgttgcttctagaggaagcaacctggctcgcctgngcgagctgggtggcaagctcctccactattctgctctacatagggagaggagtgaagaacgaagggtttcagccttcttggcacttcgtattcac

SEQ ID NO: 8724 - DNA, 464 bp, Glycine max
  unsure at all n locations
agctntgagaaaacatgtgatccttggcatcatcaaaacattcagcttgatccttgttctacagatacctccattttatcatcaacaatgggcacccaattacccatacgaagttcggttcaaatacaatggagcaacctacccaatacgggtccaacaacaccgaggaagatatttttttgcagatggactctcagaagttaggacagatttaaaaatttacgagtctattatcatcaacttctatgcctgcgataataataccatctttgatctacattttacacctcccctgaaccaacaaacatgtggtagaccaaaacttcattgccgtatacatgcctggagaactgaaattacccaatgtatactgggtgctccccaaccactggtaatatacaatcacattaacttgcattattatgagaattccaataatattattaatctctgtaaatgatccc

SEQ ID NO: 8725 - DNA, 491 bp, Glycine max
  unsure at all n locations
tctanactntatacaagaatgaagctctgataccacttgttagacaagtggcctcagatatcttaagaagggggggttgaattaagatattccaaactacttccccaattaaaaatctatttcactctttactcaagttatgaattcccttaatgacaatcttcttaaatattgattcaaataaaacaatttgaatatgaatataaagcaataataaataaaggagattaagggaagagaaagtgcaaactcagatntatactggttcggccacacccttgtgcctacgtccagtccccaagcaacccgcttgagagttccactatcttgtaaattccttttacaagttctaaacacacaaggacaatccttcctttgtgtttagaattcctttacaacaagagactcacagtctcttaatccgttagagaatgaggagaagaagaagaataaatctctctagaaagagatggatttacagaatgagactc

SEQ ID NO: 8726 - DNA, 494 bp, Glycine max
  unsure at all n locations
ccccccccctacttctccttccgcctcgattaataattacaannncaaccccgggattgacttgactcggaccaagcacgcggtgcactgaacaggcctatgaaaaactttggattcatggagctactgggatttacccttgggaacaacttagactttgatcaaagaaaagagcggccacccattgggaacagtaataacatacccgtgtatgacaacaaacgtacaacgaggatacttacggaattcacgaagctgtagaagccctaacaaaggcgggcattcaacactaggctcaattatcacatttcgatcaacaatatcaaatatagccatcccacatcttacggaagcttaactataattcttaaagaccagccattactaagttcatcatatacttgactatctatngccaagcacaagctaatgttacatcgcctatgtcataacatacgctaagttctcagcgaactaactactaagtctccacg

SEQ ID NO: 8727 - DNA, 385 bp, Glycine max
attcatcaagctcatttagttgattttatcctggaaaccacttcactgggtgatgtacaagacacctttgtttgtatgaggtcaaggcattactagacgaaaaggtatccagtggacgataaattcttcttaaggattttcaagacttagaagacatgttgaaatccttaaccatgactcttgaaaattcagaagtagaacacaaggaacctcacagacaaatctagtcatggtttcaaaggcaaaaaggttgtgcatggtgaagaagttactattagttatttctatggaaaggtgggtcatgagactcataaatgcaaggacttctctacaagggcaacccatcaaagggttcgttcaatgcttaccaacacccatgagctaa

SEQ ID NO: 8728 - DNA, 452 bp, Glycine max
  unsure at all n locations
agcttgtaagataatcatacaatagtttttgctgtcttgtgaattgattatgcttcaaagtcctataattgactgaggaaacgctttgaaattctgcaaaactaaggaatgggaaatcaatgcaatgggaaagacaaaacgccaactttacagcttatcctcagtgtagttgccttcaagctcaagctgtatcacaaatatntatctcnaaatcattcaagattatgagcgcggacaaatcaaacacgtaaacacactttaacaaaccaaatgcttgctttgctaaaagatcaaaaagactcgatactagtatttaataatgtttgtctttactagcatatatacatagtaggagtaattgattaaagaagtacgcataaaataataatataccgtaagataaatccatcacaattcactgttctttccaaccggttagattattatgtctt

SEQ ID NO: 8729 - DNA, 395 bp, Glycine max
  unsure at all n locations
taaccccaaccctaaccctatccctatccatcaccctgatgctgaaattctccaccagttcaacgagaacgataccgagaaccttcggtgcgatggaggtggaggttccagttatcttccgatggataacgacgcgataaggtcgtttttccccacaacgacgtcgtcgttggttcacttccagagctacccaccggatttgctttccagaaccagtagccaggacctgcgtctctcgcttcagtctttgcaagacccggttntgcttcaccagaatcaccacaacaacgagcacgtgctttntgctggaaccgggtttgaaaacatggtagcgtggaatagtagtagtaataataataataatactgcttctaatcgatacttgtggcggggtg

SEQ ID NO: 8730 - DNA, 395 bp, Glycine max
  unsure at all n locations
agcttctatctttntatatgcctaacttatcctatggactccgagcaaacgagcacggacccataggtgaacgcctgattttcttgttttgagaaaaaaaaaaaaaggatgcacagggtttgcttgcctgggcaagcaccccttgcacgaaaagggttaaaaggagagggaaggggttagtttttcacccaaaacttcttcatctcatccaaaaaacgtaagctcactggatccctcggatttccagccttaggtcaccatttctctgcattttttgattccattctgtgctgttattcatccccaacaagagatggctctgaagaagctctccacaaagaggtccaggagggatgcccatggggaaagcttcaatgcctttgtggagttcgaca

SEQ ID NO: 8731 - DNA, 480 bp, Glycine max
  unsure at all n locations
ggactctgacttgtctgggggagttgtcttcatgatctaacaagttggtataaaattccttgaccagngccatatctatgcaatcatcaggttgcctagtcaaggctttatgccaccgcctcctctcgagctcattccggaactcatcatactatgtcatatacaaatccacattcctctcagggaggatattcctggaatgtacattctgctcgtacctatctgaagcgacctcggaaacaagtctagtcgtatcatagggttcttgaggtcgggatgtggatgatttcctctgtttggaggccatctgcatcaaaagaatcacagganagaaagttagacaggttntattcaagactganagcaganaaataaaacaggataaaggattgggcgcttagcgagacagactcgcttagcgcaccttaagaaaataacagcatatgcttagcgcgcanggcgcgcttaacgcgtcaacat

SEQ ID NO: 8732 - DNA, 608 bp, Glycine max
  unsure at all n locations
ccacacgctgccgtatctgtcgtaactntcnctctnctacatnangtttttanngctntcctattttctctttttcctagtcnatcgacgncacattgagacttggagtgtctncattcgagatcctagaaagngacctgcagcatgcaagcttgcatntacaacaatatatcttataaataatctatttaatgaatccaaaggtccagaacatataaccccaaagataactttatcacagaggcacaaattcctatgatatgtccgcctactcattaaaattacactactgcctagctttaccaagctccgctcttaaacttattttaagttttctaggcggcccataagccagtttttcatgaatcttatatgttaccctacattttacaccctaaaaactcacttttaaagtcaaatttttaatacaaacaatccacaaatccataacagttagttcaatatcctgacagatgtattccttagacttaattcattcataacgtttgctagaaaaaactataagttgtaacacccaaaaaaatcacttttaattgtacaatctcaagaagaacaacatatcaaacagttccaacccatgtagcacg

SEQ ID NO: 8733 - DNA, 297 bp, Glycine max
  unsure at all n locations
aactctttntatagcagatttgttggtgctacttcacaaccccttgaactacttcacattgatttatttggtccctctagaactatgagtttaagtggaaattactatgtctcggtaattgtggatgattactcaaggtttacttggaccttgtttataaaaactaaaaatcaagcttttgatgttgttcgcaaacttgccaaggtgatccaaaataaaaaaaaaggtctttacggtgtttcatctagaagtgatcatggagatgaatttaccaatgagtcttttgacaacttctat

SEQ ID NO: 8734 - DNA, 455 bp, Glycine max
  unsure at all n locations
agcttaaggcctgtttccatattcaaatcaaatcagtgtttcgaaagttgctttttttatcaagtccatgcaaaaacatatgaattcatttgggttttgggaaagtccttcattgtttttcattctcaatgttttcaaaacaattcttttgttgtgttctgattgaaaaataagtttcaaaaatactggttgttgattcttttcaaagcatgttatattcaagaaaaaaaaatttgcttaagtcccaaaaagagttataatctataactatactaatagaatatcaaagcacacgtaagttttttaaaaaattcaaaacaataaataacgtaataaagtactgaaatttaatgcaaagcgataaataaacataaagacaacttcacgaattttcaaagatcatnggtgaggagctcaatctccttgatgatcatggttgaggagctcagtctcct

SEQ ID NO: 8735 - DNA, 308 bp, Glycine max
  unsure at all n locations
agatgaggaagtgtggaagggtgaacttcctgctcttattcgttgaccacagagtggtacctggagatatgtcgcggaggtcaggagaccttggggatgtcangtggggtgctattgcccaaaaccaagcttgaccaatcccgacccaacccgggcatagttggtcagtgagaacctgtgatgtacctaaacaggcgagctcctggaagtcaacagataaaaggaacagagaccaccacagcagaaggcttgtggtggctggccagctatgaacttgatngatgtgtgagatatggcctctggtaatc

SEQ ID NO: 8736 - DNA, 368 bp, Glycine max
  unsure at all n locations
agcttgaaatgaggaagtgtataagggtgaaacttcctgctnttattcgttgaccacagagtggtacctggagatatgtcgcgggtatagtcagtcagtgagaacctgtgatgtacctaagcaggcgagctcctggcagtctacagataaatggaacaaagatcacaaagcaaggaggcttgtgtggttgctggccagttgtgaaacttgattgatatatgggatgtggcctctggtaatcgattaccaagggtgggtaatcgattacatggcttacaaagtgaagacaggaagctaagatggcctctggtaatcgattaccaaggggtgtaatcgattatcaggcttgaaaatgggattaagaagct

SEQ ID NO: 8737 - DNA, 481 bp, Glycine max
  unsure at all n locations
gacactataaaactcaagctgaaggatgcttcaatggaggaaaagaaagagggagataatgatagaggngggagcacgaaattgaaggaataaaagagggagagaagtggaactttgaagtatgtctcacaatattctcattcatcaaagttacaacaagtgttacacatgcttttatttatagactaggtagcttccttgagaagctttcttgagaaaacttccttgagaaacttctttgagaaagctttcttgagaagctagagcttagctgcacacacccctctaataactaagctcacctccttgagaagcttccttgagaagattcctaaagaagctagagcttagctacacacancccctataatagctaagctcacccncatgccaaaatacatganaatatataaaaaaaaagtccctaatacanagactactctaaatgccctgaaatacaaggctaataccctatactact

SEQ ID NO: 8738 - DNA, 449 bp, Glycine max
agcttctatagaggctggatctttgagcttcaatgaggtccttcaatggtgatttctcgccatggagatcagcggaagataaaggagaagaggtgaggggaggcgccatctactagggaataagccatggaagaaggagcttcgccaccaagagagtgccttggataaaaagcttggagtgggtgcttcaatggaggaaaagaaagagagagagagaaagagagaggggggagcacgaaattgaaggaagaaaagagggagagaagttgaactttgaagtttgtctcacaatacgctcattcatgaaagttacaacaagtgttacacatgcttctatttatagactaggtagcttccttgagaagctctcttgagaaaatttccttgagaaacttctttgagaaaaattccttgagaagatagagcttagctacacacacctctctaat

SEQ ID NO: 8739 - DNA, 507 bp, Glycine max
  unsure at all n locations
cctcgggtaatctactacgcttccagaactttggatgctacctcaagcaaattacactaccacagagaagggagctattagcgatagttttgctcttgagaaatttcgttcatatttacttggtacttgtgttattgtttatattgaccatgcagctctgaagtacctgttgaagaaggctgaatcaaagcctagattgatcagatggatgctttggctccaagagtttgatttggaaatctgtgatcgaagtggtgcacataacctcgtggctgaccacctgagtaggattgagcatgcgtttgaggactcacccattcgggatgtttttctgaatgaccatttgtacattntgtatattatttctaattccttccccactccttggtttgctaatattgtgaattaattggttgcttctattttgccttccttagtatctaaagctcacaatgatanaattaagagtgatgctaagcattataattgggatgaccccctattgtg

SEQ ID NO: 8740 - DNA, 461 bp, Glycine max
  unsure at all n locations
agctntacaaaagttacgaaaaaaaggtactcttacagtgttttctttataatttgttttttattttctttatctcatcattcattttaatgatttttctattttttgaatctctccttccaagttatattatttgttgtataaaagctttatatcagtatatatagttataaacctttggagatataaggtgagttcaattattaagggaggagggaacggagaaaaatctcatattggaccaattttaacaaaaactaataatactgataattaacatttgtcataaaaaaaacttttgggattcattcgagaaagtgaaaagaaatgaaataaaagtgaatttagataaaagttttgaattaaaatagagagtaaaagtgtgagtctcaccattgttaggtctagatgaccactcatcttatccaccttgacttttgatgtataacaataaatataaa

SEQ ID NO: 8741 - DNA, 438 bp, Glycine max
  unsure at all n locations
tatttgcctaacaagccaacttacaacagcaagctccaagagactcagcataaggatgcacaggccagagttgagtatgtgaaaatattntatgaccaagtgaaggtgcaaattgcaaagaagaatgaaagctataccaagcaagacaacaagaaaaggaaggaagtggtacttgaacccagtgatgatcctggacatttgagggcaaatgttttccaagaaggagggaatgatgagaatcctgaaactggcaaaatacaggctaaaggcccaagtggagaaggacgaaggcctaagtggagaaggacaaagcccncgagtggagaaggatgaatgcccagaggcagagacattatcaagactattaattgttgctgaaggcccatattaatttgaaggcccataataaatatgttctaattttaattaataatttta

SEQ ID NO: 8742 - DNA, 463 bp, Glycine max
caagcttcacctttggtcctcctcatagttggtgcatgagataacatgctctattttcatctcccactccaagtaggcctccggatcattctttcctttaaatggaggaatgttgagtttaataccatcaattcggttctgtctaggaacaccatcattccctcttctcctcctttcttcttcattatgatctctattctccatttgattcaacctctcatggagcgcatcatctcgttgtttcattaacctctccaaatgttgcatcaaagcttgcatttggaattgcgaaagccccactccatcattaggattagtacctgacatctcaaacaaacaaatcaaatgtaacaagacaattatagttgctgtttgaatacctcacccactcaagtgtatcacacaattatggcttttctctaatgaaacactcttgccttttaccactctaattccccttgag

SEQ ID NO: 8743 - DNA, 324 bp, Glycine max
  unsure at all n locations
catatgtatgatctaataatctgctattttcaactcagacattctcattctgtgacttggcaactgcaactagaaattnttgagctgaatgtcttttgggagagggaggctttggtagagtatatgccattaggatgcctggaagaccacttgcatggtatttgcatttcaactattcaagttgttttatcccttctttaatttatatcatcttgaagttattattggttatatatgtttgatttgcagatattcctcctggcaagaaacaacttgactggaacactcanatganaatagctgctgggtaantacacatgaagt

SEQ ID NO: 8744 - DNA, 456 bp, Glycine max
agcttcaagaaaaagatggcctcagcaaattccttatttccaaaaggtaattctatcaatagacctccaatctttaatggagagggttaccactactggaaaacccgaatgcaaatttttattgaggcaatagatctaaatatttgggaagccatagaaatagggccttatatacccaccacagtggaaagagtttcaatagatggtagttcatcaagtgaaagcataactatagaaaaacctagagatagatggtctgaagaggatagaaaacgagtacaatacaacttaaaagccaaaaatataataacatctgccctgggaatggatgaatatttcacggtttcaaatcgtaagagtgctaaggaaatgtgggacactcttcgattaacacatgaaggaactacggatgttaaaagatctatgataaatgcactaactcatgagtatgaatta

SEQ ID NO: 8745 - DNA, 497 bp, Glycine max
  unsure at all n locations
ngagatgaggaagtgtagaagggtgaaacttcctgcntttattcgttgaccacagagtggtacctggagatatgtcgcggnggtcaggagaccttggggacgtcaggtggggtgctattgcccaaaaccaagcttgaccaatcccgacccaacccgagcatagtcggtcagtgagaacctgtgatgtacctaaacaggcgagctcttggaagtcaacagataaaaggaacaaagaccacaaagcaaggaggcttgtggtggctggccagctgtgaaacttgattgatatgtgagatatggtctctggtaatcgattaccaagggtgggtaatcgattacaaggcttaaaaatgaagacaggaggctaagatggtctctggtaatcgattaccaaagggtgtaatcgattaccaggtttgaaaacgaggtcaggaagccatgaaggcttctggtaatcgattactgatcgaggccgtacccgaatcanataaacatta

SEQ ID NO: 8746 - DNA, 462 bp, Glycine max
  unsure at all n locations
agctngcatccncattnttctttattccttcaagctataaaaataaaagtattattaataccatcaaattaaaccaatatatagttaattaaaatgatcacattaattatatgtcacgccatgttcccaacaatactgcctgataattaaaactaaaataaatacaaaactcatgcttttaactattagtatgattatgactattaaattttttttttgaaagacattatgactattaaaatttaattaaaatgtcagcgtgatattgttatactcagacatgatgaatattcaaaagtagagggaatataattatgatggtgaatgatggcgatgggctttcaaatgtaggtgatgatgtatgggtggtgggtgttatacccatatgatgaggatgattgagttgtgaaagatgtgcatgctgataatgaaatgaacaataatttttttcttaacacaatg

SEQ ID NO: 8747 - DNA, 462 bp, Glycine max
  unsure at all n locations
cgatgctgaggggtgcttgtttgatcggtcaactcattnttctgagtagtgcgttacacttttattatttgttcatttcaggttcaacactgtagcatatttgcagcaaatatggtggtttgaggtggatggggagttcagcttcccttttcctgctgatatttatactctctcctttaggcttcaccttggacgattttccaagaggcttggtcgacgtgtctgcagttatgaacatacccatggttgggatataaaaccagtgagatttgagttgtcaaccatggatggtcagcaagcatcatctgagtgctacttggatgaaactgaacctgatgatttacacggcaatcacaagcgtggacattgngtagattacaaggtgggtgagtttatcgtcagtggatcagaacctacaactaaagtaagattcttcatgatacagattgattgacacactct

SEQ ID NO: 8748 - DNA, 397 bp, Glycine max
atgctgactcaccataaaccttgacctatggtgataatggcaatccttaccctcggaagcatgcaagaatatatgggatctttccggtcttagaaaagagatggaatatttccaatgaaagaggaaaaaagaaaagaaaggaaattcccaatcgaagagtgggagaaagaaaaagaaaagagggagaattcccttcccaagaatgggagaaagtaaaaagggaaggaagctcctggtcaaagaaaccagagaggtctttggaccagataatatctgaacagtacagaattgtcaccaaatgaacaaaaaggaaggaaaggaaaccacgacctagaatggtcttctccctttaattaccaaccaaaatcccgtgcgctagcgacccttttttctcgcc

SEQ ID NO: 8749 - DNA, 420 bp, Glycine max
atgcacggagaatgtaattatgaagatgagatgcccgaagatataccattttctagttcaccatgcattatgtaccatgttcaattattttgttttgctgttgtgagttcttgttagaaatgggtttatgatcccaacatggttggctcatggtgcctaacacatgcaactaagaatgtaatgtgaagattcacgcattcccttttttgttttgttgtgtagaggaaaacgcaacgatgagctcacatgagaacagatggtatgcaatgttgcagatcaacaagtttgatgaacgcatatgcatgatgatgccatgactcatgcagaatgtgaggctgttatatgataacagacaaatgcaggaacgatatgttcattatgatgccatgaatagatgtgtatgcgatgcatgatatgaat

SEQ ID NO: 8750 - DNA, 344 bp, Glycine max
taatccctaatctctcttccctcgtggcatcatcaaaaggccaaagtgcataagacatacatgactttcttcttaaaatatcagtcgcataacatccatcgataattaattataaaagattctaatctagacatcaaaagagacatgaataagccatggaagaagttaaaccacataatctataaatgttcactcatactacgcaaatattacaagaaatactaaatgttcaaatgtcataataacatatccaaatacactgcttgagatcagagtaaagtaataaaaatatatatcatttagagaagtcactagcatctagcagtcctaattctcttctaata

SEQ ID NO: 8751 - DNA, 253 bp, Glycine max
  unsure at all n locations
tctctgtaacaatcaagtnagatatcctctttcaaggaatgaggctcatgatgagtaaaaatggacaacttaatataagtatggccagcaagactcttgtaataatatataaatgattgctcacgatgaggacttgtgcattgaggagacaaataagaagaaatagtgccataatagctttcagacaaataaccacaaggttttttatattagtagagaatctgacaggatctgcaatgctctgcaatatgtc

SEQ ID NO: 8752 - DNA, 453 bp, Glycine max
agcttgtataccgctccacccagtgaaacttcagttgactggccccataaaatgacaacgctactagcgaagtcatcacagttattgtgctgtaaatgcaatgtgtgaagcttggttagtaatgaatatctaaacaatttttatttgcaaacttaattggcatctaaaccagagtagcatcaacccagattaagaaactcagggcctttaagattgtgaatcttttagtgcagaacagcattcaaaattcaaatacaagacagaaataaggattcctatatgttccatcaaccaacctgaatttcaaaaaagtagtcaagggatctagctgaattgttaaccatctttgtttagcttggatggcatctcaaaattcaagtagtttgtggtaccaaagagaggtttgtcagacagacatgatgtcttattagaagtcttagcataagttgtcat

SEQ ID NO: 8753 - DNA, 459 bp, Glycine max
  unsure at all n locations
ggtatatctganagataaatcanaagtaactaataatgcattctgacgtctcctacgtacataaaacgccgtttactttataaatatagcgtcttggtcttggatgtgatgtcatattgagtgctcattgcttcctaattttcttttgagctagttccttttcaaagttgaacctacacatgacgggagtacatagaataataataaaatgttagttaagctaataataaaattcttctttattagtttcttaattgaataaaaataaaataatagatataataaataatttgataaaaagagaaaaaaataaataaaggaacaaaaggcaaacaaactgttgaatcgatatggaaacccttagaagcagcttagcctataaatagaagttagtgaatngaattggttgcatncatantgcaaattgaagttaaaggatgaatatctataataacattc

SEQ ID NO: 8754 - DNA, 443 bp, Glycine max
  unsure at all n locations
agcttattatattgtgcacgccatggtgcattgttaattaaactacgcacganagctacctatataaaggtgtaatgaaagtccaccatatacttaaagttggcataaaatgtgcttattcagccacctgtatgtgtatttgtagcagaaatgaatcggttaagaaacagaacttaatcaaaattattttgatcagcacctgtttattagttatgcttttgagtgtagcattcatattgatatttgtttttcggaatgatgattgatgtaagtgttcattcagttatttctttgattcttgctttcattctggaccgtgttgctcatcatcacaggtccaaatgcttgataccaatgaatattgttattacgtgttcactgtcattaatgacaattgatatatgctatacaaattgggttcatgatgagtgaaccttatattc

SEQ ID NO: 8755 - DNA, 413 bp, Glycine max
gttgcgattcattctatgtacccgtagtggtccacattgtgtttcgtgcatatttattctcgttgtggttactttgtataccccctgttgacgtgcttaagccattttacttaagtcatttctcgcttaacttaaaaataaaataaatttccaccgaacgttcgaattgtattatgcattaacttcggctaaaataaattacgactgttcggtcgtgccgtaaccacgttggaaatcaaaaagaggtaaaaaataatataataataaaaaaaaacatctttttagtgaaataaagcggaaaatcaatcggacgttgtctctttgggatttctcattcttaatcgaattgattaataactaaagtgaaactaatgctaagatcaactcacctagtcaagctcgtccacaaaaat

SEQ ID NO: 8756 - DNA, 451 bp, Glycine max
  unsure at all n locations
agctaggctctagaccttgtcattggatcctataactcatgaagtgcttctaggcccttatactctttgaatatctcgagaatgaacaatggaacatctcgagtaattcaaatggtcataacatttcaatcgaatctccgattctagcacgtaatatattgagacacttgaaatcgaacatgaaagctctcggcaaattcaaatggccataacttttgactatatgattgaggcccatgatatttccagacgctcaaaattgaacaacggaagctcttgagaaattcaaatggtcataacttttcacttggatgtccgattcaagcgcataatatatcgagacgcttgaaattgaacacaaaagctctgaccaaattcaaacgaccataactnttcacatggataatcgattgatgcccatgatatatcgagacgctcgacaatgaacaac

SEQ ID NO: 8757 - DNA, 437 bp, Glycine max
  unsure at all n locations
tctgcataattggagagttctagagagagaaaggttcaagttctagagagtctgagagaanttgttgtgtgaagatccgcagagaccagagctggaagaggaagccatcctgagagcttgagatgagtttgtgagtgattgtgtggtcctagaggtggaagagacatccccactacttgtatgtctgcaatctttcattctcttctctttgttgtaaaggaagctttccagttatggaaagttaaatcctctgttggatcttccttgtaagtacttgatgtaaatatctttctatctatttaatgatgttctgtgtgtttactatgctatcagaacttcattctaccatgcttctgccttgatcacgtagatgcatgtgttgttaggatcattcaacagcggaaattggtttgaatcttataacttgataggacatg

SEQ ID NO: 8758 - DNA, 438 bp, Glycine max
  unsure at all n locations
agcttcaccaggaagattattgaaatatgctataaagaactaataggaatcataacctatttcataaacccaaacatataagttctcccaaatgtaccctcagtatcttcctccacaaccttctagagctaaataaaataacaattaccctaaacctaattatagaattagagggaaaatactccttaagatgctataaaaataggctgtaaactgaacacactgactggttttaaaatcaaagctacaaaagataattttccagcaagatgcaacacaaatatccttatgacattaaaatgatagctgtctgcaatcaccttaaagaagtctcttcattntgaagatcataagaatgattacattgtgattccttctctttagaatgtaaaggtcttggtgataggccagacaaatgacaatagctgttcatacctg

SEQ ID NO: 8759 - DNA, 436 bp, Glycine max
  unsure at all n locations
tattgtatntatctatctcccaatgccgttgtaaagattcatcatataaaatgcatgaagcttgaattctagatgagtgcttaaatgcatgggcataaagatatcattctatgtctagcaatgattatcttatattatcttttctttntgttctattagaagttaccctttgtcgagcgtgtaacccctaaaactaatgcatgcacaccttctttaaatcttatttagaagttaccctccgtcgagcacctaactcctaaaagaatgtaaagataaatgcatgggagataaatataaaagacaatcggatagaaaaacacatgttgttgcattgataaataatgaagagtacatcatacatcgctntggctttangcctgccagaccctaactaggngtttaacctctcatggccattganggctntacactggat

SEQ ID NO: 8760 - DNA, 421 bp, Glycine max
agcttcctagacgactactccggatacaaccagatcagaatggatcctctagacgaggagaaaatgacatttatcactgcggatgccaacttttgctatagggtcatgcctttcggcctaaaaaacataggcacaacataccaacgactgatggatcgagtcttcaaacaacagatcagactaaacattgaggtatatatggacgacatggttggcaagtctcacagcataccccaacatgtggtagacctagaagaagtcttcagggaactccgcaaatatgacatgcacctcaaccctaaaaaatgtactttcggggttggcggaggcaagttcctcaacttcatgatcacacaccgagggattgaagccaaacctgacaaatgcactgtcatactggagatgcgcaacccagccaaca

SEQ ID NO: 8761 - DNA, 379 bp, Glycine max
  unsure at all n locations
gggtcttcatcgtccganaaggttattntagtcatttatattttttaattgattcaaaataatgttttcatctatctaatgttgacgttgttaatagataagataccaatgtctaagaatctaaacaaaatgtaagtttctttctgcttcttcctcctcctactcctagttccttcatggactaatatgagtctcatcaataatgagataactctcattcaaccaatcttctttctctttctcctacatctatcacacaattctntaataaatatacaaactcccatgtgattttttagttctaaagaggtagaagaacaggatggngattgggagaaatgagatataaatattatgatggttgttacaagcttatatt

SEQ ID NO: 8762 - DNA, 443 bp, Glycine max
  unsure at all n locations
agcttatttgttattgtcaggcggaatttgaaatcccagaggcttctgacagtagcacgaanagaagtttcttcagactgttggcaagagatggaagcagtttaaatcagacctcaagaggaaatgggcccttgcagtcgatcgggatggtgtggacgacactatctgtgagaaatatggcataagcaaggaaaaatgggctcagttttgccagactcgcagagacccttcttgggaagtatgttccttgccatttaagttgtttttcaaaaaacattaacttgttatacttcattctagcaatttgaaagattattgttttatttttgcaggatgtgtgcaaaaaggcacaggccatccagaaacagaacactgcccctcacgttntgtcttgtggnggttatgaatatttggagcagaagttcctggttgagaagaccatg

SEQ ID NO: 8763 - DNA, 459 bp, Glycine max
  unsure at all n locations
tcactatnggcataagaattacacattaataagaccacttggaatgatggacccatctataaatgataaacaaaanaatgacatgactcaggatgtgggattacatcctttaatatacaaccatgcaaatttcctattggcctttggcagcagctagctgtttcattaggttaagcacttctaatacttttgaagccaactgatctttatacttcttattcgttaacactgattcatcaattgcttccttgtatctacaacggaaagaatccagctttgcttgtgttccacggagtctcattctgagcttagccatctctttgttgttttttaggccaccctgtcaaaattaaggtaaaaacagtttactatgatgactccaagttgagcacagaactcagcatgaggtggaccaataactggtaagccaaacacgtacaatctgaataacagacatgc

SEQ ID NO: 8764 - DNA, 432 bp, Glycine max
  unsure at all n locations
agcttatgataaacttgagaaggtttgaacctcatattagttgtggatgatcttcatattctattgtagaaagcaatttatttttggcctcatgtctgttcagtatctttgaaattttcctgttagcataattactttaattttctcattagtaaatgatagatttataagccaagattatcatttcaaatatagaatagataattnttctttattgttctcatggcaattcttacactattaaaaaatatactttcaacatcaattttaaaaccgatgttgaaagtaccaatgttaaatgtaatattgttaacatcggttttgaaaaaccgatgttaacataaaaattctaacatcggttttcaaaataaacgatgttatatacaaagaactacaacaaaataagtgtatgcataatgaatattgacatcg

SEQ ID NO: 8765 - DNA, 388 bp, Glycine max
  unsure at all n locations
tacctgcatttatttatataaatntatttatgttagattatgcatagtggttttagaaccttgccatttatttaatgtatgtacaacacaggacagagaccctgaataattntggtggttccttactccttagttttattagttagttntattgctaattgtctctctgctttggttntggctgtatcttcttttcttggttgataccttattcagatcccattaacacttcactttctctcgtggaaaaantatttggcaaacaaaaaaacatttataaaaaagtatgaactatgtagattagcatctttccaatttcacatctcatgttaaaaaattcagcttttttctcagtcttgactttcgaaagtgtacctttccaatatgt

SEQ ID NO: 8766 - DNA, 115 bp, Glycine max
agcgttggttattctcttgtgctacaaacatattttgccgttttggcggcaataactggccactgagcgaggatgtcatcacggtcctatcacaggcgacgtacgagctcggcgt

SEQ ID NO: 8767 - DNA, 216 bp, Glycine max
gagggagaggatacgcatctgtgcggatattacaccggataagtgcactctcagtcaatgtgcttgatgcccatctggagcgatctcgtccccgctgcaccgtgggcgacactagattctgctttggatctctgcagcaccgattgaggtactctctgtgtccatgtaattttctaacgccacaatttatatacgtatcgtcaccaaggtcggtgt

SEQ ID NO: 8768 - DNA, 431 bp, Glycine max
  unsure at all n locations
agcttattgtaatggattacacaatntagataatacaatgattgatatttaaagagtctctgctttaatcgattatcaagagatatatcgattacttctctcttaaataatgtttcagaagtgatcaagaacactttaatcgattacattgttcttgaaagttttccagtttttgggagaaacactttaatctattgaaatgataattaatcgattacttctttgaaataatcgattacattntatatttaataaattacaggagtttataaccgttttctctataaattgtccccttgcgttcttacttctaacaacttttgaatgagctagaattatgagctcatattagtaaaacaaagaacgaaagaaaaagtgctttgatacagtgtgcctcacaacttctaatctttgattataaagatcatatt

SEQ ID NO: 8769 - DNA, 498 bp, Glycine max
  unsure at all n locations
ggtgtagcactacccactgcagaagctgaatatattgcagctgcaagttgttgtgctcaaagtctctgatgaaatcctatcccccaagggcataggatagaagactccaagaagattgggccagagatgcaagagaaggccctaggattctcattagccttatggtagattntgggcccatgggctaagtatgagaccacttatctttgtacatattacattaatgtttcattatttttggcctttgtatttaggactccataatgtaggtagggtaccctagaaatgttggacttttcagcccttgtattttatggcacctagactagttntttgtattaagggtagttntgtaatttcattcgcattaagtgaatatttgatgtgtgtgttgngaaataaatttaatcgaattgggagaagcctaatccaattaaattntagagggggaggtgagcattngcttgctacacnccattgccacatcatatagtcaca

SEQ ID NO: 8770 - DNA, 462 bp, Glycine max
  unsure at all n locations
agcttcataccctgatattattcataaaaagcttatcaagataaagtatggaggggtcaaaccaattatatcaacaaaataacactcgacagaatctataagaaggtaaacctaatttattatgaagaaaatcctctgtaatgaaattaggtaaactatgccagcatttgaatccaacatttgtaactccaaaagatgccaaaaaacgcatacggctgataacatgaaaacaactaaatcaacattaattnttagataaatggttatttttgtccctaaatatgtacatagagagtgctcacaaattagtcttcctaaaaatttaaattttagttcctggaaggaaaaaaagtacaacaaatttatcccttcgttaattttcgtttgttaccattaacgaaaaagaacatacatgttagattcatggacgaatntgtcagtactttgaaatgaaaatgacta

SEQ ID NO: 8771 - DNA, 502 bp, Glycine max
  unsure at all n locations
tcatgatgatgaaccaagcaatgttgatgatgccaaaagccctagtgattgattcaagaatgattcaagacttcaagatcaagcatcaagaatccaatccaagattaaagattcaagagaagaaatcaagaagcaacaagtcaagacttcatataggataagtattaaaatattnttttcaaaaaccaaatggcacagttttgttttacaaaaagaattttctcatattttctaagttacgagagtgattactctctggtaatcgattactagttatcagtaatcgattaccagtgaccagtttggttttcaaaatgttttcaaatggtttgcaatgttcgaaaatgattntcaaatagtgtaatcgattacactatattagtaatcgattacaagtgaatctgaacgttggaattcagatccaatcgtgaagagtcacaactgttcataacatgcactggtgtaatcgatacacctttgtggaatcgataccaatgaatag

SEQ ID NO: 8772 - DNA, 380 bp, Glycine max
  unsure at all n locations
agcttgtggagtataagaagtcacagaattgtgttaggttggaaggtaaccgttttgtgttccctggaggtggcacttcgtttcccgaaggagtcgatgcttatgttaatgctctaaaacgtcttcttcccgtgcctttataatctggggatgtcaaaacaatgcttgatgttggatgtggggtgagtcancttctatatcttattatgctttctccttccttggattctctttctttattttctttcgtcctctcttaattgttcgccctgttatcatttcattcgccttcttttagcttgtacttttacatgttactacaagaggagtttcttgagcaacanagacagagaggcttttcaatcaaatgagagcttatg

SEQ ID NO: 8773 - DNA, 281 bp, Glycine max
tgtcaggtttagcaatcgatcttgtttgtgtgtctataaggataggatcaaatatatatatatattaagagagagagagagagacaggagggatcaagttactccaagagtaactcttgtactatatatttataaatgttcaatctatttaaaactttacatgcatcaagataatatcacataacaaattcgaattatataataagttattaaggggagtaagtttgcaagacttaactctatggtgagtgaatttcccatatgtgtatgtcatcctaaac

SEQ ID NO: 8774 - DNA, 448 bp, Glycine max
  unsure at all n locations
agcttgtagccattataagaggatgatcatgttattggaagtatgactgataatgttagtaagtttgtcatattgattgtgaaggaatggattgaccgtatcccggttagagtgtgatcgttaaattttaagagaaacgactattatttattactgatttttgcatgaatctctgaagtatgaattgaatgcatgaaattgaggatgatgaatgccatgtttgattgtgatagccacttanccaaaaagttgaccacatgcttgaatgatttatcctttgcacccagtttgagctgaatgaattattgattgattgaaccctgtgcctatacaatgttatctcctgctaccttgacgtangttgtaggagagcatcatcacaggaagcgtggttcagagcaaatctgtcccaaattcgcgggagtaattatcaaggtaaatttattcc

SEQ ID NO: 8775 - DNA, 339 bp, Glycine max
gagctcacgtactcccacgtagcccttatactcgtttctctaacaccgggtcccatcaatcctgccaagcttccacaacattcaagtaattcaacattctatcatcacaaactaacacagccaagaaaatagggcagaggcagaaaactcttgcccaaacacaaaccaatatcacagcttttcacattcaaaaaccccagtaacattctctctgttccaattctttaaccggtggatcgactcgaacatattactgggagtctctagtacataagtctacattatgaccgctgggatctgctagaaacgtctagagcataatctgtactactcttttca

SEQ ID NO: 8776 - DNA, 430 bp, Glycine max
  unsure at all n locations
agcttgtgaacaaggaagacatagatgatgtgataagagaggtgcaaatcatgaaccatctctcgggtcaatctaacatcgtggaacttaagggtgcctatgaggataaacaatcggtgcatttggtcatggaactttgtgcgggtggtgaactttttgatcgtatcattgctaagggacattacactgaacgcgccgcggcttcattgctgagaaccataatgcaaattattcacactttccattccatgggtgtcattcatagagatcttaagcctgagaatttcctcatgttgaataaggatgaaaattcacccgtcaaggtcacagattttggtctatccgtctttttcaaagaaggtttcccttaattctatttcatatattctctattattntttctctcttccacatctttttttttttcaat

SEQ ID NO: 8777 - DNA, 464 bp, Glycine max
  unsure at all n locations
tgctngagaagcttctatggaggttggatctttgagcttcaatgatgtccttcaacggngattntctaccatggagatgcagcggaagataaaggagaagaggtgagaggaggcaccacccactagggaataagccatggaagaaagagcttcaccaccaagagagtgtcttggataagaagcttagagaggaagcttcaattgagaaaaagagagagagagagggggaggggagcacgcaattgaaggaggaaaagagggagagacattgaactttgaagtgtgtctcataagactctcattcatcacagttacaacaagtgttacacatgcttctatttatagcctaggtagcttccttgagaaacttccttgagaagtttccttgagaagcttccttgagaagtttccttgagaagctagagcttagctacacacantcctcttataactaagttcacctc

SEQ ID NO: 8778 - DNA, 452 bp, Glycine max
  unsure at all n locations
agcttgttataaatataaccaattatcggtccccttagagacttagagaagatatctgccaacttatcattggagaaattgcggtacatttgtttcatattgaggttacgagaattttgattgacaatatcctttatgacttttgcataatgttctattctagtttggcctataaatccttgagcttgacttgattttattcattctttcttccatagactactttcaggttcttatctcttcattttttatttggagtttctctcattctctatcaatgatgtgagcgtgtattgatatctttttctatcttattgattgatattttattggacgtttatgcttatcattttctacatctacaacttcatatttcatcaataaaataagtgttttaatgcatgatgcanattccaaatcacagtgtgctgtattctaacattntaatatat

SEQ ID NO: 8779 - DNA, 389 bp, Glycine max
  unsure at all n locations
tgcgtagcccaccatctcttcatagtagagtatcgataatgtgtctaccatcacgatcatcgtctccctttccatcattgngggtaccacctgngccgccagatccctccaccttttgggcgtgttctttgaaagatccgtccccctttgtgcaaatgttctgtagttgcatcctatccggaaccatatcaaaattgtactgatactgcctaacaaaggcaaccattacgtccttccaagaatggactcgggaagattccaagttagtgtaccaggtaacagctaccccagtaagactttcttggaaggaatgtatcagcaattcctcatcttttgcgtatttccgcatcttctgacaatatatctttagatgggtcttgagacaagta

SEQ ID NO: 8780 - DNA, 452 bp, Glycine max
  unsure at all n locations
agcttgccaagaaatatcatgttcttctagcttctgaagcagtcatcaagcaaattcctcgtcttttggggcctggtttaaataaggcaggcaagatgattgccttgctatttgctcttgattggttctgcgtaaaatatgtgagttctcaaaccaaataatgtcaataagagaaataccgcagaagctataaactgtagcttctgttgtgacacacgcccgattgggtaaaacaatcaaatagaacagtttcagtgtttcctgtttgtgttcttagcttggttccagaactttccttcacttatcttgaagaaacggtgtttcttttggcttctttgagtgtcttttatgatatgcattgtgatttacggagaacttattgatcacattctctgtatttatatccctgcaactntgtcaagagtagacgaatattgcactgatgataatac

SEQ ID NO: 8781 - DNA, 348 bp, Glycine max
  unsure at all n locations
tcttaaattgtggttaatgtttcaacttacacatccaatttctagagcacatgtcatacgataactggtgcgttgaattctctcatgcataatcgtaaaaattggataaatcagtcgattatattgagaactaatgacttaatacacttcaataattggatcagttaaacaagtaacccatattaacttgatagattntaataagatttataacttggtcgattctgacaacccgagttacgttgaacacgttacctttctaaatacaaaaaataacggaatgaattcattntgagattgaggcagaacaatcaaactaagtaaaatgtgcgtatattaccctaccct

SEQ ID NO: 8782 - DNA, 407 bp, Glycine max
  unsure at all n locations
agctngctaacccatggaagctcctataatctcccacactntntagggtgggccattcttggatggccttgattttctcaaggtccacttggaccccatttctaccaactacaaatcctaagaaaactatattatctacacaagaggtacacttctctatatttgcatagagggtgtttttcctaaggactgaaagaacttgcctgagatgtcctaagtgatcatctaggctcctactgtacactaaaatatcatcaaaataaacaactacaaatctacctaggaaatcccttaagacatgatgcataagcctcataaaggtgcttggtgcattagtgagcccaaaaggcatcactagccattcatacaaaccaaacttggtcctgaaaagcggtntccactcatca

SEQ ID NO: 8783 - DNA, 364 bp, Glycine max
  unsure at all n locations
tcatggtgaatcaaaggtgtnttgatgataacaatgatgatatcttaagatgatgacaaaggtgatgacaaanagctcacagatcaatcaaagaacaactcacgagaatcaagaacaattcaagggttcaagataagaatcaagaagaattcaagactcaagaagaaagtttagagtcacgaatcaagattcaaggttcaagatctcaagaatcacgatcaagattaaagactcaagattcaagaatcaagagaaggcttaatcaagataagtatganaagtttttctcacaaattgagtagcacatgatttttctcataacatgtttaccagagagtttttactctctggtaatctgatacca

SEQ ID NO: 8784 - DNA, 343 bp, Glycine max
agcttctgttgttcaattttgagcgtctcgatatactataagcctgaattggacatccgtgtgaaaagttatgaccatttgaatttctgcagagcttccgttgatcaattttgagcatctcgatatattataagcctgaatcggaccttattgtgaaaagctatgaccatttgaatttctcaacaacttccgctgttgattttcgagcgtgtctatatgagaatcgcctgaatcagacatccgaggtaaaagttatgaccatataaatttctcaagagcttccgctgttcaattacaagcgtgtcgatatgcgatgcgtatgaattggagatccgtgctgaaa

SEQ ID NO: 8785 - DNA, 559 bp, Glycine max
  unsure at all n locations
ggaaccctaatttgagatctctgcgagctncngagactatataatactcncgctagcctgatagacgtgcagtaaagacaacgcggacgaatgatctcctttcgacccggagtacgacagtctccgctttatgagcgacgtcaccaacatcgcttccaatgcatcaacggatggtcgattatcctggagccacgcgtacatctcagggactaccagtgtactgatttccacgacgatatatggcgccagccgtggtcaccactgcgtactcccatggccgagcatgatccataaataggacctgagttttatgccaatgcttcggcaacagatgagggcgtgcgtgacatgacatcctgggttaagggtcagagcatcccgatctatgccgacgctattgggcagcttctgagatatccgttggtgttataagacggccacgagcgctagtatggacagatgaggaacctgtcttatggcgtcaactaagagggcatcatccagatggtatgtataccagngcacgattatgcccgactgctgcagaaacngatcattn

SEQ ID NO: 8786 - DNA, 121 bp, Glycine max
  unsure at all n locations
agctntgttctttcataaaatgagaagttctgaacttatcacgttatctaaaaaaccttggggtggatccaagagctccaatcattcatttgcatattcatgttttggtggcatactcacc

SEQ ID NO: 8787 - DNA, 427 bp, Glycine max
  unsure at all n locations
tgatggtgtcgagaagaaatcacatgtatgtcatcatcaatatagtggagaatgtgaatgtatgtatacatgatnttgatgatgtcaaagaagaatctaacaaggctgcttcaaatgataagcatttgcttcaagaataattcaagattgcttcaacaaacaaagccttgtttcaagattcactaaagaccaagccttgccttanaacaaagtgctttcaagacatgcaaggctctggtaatcgattaccaggaagtgtaatcgattactagaagacagggttgagaaatagctgttgaaaaatgttttgaatttgaattttcaacatgtaatcgattaccatatgtctgtaatcgattaccagcaacggaactttggaaattcanattcaagtcataacccttcagatataactgtgtaatcgata

SEQ ID NO: 8788 - DNA, 471 bp, Glycine max
  unsure at all n locations
accgggatccttaagtcacctgcggctgcagcttgcttcacaaatntcccttatttttgatccttggaaccctttaaaaaacctctaggattcctatttataggaaaagggtcactttggggcaattgtagttcacccaagcgagctagagctcgcctaggcgagctgaaacttagtgctgaagcaatgagctcacccaggcgagttggtttcttcaccatgaagttatttagtggcccaagcaagccagaggctagcctgggtgagctagggttcaggaaaatcaaggaaaagacccttttgcctccctttttttggtatttttcgcattcttgatcaaaacactaaatgatcatatgtttcgcactgtaactctgttcaacatcgtaagtcgactagcaaggatcaaaatatcaatgaacgatagtcctcggacgaaatagggtatgacagaaacaaatcttagatatt

SEQ ID NO: 8789 - DNA, 355 bp, Glycine max
  unsure at all n locations
cttcgattcattctatgtgcccgtagtggtccacattgtgcttcgtgcattctttctcgttttgtttactttttataccccctgttgacgtgcttaagccattttacttaagtcatttatcgcttaacttaaaaataaaataaatttccaccgaacgtttgaattgtattatccattaacttcggttaaaataaattccgaccgttcggtcgtgccgtaaccacgttggaaatcaaaaagaggtaaaaaataatataataatcaaaaagacatcttttagtanaataaagcgganaatcaatcggacgttttctctttgcgatttctcattcttaatcgaattgattaataacta

SEQ ID NO: 8790 - DNA, 429 bp, Glycine max
agcttaagatctgcggcaattgaggaagtcgctgcatgtttttatttttgtatgttcttcttggtttccccctgggattcctgtcctctgtaattttctcattgcagtctttaaaaaagaaaggaacgtaggattgaggttctggtcctcgctttgtgctttaaaagatgtgtagtatttgataaccggagccttttcgctcagtccatgggatgccccaagcgcttaattgaaactgaacccgacgagctttcgctaaaaagattattccatttgaaaacactcatgcatacgcatacacatgcatatttgttatcttatgacaggaactggatcgttttaggcaatagtcaaatactgagccaaatccaaagacagagacgaatcgaggtaagcggtaacgcgaccacgatttgctgtgcaatgtca

SEQ ID NO: 8791 - DNA, 419 bp, Glycine max
ccagaaaccatgggagttggctgagatttagaggacctacgtccttcaaagaagacttgttaagatgagcaataagagaggtgatttcaaaagaagaagagttggtgaagattatatcatcaacatacaccaacacataggttttagaggtaggtgtaaatcacatgaaaagagaagtatcactcttggctgaattaaatcccaaggacctcaaagtcaaactgagtttgtgaaaccaagacctggaggcctgtttcaagccataaagagctttgagcagtttgcatactttgtgtttgtcggatgaaacaaagcttggtggttgagtcatatatacagtttcttgaaggtctccatgcaaaaaggcattgttgatatccacttgatgaataggccattgttgagaaaccacaaaggac

SEQ ID NO: 8792 - DNA, 456 bp, Glycine max
  unsure at all n locations
cttgaagacaagggttatgaacctacacgctagcatccaaattcttttggaacaagctttttgtatattttttgtatagttagaaaaatctctcaaagcaccttaaataccttgagagaaaagactaagtacttagattgtacaatcgtttgtaagacgattaagatttagtcaatgtgcaaacaaactataaatatgttgacttatttatagctagcagtggcttgatagaacaaagaatatgtcaagcttggtgtagagcttgagttgtaaaagccaaaagtgataatgacttatacttataacttgttgaagttggtggaacttggtggttaaccaaaagctagtctcaatggtagagatgactagtattttaatctgacttggggtttgaatttgattctgtctganaaactcttttaattntgcaaaatctatttctatcgtctaaatctg

SEQ ID NO: 8793 - DNA, 364 bp, Glycine max
gatgaagacgacagggaccaccgagggggttccaatgagccgcatgagggcgcgttttaggtccttgcctcttggatcctcgtccagctcgtgcacggttgggttcacacccatgccgcagaagagcctcttgatggcgtggcacatgcagcacgtgctcacgctgaatatcaccaccgcgctctccgacgccagcctctctatgcgctccagcgggtcccccactaccgccgccgccgcgttccgaggggccgccacgtagctcccccaccacgccgccgccgctgcttggtaatgcattctcagaagaattttatgtgatgaaagaatgacacgcacaatgtatgaaaatgagagtgagaat

SEQ ID NO: 8794 - DNA, 408 bp, Glycine max
  unsure at all n locations
agctntgagcaaattcaaacgacaataactntttatctcggatgtgtgattgagtcccgtcatatatcgagacgctcgaaattgaatgctgaacctatgagccaattcaaacgacaataactttttactcggatgtctgattgagtcccgcaatatatcgagacgctcgaaattgaatgttcgacctgtgagccaattcaagcgacaataacttgttactcggatgtcggattgagtcctgtaatatatcgagacgctcgaaattgagtgtttagactgtgagctatttcatacgacaataactgtctactcggatgtctgatagagtcccgtaatatatagagacgctggaaattgaatgttgaaactctgagccaattcatacgacaataactttttactcggatg

SEQ ID NO: 8795 - DNA, 338 bp, Glycine max
  unsure at all n locations
ntaacattcaatttcgagcgtctcgatatattacgggactcaatcaagcatacgagatagaagtcactttcgtccgaattagctctgagcttcaacactcaatttctagcagtctcgatatattacgagactcaatcagacatacgagtaacacgttattgccgtgtgaattggctctgaggtttaccactcaatttcgagcgtctctttatattaccggactcaatcacacatccgagtcaaacgttattggcgtctgcattggctcataggttcgacattcaatttcgagcgcctcgatatattacggtactcagtcagacatccgagtaaaaagt

SEQ ID NO: 8796 - DNA, 418 bp, Glycine max
acttgaccttttcctcacacatgtgccatactccccaaaacttattttaaataatatttgaattttgtaaagagataggtaaaatatctattatttgagttatgttaattttattgctttgtgtgttatattttcacatgttttttttttagcaaggagctacatatatagaggtaactagtcaccaacgtgtagcaacaaaatacttgcagcaatatcattaagaaacagaaaatagaaatcgaacaaacttcctatcattaaatacttgtaacgttctgatcgaggccatacccgaatcaaataaacattaaaaatgcagtatctaggaattgatcttaggtcatctcccaacgagcattggtcaaccaaacgttcattacagatagtaataaacaataacgaattgggggggggg

SEQ ID NO: 8797 - DNA, 417 bp, Glycine max
acaatggctgaccggattagtaattcgcctgacgtagtgctctctcacattctctccttagtcccaaccaatgtagcagttgcaacgagtgttctctccaagaggtggaaacttctatggcgctccgtttcgactctcaacttcaaccacagccaccatgacgacaacaaccacgaaacctgttccctctttgctcagagggtgcacgcattcatcctcatgcacgacatggaccaacccttcacaagattctgcctcagttcttcttgccctctcgatcccattcatgtgaacgcatggatttccgctgcaacgcaacacagagtcgagcacctcgacctctctctgggtgtgcggaagaattgccctcttcttgctttcagctgcaaaacctcgtgggttgaaactgtgatgttg

SEQ ID NO: 8798 - DNA, 302 bp, Glycine max
agctatagctggagtcatctttatgattatcaatatgtgaccatggcatgaatttcactcacggattcctggtctctgtggggttcttatcgcttcctctatctaacaatagctcgtctaagctgagcttatacttatagctgcatcgactaaaagatggggctactctgattactcattcacttctccctcttgcctgaaaaatcgaaagactaaccgcctgagtgatcttatgtatcccttcttcctcttacaagacaattcgaaggaccttccgcctgagaatactcatgcttcttccc

SEQ ID NO: 8799 - DNA, 66 bp, Glycine max
atgagcaatatgagaggcgatttcattggattaggagttggcgaagattatgttatcagcatacac

SEQ ID NO: 8800 - DNA, 324 bp, Glycine max
  unsure at all n locations
agcttaanatctagggcaattgaggaagccgctgtatgttnatatttttgcatgtacttcttgttttccccctgcgattcctgtcctctgtaattttctcattgcagtctttaaaaaagaaaggaacgtaggattgaggttctggtcctcgctttgtgctttaaaagatgtgtagtatatgataaccggagccttttcgctcagtccatgggatgccccaagcgcttaattgaaactgaacccgactagctttcgctaaaaagattattccatttgaaaacactcatgcatacgcatacacatgcatatttgttatcttatgac

SEQ ID NO: 8801 - DNA, 337 bp, Glycine max
ccacaaaccatgggagtcggctgagatttacaggacctatgtccttcacttaaaacttgttaagatgagcaataagagaggtgatctcacaaacaccaagagttggtgaacattatatcatcaacatacaccaacacataggttttacaggtacgtgtaaatcacatgaaaagagaagtatcactcttggctgaattaaatcccaaggaccttaaagtcaaactgagtttgtgaaaccaagacctgcaggcctgtttcaagccataaagagctttgagcacgttgcatactttgtgtctgtccgatgaaacacagcttggtggttgagtcatatata

SEQ ID NO: 8802 - DNA, 395 bp, Glycine max
  unsure at all n locations
agcttatccttatggctcgcctccggacttcacccnccatgccaccccggaagattaagccaagccccgactttcgaggggcaactcccaccttatgatgactatcccaggcaagacgatgaggaaggagatacccatcttggccccctgctccacctcaaagatccgtccccctatgaactaccccaaccgaacatagtccgccatatcccggcttcacccacacctacaaaagaatctgttcccttcgcggaagataaggagaagatgaaggcgcttgaagagaggttaagagcagtggagggccttggcaattacccattctcggatttggcggatttatgtctcgtgcccaacatcgtcatcccttccaagttcaaagtaccagactttga

SEQ ID NO: 8803 - DNA, 457 bp, Glycine max
  unsure at all n locations
tgtagggttcaccccagattccgttgtcatatgctaaacttgatcccatatctacttgataattcaatggtagccataaccctagccaaggttcatcaacctccatttctccgagaatacaactcgaacacaacgtgtgcttgtcacggagaagcccccgngcgttccattgagcattgtagggctctgaagtgtagtgtcgcaacctacccttccgcgggagggcgacgcgagactcgcgggatgcgtgttccacgaaaggaatacgcgcggagtcgccaccaacgtttatttgaggaaaacgtccgataaactggaaaagacgcgatctacgaactgtttagtgaaaggttcgggagttgtatctacgcacggcgaacgtattagcaccccacacgcccgtcccaggggacggcagcctttaatcgaatgtgcaaacatgactttgattttatgt

SEQ ID NO: 8804 - DNA, 324 bp, Glycine max
  unsure at all n locations
agcttgtaatcgattacacatataatgtaatctattgccagagcagattttcagaaaatattctcaacagtcacatctttttatgtggttcttgaatggctatcaaaggcctatatatatgtgacttgagacacgaatttgctaagagtttttcagaacaaaaaagtcttatcctcttataaagaaaaattgttttatcctcttacaaattccttggccaaattacttgtgattcaataaggaatttttgagtgctcaaatngttcaatntatctctttcaagagagatttcttcttttcttcttcttcattctgaaaagggat

SEQ ID NO: 8805 - DNA, 454 bp, Glycine max
  unsure at all n locations
tgtcgaattatggcgtacccatcacatgtggtactaggtggcggtcgggcgatggtgcaaaacgattctccacatccacaaatcacgtataacccaccatcccctgttgcccacctccaactgagctcacgtactcccacgtagcccttatcctcgttcctctcaacgccgggtccccatcaatcctcccaagcttccacaacatccaggtaattccacatccaatcatcatggaccaacaaaaccaagcaaaatagggcaaaggcagaaactctgcccaaaacacaactcanaatcatagcttttcacatacaaataccccagtaacattttcttcgttccaattcgttaaccgttggatcgactcgaanattttactggaagtatctagtacataagtctacatnttgaccgttgggatctgctagaaaatgtccagaaacccatatgtact

SEQ ID NO: 8806 - DNA, 300 bp, Glycine max
agcttctggcctatctccctcactcactcactgtctgtcgaaggtatctcccacgccgtgccgccatcctgtacagccatcggcatataagtaagaaccctactttattttgttagtgttaatttcaacatcgggattcttttattttgttgctgttctgtagaattgaatatcagttggtgttgttgttctgtagaactgaatatcagttgtattttgttgttttcgtattttaaaagacaaaccatgtaagatatatcctatatggtcacccttatttttatgggcttagatttaaag

SEQ ID NO: 8807 - DNA, 438 bp, Glycine max
  unsure at all n locations
tctatcaccattaanacaacaacaacaacaacaacaacgccttatcccactacgtggggtcggctacatggatcaacttccgccataatgttctatcaagtaccatacttctatcttttgacactgtactcgagccatacagcgcgttgcttccgggcaacgacctagcattcacattattacgtaattgatccatgtcatagagattcgacaaagtttaacgttggctgtcgaaagcctaacacaaccctctccttttatccgggcttgggaccggttaagaatagcaaagctaccctacgcaggatttctatcaccattaaaacaagtaaaaaaaaataaaaataggtagaactatttggaatcaatagaaagttggggcaaaaggcttatgacatagaggtaaatgcatagaactattattatggaagtcaacac

SEQ ID NO: 8808 - DNA, 354 bp, Glycine max
ataccctcaatctaaccgacctgcaattgttggaggaaatttactacgggcagcgctccacgtatgcaagtaatcaattgacgcttcattgtaggcgactgaaagatgatgctaatgttaacacactgttcttgtcacatcatcgaatcccgtttgttgccctgattgacttattatataacatcgatagaaccccagatggtcaggtaaacttacttgcgactactatgacccctactcatgatgccctgctatattacaatgagatgtggaacatgtcgcgcctttttgtatttagtggctactcaatcacatgttttttctccaattatctttgacattcccggcggatgt

SEQ ID NO: 8809 - DNA, 257 bp, Glycine max
agcttggagaaaagaactagaacatgcaagatatgcgtacactacgactataactgaactagattcttccaagcaagaactcaccaaaataaggcaggattttgatgcagctttggaggcaaagctggcagcacttcaagcagcaggagaggctcagcgttcagtcaaattaaactcggaaagaatcagtgaactcttcaatgaaatcgcaaccatgaaagcatcaattgaacaagtgagacttgcctctgaacaat

SEQ ID NO: 8810 - DNA, 399 bp, Glycine max
  unsure at all n locations
tctccatctctacaganacaaacgtaacttcatcattcaactctgccattctgagctgatttagagtccttttggcatagacagtgaatgcaatagaggtaactattgccataatgaaagaaataatgttgtatacgatatccacaggagtcaagcggtgcttcccatactgtgcgtctgccaatgtctctattaaccgaccactgagagatggagaaaaagataaatctcaagatgagatgttagtttatttaacagaagtaaaaagataacacgttctaagctgatccacatctatatgactatatccatcagaagtcatatatgcttctcaacttctcaattctcattttcatacatgtggagctaacaaaaactcgggtacggtagggaactcat

SEQ ID NO: 8811 - DNA, 445 bp, Glycine max
catgcaagcttccactccagttcccattcgagtacctaatgggtgtgattgtcatacgttaaaaaccttaatacacaatacccttaagctaaccgacaagcaatttttggatgaaatttactaccggcagcctttcacgtatgcaggtaatcaatttcggtttcaatgtatgcaactgagagatgatgctgatgttaacacaatgttaatgtgtaatcatgaattttcgtttgttggtctgattgagttattatgtagcattgctagaaccccagatggtattttaaacttacttgcaactactatgacccctactcatgatgccctgctatattacaatgggaggtggaacatgtcacgccaaaatgagtttgtcggttactggtccacaggataaaatcccaataactttgacattcccaccggatgtaccatggatgaactg

SEQ ID NO: 8812 - DNA, 304 bp, Glycine max
  unsure at all n locations
caacaacttatgaaatactgtcctactgaattggatatatactctgngattcctaaaagaacaataaaaactccaacttcctctactgatatagaaaacactgatgcaaccaaatcttctaccactaagcatgatctttctgataaagatattctatgttatggacgaaaacacaatgtattatgctctattaaaactgttcntatcatattattacatttctttaaattttaaattagcgggagattgttggaaaatatattcttataattcaaaattaaaatatatctttttataaattatg

SEQ ID NO: 8813 - DNA, 466 bp, Glycine max
  unsure at all n locations
agctgtgatntaattntctttcgtaaattccttgaactattntagattaagccaaataaaatgaaaaaaaaaaattattcaacttaaatattcatcttatatttctcattttgttcttttcttgtcgcatcattataggattgcttgacatttttctctttccctatttccatacatcctggctttgaggaagagttttaaggttaaaatataatttgcgtccttataaatataaaaatatttaaaatttatttttgtaaaatttttaatatattttcttccttacaaaattataatatatatcattttttaatttgtacgtaggtttaatttagataaatccatatttacaatgatcactttttatattaattatatgtatataatgaatataacaaaactaaatacctaagtttggattgaaacgaaaaataatgcattgtatcttatgaaaatgaaaaatata

SEQ ID NO: 8814 - DNA, 366 bp, Glycine max
  unsure at all n locations
actanatgacccttcttgtaccaccaagtttccaactcaatcacttttaaagtcctcttgactgagtacaaagtgacttgcagcagtttggtgagtaattaagcactcctctacatgtcaaattttaaaatcatatacatatctaatatgaatttcatattaatttcaggatgtgtcgagtaccatgtactcatttatgaaagctataagattcatacatctgaaattggaaaggactacaaagtgtaagatagtttataattatcataggaagactgcaaaaattagaaatggatgaaataattttgcacaatcacagaattntcttcttgcaactcaaattatagctgagtttccatatgcaac

SEQ ID NO: 8815 - DNA, 489 bp, Glycine max
agtcgacctgctgcatgcaagccttgaacaatatacttgtccttcatttaactgtctttgggcttggcgaccatgctcaacaaagtactttcgacacctactgtacgttgatttcaccaatgttgttatgggaatgttgcgacaatcctttaaaaccttattgatacattctgagaggttggttgtcatgtggccatatcgacgtccttctctatcataagtcatcgtccatttttcctttgaaatgcgatcaatccatgttgctatggctggactcagttgacgaaatttttctaaattttgatcaaaaatgtgcttgcaatgagtgtaggctgcataaaactagttatgaataacaattttaagtatatatgaaagttaaataaacgtgaccatcaatttattatatcttacccaatttcttcaacatttctttttgtttgacattattgaattttcgattgaagttgcttgctatgtgtcgcacac

SEQ ID NO: 8816 - DNA, 404 bp, Glycine max
  unsure at all n locations
ccgcgtntgggagaaagaaaaggtaaggtttactgaataatttgatacccctcttgtctcgtaactaacgatggcagcgttccgatggaagagctttgaggagaacgaggatcaccctgaactgttctttcactttctttgaagttaatgctggaaaaagtctatttgtatcatttggaaagaagtaagcttaagctgcctacgatattatttttaatgttgtgaagattttcttgggtattgcatgagtgcctcatccacgaatgtaaaattatttgtctggctgaagtccttaacaattatttgttgtttgtagtaagttcatcacatacttacactaagacatttatcgcgattgatggagctggaaagcgattacctgatgaagtgagtcccgagacatg

SEQ ID NO: 8817 - DNA, 469 bp, Glycine max
  unsure at all n locations
agctnggttcgaatgactttntaatgaaaaattgttatcaaccgaactaatattttatggtttggtttggttcgatttttgtaatttttacaaaatattatttcactaaaatttataattttttttaatattttgaatcaaattacattaaaaaaattgttaataacaatctatgaaacttattaatatgttaaacattctaaaataaaaattttcaaaaatctcatctatttctaacatatcttaaaaaaatcatatgaaaaaaagtaatatgcattatataagtcttatatacatgacaataaaaaacattgtgaaactcaagtgatacatgcataaaatacataacactaaagtaatataagtattagtacaagtattatggtttgatttgcgttcaaaaacatataccgcaaatcgaactgaaccaatcattttgagaaaaacattcaaacaattcaaaaaaagt

SEQ ID NO: 8818 - DNA, 477 bp, Glycine max
gcttcggccgcccgcgttggtcaatttacaggcgcacatcactaatcttaacagactctgatcgaaatgccccgacatatataaaatgcaaaatcggatgtaacattgtttactctcaaccaattcaagttcgaaacttagtcacccttcaatatatgcatggagactcctcccagcaatctagatcacaaggcaattaatattttgtttacttgaatcgataccaattactattatttacagaattaatcatatgagtatgcatttttaatttttgaaacacgaaatggaattggtgagcaaccgttgcgtggatctgcatggtaggattgctgacaagcgaacaacaggaggatggaaagcgtcgcactttatcataggtactgttatgacattggatagacaatatattatgcgttcaatggtcaaattcttactgatgacaagagttatagcttagtaagtgtaacacatgat

SEQ ID NO: 8819 - DNA, 385 bp, Glycine max
agcttcaaggctaagtcttcatgtcgctccccctatctctaatagtaacctttggaaagaagccaacaactagaatgattgttgtcaggttcattgtagtaaagttctcattgtcctataaagccatattggcataccatctttgaacacattgaaggcattaatttcaatggtccacttgaccatgaagttcctcagtgatgatatacaggtcgaaactttgaaaggagactaaaagaaagctcaggaattttacaaagaatctatagagtagaagacatttgatagtttttttttcaaagcatagaaacaaaggacgtcgagtcctaagaagcacaaagacaaggacattgagtcctataaggacggggacactgagtcctat

SEQ ID NO: 8820 - DNA, 411 bp, Glycine max
  unsure at all n locations
ctcaagctctagcttctttaggaatcttcttaaggaagcttctcaaggaggtgagcttagttatgagaggggtgtgtgtagctaagctctagcttctcaaggaagttttctcacagaagcttctcaaggaagttttctcaagaaagcttctcaaggaagctacctagtctataaatagaagcatgtgtaacacttgttgtaactctgatgaatgaaagtcttatgagacacacttcaaagttctacttctccccctcttttattccttcaatttcgtgctcccccctctctctttctctccctctntcttttcctccattgaagcatccttccaagcttcttatccaacgctcatcttggtggtgaagctccttcttccatggcttattccctagtggatggcgcctccct

SEQ ID NO: 8821 - DNA, 420 bp, Glycine max
ctcgaccgggatccttaagtcacctgcggcatgcaagctttataagcgcgggtttgggagacgaaggtcaagtggtcgcgatatacgaagatgatgttccgagtacattggatttggtacgaccatgccctcctgatttccagctgggaaattggcgagtggaggaacgccccggcatttacgcaacgagcataatgtaaacctttacgggtttaaaagctctatagttgggcctaggctttagagcttttccttttgataaggctttgagtcttttgtttgtgaattcataatacaaggatctttcttcatctgttcctacgtctctacccattctcattcatttgcatgtttacttctttatttctgaaacggcagatccgatgacgagtcccccgaaggtactaatacctgggaccc

SEQ ID NO: 8822 - DNA, 289 bp, Glycine max
tgaaggtgtgtagaacactggtcacgtgtctactatcattgtgataatctctttctctattattggaggcgctacttgagctaccaagattctccatctttgggcgtattcattgaaagatccgtgcccccctttatgcacatgttctgtagttgcatcctatccgatgggcctcttcttcaatggccatgggcctttcctttagatgatccaccttatccatttccgccatagcatgagggtttttaatcgttgtggaatgcaaagggtgtggttgtgggtgatactg

SEQ ID NO: 8823 - DNA, 418 bp, Glycine max
  unsure at all n locations
agcttgcgcatcattggaagctatatgttgcttatgtcttcgttgggcctacagaatgtaacttttgaacttgatgcaaagttatagtggacaagataaagagcaatgtcacactcataacccacctcattcatagctcactattagaaaagtaggattctacatcggttctttaagagaaattaactacatcggtttacgaccgtcgggtagtctattctacaacagttgacaaggaccgtcttagaatggtcaacattctacatcgatcgttgaaggactgtcgtaaaatactcagcaagctgagcgtgaccatcttagaatgtcttgacattctacatcggtcttgtcaaaaccaatgtagaaatgctaattttgttttattttttgtaattggagctacttttnttttgtattt

SEQ ID NO: 8824 - DNA, 306 bp, Glycine max
  unsure at all n locations
ctntaaaatgtcatgtatggctctgctaaataaactctatattataagctactggaaaagtataaggcagcagcatctttggatacaacacaaggacgaagcatagctcctgcttctacagctgatactataagttaaacacaactttgttcaaagcagaggaggtatgtgctacgtgtgaaccatatcatggctgcataagaggcataacttctagcatgtccaactacacatgtcattctgatttattgatgcatagntcctcagaccactttttaccctcttttctcttttttggcactgtga

SEQ ID NO: 8825 - DNA, 401 bp, Glycine max
agcttccttctacacctgataaagaggatgagatagtcactgatcgaggccgtacccaaatcaaataaacattaaaatgcagtaactaggaagtgatcctaggtcatttcccaacgagcaatgactaaccaaatgttcataatatgcttcgttataacagtaatagtaacgattgggggggttgttttgtgaatttaagaacaagcagattggaatacgaaattaatagtattaaaaaaatgttgtttcctctgattcagaagccattctcgtgtcctaggttatgaagaatccgtctataacagttaaccacttaatccaaccctattttaatttactaaacgaaaatcaatttaaggttgtcaatatgtgattaagcaacacatacaccaatttaccct

SEQ ID NO: 8826 - DNA, 457 bp, Glycine max
  unsure at all n locations
cggttntgggaaatagcaccccacctgacgtccacaaggtcttctgacccccgcgacatatctccaggtaccactccgtggtcaacgaataaaagcaggaagtttcatccttctacacttcctcatctcaagcttgtaggattatggggtatccatcacatgtggtactaagtggcggtcgggcgatggtgcacaacaagttatgcacattcacaaatcgcgcataaacccaccatcccctgttgcccacctccaactgacctcacgtactcccacgtagcccatatcctcgtttctctcaacaccgggtccccatcaatccttccaagcttcctcaacatccaagtaactgaacatttcaacaacacagactatcacagccaagagaacagggcanaggcagaaaactctgcccaaagcaccaacacagcttttctcacttaaagaccccagtaac

SEQ ID NO: 8827 - DNA, 423 bp, Glycine max
agcttgtccaaaataaagatgcaggggcaactttcactccagtgctcataatcaagtattgtcatttgagagcaaaacttaatgccttggtctaatgagcttcctgacaggttgacacggcatcatcattcttgaagccaaaacttaggttgactaacattaaaaatgttacgaatgttgttcataatccaataacaaatgagaaagaatgcttactaattccatagaaacaagaaaaagaatacacattcgttcatatttcaaaatctcaataaaaaaacttgccttcccataatatccattttcagttgtattttagtatacaagattatacacaatgcaataatttcagaatatacaaagagaaccccattatgttttacagacctatacaatacccataaagagaacttacattctatt

SEQ ID NO: 8828 - DNA, 455 bp, Glycine max
  unsure at all n locations
tatgagtattattntcaaccaagccacttttgactctagaacaaataaaaagatttgtttaaggttgggtgcacataaacaaggctttcatcttatagacaaatttacaagataaacttattgtctttctctctcaagatttataatgtgttttgaaaggagtgaatacgcaatttagtccctgagattgtaatcattttacatattagtccctaacttaattttaaattcaaaatagtctctatctttacattcgttatgcaaataagtctctgccgttaaaatttaatttcctccgttagtcatgtctatttggcaaacctcaatccatgtaagcaacccaatgtggcangtttgagtccaagtcagcaatctcatgtggtaaggactgaattgaaaaatacgaaagttacgttacaaagaatcaaaaatgaataaacgcattttccccacaa

SEQ ID NO: 8829 - DNA, 385 bp, Glycine max
ggatccttaagtcacctgcggcatgcaagctagtctcgttcgttctgttgagaacaaagtctcaatctgaccttcatggttttcttcgaggtaaccatgattctatgttggttccttgttagtttcagcttgtctttgcatcttttctgactttggaaccaccattgtatattttgcacttcctttgaaaaaccctaaacaaagagactttgtaaacgttatcttttcataaaatgagtgttattttcgggaccttcaccaaaccccggtcacattggcgtgatcggaatatcacaatgatgttccttttctaaaatttgaaacgccttttaccctttaccttttgacaaggattttgactcaaaatattatcactagctttatt

SEQ ID NO: 8830 - DNA, 364 bp, Glycine max
cgaagctcggcagaaagctcgaagatgttttgtgttttacatgcttaactcccttgagtgacatttgtattggttgttatattgagtgtttcatcttagtatcttttgcgcatcatgcatcatcatgagtaagtgagacaaaaacttcctaagttacaaagtttcttcacaaggcgaaactctctatcttaattgattaaaaccttatcgtgattgattacacaagttgtctgaagcttgcggagttatgtctcatacccgcttaatcgattatagccttctcgtaatcgattacacaattgtgtatgagacaacgactgacttattcaagagtctctactttaatcgattaccatgtgatata

SEQ ID NO: 8831 - DNA, 391 bp, Glycine max
  unsure at all n locations
atcttgctggttggttctcaacattgtgaggaatcaggtaacatagtaccctttctttctcacctatcttttatctgtaagaactttgctactccttttaattgttaacaattcttaacttaaatagaatatataaaacactcggatcaataatggtgtgtaatagctaggctagtctaccgaattgcagcaagtaatatagaggtaagaatcaacagtgtggacaaattgcaactaaactagaaactttcatttgcaggtaaaaaattcgcacaaaataaggggaagttcagaaaacagggaaaaatccactatntaatggtggcagtgtcctatntattctaatcttcccttatgcatccaattgcattctcaatgcagaattcaattt

SEQ ID NO: 8832 - DNA, 263 bp, Glycine max
tgagttaagtttagccagcaacacatattcttctactgcaagctacatcagctggtctataaacatgatgtgcatgtccgaatgtgtatgtgtttaattaattcgaaacgcacgagaaatcttaacaccttgctatttcttcattacaccattcacagaatatgttaccactattcattcaatgttgcgatgatatgattaccaaatgggacgaaatgctgtcttcacatggatcaagtgaaattgacgtatggcctttcgta

SEQ ID NO: 8833 - DNA, 178 bp, Glycine max
agtcttgcataccccaatgatccattaggaaattacttgttaaagatagccatgagggtgggctcatgggccagcttgggatagacaagacgctcgtcttactcaaagaaaagttttattggccccatattgaaaaaaatgtacttaagcattgcactaagtgtgtagcttggttaca

SEQ ID NO: 8834 - DNA, 448 bp, Glycine max
  unsure at all n locations
tctatggagactgaatctttgagcttcaatgaggtccttcaatgatgatttttcaccatggagatgcagcagaagataaaggaaaagagatgagaggaggcgatatccattaagaaataagccatggaagaaggagtttcgtcaccaacaatgtgccttggataaaaagcttggagagaatgtttcaatggaggaaaataaagagagagagagagagagaaaaagagagaaggggagcacgaaattgaaggaggaaaagggggaaagaagttgaactttgagttgtgtctcacatgactctcattcatcanagttacaacaagtgttacacatgtctttatttatagcctatgtagtttccttgaaaaactctcttgagtaagttctttgaaagctagagttagttataaacacccttctaataactaagcttacctccttgagaagc

SEQ ID NO: 8835 - DNA, 232 bp, Glycine max
  unsure at all n locations
attaccgcgatcctctagatgaacccgtggcatgccagcttgttccctttaggctttggagtctgctttatcccantaatatcagtatgtctctatctgatatcatctataactattcttctcggcagttttttccattgttgataaagctggttgcttggaatggtgaaagtgctgtaccatattttcttccctttcacattgggtccagtttggtttttttattgggggg

SEQ ID NO: 8836 - DNA, 580 bp, Glycine max
  unsure at all n locations
cttcaccacccctcagaatgatagactntgccattancctcttncnnntccccgcagccgcggtgagcccntgtttacgcgctgtactcacctcnnagctctgangcacatcctctcgccgtatgactatcatccncacacgattttgccgccgcatgttagcctcaaccctacgacgcaacgtcgaggaccacagtgggcacaaaactcgaacggccgctacatgtaatcgcgaacgcatactgcggctcactatccatgccaacacacaactgcagcttgtgcgtacccgagcatgaatcactacacagatgttgctcatacaaacgagcatatcttactacctcactccgcacaacggaggccacttcccaacgaaccagctattacctcctctgatgacgcatggacatatattcctgacccaactacatttcgcccgaatggtcggccacaatgcaccaccgatcacacatgagacggattgggttcgcaccatctgaccaccgaacaaaaggacgaaatgtgagcccacggcatacatggcgtggcgtgcaaagcaacccgccaccggacatgc

SEQ ID NO: 8837 - DNA, 465 bp, Glycine max
  unsure at all n locations
agcttggtctctntntcatttctagtttagttatgaaacatgttcaagtttgtctctgttaagaggattataaaattcccacctatatatgatgtacatattataaaatgcagtgtttactaaaagatgcataacaactacacaatccctgtcactggcctaataataaaattttgaggggatgtctctttgattaatctggcataaattaaaaaaaattgaaagaaaagtataatacatttacagtgtaaatgttttggaagtatcataagcattttgattttagagatcgagaaataaaaaagatatatcagttataaaaatgtgtgtaaaagtaatatagtttactaatttgtcctgtacttttttgttctatgttttaaatagtgattctgtaaaacacaacataacactttttaaagaaagactaaaacaggacagagacatgtatgtctgatgtctata

SEQ ID NO: 8838 - DNA, 360 bp, Glycine max
caaacttggcttacatcttttaatctcataagatacaagtcagtttggttcatgcagtttggttttggagcacctcaattttttaaagctgagttagatttataaatgtcataccataattaattattgcttctattcatgattaagatatacagcagctggttcatcaatcttcaacatttacgctacggagtgcggattggagaggttaggctcaaacttttgcgagggacttaactgcccatgacattttctttttccattaaaatcctttttcatcaatcttcaacattcacgcactaaggattaaataggtttttagtccatataaatatgacttcatgtagttttggtatttca

SEQ ID NO: 8839 - DNA, 461 bp, Glycine max
gtaacaatctcaaaacttctcaacattgtcttaatgaccctcacattttgcattgatgcttcaccaaagaatatggtatgatctgcatatcacaggatactaatttccactgagcttcttcccaccaagaggcctttaaactgattttttttagagcttctctcattagacccgttaatccctcagccacaatattgaacaggagtggggctaacagatccccttatctaagtcctctttgagggaaaaattctgctaaaggactcttattgatcaatatggagacaaaagctgatctaaaacatcctgtgacccaagttatccactttagggtagaatcccatcctcctacgcatatataccagaatatcctcactaactgaatcatgtgccttctcatagtcgactttgaacaccaagcagctcatatcacctctcttcacttcctccacttcattggc

SEQ ID NO: 8840 - DNA, 465 bp, Glycine max
  unsure at all n locations
agcttggagatgagggaggattcagagggagattccatccgcagagggaaaagttcaatggatccaatccaagaacaagcagaaagaagcgcgccaacaatccactttcatttcaaacttttggaaatggagcggagcctagcatctataacggtctattttctttttttcaaataaaaattatatgagatttgttcgaggaaaaaatacaatactatatgcatatatactcattattcattgttggcagaaaaaaaaatagcatgcatttttaagtataatgattnttttcaccgtaataaaaataaaaatattacgggaaaaaaactataaatattctattttcgtctaattaaaaagtattctaagtgaggaaataatcaattgtcatgtacacagcctagaagatgaacatatataggtgtngctctaataaaaaaacactccaacataataaatctctcg

SEQ ID NO: 8841 - DNA, 585 bp, Glycine max
  unsure at all n locations
cttcccacctacatatcctanttctgtgtaatttttgattgaacttaccanccctcgccgcgcccgtgagcgtgatgacgccctcgtacnnacgcgccaccctctaagacatacccatcgagcacatactccactcacacgtcggactgctctgtacccagcttatttactgctccttaccatccagagactgcttataccgccttcaacatgccgaaccatattttatgattgacgtgaggcgattcaaacaattaccatatctcgctagtcccgctgctcggtggcgatatgatacataagaccaatccgtcttctaatacttctggaacacaaccgaatgcttaagcctataacacccaacaactacatttgactcgtcgcagctttaagcccataattttcaatctctgtcttgacacacaatctcttgctatgagacctccttgactcaacacgtcgtagaccctaacgcctctaatgcagacgccacccattcaaacccatgcacaaccgcgctcctagtcgagcatatcaaacaccgatcgctttagaccatggatctaaaacactcccgcgctcccc

SEQ ID NO: 8842 - DNA, 385 bp, Glycine max
  unsure at all n locations
gcttgccgccatggagtnttccgactatgctcttgtgtggtggaacaagctacaaaaagagagagcgagaaatgaagagccaatggttgatacatggacggagatgaaaaagatcatgaggaagcgatatgtgccagctagttactcaagggacttgaaattcaagctccaaaaactaacccaaggcaacaagggggttgaggagtatttcaaggaaatggatgtgctcatgattcaagcaaagattgaagaagatgaggaggtaactatggctcgatttcttaatggtttgactaatgatatccgtgatattgttgagctgcangagtttgttgaaatggatgaatttcttcacaaagcaatccaagtagagcaacaattaaaa

SEQ ID NO: 8843 - DNA, 358 bp, Glycine max
  unsure at all n locations
gtacttcaatattntccacatcatcaacgatcttattgaaattatccaattgctcagtgactgttcttgattctatcatcttgaaggtgtacagttgttgcttcaagcatagccgattttccagagacttgtgtcatttacaaggattccagtttcagccacattgaggctgttgtcctttctcttgcaacttctcttaaagctttatctctaaggcatagtatgattgcacttctggctctatcaatcatttctgatttctcctttgagcttagagattcagacatcctttcttcttctttaagagcttctgcacaaccatgttgaatcaagaatgcttccatcttgatcctcataa

SEQ ID NO: 8844 - DNA, 379 bp, Glycine max
aagctctactgagtctgattataatcatctacctccttaatgcaactatagaaccctacctgtaactatcttcacttgccaattcaatgaacacccgaaccccaatactcgcttgcttggcaagaggcctggacataccctctttcccttcttattccactcacccacaaattcacttccgcgcaagcttctaccctctttaaaaagcttttcaaagtttgaatctttatcacaaaacaacaagacccagaacatttttttagcaatgctgtgaccaatgattgagtagcgaagattctgtgatctgtcagcaatggcggtttgcactttgaagccgcagaagccgaacccttacgcgctttggaagccgaagccgaag

SEQ ID NO: 8845 - DNA, 517 bp, Glycine max
  unsure at all n locations
agccctccgcgcgtgacccctgatgaacgcgctgcatctacgcacactctagaacactctagcctgttatcatgaaatctcataagatacatttatcatatggnatatgcattacgatgtggcggcacatgcttaaattgcggctgtcttacacacatgaatcacattggatcattaaccattaggaggaattcacgattaagatatacagcatctgagaactcaaactatcatcttagcccgtataggatagccgataggagatgtttggctcaaacgcaaggcatgcacccactgtcaaaccatgatttagcccctctattcttaatagcgaccatcaaccccttggctcttaagaatatatacgtttatactctctattattcagacgacacagtccgccgcccactctctaaaataggcgcactggtcctcgtttcacgttcagactcgcctttcttcgtgtattcgtctatgactacactcgcaggtgttcagtattcttaaagacaacccc

SEQ ID NO: 8846 - DNA, 392 bp, Glycine max
  unsure at all n locations
tgaatgtgttactntgacactctctgatgaggaatacaccatagtccatagctctagaagcgccacacaaatgtggaacaccttagccataacatacaaagggtgctcacaggtaaaaaggaacaatattaaactaagactcctaacacataagtatgagatgtttagaatggaggaaggcgcagacatacaatgtatggttgaatgcttccaaaccattttaaacgagcttacagcatagtgtagaactcttgacaattatgataatattgataaaatactaagaagtttatcaagaaagtggagatcgtacgttacaactttaatagctataaagaatcttgatactctgtctctagaagaatgtagtggaaccttaaaggtcatgaaca

SEQ ID NO: 8847 - DNA, 337 bp, Glycine max
  unsure at all n locations
gccacctgcngcatgcacgctacgatggcgtgatattatatacatgtctgtcatcatcaaaaagggggagaatgtgaatgtatgtatacatgattttgatgatgtcaaaagaagaatcaaacaaggctcatttcgcttcctgattaatacaagattgtttcaacaaacaatgctctgattcaagatttcttcaagatcaagccttgcctcacaatgaaaggtttcaggtcattctaggcacatgttatcgattaccaatacatgttatcgattaccaatggtttgaaagtgtgtaatcgattacacatcatatgtaatcgactaccagagaggattt

SEQ ID NO: 8848 - DNA, 459 bp, Glycine max
  unsure at all n locations
tgcacgatgttaacttacaagaaaacaagtttaatcaaagcattatataatatttattcaacttagaaaaaataaggacaaatgggaaaagttaacttatagtttattacaataaaacctaggtatccaacatcaatcatcatctaacacgaaattcaattactgatatgcatagaattggatgatcccacaccataatacatataatccaatacattctgatttcatgaattcagtccaaggaaaaccagataacaggacattaacatcaataaaatatcttttatttatctccaaggcctagactccaaggagtccatcaggacctctctctcctaattcaggtccaacccagagaatattntaatatacagactctatctatgaactatgcaatacacacaactactcaattgttttcaaaatctcaactattttccaaaattatattaacttatc

SEQ ID NO: 8849 - DNA, 354 bp, Glycine max
tgtgcctcttcaggtctggaatgtgaatgtagcatatagatctaaatacccttatgcgctttgctgatggcttctttccgttgcaagcttcaattggagtcttgtcgtttacagacttagttggacatctgttgagcatgtcaacagcatcagagactgctatagtctagaatgcgttacgtagattcgttctcttgagcagtcatctagccatctccataactatgccattctttatatcggacactccatattgttgacgagaatatgccactcgaagatggcgctcaatgccttaatcctcacaaaatgtgtcaaactcgcgagaggtgtactctttgtccaatcacttct

SEQ ID NO: 8850 - DNA, 315 bp, Glycine max
cttgcactattatatttattttggtaacagtatatattttgcctgaggtctggttattacgatgaagcaagaaatgttgcccaatcttcacgtgcttcacatcaatttgctcctttggtacatactgtggtcactacttatttactaatttatgatttaatctttcttaataatttacttatttctgacagctgacagagtggattaataaaggagggatggtaccagaagagattgcagctgctgcatctgatgaatgtgaaagaatgttgagaactggtgaccgggtaggtcgaactgcatatgacaagaaaa

SEQ ID NO: 8851 - DNA, 426 bp, Glycine max
tcttgtatattgcagatacaccaattccttacttgcacttatctctattggcttgcttcactctctgtcattccctgagacactctgactcacttttgttctgaactttgaatgattaataaataattaattgttaactaatgttattaaggcattaattacaaattaaaaagaagtgttttaattgtaatgatgtcttatatacatatatcatgttcacctatatacttatttgtagaatgcaactattcacatataaattattgtgcgttcaactctacttaattctgtaagatcaatgtcattcaactctacttatcatttcttttatcacctagatagagtatcatatcacaataaaaggtgccagcactatcagcagtcccacacagctcgagatacaatcaactaatattcgctactaac

SEQ ID NO: 8852 - DNA, 435 bp, Glycine max
tgtttttcaaacgggtaaaaggctcacattcactttcttctacatcatattcaaacttgttcaaataaataataaagtcatctcgactcaaagaaggtcatctaagtctcatacaattaatatataacctatatcctaatgtcacatcctatcagagcgtggtgttcccgtgtcctctagcatgaggttcttcatagccaaccacctattcatctgctcccccgaacacaaagtttaagatcatcatatgatccaaacacaaacagcaaaccgggagtgagttatcacatttctaactactagagagaaacaacacaacatatagtagccaaatacaatttacttagcatatctcacattatttcatcactgtgtcattcatcaatcacacttttcatccatcaatcacacgtttcaatcattgatcactataca

SEQ ID NO: 8853 - DNA, 561 bp, Glycine max
  unsure at all n locations
cgccccccagcgtattgatcgttcatgaacgccttgatancactcgcaatcacgagacactatagaatacctaagcttgtctctgatgtcgacgatatatcgactgatgatgatgacgatgtctaatgggcgaantatggcgatgatgattacgggtgggaataagcacgccgcctacggggcctacgacctgttctacataaagtttgcctggactgacctatttaatacaaaaggttgaggcgtacgggctttcttcaaacagtcttttaaacttanaatcagcatcagcgctctataggcttattaaacnaagtccttaatacgcnnctgattagacccacgcccactatatatcccatatatacctcatattatctctttctctcgactagcatatatgtgcccttgcattgaacacaacacaaggcataattaatatttttttgttgaaactaacaggccttgattacacagtactgctctatcactncattcctataatcaagtaagacattaattaccacttaactcgtactgagtcatgtgttgactcgcgct

SEQ ID NO: 8854 - DNA, 361 bp, Glycine max
  unsure at all n locations
tgcttctaaactttatacaagaatgaagctctgataccacttgttagacaagtggcctcagatatcttaagaaggggggcattgaattaagatatcacaatcttttctaaattaaaaattctattttgattttaacccacatcccaagatttctttcaaaaatgaactcctaaataattatgcaaattaatcttactgaatagaaacaataagcaatatacaatatacaataaaagagtttaagggaagaaagattgcanactcagaattatactggtttggcacacccttgtgcctacgtncagtccccaagcaacccgcttgagagttccactatcttgcaaaagtccttacaagttct

SEQ ID NO: 8855 - DNA, 406 bp, Glycine max
tctacttatgtggcagggcgggcttccttcactttcttgtctccaacgcgagctctgaccactgttcttccttcccgcgatgcttcttttcatgtccgcctgagtgggcttatagcctaaaccatacttcccacgatttccttgggtttttatcaggctagttatgccgccattgtctttgcctaaacccatcccgggttcataaccgttccccaacataactcgggccatcattaccgccgcatcggacagacaaggttgcccaaagagggagtccacggaggaaatgctgaccacctcaaaagactggaaagcgcgttctaacgattcttctgcggcttccacataaggcatggaggatgggcagcttaccaagatatcttcctcgcctgacacgatgaccaag

SEQ ID NO: 8856 - DNA, 215 bp, Glycine max
ggagcgattacgtttacacgatagtctgtataaaacaaacaggttatgcactgtagatgtttcttaccttacaaacaaccttcctacttctacatgatgatgcatgatgcacacataaatagattacgactacaaggcagcaatcaatacaaacgccactccataagaagctttcgcctctactttgcgcacacctttttaaaacttaatcttca

SEQ ID NO: 8857 - DNA, 234 bp, Glycine max
gcttcttatccaaggctcatcttggtggtgtggctccttcttccatggcttattccctatatggacggcgcctcctctcacctattctcctttgtcttccactgcatctccatggtggaaaatcatcattaaaggacctcatagaagctcaaagatccagcctccatagaagccccacaagcaagcttccatcacaaggctacgtgacacttatgcatgccagcccggacatgt

SEQ ID NO: 8858 - DNA, 130 bp, Glycine max
tgcaagctttctccatattttcctataaatagggggtgaagtgaagggaattaatgttcagccctcctggtaattcgagatcacttgaacttaccgaaacacattatttccgcgcacaaaatccaagctg

SEQ ID NO: 8859 - DNA, 160 bp, Glycine max
  unsure at all n locations
gcttcatgatcgaatcaagattgattcaaagaagttntgatgataacttaggtaatgacataaagctcaaaggtcaagaacacttcatgataacaaagatgatgatctcaagaatcaaagaatgagctcacgactttcatgattgaatccagaacacttc

SEQ ID NO: 8860 - DNA, 183 bp, Glycine max
aagatcacttcatgataacatagatgataacattcaagaatgagttcaagattgagtcaagaacacttcaaggatcaagagcacatttgatttcagaatcaagaattaagattcaagattcaagaatcatgattcacgaatattcaagatcaagactcacgactcctgactcatgattccaga

SEQ ID NO: 8861 - DNA, 151 bp, Glycine max
gattctatagtggaccacagcagtgcgtatcatgtaatatgctttgtcttccactgcatctccatggcggaaaatcatcattaaaggacctcatagaagctcaaagatccagcctccatacaagccccacaagcacgcttccatcaaacgg

SEQ ID NO: 8862 - DNA, 479 bp, Glycine max
  unsure at all n locations
cgtccatatacgcactgttttatcgcactgcagacgctgaccacacaggataaacacacatatcgtacactaacacatctttattatctaggncacatactcaaagcaatcatactatactacacataataggtccttcactacccatgctccacctcatcatcgaatgtctcagcaactcttacttgatactttactctcccacaaacttctcctaccacacttacctgtccttctcaattataatattcacctcacctcttcaccattctacctacccgctactctcacattctcactaatcatcccttgtccctatcactcactctctttcaactcttccactctattctctcatacccaacnactcacctctcctcttcgttncacctcctgctccctctctcggttttattccctcatctatcatcccttcccacctctccctatcatcccccacactttctacgctgctcatt

SEQ ID NO: 8863 - DNA, 200 bp, Glycine max
  unsure at all n locations
ataacatccacgctactggcacttatgtacanacttaatattgcaacgtgcagtcatctcactatataactctagggattccactgcatgtccatgccggaaaatcactcattaacggacctcatagaagctcacagatccagcctccatacaagccccacaagcaagcttccatcaaaaggccacgcgacacttattca

SEQ ID NO: 8864 - DNA, 423 bp, Glycine max
agctagaagattccatatggatatatcatcactgtagattccaaccctctgggtatgtctacatttctagttagctcatggctatgaatggctaatcttcctagtacggcgattatgatgtaacctaccatgaaccccttttctgattttaataagattctcgatgcattttagttaattgattctctttttaatcttaatttttatttggaaatggtcattctaatacataatcgattgcatagtagtgatcatctacatataattggtagaattaggaacaaagtgtttcataccaaactgcatagccaaactattcacgttatctttggtgggttgattacgaaattgattaatcaccctcatcattgttcttaatcccttcgtttaattcaacacctgcatgattaattgaggattgct

SEQ ID NO: 8865 - DNA, 255 bp, Glycine max
ccttcaatgaatgtgacttatctctttattatgcaaatggagaatccgattcgagaacaaatccttctcaagagggagagaatgatgaggacatgaccaagagcaagggcaaggattcacttgaacgacttggaggacctatgacaagggctagagcaaggaaagccatggaagctcttcaacaagcgttcgccatactatttgaatacaagcccaagttttaaggagaaaagtccaaggttgcgagtcgcatca

SEQ ID NO: 8866 - DNA, 182 bp, Glycine max
agcttgaggagacgctaatatagttcatgcaaatatccatgtccaactataggagcatggagtcttccatcaagaacctggagatacaagtgggacaattagccaaacaaatggctgaaagacccactagcagctttagagccaacatagagaagatcacgaaggaggaatgcaggtctgcg

SEQ ID NO: 8867 - DNA, 135 bp, Glycine max
cactatgaatactcagcttcatcagtgtaatcacagcaccaaagctcatagtaggcgctccttacacctccattaattctttgctttaccttctcttccattgctgtctcttcaatctatctccttgcatctcct

SEQ ID NO: 8868 - DNA, 250 bp, Glycine max
agcttctagtttctatttctagaccaaaatccattattaacatctaggtcattaataagttgaccattttttgaccagagaattttctatgaattatccttatcctttgtagactttaacttaaaaacttaagagattaaccatgcctaggtatcctatggtaacatctaatctttttaccatctttatagcgtaaaaacactatctaatcgcactacccaataataatactgttcaccccacacacatg

SEQ ID NO: 8869 - DNA, 221 bp, Glycine max
tccaagcttaatttgatgatgccaaagactcaagtcaagaattatagattcaagaatcaaagagtaattcaatcaagaatcaagattcaagtgaagattcaagaagaagactcaagatatgcaagaacttcaagaaaagcatcaagataagtataaaaagattttttcaaaagaaaagaggaataacacaacttgtcccaacgaattctttacagaaacac

SEQ ID NO: 8870 - DNA, 436 bp, Glycine max
cagcttgatagggaggtccatcgataacagttatcattatgcatagttgacgctcattgtgaggactaattagtatctaggagatctttatattaggtcagtacaccgcattcaatcataaataattatttatgataaactcatgaacttctataacaattaacttaaaaatgataggagtaataattctcatattgacgactatgtaaactgttgcgcagataatgcatgtctattaagctccttttgaaatcttaggggattattttaagatatttagtgactctaatttactgaaggcatatatttagatttaaatcttttatcactctcatacaaaataatttttcaaaagacaagaaactatgaatgatgtgttatataaaaaactaagaagaatcattcaaaggttaataattattcaaatctaatatca

SEQ ID NO: 8871 - DNA, 373 bp, Glycine max
agtcaaactaacgtattgattatatactaacaatttacatgtttggtaacacacacatgatctgtgacacatgggacagaggtggtgttatgggtcagcacgaataataaatgggggggtattcctgtgaactgtgtatgttgtgagcatggataaaaaatgagattatatataatagttatctagttgctaacatgactgatttttatacaaattttacacatgtatctttttgctctcaaagttacttcgttctaatacttttcatgtaagtgaatataatgagataagtctcacatcctaaatcaataaaaatattttcaaggtcgcgtctgaaaataaaaacaacaataagtttcttgaaatggttaat

SEQ ID NO: 8872 - DNA, 130 bp, Glycine max
agcttgcttctacaaattcttcatctttcttttgtttctttggctgagaagacccttccatagtgtcataccttaatttcgtctgaggactatcgatcgttgatcttttgatcctcgctagtcgacttat

SEQ ID NO: 8873 - DNA, 332 bp, Glycine max
ttgagccaatatcttgactcatcataaaccttgatccagcgtgtgaatgccgatccttaccctcgtatgcacgacacggaggagagtgaacattttccacaaaggggattgtgatcgcaacatggttcgctcatggtgcctaacacatgccactacgaatgtactgtgaagtttcacgctccccctcttcttgtttctgctttgcagacgaacactcaatgatgaccaaacatgaaaaccaatggtatgcaattttgcagatcaaaacgtcttgttgaccgcatatgcatgatgatgccatgactcatgcaaaatgtgagcctggaatatga

SEQ ID NO: 8874 - DNA, 472 bp, Glycine max
  unsure at all n locations
cgctgcatgcaagcttctacanaaatccttattaaagaaagacttcttgaaagggaggaccattatttactgtgaacaatttgctcaattgacaacaaggttagatcaaatttgttactaacaatctttatattatgtcattttcaatcaatcaattatattttttaattttctttaacacaggtccatcgtctacaaatttattctattgggtggggttctataacacataaactcaactttagaaaatgataaaaagagaatgattatctcaaatgatacaaaggtaatatagtgagattattttaaaatatttatgtactctaatttaataaatgcatatatttaattttaaattttctatcactttcatacaaaataatttttcaaagacaagacactatgaatgatgtgtataaaaaaaactaagaagactcattccaggttaataattattcaaatttatatcatt

SEQ ID NO: 8875 - DNA, 433 bp, Glycine max
caattttggacacacattttaacctttctgatttatttaagacatgaatcttgttccattatattcacttatatgaaaactatgaaaaccaactaatgtttgaaacaaaaagaataataaatatggtgaaaatcatgtgaaaagtgagtgtcatgagcaattagaaaaaataaaattagatattttagttatctagttgctaacatgactcatttttatacaaattttacacatgtatctttctgctctcaaagttagtttgttctaatagttttcatgtaagtgaatataatgagataagtttcacatcctatatcaataaaaatattctcaaggtcgtgtctgaaaataaaaaaaacaataagttttttgaaatgcgtaatgtgtcattagtaaaataaataggtgaccatctaacaactttaaaaattag

SEQ ID NO: 8876 - DNA, 425 bp, Glycine max
  unsure at all n locations
ttgaatttctcaagagcttccgttgttcaatttcgagcttgtcgtcatattatgcgcccgaatcggacatccgtgtgaaaagctatgaccatttgaatttctagagagtttccgatgtttaatttcgagtgtatcgatatattataaacctgaatcggacctcagtggtaaatgttatgaccatttgtatttctcaagaccttccgttgttcaattctgagcgtctcaatatgtgatttgctcgaatcggacatccgtgtgaaaagcaatgaccatttgaatttctcaagagctctccgtgttcaatttcgaccctctcgacatattatgcgcccgaatcggacatccgcgtgaaaaggtatggccatttgaatntctcgagagcttctgatgtttaatttcgagcgcattgatatattataagc

SEQ ID NO: 8877 - DNA, 386 bp, Glycine max
ctcagctataatatatcgaatatgaacaacggaagctctcgtgagatttatatggtcataacttttcacactgacgtccgatacaggtttataatgtatcgatacactcgaaattaaacatcggaaactctctagaaattcaaatggtcataacttttcacacggatgtccgattcgggcgcataatatgtcgagaggctcgaaattgaacaacggaagctctagagaaattcaaatggtcataacttttcacacggatgtccgattcgggcgaatcacatttcgagacgctcagaattgaacaacggacgctctagagaaattcaaacggtcgtaacttttcacacggatgggcgattcaggctcatcatatatcgatacgctcg

SEQ ID NO: 8878 - DNA, 455 bp, Glycine max
  unsure at all n locations
agcttgcacactcaaagggacatctcacctatatctntattaaaaactatcatgtacatctgtccattacacaaaaataacaccatctaagcaaacttaatacttctatagtcatgaccttttatctaagtaaattattatatttatttctcctaatgatatagagatttctccattcccatctccacaatcaatttccctccctccggtttcctaaacttgacaccctgtcttttatggctactacaaggttgtataatctagtatacttcctatatgtgaaaataaaccacttccacccaaaggtcttgacaaaataaaagtatcccctaaccccgcaacccccacccaccttctaacaaactcaaatgccagattctttcttccctctcatagntactctntgatataccgtatcacaattattggtgatttctcttccttctgaaccacca

SEQ ID NO: 8879 - DNA, 439 bp, Glycine max
  unsure at all n locations
gatgcacggaanatgtaattatgaaattgagatgcccgaagatacaccatttcctagttaaccatgcattaggtaccatgttcaattattttgttttgttgatgtgtgttttttttttagaaatgggtttatgatcccaacatggttggctcatggtgcctaacacatgcaactaagaatgtagtgtgaagtttcacgctttccctttttttgtttttgttntgtagaggaaaacgcaacgatgagcaaacatgaaaacaaatggtatgcaattttgcagatcaaaaagtttgttgaccgcatatgcatgatgatgccatgactcatgcaaaatgtgagcctggaatatgataacggacaaatgcacgaacgatatgttcattatgatgttatgaagagatgcttatgcgatgcatgatatgaatgcattttacggaca

SEQ ID NO: 8880 - DNA, 453 bp, Glycine max
  unsure at all n locations
agcttcttgatataaactaggcattaatcttcatctaataacttaagatcctttgatagtttttgtgtatattgaccgactgccctttcttttacttgtttaaaaatatatatttgatgtttgcatgcacatttatttaatgtaattcttttgatacgtgtagatagagaaaggtgcatgctacatattgtttaaaaattttgaaagcccagtaatactgcatgagaaggatgtaggtcttgaaattctaagcacaggtaatggttaattcttcatgattaacatcttgcacgcaatgtgatattnttctatctttcatgttctatgtctgcatttttacaatatttatgctggtctcanatgtagttgttcaggagttacaagagcaacatggtgctaattctaagtcacttaatgtagcgagatgtacatcttttaataaagatgggatca

SEQ ID NO: 8881 - DNA, 434 bp, Glycine max
  unsure at all n locations
tgaagaggcgaacaaaaaaagaacttaganaattgttcagttgttcactcgctaagtgcaacactcgcgctaagcgccaagtcttcacgcgctaagcgggccctttctcgcgctaagcgcttagacccctgattagtggctggatggtaacgctaaacacgccttgcttcgctaagcctaattatctctctggaatctgaatttatcgaattgggcttaacgaggtgaaaatctgtggatagcgctaagcccaaatgcctctatggattttaatttctcgcattgggcttagcgaggtgatgcgctaagcgcaattccctctctattttgaaattctttggaatagcgctaagcgccggtgaagcgctaagcgcaagccatcactgcatggaggagcatgtntatgcgctaagccccacctttggcagctaagt

SEQ ID NO: 8882 - DNA, 395 bp, Glycine max
  unsure at all n locations
ctgcggcatgcaagcttctatataagctgaaccattttatcaatatacacaagttgagttttattcagagaattagagtttatctcttttatcttagtgagagtgattctcctaaattcttgagtgattcaagaacaccctgactgtatcaaaggacattcacaacctttgtgtgttgccctcgctggaaagagtgattctttccttcctttcatcttcacccttgttctttcaaaccacaattccagaaaatccacctctgcccagaattatctcgtggccataactcccattntacgcactcaaattaagtgattcttgagcctaaattgaatttcaaaacgagacctttcacctcgttttggaatcacctcatttggagccctgtagcttca

SEQ ID NO: 8883 - DNA, 315 bp, Glycine max
tctgaataggacctccgtgagaaaggttatgaccatttgaatttctcgagagctttcgttgttcaatttcgtgcagctcgatatgtgatacaccagaatcggacatccgagtgaaaagttatgaccatatgaatttcttcatagcttccgttgttcaatttcgtgcatgtcgatatgtgaagcacctgaatcggacatccgagttaaaacttatgaccatattaatttcccgagagcctccgttgttcaatttcgagcgtctcgatatattaagcgcctgaatagcacctccgtgtgaaaagttatgaccatttg

SEQ ID NO: 8884 - DNA, 284 bp, Glycine max
ctacatacaacacaacgtattatgcgcctcaatcagacgatgcgagcctacaagctcgacaatttaaattcttaaaatacatcgcttgatatcattcttgtgcgtgccaaaataggcctatcataatctagcgtgggagagaatataacacataaactctgctttagatacctatctttattgaatgactgtctcaaacgatacaaaggctatatactgagactatatccaaaatttgatcgcctcttatttaataggtgcatatattcgaatttaaatttttt

SEQ ID NO: 8885 - DNA, 508 bp, Glycine max
  unsure at all n locations
gcccgcgcgcatgagacctgattagcgactcttgaagctccgcttaaatatatcgcttgtgaacaacggaagctctctagaagatttcatgctaacatcattgctgctgaagacggcacatgtgtgctacgcagccatacactcgaagagatccatcagaaccgctctcaaattgcatacggcaatatcttgacaagaggattaccgacaacgtcgcacattatgaatggaggctcgaaatagagaccggtgaggtgagacatttttatagggttgtgacacacgacactgttggatgaaagagtaaatgttcttcataattcacgttggtgaatatcctgacttcagattgacatcctctctcggtatgcatatgaacgtggcgcggatgagcataaaatagacaataagtcctttgatatggacaatgagacactccatanaacaaatgggaattctagtaacgtggacgcactcatcgctgaatataccataacgtcgtacgggg

SEQ ID NO: 8886 - DNA, 400 bp, Glycine max
  unsure at all n locations
agctntaacctcatcgtctctcacagtctttagatttgggagccaatccaatccttgtgttcggactctcagccacttatgatagccgccgatgatcccattactgcttcccctaagctctctgtcctttcttcatgccgcatcccatgccttgcgaactccttggagtaccctcgcgttgtggtcacttaaaccccgtgcgatgaaaggcgtgatgctttcgtctgatggcacttctctcatggggtagccaagctgtcttatggcaaggacgagattataattaatacaaacccttgttcccatctagagaacatttggacatccttcgcatgaagatagaatcctgattcttccttccttctagcgagggaaccaattaacagacgccccttcatgc

SEQ ID NO: 8887 - DNA, 343 bp, Glycine max
  unsure at all n locations
tctgccccaattntctataaatagggggagaagtgaagtgaataagggttcagccccttacgcacttatctctctttcgaatttgcttggaaaaattgtttctgtgaagaaaatccaagccgaggcgcttctgaaacgttttcgtaacgtttccgtgaggaatttctcgaaggtttcgaccgttcttcgacgctcttcattcgttcttcatcgttcttcgatcttcaacgggtaaatacctcgaaccaagcttttcgattcattctatgtacccgcggtggtccacattgtgtttcgtgtatttntattctcgtttcatttactttttatacccccctttgac

SEQ ID NO: 8888 - DNA, 363 bp, Glycine max
  unsure at all n locations
agcttaatattgaaattatattntttntattcctttaagataaaatatgtcaacttatcttcaataaaataaaattagcagtttttatagcattaatttttattaagttaaattaataatgctcaaaaatttcatttgttcagctagatatcaacatagatatgctgcaatttgcaaatttcttatagcaggtgtgcactagagtgtgaataataagaattattttgtttgagaataacattcaaagatgctctcttattttttttagctctgataaggtgtggtcaagctgtgttttcaattttctttcattcctgtcagctctggtttttttaggaaaggtggctcatttcattctttaat

SEQ ID NO: 8889 - DNA, 432 bp, Glycine max
tctagaagaattatcggctatctgcttagtcagctatcctacttgaatttccaaattatttatagtagactttgtgctcatgtgatttgacattgcaacttgcatgaactgaaccaaaatctccttcagcttgattgttctctcataaaggctacgcccttgattttaaggcctgttggatggtcctccttggtctttattgaattggtttccaggatgagacctccactgcccttgattatgattaaaattggaaacttgctagtaacctcgcaaatcacctgcattaaatcctggtctgtgctgattcctcatataattcacctcctttgcagcttcattaagagatatacaacaatcagattcatgagctcctccacatatgctacaacctccaacctgcagaactactgaatgtgaacggtgagttgc

SEQ ID NO: 8890 - DNA, 325 bp, Glycine max
agcttcccacaaccaaccccaagagtcgagctctcccttgaagcattgtgtcacggattgtagaccatttctcaacctcaacttgtggttcttctgcgaggacttggagtgcaaagaatgcacaagaaacaccaaaatacatgggatacatgctttcagtgtcactcttgttgtcacacccatctctatccaaaacagaaacttccttctcacccattcctgtgagatcggattccctggcacctctgcaactgaaaaccaaaagttaagaaacaaaaccagcaaagactgtaattcccacattaccttacaactcacatgattc

SEQ ID NO: 8891 - DNA, 448 bp, Glycine max
  unsure at all n locations
tatcaaaacaggtccttagttaaaggcctctttctccaccgctgtgccactattagactaaaacgttctgcagaagactaaattaacttagagccaaagccaaaaacgtttcaagacaaaagcaatagtaaaacattgctaaaatgaaaattgaagttagagaacacaaaaatgaataactaaattaaaactaaaattgacattagagaacgaaattattgatgttaccttgtcatttcatcatatatatgaacatagtaaaatcctttctttttctttccattattcaacaaacctatatacatatctggaaggttatttccgtctatacgggcgttaatacaatagataagagatgaactaccccaagaagcttggggcctggtntattcagcanatatctgctcaagcatacagagaatcaccacataagttctaatcacatatt

SEQ ID NO: 8892 - DNA, 307 bp, Glycine max
agcttagcgcgcctctgtgctaagcctaattacttctctgtttaagatttatgctgagcgcgtcatgtgcgctaggcctaaatacctctctgcctttatttgggtttagcgccactagtggcgctaggccccccgtctcctgattcatgattgcgctaagtaggaccctcacagcttagagccctaacgtttcatgtgcactagtgctaagtgcacccatcgtggcttaatgcactcatttggttttgttgcttcctttctttacttacttttccatctgtaattcttctcatgcttctgatggtct

SEQ ID NO: 8893 - DNA, 455 bp, Glycine max
  unsure at all n locations
cattgtatgtaatgtgtgttaaaataagttgtagatgttccctttgagtnttgtttacgtataaatataataatttctggtcctaccattttgaaaaattgaaacgctcgtcaattttggaagctaaattgaatggctgttaatgggtggtaatgaccactaatgaattataacagccaataatgagcggtaatggctactaaatgcattcttgatggtagaatgcctatatatagcacatgtatttggtccgtgagatcatctctttgaattcattctgatacaccatctacagagagaaagaaagagagcttgaaagaaccaaaacaagacaactcttcatggcaatggttggaggtatgatttaatatttattctccgcattttgttaatgacctgtgtntcttttgtagtttgcaacatcacacgttaaaacgtgtagtctaacatttggt

SEQ ID NO: 8894 - DNA, 406 bp, Glycine max
agctctgctttaggggcaatgatacgaccactgataagcaatggaagcatgagaaaacatgtgggcgtgccctaggcctaagatttgacaaagagagtggagatctatacatagcagacgcatactatggacttgttgtggttggacctaatgggggactcgctacatcgttggcaacccatgttgaaagaaagcccattctcttcgcaaatgagcttgacattcataagaacggatccatcttcttcacagacaccagcaaaagatacaacagagtgtaagcctttattactcatatactatacatcatttgagtatattcatgcactcattattgctttcaatggattattattgtttacaacgtacttattacttgtttgcagcgcgcattctattatattat

SEQ ID NO: 8895 - DNA, 319 bp, Glycine max
  unsure at all n locations
agcttctcagattctccttcagattctcccaactcgctaagcgggctgagtgcctcgcttagtgcatgactctcgctaagcgcacaagcctcacttggcgagacaccagctgctagccttcacaaatttcatcctttttacctgaaattgaagttgaaacacattaaattcacaatgttgggcatttctattgaacaaaactaaactaaacctaaaaataagtacaaatctacaaaaagaaccataaattggggaaaaagacaacattntataacatttttctatacanaagttagtcgtaaatgacgactaacaaact

SEQ ID NO: 8896 - DNA, 449 bp, Glycine max
  unsure at all n locations
ntcaacccagtagaaataacatatggctcacataaattagctggtacataaccaatgctgccataatgtcataagacaatggatttgttctcaccataagcatccctttacaaatccctactttattttacttcttttaaatgactcagtcacatcccctttacaaattaaaataaaatcattgttcacactaaatgcaaatttatgcttgcaattattaaacttggagatcagagttgctcacaaaattatctacgactatgtctctcacaatttttatccaactattcaaattgatgcgacgtggtaacttgcattagcctaggaaaacatatatttagacatataacagtttanatgttcagccataaatctgttacaaagaactctattttgacctcgttgatactatctaaccccctaacgtactgcatatatttcacagaatg

SEQ ID NO: 8897 - DNA, 433 bp, Glycine max
  unsure at all n locations
acgcttgatgatatggtcttcaccgacgaaaggttcgatgtgggtctaaaaagaggaaaatttagtcatcctgcttggacgaatgaganaactggggcaaatgaagagggtgaggatgaaggaaaagcccgtgctgtgactgccattcctatacgaccaagtttcccaccaacccaacaatgtcattactcagccaataacgacccttctcattacctaccacccagacatccacaaaggccatccctaaaatcaaccacaaagcctacctaccgcacttccaatgacaaacaccacctttagcataaaccaaaacaccaaccaagaaatngaatttgcagtgaaaaagcctatagaattcaccccaattccagtgtcctatgctaacttgctcccatatctacttgataattcaatggtagccataacccca

SEQ ID NO: 8898 - DNA, 387 bp, Glycine max
  unsure at all n locations
cataccatctactatgccaacaaagttataaatgatgcacagatgaattatgctaccacagaaaaagaaatgttggcaattgtctatgcacttgaaaagtttaaatcttatttggtaggctcaagagttatcatctacactgatcatgcagctattaaatacttgctcaacaaggctaattccaaaccaagattgataagatggatttttttgttgcaagaatttgatttggtgattcgcgataaaaagggatcaaagaatgttgtagctgatcatctgtcaagattagtgaatgaggaagttacagcaaaagaagtcgaagtgagagatcaattccctgatgaatcanctattttaataagtgaaagaccctggtttgctgatata

SEQ ID NO: 8899 - DNA, 435 bp, Glycine max
  unsure at all n locations
acacttaggcattctntggattatagagactagatctttcaaatgttgttatagaaacggattgaaaagcatctgtggatagttttcaagctgacactaagggctcaactgatttccatgttatcttgaatagttgtagagatcttctttcatcaattccaaactctagagtgagttttgtaaagaggcaagttaatcatgttgctcacaaccttgcaagggcatcaagattttatgctaactctcgtatctttgattatattccctcatgtattgtttcacaaattgttaacgaaataatataactttcctgtaaaaaaaaaaaagcttaagctgtaaagtgaaagcacatgaataattgtatatctaaaatatcctctcacacacactctttaaaagcctaaccctacctttgctaaatttacttaaaaaata

SEQ ID NO: 8900 - DNA, 470 bp, Glycine max
  unsure at all n locations
cgtacatcttaactaaaattggaatcctcttcctacgtacctatctaggaagctatagcaagtaaaaaaaaaaattgacgatgagagacaagccatgccatcaatttgtcttctagaagagacagtatccaaaaggcgacgaaatgaacataggaaaacatggtcttgtactcttgttgcacaaaagtgaacgagacagaagaaaagtctggcatcatggaaatttgcatacattgaaggcttgcattcatattatagaagagaaaaaagaatagtataattgcaggcaaacttatatacattattatagggttcatgagtntttgttttactgtaccattccccaaagtaaatgtactnattttggattgaaaaaaaaattggtggacaccaaatactcgataacatctatagaggagcggantgagagagaagacactactattagtataatgagaaatgctctatgc

SEQ ID NO: 8901 - DNA, 478 bp, Glycine max
  unsure at all n locations
ttaagtcacctgcggcatgcaagctntaagagcaattcctttctttntcttatcattctcctcatgttgattcaatctcatcaattccatttcatgttcgtgtaactttccaaacaaagcagcaagagacatgttagatagatctcgtgattcagtaatggctgttaccttgggttgccattctctgcttaagcatctcaaaactttattgataagatcttcatttggaaatgtttttcctaaagatgcaagatgattaattatgtgtgtaaacctcttttgcatgtcttgtatggtttcatttggattcattctaaataattcatattcatgagtcaaaatatttatcctagatcttttcacatttgttgttccttcatgggttacctgtaaggtatcccatatatncttttgcattttacaatttgatacactaaagtattcattcatcgctaaagcagatgtaattatatttttg

SEQ ID NO: 8902 - DNA, 373 bp, Glycine max
  unsure at all n locations
gggccaatgactntcggtttccacacctgagttgacttccgtaccaccggctcactctccttagatattggccccccgggcatcttcttcgcttgatctctttgatatcgaggaagatttgcaaaaagcttatcccttccaatgaaaatattgtctagcttcatggcgaatcgttccggctcttgaatccggcaaaaacgagcaaaaccgaatcttttacccatcctatntctccttgtcggaatcaccacctcttgcaagtcaccatagctcctgagactgttgaacaagtgcttcgcattcatctcctccgcaaaattggtaatgtaaatcgttgttgattgtagttgctccttaactctttggtccctgg

SEQ ID NO: 8903 - DNA, 438 bp, Glycine max
cttaagtcacctgcggcatgcaagcttggttcccaacgctttgttcagactctcctaaaatctagaggtgaatctaggatctctatcagacactatgctagatggcacactatgtaatctgacaatctcactaatatacagggaggtcaacttctccaaggaaaatctgatcttaatgggaatatccttagggaacacttcaggaaactctctgacaatagggaggtcacccatggaaacctttgtctctacttctaggttagacatgatcatgtagacttaagcatcttcttttaaagatgtcacaacttggttggcaaagataaacatcctatccttactcactccagaatcatcaaacactgcatttttattaaaacaatttaacaagacatggttggaagataactagtccattcccagaataacatcaatttg

SEQ ID NO: 8904 - DNA, 382 bp, Glycine max
  unsure at all n locations
ntcatttattattctntgctaagcaaagttatcctatatttgagctctattgtttattcactcattgagtgttattgaatatttgtgttcattcaaacttctatttttgaaagccaagagtggtttagtgttaaacaatagttgagtttcttagatttacggggagtctaagaaagtgtcagaagttgtattaagaatacttgtatagctacgagtgcgggtcacgatactcgttntgtaatgaagttttgattagtgcaaccctttacttttgactaaaggagaattgggcgtagcttacgttgagtgaatcaatataaaccaagtgtttcaacttctctccttaatatcttattaagtattctatcggcactctctatca

SEQ ID NO: 8905 - DNA, 338 bp, Glycine max
  unsure at all n locations
agctcgcctcaaagaggtccaggaaggacaaggcggccgaaggaactatttccgccccggagtacgacagtcaccgctttatgagcattgtgcaccagcagcgcttcgaagccatcaagggatggttgtttctccgggagcgacgcgtccagctcagggacgacgagtatactgatttccaggaggaaatagggcgccggcggtgggcaccactggttactcccatggccaagtttgatccagaaatagtccttgagttttatgccaatgcttggccaacagaggagggcgtgcgtgacatgagatcctgngttaggggtcagtggatcccgttcgat

SEQ ID NO: 8906 - DNA, 391 bp, Glycine max
  unsure at all n locations
tgtgttttcccttgtagaactactaactgcagtaacagattctcctgaaatctgttgagtcccacatcgagtagaagtggaaaggttgagcaccatataagtgaggagaagacccataaatctgagccttaaggttttgggttagagtgtgatgtcagatctccttatgtggtggctcgtggtccacaggtgtacccctcgaatctccccaacaattggtatctgagctgatggttcaagttggtgaccggctcagacgagtatgcaagtactgcaggtggccaaaatggctagcggcacagcgtgccccgcaggtggagcggngtggccagaatggctagcgggcacggcaagtaccgcaggtggccatggctatacttgtggatgataa

SEQ ID NO: 8907 - DNA, 256 bp, Glycine max
  unsure at all n locations
agctngatgctgcaaacttatctgtatccaagattggagagcacatgtcaggaggttctagtggcggctcctcagctggtggttctcacggaggcgaccaggctcccgaggcagaatacgatgaggagaagaagtaaggcgaggaggggtttgtatccacttctactgagttattttggctagagttagagatgaatcatcttttttcattcagcatatgatataaggtattttgtactacaaggctggagttcat

SEQ ID NO: 8908 - DNA, 405 bp, Glycine max
gtaactacatatcttctaggtgtctgagtcatgttaaaagcatttctacggcagatggaattaagaggaatgatctaccggcaagatagttatagcttctgcccttgatacaagggggtaggcgaacttggacagcctgtgaacaattcatcccaaaactcaaatatatgccactaaatcacacaagtgatatataaatgacatgtgtgaaaaaattcattattttgacatttagaatataaaaagcttgtgatatttcacaggctataatgtcaagtgaaatataatggttacccaagtattcatctgcttaaagtagctaaatcgacagcagaaatcatagagcaactgaagagttccactcttcttgctctaatacaggaaactgaagagtctggtgaggag

SEQ ID NO: 8909 - DNA, 391 bp, Glycine max
agcttaaagtatgcccgtgtcattcatccctatgagatgttgttgaagtattggcgatcagaattgccattccttggattataggattgaaccaagctcatgcttttacaaaaaggttcatcaagtcaagttgaaatacggaagtaaccgtcttgcaaaattggggcaaaagatgaatcgagtcacatcactgcttcatctactgccaaacatatttaggattgttgaagtccttgctacttccagtttcaccttgacaaagttgtcatggaccatgttgaaaatctaaattgattcaaccccatatcctgcgtaaaaattcgcaatacttcaactttacatcattcgcatgcatccatgcttttcattggttgcattgctcattgcattc

SEQ ID NO: 8910 - DNA, 434 bp, Glycine max
  unsure at all n locations
tgtagaatggctagacatgatacatgtctnggtttggttcggttcaaggataaaagggatgccccacattatttccatgacacaaatgcaaaaatgatgattaggaaactttatgcaaaactggtcatgcatgcacctatgtggacactcaagtgtcaaatctttatggtcatgtgatgctaaggctcaagattcatttcctctattttagtcaacccaacgtttccaaaatatgttcttttatcaatttgtgcattcatccgagtccattctgggcgtctgggaaaatcttcacagcattcacccttcaggtgtatacacattttttcaaaaactagttatgatcagtgaatttttttaaagaaagttggaagtcatctctcttcaaaagcatgttggttgttcagcttgacaacttatactcctcttttctc

SEQ ID NO: 8911 - DNA, 306 bp, Glycine max
agcttgctcgataagccattgatgtccagtatagtagtcgcgctaagcgcaaatccttatctgttttgaaaatttgtggaattgggcatagcgagcctgctcgctaggccaattctgcagaaaaaaatggatttgtgttcactcgctaagtgtgtggtagccacacgcttagcgcataagtcatttttcctaaggcacgttaagcgagtcacttgcgctaagcgcctagactgaatttcaattttgtttatgattcttaatttgaataaattcttgtctaatcttatgtttcgattcttttgtatt

SEQ ID NO: 8912 - DNA, 429 bp, Glycine max
  unsure at all n locations
tggcttagcatangtctaaaatattcataacagaagagggtctatgcttatcgcagcatggcacgcttagctcagcctctccaaaatgacccttacgcttatcgcacagggcgtgcttagcctaactataaaaactaaaaaacagttagagagttgagcttatcacagcagggcacgcttagctcaacctcctcgaaacacaactatggcttaacgtggcaggctgcgcttagccttattcaaagagttaaaacacaaaacctagatggcgcttagtgcagcaagttgggcttagcacctaaactactctaagtgtctaaaacactaggcccgcttagcgcacagatgcacttagtgggttcatcatattattcatcagcaacgatgaacgcacttagcgtgatcatatggaataccaaanaaattaat

SEQ ID NO: 8913 - DNA, 170 bp, Glycine max
ggacgactcttgagacttgttgagagaatgggccatgtgcccgccattttcctctgtatccaattaaattccaatacgcatgagagggagcataggcactaggtagcatggcccgcaccttgtaaggatcatatcatacctcatgctacaccccatccctgacccaccac

SEQ ID NO: 8914 - DNA, 510 bp, Glycine max
  unsure at all n locations
cgacgcggcatgancccttnntgacgcattgatcagtgaccttgaatctcagctaaatatacgattctattatactcagcttggctcacttatcttctttatatagccaccttttgacagatacactatagctatcttcacacacttctactgatgctctacgcccatgataaatgccttatgtgaccataacaacgcgttcatacacctactacttatcatggctcggaggacgccgtgaatatactatactattgagaattacgaatataagggccgaagggaaactattgctattgtaacatgtactcataggagcgtatcccaacttggaccatggactcattanatctaccctacggttcatgagaatctctcggcaatggttatgagctatatctcaagcctctcgtagtgttgtagcgaatacactagtgcggtgcgagttgatgatcccctccaccttcggaaggattggaactgatatgccgaggttctatgtactttatn

SEQ ID NO: 8915 - DNA, 229 bp, Glycine max
gacaatcctttgtctctcactcaatccttaggcccagcacctagatattgagtgtgaactacgtataagaatggacgatttcccccttgactgtgactcctgaacacaaaagtatgaaagttgcacagacccattggcgggctattgaccaaaggggcaccggccggtcacaatgatactgtgagtacctagcggttgccgtggacgaccgttaccgtacgtctacact

SEQ ID NO: 8916 - DNA, 204 bp, Glycine max
agggacatattgacagaggggggttcactacattgacggatgacctaaggagatacattgagattctagatgtatgtcagattacgatcgttcatcgaaactacgcgaagtgtgacacatgcttatatttataggctaggcatctaacttgagaagataccatgacatatcattcctgagaacctggagcttagctacatacac

SEQ ID NO: 8917 - DNA, 125 bp, Glycine max
  unsure at all n locations
tgcttatgcacggaatatgtaattatgaaattgagatgcctgaagaaacaccatttcctagttaaccatgccttaggtaccatcttcaattattgtgttttgctgccgngtcatctcctcccccc

SEQ ID NO: 8918 - DNA, 401 bp, Glycine max
  unsure at all n locations
ntgatctaccaccatcgccaccaccatcatcttagttntctattatgttatattattagtactttgatttccagcgttgtattttggctatattattatgatatttgaacaatttactatttccttatttgcatggtatgtttgaacaaatattaagtatgttatttggctatgtggatgttatagttaatctattcatcattgctgcttcatgatttggttgatatttctccatacatgttgtatggatgcttagttatatgtgtatgcctcaaatttgttacacactttggctttttgttgatgtcaaagggggagagaaatatggactaaatcaagaactcacatgagtaatcaacttaatcttaagagaagcatanattcataaacaaagggggggg

SEQ ID NO: 8919 - DNA, 450 bp, Glycine max
  unsure at all n locations
agcttccatcacanaatagctactaaggtcttgttgtcgagattnttctggccaacactttttaaagatgcccatcaccatgtcttaaagtgtgatcaatgtcaaagaatggtggatttcccgaaggaatgagacgcctcttcaaaaaattatggaggttgaagtttttgattgttgggttattgacttcatgggtcctttcccctcatctgctagtaataagtacatcgtggtagctgtagattactgtgaatgtatgtatacatgattctgatgatgtcaaaagaagaatcaaataaggctcatttgcttcaagattaatacaagattgtntcaacaaataaagccttgattcaagatgtcttcaagatcaagtcttgcctcacaatgaaaggtttcaagtcatccaaggcatatgtaatcgattaccaatacatgttgtcataccct

SEQ ID NO: 8920 - DNA, 450 bp, Glycine max
  unsure at all n locations
gggagaggatgcttcaatggagganaagaaagagggagagatttagagaggggggagcacgaaattgaaggaagaaaaagggagagaagttgaactttgagttgtgtctcacaagactctcattcatcaaagttacaacaagtgttacacatgcttctatttatagactaggtagcttccttgagaagatttcttgagaaaacttccttgagaagctagagcttagctacatacacccctctcataactaagctcacctccttgagaagcttccttaagaagattcctaaagaagctagagcttagctacacatacctctctaatagctaagatcacctccatgagatgagaagctagagcttagctacacacccnctataatagctaagctcacccccatganaaaaaacatgaaaatacagaaaaagtccttactacaaagactactc

SEQ ID NO: 8921 - DNA, 440 bp, Glycine max
  unsure at all n locations
atatccaaaacctatattcaatttttggattatgcttaatgagttttgtatatttgacatgtgaatcaagattctaatatatactttagattattattattatatcataccttatataatatatggtgattgcaatgaaagtaaaaataatatatctcgatcatcgtgtgatattggatttggtgtacatgtgaggtattgatatatatatatatatatatatatatatatatatatatatatatatatatatatgtgtttattatatattggatatataaatagtagattatttctttcacatattaaaatgttatacaaatatagattaaatatgtgaatgataagatgttaagggaatatttattagatgtaacatactttgaatagcattgtagacgaaaactatcgtgtcaacatcgctatataaattgatgacn

SEQ ID NO: 8922 - DNA, 449 bp, Glycine max
  unsure at all n locations
ntctcaagaggattctntgagaagctagatccttatctatccacacccctctattaactaaattaacttccttaaaaataattacggatgaaaataacgcaacaaataatcaaacatcaaacataattactaataatatatagatatatatatcagggtgttacagttatcatctttgttatcattaaaacatctttgaatcactcttgattcaccatgaagctttgcttctacactaccaaatagaacattttttatcatcacaaagtttatagcttatatattagttgaattattaagttcatatgtttttcttcatttcttcaaattaatttgacatatgagggtgtacttatttaaaaatcgtataaggaatttggtccaaattcggttagttgaaataatttcccctcatatatgatatatacaggaaaactcagtagtaagaa

SEQ ID NO: 8923 - DNA, 407 bp, Glycine max
agcttaggttggaccgacaatgcaccaaattacccaatctccttcctatctaatctctaacccccaatccagtttgctgcactgatgtcacccttattccagttcctcaaatttatccacggtatcattcacttttcaataatgtctattatttactacaaatatgactgtctattagcatatccactgttctaagtattgcataccacttcttagaacatgcttaaactacctacgtatgtaaatactattttattatatgcaccgaggcaatagtcaataatgcatggaaaaacacaaactgaaagagtaaagaacaattctccaatataggagttgctcagcgtgtaaacactgatatccataacaattctctttgccaaatactacatccacgttaactagtc

SEQ ID NO: 8924 - DNA, 371 bp, Glycine max
  unsure at all n locations
ntgccatgtcccttctagaaagcacatgcataacgaagttcctcanatagtcatcatcanacctagacctcaatccgaaacacacgaccatctgcagaaacatgacgacttcggcagcaccactctctgattccccatccanatgctccttacacgtttccacaaccgcaacggctctctccacgatctttctagaatgttcccttgactctgacgaaaccatcagcgcctgtatcacaagcccgcacgcccacctcttatccgtcaccccggacttcgccaccttgctcttcataaactcctacactgcctctaccaccagccgcgccgggtccaccgcttactccatcgccgccgctatctccgcccgc

SEQ ID NO: 8925 - DNA, 393 bp, Glycine max
agcttaccttcaattattgtgattcatggtatattgtctaattacacttcttacttattcatacaatactatgtttcagatttatccatacacttgttattatggataaaaataaatgaaatacttttacactcaatcttattactataaaaatctctattgaatctcactattacatttgattaccacattattataattaaaggatatataagggaggaaatactttataatgatcagaggagggaataaggtgaaaggaaagaagatatagggtcataatgtcatgcacaaccagtgtatctctttataccatgtataataatacatcagtctctttataccatgtacaactagtacatcaactatcttatacatttgctcaggccttta

SEQ ID NO: 8926 - DNA, 424 bp, Glycine max
tttgtagataatgttaatgcttcacctgtaccgttgaatgtgttgtcagtgccatggttgttcttaatgtggggcatagatgtgattggggctatcgagcccatggcttcaaatgggcattgtttcatcctagtccccattgattacttcaccaaatgggtggaagctgcctcatatgctaatgtgattacgaatgtggtggttagattcatcaacaaggagataatttgtagatatgggttgcctagaaaaataatcaccgataatactactaacttgaaaaacaaaatgatgaaggagatgtgtggggatttcaagatccaacaccataattcgacaccttatcgacccaagatgaatggtgaagttgaggctgccaataaaaatatcaagaagctcattcacaatatgaggatgtcataca

SEQ ID NO: 8927 - DNA, 340 bp, Glycine max
  unsure at all n locations
gctgctacacagagaacacacaaaacatcattacatagatagaaatatatttacatcaggtacctacagggaagatccaatagaggatttagctttccatagtccggaaaccttctttacaacacaaagaagaacaagatgaaagattgcaaaaatacaagtggtgaggatgtctccttcacctctagggtctcacaatcactcacaaactcatctcaagctctcagaacggcttccgcttcgagctctcatctctgcagatcttcacacaacaaaatctctcaaaactttntggaacttggacctttctctctctagaacttcctaaacattcaaaagc

SEQ ID NO: 8928 - DNA, 428 bp, Glycine max
  unsure at all n locations
gtgatggtgtcgagaagaaatcacatgtttgtcatcatcaaaaagggggagaatgtgaatgtatgtatacatgattntgatgatgtcaaaaaagaatctaacaaggctgcttcaaatgataagcatttgcttcaagaataattcaagattgcttcaacaaacaaagccttgtttcaagattcactaaagaccaagccttgccttaaaacaaagtgatttcaagacatgcaaggctctggtaatcgattaccaggaagtgtaatcgattaccacaagacggcgttgagaaatagctgttgaaaaaggttttgaatttgaattttcaacatgtaatcgattaccatatgtctgtaatcgattaccagcaacgaaactttggaaactcanattcaaaagtcataaccctctcaaatataactgtgtaatcg

SEQ ID NO: 8929 - DNA, 349 bp, Glycine max
agcttgaggttataagggtattggttgacaatgctcgagaatataacattgtgcgataactattgtgtttcaatggcgccaacattgccaatcctcatatacatgcgtgagaatgagggaatgtgatacactataatcgtgaaccgtgggtgaggaatggttatttgaaattaaaagagactcatttatagaatgttatattaaataagcgttttaaagaaaattcaatggctactgtcaatctttccagtgggcaggatgataacgtaggaggacaaggcttgcccatcatcccttactcacagataccacactttcttccaagggtacctagaacatgttaactttt

SEQ ID NO: 8930 - DNA, 369 bp, Glycine max
  unsure at all n locations
ctaatagtagggaaagagcacacaagatgctattgtgaaaagagaaaaagttatagaagacttgaggagaagaaaagaanatgagatagttgtatgtttagacaactcgtacaattttcaaatgtttgaaaactccctccaacagccataaacaactaacttccaagcttatttaatgagatcaatttgaacgagcttgttgcaacgaaggagtgccacaaagagatggtttggtcataagagttgagtagctcagaaagatacctcatatatataaaaaaaacttcttagtcaaaacactctacgttagagctaaaccttgtcgatccananacaagtgtaaacacgttcatcagaggagtcacaatg

SEQ ID NO: 8931 - DNA, 385 bp, Glycine max
agctgtacagcagattttttaatgacccactatcctagaattaagataactcaatgccattaacctatggaattaaaacaaacttaatggctgagtgtaactgatatagtaggaaccaatatcaccccctacatcctacatgtcaaccaccattaggtctcccaaaaggctgatgcctacattgccaaatgggcccttattacaacttgaactgaagccctattagttgattaacccataacatatttttggtcagccaactttactaggattgggccattattttgacaaacttaacactctaaaattgaaataaagaggtgtcatttagtcctccatatgggccatgatacaactcacaaccttggacttttgtccttgaaac

SEQ ID NO: 8932 - DNA, 258 bp, Glycine max
  unsure at all n locations
ntntagcaattcagatggtcataacgtttcactcggatgtctgattcaagcgcataatatatcgagacgctcgagattgaataatggaagctattgagcaatcccaatggatataacttttaactctgaagatcgatagatgcacatgatatattgagacgctcggaaatgaacaacggatgctctcgagacactcgaatggtcataacttttaactcggacgcctgcttgagacgcattatatatcgtgacgctcta

SEQ ID NO: 8933 - DNA, 367 bp, Glycine max
  unsure at all n locations
agctngagcttggttcaatcccgtaatccaaggaatggaaattctgattgccaatacttcaacaacatctcatagggatgaatgactcgggcatactttaagctatgcatggaaaatgtaattatgaaattgagatgcccgaagaaacaccatttcctagttaaccatgcattaggtaccatgttcaattattttgttttgttgttgtgtgcatttttttttagaaatgggtttatgatcccaacatggttggctcatggtgcctaacacatgcaactaagaatgtagtgtgaagttttcacgcttcccctttttttgttttggtttgtagaggaaaattgcaggatgaaccaacattgaaaccaat

SEQ ID NO: 8934 - DNA, 434 bp, Glycine max
ttgaagggacaagtcgagagtggaaagtatgatattagaggacaagttgaaggcttgtcaaaggtcgaagaggagcttgaccgaatagttgagaaggatggaagagaacatgtgggctatcattgaccagtataaagagaagctaaatctagcagctagccataagtaaaggctagaggacgagcattcaaaagtatcgatcctacaagtagaaagggaagcaagggagagtgtgatatattcattacacagagaagctatgatgtggatggataggttcgctttcactttgaatggaagtcaagagcttccaagactgttagccaaagccaaggcaatggcggacgtgtactcgactcccgaggaagttcatgggctcttctgatattgtcagcatatgatcgagctgatgtcccacataattacgaactact

SEQ ID NO: 8935 - DNA, 385 bp, Glycine max
  unsure at all n locations
agctntaatggagcttacatcatgtggtatcattcacatcttcatctaggtgatgttcttttgcttcctctatctttttgttcggtgaattatctttaattccttgttcttcatcttattctccatgtacatcctccattgtcttgtggtttggtgttgtttagagtagattaaaaaaaataaaccgattaaatcttaaatctacacttgttcttgcatttctatggttcaaattttgtagatctactcttgaatcatatttttgtgttgattntagcttctatcatttttcattcataatattcttgtgctgaacctttagatctanattttcttcctaaatattgattagaaaaaaacacaaaaatctaagcggtaatcactt

SEQ ID NO: 8936 - DNA, 440 bp, Glycine max
  unsure at all n locations
tcaagctttgagtagaacatgggaccactcatttatttanattttnannttnaannnannnnnnnngaaatcatatctagtcaaggtctgagagaccatacaagtttcctaacgatttctaattatgtgggccattaagtctatcatatgctgacaatagccgagaagcccatgaatctcttcgggggcggagtaggtgtctgccatcgccttggccttggctaacaatcggggaagttcttgactcccgttcaaggtaagagcaaaccgatccatccacatggttgcctcttggtgtaaagagtcgatcacccttcctctagcctctttttccgcatatacttgggcatactcatccgcgattctatgctcgtgggccgtggctagacccaactcttcttggtacttggcgatgatagctaacatgttggtttctgtct

SEQ ID NO: 8937 - DNA, 334 bp, Glycine max
  unsure at all n locations
agctttcagaaaatgtctatgccgagtgtataccattnttcttccatgtttcagttgtacgtagcttgtgttttcttcatagatagggcaatcacgatgtcctttaacactatatccactcaaattcccatatgctcgaaagtcattaatggtacaaaatagcattgcacgcaacttgaatgtctcatttcgatacccatcaaatacaacaaccctctcgtcccacaactttgtcaagtcttcaatcaagggactgagataaacatcaatgtcatttcctggttgtcttaggcttgatatcatcatagaacacataatgtattttctctacatg

SEQ ID NO: 8938 - DNA, 437 bp, Glycine max
tccttaagaagattcctaaagaagctaaagcttatctacacacacctctctaatagctaagttcacctccttgagatgagaagctagagcttagctacacaccccctataatagctaagctcacccccatgagaaaaaacatgaaaatacaaaaaaaaaagtcgttactacaaagactactcaaaatgccccgaaatacaaggctaaaaccctatactactagaatttccaaaatacaaggcccaaacgaagagaaaacctattctaatatttacaaagaagagtggatccaaccttgaaccatggactcaaaaatctaccctaaggttcatgagaaccctagggccttctttagtagctctagcccaagcctcttggagtcttctatctaataccctcgcggggtaggaatgcatcatcccctccaccttggaaag

SEQ ID NO: 8939 - DNA, 248 bp, Glycine max
  unsure at all n locations
ttctttaaattagctgttgaagcagtattntgtacagttcacacacgcacacacacatggtagcaaggactccattgcacttgaagaagttaagtccaatctctattctagagagctttgactaaaggcatttgggaatggtgatgaagcctttatggttggattattggtgacaaattctgcttaaggatagaagaataataaaggaataggtggcaagaagaggaaaaatgatcctaagacatctg

SEQ ID NO: 8940 - DNA, 377 bp, Glycine max
  unsure at all n locations
tagctcttctttgcttatcttatgagtgagctatgacaaactctagcaccacttcttcaaggataggcttacgatctatgttcatcatggtggccttttcacattcctttagagattccagaacaaaatcttctacaatgtcttcaaattccttcgctgttaaggccacaaatcttacatcctcaactacgtttgttttatgtnttttagcagataaagccttccagaaactatgatgacttgttctatttttgaagcttactatctttccaaggtctgatcaagtttttccttctctcttgatttagccaagggattcttattagcctttcccaaggcaacaacttccttttacttattgggggtgaaactggttt

SEQ ID NO: 8941 - DNA, 108 bp, Glycine max
attcttatgattgcctatgcgtggaccctcaagtgcaatcctccattcttccctctattccgagccccatgaatgtcattgcctactgctggtcatgtgtcctccacc

SEQ ID NO: 8942 - DNA, 412 bp, Glycine max
tcggaagaaagtgatgaggtacaagccctaaaggcagagcttgaaagagcctgcgtagtcgaagagaagttcaagtccatagccatcaaagtctgaaaagagtatgatgaactaagggatgtcaatatggccaccgatgaagccttggaatgagaaaccaagaaggcccgaaaggaagaacacgaccaaagcaaagttttgaggggctttatagggcagcaatagtgagctcaagttccgaagaggtgaaaggaatcatcacgggtcaaaggcatgatcttgaaggacgagctaaaggcttgccttatgtcgaaaagaaatttgtcccaacagctaagcgagactgaagggaatatgtgggccatcatcgataagagcaaagagaagctaaatctagcggcgactcacgagc

SEQ ID NO: 8943 - DNA, 103 bp, Glycine max
ataagtttaagaatatacagcatatagttggcccatgatatattactttaatgtataagctgctctcttttcatgataggttagcacactgcacacatctttt

SEQ ID NO: 8944 - DNA, 475 bp, Glycine max
  unsure at all n locations
caagcttgttggagtagaaacatgggaccaactcattntatttcaaaattgatagtcgtatctagtcaaggtctgagagaccatacaagtttcctaatgatttctaattatgtgggccattaagtctatcatatgctgacaatagccgagaagcccatgaatctcttcgggggcggagtaggtgtctgtcatcgccttggccttggctaacaatcggggaagttcttgactctcgttcaaggtaagagcaaaccgatccatccacatggttgcctcttggtgtaaagagtcgatcacccttcctctagcctctttttccgcgtatacttgagcatactcatccgcgattctatgctcgtgggccatggctagacctaactcttcttggtacttggcgatgatagctagcatgttggtctccgtctcgcataaatgctgagacaagcttcttttggaccttgaaacaagcaataac

SEQ ID NO: 8945 - DNA, 454 bp, Glycine max
  unsure at all n locations
gtcctaaatgacatttcaagctaatattaactctctttaacctccatttaccacagaattcagacttaacctcattctaaatttcactttaacctccatttaccacagaattcctacaagtcccaaatcatgtatcaatcatgtctaacccaaaatcaagcttcaaaacacaccaacacagaatctaggtgtccaaaacccctcaattcaatgggttttctaggtttgaaaagtgaaatttataatgaggtaaatttgaagcaaactctcacctcacacaagtccataacatcaatctaaactcgctcaaactgaatttacacctaaaattcaaccgaatcaaaatttgactcctccacacccaattntgccctagaaatggctctntgttcactttgatcattcgttcttctctctagcacagtccaagctttctcccaagttctaaatgaca

SEQ ID NO: 8946 - DNA, 345 bp, Glycine max
  unsure at all n locations
tattgaganaacttccctgagaagctaaagcttaactacacttatcccctctaattgctaagctcacctccttgagaagctntattgagaagctagagcttagctacacacacccctctaataactaagctcacctccttgagaaggcttctcgagaagctagagcttagctacacacacctctctaatagctaagctcacctccttgagatgagaagctagagcttagctacacaccccctataatagccactgaatgtcgcgcttagcgaatgctcgctaagccagcagattggcttagtgagaaggtgagaataacacttttgcaatttggctaattaacct

SEQ ID NO: 8947 - DNA, 189 bp, Glycine max
  unsure at all n locations
agctttcaacaagagtcttcacaaataactattatgaagcagaaaactaacaaagctacccatcatatctcccaaaaccccatacccacgaaaatcaagggagaaagaagtccacccaaacctgaaatttcgaagtcccactcgtagacacgcacttnacgaccccgaaaatgctctccttccacgatt

SEQ ID NO: 8948 - DNA, 414 bp, Glycine max
actttgtccagacaatgttagagagactagtgcatatgcactgaaagtgtaccgcgatgttatacattaaatcaatcatatgctgacattatcgcgagaagcccatgaatctcttcgggggcggagtaggtgtctgtcatcgccttggccttggctaacaatcggggaagttcttgactctcgttcaaggtaagagcaaaccgatccatccacatggttgcctcttggtgaaagagtcgatcacccttcctctagcctctttttccgcgtatacttgagcatactcatccgcgattctatgctcgtgggccatggctagacctaactcttcttggacttggcgatgatagctagcatgttggtctccgtctcgcataaatgctgagacaagctctctttggaccttgaacaagc

SEQ ID NO: 8949 - DNA, 287 bp, Glycine max
  unsure at all n locations
tgatcttgattcttgctaagttctgtaactagcttagaacaatttacttggccttctcttaattgtctntgggcttggcgaccacgatcaacacagtactttcggcacctactatatgttgacttgaccaacgctgctattgtaacgctgcgacaatctttcaacaccttattgacacaatctgcgaggccggatgccctccattcatagggttttctacgtttgaaaagtgacattcacaatgactgttatttgaagctaactctcacctcacacacgtccataac

SEQ ID NO: 8950 - DNA, 450 bp, Glycine max
agcttctatataagctgatctcattctatcaatttatacaagttgagagttatggactgagagaccatacaagtttcctaatgatttctaattatgcgggccattaagtctatcatatgctgacaatagccgagaagcccatgaatctcttcgggggcggagtaggtgtctgtcatcgccttggccttggctaacaatcggggaagttcttgactctcgttcaaggtaagagcaaaccgatccatccacatggttgcctcttggtgtaaagagtcgatcacccttcctctagcctctttttccgcgtatacttgagcatactcatccgcgattctatgctcgcgggccatggctagacctaactcttcttggtacttggcgatgatagctagcatgttggtctccgtctcgcatatatgctgagacaagctcttgttgaccttgaacaag

SEQ ID NO: 8951 - DNA, 442 bp, Glycine max
  unsure at all n locations
ttaggcanattcaaacgacaataactttntactcggatgtcttattgagcgtagtacaaaatcaagacgctggtaaatgaaagtttaacctacatctaccacagaattcctacaagtcccaaatcatgtgtcaatcatgtctaacccaaaatcaagcttcaaaacacaccaacacagaatctaggcgcccaaaacccctcaactcaatgggttttctaggtttgaacagcgaaatttataatgaggtaaatttgaagcaaactctcacctcacacaagtccataacatcaatctaaactcgctcacactgaatttacacctaaaatacaaccgaatcacacattgactcctctacacccaactttgccctagaaatggctctttgttcacttggatcattcgtcttcttttagcacaagccacgctttctcccagtcctaat

SEQ ID NO: 8952 - DNA, 63 bp, Glycine max
agcttttctttctcaatcatacctatttactgactatacaactctaattgtaagttcacattc

SEQ ID NO: 8953 - DNA, 73 bp, Glycine max
gatctctctatgggttgatgcaatctctctcgtgcttgtttgtgtaaattagtcatcgtgctcaaatgcttgt

SEQ ID NO: 8954 - DNA, 434 bp, Glycine max
  unsure at all n locations
ncctgttctttttannnncgaggannagccnncaaagannccctcataaccacccttaattctccctgtnagaagcatcctatcacccgttagatctggtgacgtcgctgtggcatcaccaattaaatcttacccaacagtgcgacacacactcactgaatggcagacctctattttaacttagaccaggctctattaaaccataaaatcttcccgcctcggggtacacctgtattggcaaaccccccaagggaaatagtcattcccttattacttctacaatctggtggaactggggcgtaaccctaacgtcattcccagtgggagagatgactagcattttaatccgacgggggggatgaatttgaatccggcagaaaccctcttttaatttcgaaaatctacttcttcccctaaatctggttgcaaaacgt

SEQ ID NO: 8955 - DNA, 259 bp, Glycine max
tcgacactatgatacattgtgcctcctcattgttgaatggagtagcttcaaaactgataatagacaagaaagatctcatacattgtgctctatcacaactatgccagttgaacaacctcttgatggcgtggcacatgcagcacgtgctcacgctcaatatcaccaccgcgctgtccgacgccagcctctctatgcgctccagcgggtcccccactaccgccgccgccgcgttcccaggggccgtcacgtatcttcccat

SEQ ID NO: 8956 - DNA, 92 bp, Glycine max
  unsure at all n locations
agcttatatatcaaagattcgacaatttaaaagttgttggctactcagactcagattntgctggttgtgttgaccttcccacgctcccacct

SEQ ID NO: 8957 - DNA, 262 bp, Glycine max
  unsure at all n locations
tgtggccctcctactcatcaaggccactaccctctatacgatacaacctccctcgacactagacaacctctttcgctcgcaagacggctcagagcttggagggattatatactatatagggtccacaaaatacacgtggcaagttatgtggcactccaatagacatatcagccctctatgtcagctctagcacagaaacacgaatgctcaaaccttagtagccaggctattaactgacaggntatctctaaccactttatta

SEQ ID NO: 8958 - DNA, 402 bp, Glycine max
  unsure at all n locations
atccttaagtcacctgcggcatgcaagctntaagggaaattaatatgggattgtgctagaatttagattattaacttattgtaatttaatttatnttggtgtgaaatggcactatgacataaccatggaactcatcccacttccttcaaacttctatccctctttcttttctttttttgaaacttctcctttgtgggtgagtttgatctatgttttttctcatatctatcccaagtcacaggtaagttagtttttccactcactactaaaaaatatacatttaacatcggcaggttaacatcggtttccgaanaaaccgatgttaacaaaagcacggtggcatacttgtaataagattagtttattaaccatcggtttatacaaaaccgatgtaacacaaat

SEQ ID NO: 8959 - DNA, 336 bp, Glycine max
agcttggagcgctatccgcagactcagcagaagtttttgggaaagaaatcagactatgtgcacgaatcttatacccaatgggttattgataggaccaagagctttggcctaccctaccgcttacctagatacctatcgtccaccatcccaccatcatccttgcctatccccttcgacaccaaggaagagtttcatgaacaattaaccaaagaaaggcaagaaaaagaaacttggaagaggagatgccaggagctcgagcaagagaatgagactttgaaagggaagatagcccaacagagccgtgagctttttatccagaaccagaggatgatcgag

SEQ ID NO: 8960 - DNA, 391 bp, Glycine max
  unsure at all n locations
agcttgaacctcacagacccaattccaattatcttttacaggacttgttgtttccatggaggactgaaccaccaacttgtttgtcaagatcctcaaaccaagacttgtttggagtcatatgaaatgaacacccagagtccaagatctatttgtctcagtgttcttatgagacaccattaaagcctcagctgaatcataaccatcttcaactagagtagcatttccaggttctttagatcgatcttgcttgtttcctttctgtctattaggacagaatcttcgagtatggccttctctnttacagtggtaacatctaatgtttagtacattagatccaaatcgagtttgtgacttggatcttttcccttctgtcttatcatccttcttggat

SEQ ID NO: 8961 - DNA, 463 bp, Glycine max
  unsure at all n locations
agcttcttcttcagactntgtgaacagtgtcttgttatttatcgaanaatcatccattgcatcaatgcttgaagaacctgctatgtgttggggaatattggggggtttcttccaaaggtgatttcatagggggaaagtctggtgcttgaatgaattgatatgttataggaccattcggtctatatcaaaaacttaccccaggacaacgggcgatggtgaacggaggctcgtaagtactgttcgacaactcgatttagcattttcgtctgtggatgataggcagagctcatacaaaagtttgtgtcgctgagttggaacaattcttgccaaaagtggctgatgaacaatgggtctcgatagtagaccaagctatgaggcattccatgaattttcccaacaatgtccatgaaaaggattgcaatagtgtgagtcgtgaagtgtgacttgagcttggccaggtgga

SEQ ID NO: 8962 - DNA, 437 bp, Glycine max
  unsure at all n locations
agcttgtattccaatatttataatcattntgagagtttagcagctgtttcacccaacagataataaagattgatgattaacaatcttgacttttcctacnaaanaaaaagaaaaagaaagagaacaaaggagttgttgcattnttttaattttcaagaacttcttggccaacaatgaaactgaatttaattggtcagaattaagccaaatgttcttattcggtataagtagtagatgcaaaacaagtaagtgaaggaagcagagcgactggattcaattatgggcttctcagaacttgaatcatgtcattcgatgcattgaatattaagtttatgttaatgcatcttgtgggtgcttaaaagcacacaataatggtaaaaaaatggttcaattcacaacattaatccttactcagaagtgatatctcatgataaaca

SEQ ID NO: 8963 - DNA, 278 bp, Glycine max
agcttaactctattcgcattcttatctctcttgctgctacacatcattaacctttatttcgataggatgtacagaatgctatcttgcatggtgacttacatgaagaggtgtatatagagcaatcacctgtgtttgttgcttaaggggtgtttggcaaggtgtgccgcttaagggagttgttaaatggcttgatgcaatcacctagatcttggtttgggagatttagtggtgtggtccttgcatttggactgaagctgagtcaaagtgatcatactgta

SEQ ID NO: 8964 - DNA, 450 bp, Glycine max
  unsure at all n locations
agcttggaacaccaacttccaacattatgtggaatatattgggaggctcttcataaaaagtgaggttagactcatttccaaagtccttttaaccaaagcatcaactacaccattatgctccctaacaattaggactaagaatgaattgaatcaattcgaacataatttgagatttgatttgatatttgactcattgagcttggttcatgaaccaaatgagttaaatttaaatttaaagttgagctcattaaacaaataagataaacttaagtcatataacttgattcgattgattcatgaaccaacttgatatataaatctatctattattatatctagattagatatacctatctattaatctatacatatatntaaatatttatattattgaattcctataatgaattttagttaatttaatactatttttgcattaaatgaataaat

SEQ ID NO: 8965 - DNA, 331 bp, Glycine max
  unsure at all n locations
agctttcacatttactgtataaataaacaactaactaanactaaaagttaaaaacatcaattgaaaataaaatgtatcaaaagcagaagaaataaatccaaatcctatcatggctcgtcctgtgtcgcttggggctcatccagaggtgaggagggagcatcctangctggctgaggaatatcctgagctgtaacaagccatgggtcccaggtgctctttgttgcggtcacatcagctgcataatccgcatcagcagcgccatccacctccaaaataggtgaagtaactggtgaagcctgtggagtagccactggagtggcctctagaacta

SEQ ID NO: 8966 - DNA, 348 bp, Glycine max
  unsure at all n locations
agctnggagaggatgcttcaatggaggaaaagaatgagggagtgaaagagagaggggggagcacgaaattgaatgaagaataaggcacagaagttgaactgtgagttgtgtctcacaagactctcattcatcaaagttacaacaagtgttacacatacttctatttatagactaggtagcttccttgagaagctttcttgagataacttccttgagaagcttctttgagaaaactttcttgagaagctagagcttagctacacacacccctctcataactaagctcacctccttgagaagctttcttaagaagagtcctaaagaagctagagtttagcttcacatacc

SEQ ID NO: 8967 - DNA, 324 bp, Glycine max
  unsure at all n locations
agcttcatttctgatcactaagcgacaacttgtccttggctaagcatgacctagtgtcaccaagcacaattccttacgaccataactggtgttcatgaagctaaacgccattcatggtagctaaaccgaattccttacggcaatgtgaacgctaagcgagtccttatcagctaagcgcatgctcctctgtacttaagatgcatcattntagctaagccagccattgccttgcttagcgagagttgncaacttttctgatctacaaacctcgctaggcagtcttatcctagcgctaagccaagcatgtgttgttaaaaaaactga

SEQ ID NO: 8968 - DNA, 386 bp, Glycine max
  unsure at all n locations
agcttataaggtttgttgccagcagcattgaatgattcaatgaactccacattgtccttgaatatctggaaacgttnttccttctctgcagcatccttatatatttttccatattctgccatccaattttcatgtctttctcgcaaggctgtttgatgcagcttgcggngcatcacttgggaaatcccaactgcaaggaaaaggaatagggctaacatgtgttgctnttggccagtgaaagccatttcttaattatcagcaatgatcagttttgtaagaaaaggcttagttggtatatttgtgtaaagagagaaatgtgaattggtatgcattgaaatgaatgaatctggagggttatatagagatcatagtaccttatgctatgg

SEQ ID NO: 8969 - DNA, 380 bp, Glycine max
agcttctagttgtgcctatattgcgctctttttctgagcagcaaatgctggtctttgcaccatctccatctgggtttcggaaggtaccctcgctatgcatttgatgtctctaattaatatatgttgtggatagaattcaatgtaaaatagggaaataagttttagttaattatttgtaaaactgtttttatttattttaagcatttggcgtgccttgtcttggtctctattcattcttttgaaaaaccttgttttatctgatcatgtctacaaatttgaataaatattggtcgtgttattttgagtgccagtagggttatgacatatggactcgattttatattgcttaattttaaatatgcaaacgtcatcgcttgaag

SEQ ID NO: 8970 - DNA, 437 bp, Glycine max
  unsure at all n locations
agcttgttntgatattcattcaaactatnttgaattagatcctatataatggctggaaattaccaaacctttgcaaaagttgcttctataaaccaaccccctctttttactagagaaaattatcctttttagaaagtccgcacaagaattttccttgattcattgatagaggagtataggatgccattgtaaatgatttctatgttcctaagcaagttggtgatggaaaaaaggtagaaaaagattttattcatggacatcaaaagaaaatagtcaagctcaatataattntagagcctaaaatattctttccttcgctttaacactngatgagttntatgattattctcaatgtgtagatgccatagaaaattgggaaatcttagaagtgactcgtcaaggtactaagaaagtcaagagggcaagagagaacactc

SEQ ID NO: 8971 - DNA, 279 bp, Glycine max
  unsure at all n locations
agcttcaccaccaagagtatcttggataagaagcttagagaggaagtttcaatagaggaagagaatgacagagagagaggggggcgtgggaattgaaggggttagggagaaaagntgaactttgaagtgtgtctcacaagtttctcatttatcaaagttatgacaagtgttacacatgtttctatatatagcctagcacatatgaagcttccttgagaagcaaggaaggtagctttcttgggaagctagaggaagatagctttcttgaaaagctagagg

SEQ ID NO: 8972 - DNA, 375 bp, Glycine max
agtcacctgcggcatgcaagcttcatgatgatgaatcaagttgattcaagatgttttgatattgacaaagatgttgacaaaaaacccaaagaatgatttcaagattaaatcaagatcaaattcaagaatcaagagaagtttgatttcaagattcaagaaaagatgaattcaagttccaagagaagaaatcaagaagacttcacaatgggaagtattgaaaagattttttaaaaaacaaacatagcacaattttgtttttcacaagagttttcacaaaattttctatgttaccagagtttttactctctagtaatcgattaccagtttcctgtaatcgattactagtggcaaagtttgattccaaagctctaactg

SEQ ID NO: 8973 - DNA, 435 bp, Glycine max
  unsure at all n locations
agcttagacgaccttgtttgagtcgagaatactttattatctattnggacaaattagaatatgatgtagaagaaaatgaatgtgagcctttctcccctttgaaagacttgtaaaaaaaatgtnttaaaaatactcttaattaatatttgaagttttttccttattagtatatatgtgaggggtagagggtgtcacagatcccctgactgtgtcggagtcataaacggatgtgaaatcatgtagaaccactccatgtaatctgatgaacattggccagccactacacaaattttccctacaggtgcaatatagtcaccgaactgcatccatctagcatccatttcttcaacataagctgaaggcgctgcaggatgtggcgaaatggtctggatgtnacccaactatcatataaccctcttcggtcagtgaatgacc

SEQ ID NO: 8974 - DNA, 462 bp, Glycine max
  unsure at all n locations
agcttgaaagataagttgaagatctgatgaagagtatcgatcagtgcgtcatacgtgctcaacgcaacacagtcactcagcaggcaaccctcacttagtgcaaagaagtcacatgaagaacttgatatttgaaggcatgcttagcgtgagtcacgcactaagtgtgtgaccatcgactcactcgcttagcacagtagtcgcgcgtagcacaaggttgcataaaatttaagccgacttcacctataaaaagaggaggaaggaaaggaaaaggacacaatgaatatccatgatattaaagtttcccatagaaagcaaaagctaggattcatgcaggataagtgaaaccaacctttaggagtcgntccttcccttcatcttcattcttctctaaccttcttcacttccattatcctcttgcaattgtaagcctctcatgacaatgagagactaaaccttccattg

SEQ ID NO: 8975 - DNA, 450 bp, Glycine max
agcttgaggagacgctttatcagttcatgcaaatatccatgtccaactataggagcatggagtcttccatcaagaacctggagatacaagtgggacaattagccaaacaaatggctgaaagacccactagcagctttagagccaacatagagaagaacacgaaggaggaatgcagggcagtgttgactaaaagccagaggaaagcgcaaggagaagaaaagaaagatgaaggatactagtctaaggaagaaagggtagacaaagaagaaaagaaggaggaagaagagaaagaaaaagaaaagaaggtcttaacctctaagaccaaaagctagctagcccgagaggctgggaaaaaagagccaccagcccctctaaaggattccccatatcctttagtgccgtcaaagaagaatatggagcgctacttcaagcgtttcttggagatattca

SEQ ID NO: 8976 - DNA, 185 bp, Glycine max
  unsure at all n locations
atttcttggatgatatctcgcggcgtcatattgattgtcggacatcatactgctgggtttggaaaccaaaacctaatggccatttgtctaccaggagcacatactgtatgcttctataaggagcagccgatcagactgtggatgaggctttagaggacctatggcagcttanaatccctttaaac

SEQ ID NO: 8977 - DNA, 192 bp, Glycine max
  unsure at all n locations
agcttatggatggaacacttacttgttggtgatgatcaaaagcgcanaacggaatcaaaaaatgcgaataaggatgaccctacggctgcaaactcgtcaatcccgtgggtatggctttngaaaggagganaagaagtttttgaatgtaaaaacgcccccctttcgtcattcttataatttggtgcaggggtg

SEQ ID NO: 8978 - DNA, 402 bp, Glycine max
  unsure at all n locations
ctgcaagcttgcttctacactaaagggtttccttttacatttaaatataaagactatcccataaaggtgtctattttatatatcactaatgtccataaattagggatgttacactgcggacaaaaaagtatattaataagaaaaaatgattgataaatagttatatgaaatggtaaaaaaattactatgaatatattcacattaaagtatcaaattccttgaaaggaaaattcaagttatataaatgatttcttttaatattatagttaaaactcccgtgcattgcacgggttttaattaagttcttgaacattttttaaaaaaaattttccctgaacataaaaattaattcataatttcttaaaaatatataacaaaatnttaagcaaaccacaaattaac

SEQ ID NO: 8979 - DNA, 405 bp, Glycine max
  unsure at all n locations
agctttgaccacaaccccgatcttatctctacctatttttactcaaccatttattgttgaaacagatgccttaggccaaggaattggtgttgttttgtctcagaatggccatccaattgcttttttctttaagaagctttcttctcgtatgcagaagcaatcagcttatgttcgtgagttgtatgcaattactgaagcagtggctaagttttgtcattacctttttggtcattattccattatctggacagaccaacgtagtctcaagcacattacggaccanatcattcaaacaccagagcaagagtccttgttacctaagcttcttgacttcaacttctcgattgagtataaacctggacccactaatncaagtgctgatgctntatcatggtctttctatat

SEQ ID NO: 8980 - DNA, 396 bp, Glycine max
  unsure at all n locations
agcttgaaggcaaactggatgcattggttaacttggtaacccagctggccttgtgtcataccctaatttcgtccggcgacctttgcttgatgacatgcgacctttctttggtccttgtgaggtgcttgacacccatcattaagcagtttgtgaaattccaggacatgccgaanaaaccaaaaaatattgatgcacaatccgtaagtntccgtgacacaccggaaatcaaatggaagcatcgttgcataattaagtgaggttccgtaagtaaaaaggggatgattatgtaatccgcaaggttccgtaacattacggaaagaaaacaagtatcgctacgaaaattcgtaagttccgtaactttacgaaaaaaagaatcaccaaataaaagcagagggg

SEQ ID NO: 8981 - DNA, 443 bp, Glycine max
  unsure at all n locations
agctntaattcannaaaacaaaaagaagtttttatcataacctcacctaattttaatactacgcgtctanaaatcacaatttgttaactcaggaagaaccntttgctaattctcctcatttttcggtnaaattgcnacctccatacaatcattctgaaaacaaaaccctccaatcattctaacatccatctaaataaaaaatatttcgcccaaaccagaacccaaaccgccntcaatttcaagcttcaaccgaaaaacaaaacaacacaaacaatatacacatttgggatccacaagttccacactntctatntaccaatgtactaataattaaatattaatccactcagttacactactaaaagctggggatagaatacacctacactcgctatgttacaaaanaagttttcncaaaccagcacgctacactacacacggac

SEQ ID NO: 8982 - DNA, 411 bp, Glycine max
  unsure at all n locations
agctnttgcctcanaacanagtgtttccaagagatcaagactttggtaattgtttaccagacagtgtaatcgattaccagaagacaattttgaaaaacagcttttaacaagggttttaaatttgaattttgaatcatgtaatcgattaccagatgtttgtaatcgattactagcaatgacacttcataaaatactttgaaaagtcatgacccttcaaaatataactgtgtaattgattaccagaaacctataatcgattaccagtgaaaaatttcagaaaaaagtttttgaaaagatacatctcttcaaatcattttgaaaagacacaatgggcctatatatanggtgtgttgactntataaagtaaagagagaattctagagaacttaattgtcaattctccaacaactc

SEQ ID NO: 8983 - DNA, 354 bp, Glycine max
  unsure at all n locations
agcttgtagaatggctatacatgatacatgtcatggtttggtttggttcaaggataaaagggatgccccacattatttccatgacacaaatgcaaaaatgatgatttggaaattttatgcaaaactggtcatgcatgcacctatgtggacgctcaagtgtcaaatttttatggtcatctgatgctagggctcaagattcatttcctctattttaaatcaacccaatgtttccaaaatatgttcttttatcaaattgtgcattcatccgagtccatttcgggcgtccgggaaaattttcacagcattcacccttcaggtgtacacacacattntccaaaaattatgtgaattttt

SEQ ID NO: 8984 - DNA, 355 bp, Glycine max
agcttgagggtaaactttatcccttagtcaacctattaactcaacttgccatgaatcagaaatctacacctgttgcaagagtctgtggtctatgttcttctgcagatcaccatacagatctctgtccttctttgcagcaatctagagtcaatgagaaacctgaagcttatgctgcaaacatttataatagacctcctcagtagcaaaaccaacaacagtagaataattatgaccttccaagcaacagatacaatccaggttggaggaatcatccaaatctgagatggacaagtcctccacaacaacatcagtctgtccttttctttcagaatgttgctggtccaagcaagcctta

SEQ ID NO: 8985 - DNA, 441 bp, Glycine max
  unsure at all n locations
agctntatgcaagggagctaaagatacaagtatctttcaaggtaagctatttggtcaaaagagcttgtgtctatacaattcatggccttcatcatgttctgagttatacaaatcattctagaattcagagatttatgcaaagatcattattcacagttagtcgttcactcacagagtaaggtcacactttcaccggtttttggttcaagcttttctttcacaatcaatctgtctagtgactaaccattctattataagttcacactcttgttctttctttgttcaacatgcacatttgctcaaattcatgaaaggaaacacacatttcatcataagcatctattcatttaaaacaaggcatacaaccattttcccaaataaataaactacttcactgccataccatcaaaagttaagttaaactgttcacgatgcttcaag

SEQ ID NO: 8986 - DNA, 269 bp, Glycine max
tggagagcatcttttcctacgccattactactatactcttatggaaacttctcgtaggaagaatccaacttggaaaggggacataacgccacgcataagtagtcttatcctgttgccattattctactagaattttctaacttgtgttccacaaagagatgagatgacaatgggacaccaattcacgtttatcaatttttggcataaggcaaatattctgaccattaacactcccagcttctccaggatgtcttcataaatgcttgatg

SEQ ID NO: 8987 - DNA, 422 bp, Glycine max
agcttatctttatactggtattcgagagaaaagccttgtaaccattaaaggtgcgtccttagtagaataggggtactcgggagggaaaccttgcaacgattcaaggtgtccttggtcgaataagggtactcgagagagaaaccttttagcgattcaaggtacacccttggacgaatatggatattcgggaggaaccttacaataattcaaggtgcatccttagccgaataagggtatttacgagggaaaccttgcaatgattcaagttgctccttagtcgaataggggtattcgggaaggaaaccttgcaatattctgaggtgcatccttactcgataggggtgggtattcgggagggaaccttgcacgagtcaggtgcatcattttcgaatagggtattcggagcgaaacttgcacaatta

SEQ ID NO: 8988 - DNA, 352 bp, Glycine max
  unsure at all n locations
agcttgtgtgccttcttccaattcattggtggctttggatgactcanaaaattgcttatcaggaaggaagaatcaaaagtcatccaagcaatgttttccattgctaactcgccttgtggattgtagcaaacattgtggtagaggcaaaggtaatgacaatgggagtactttatcaccttcacctgtcccaaaaccacctaagtctaaccctccaaagctcgagacaccaaaagctcaaccacctccaaccccaaaggttgagccacctccaacaccaaaggttgtacattcaaccaccacccccgtgtnctcaccaccaccaccaatccactccccaccaccaccaatccac

SEQ ID NO: 8989 - DNA, 391 bp, Glycine max
  unsure at all n locations
agtcacctgcggcatgcaagctttggtccaattcatacgaccataagttntgtcatggttgtacgatttaggcccatggtatatggagacactcgaaattgaaaaatgaaaggtctcaacatattcaaatggtcataacttttcactcaaatgtcagatgcaggtatataatatatagagatgctcgaaattgaacacggaagctctgctccaattcaaactgatatgaaccctcatggaacaagggctgacttaggatcgtctaggattaaaccttgatggaaaatgcggaaattgattaacgtaaggatggaacataaggtggttaatttcgtgggtcttaatcacgtggctcttggcataaaatggatgaatgggatgggtaaatgta

SEQ ID NO: 8990 - DNA, 327 bp, Glycine max
  unsure at all n locations
agctntgtcgccttcagctttgtcgtgttcgaagttctttggtgtccgaaggtaaggtgtgccctggcaattaacaaccttgaataagcattgtgaattccatcctgcgtatataagtgtggtgtttgttccccaacataagcatgctacatttcgatccttgcattttgtagttcttctcatcgaatgtttcttttccctcaatatattggcatgttttcttttaaatgtggtcatatccttctttctcttctttntgctgtagaaaacaagagtatgctttgaagggtcatcggcatttgtaattgtagatcctgaatggcagtg

SEQ ID NO: 8991 - DNA, 297 bp, Glycine max
agcttatccggcctcccattaatagggccttcatataataatattgcatgccaaggaaggtacaacagcagggtcaggcatagcagcagcaagaggaggaccagcagcagccaaccgcagatgtgccgccaccacttctactgcagccaccatctctagagtccatctttgctcacctgcgaaggatggagctctaaatgcatgcatatatgtagcatgtgactaaccaacaagcggctaatcataggggtcaggtgcagctaaatgagagcttctaccagtacaccctacaccagc

SEQ ID NO: 8992 - DNA, 351 bp, Glycine max
agcttgcttgtggggcttctatggaggctggatctttgagcttcaatggggtcctttaatggtgattttccaccatggagatgcagcggaagacaaaggaaaataggtgagaggaggcgccatccattaaggaataagccatggaagaaggagcttcaccaccaagatgagccttggataagaagcttggagaggatgcttcaatggaggaaaagaaagagggagagaaagagagaggggggagcacgaaattgaaggaataaaagaggtatagaagtggaactttgaagtatgtctcacaagactctcattcatcaaagttacaacaagtgttacacatgcttctattta

SEQ ID NO: 8993 - DNA, 408 bp, Glycine max
  unsure at all n locations
agcttaagagnggcacctcncgtactcttctctcttcggcaccggagggattcacaacaaccgcaggcctcgcgtcgacgagaaccctaaggactatgccaatcgctctgccattcagtggcatcgtgtctccgtttatcctcagaaattgtgagaccttgtcaccaaacacgttgttcccgggtcagcccactctctcattcactcgccgctttatcaattaaccaattgtcgtattgcaccttactgatgctgctggccttttgcagttcaatgctgtacgtggaggggaacctcgagaccaaatgcttcaccgatccgataaccggcattgcccgccgaattcgagaaattgctggtcgacgaaatggtaactcttcaatcaactcttgttgtataaatgacttt

SEQ ID NO: 8994 - DNA, 203 bp, Glycine max
agcttgtgagggaggtgttcttagatatgagatgtttgtgtgtatctaaactctatgctctcaaggaagttgtctcaaagatgcttctcaaggaggttgtcttaagaaagctgctcaaggagacctcctacactattaatagaagcatgtgtaacacttgttgtaactttgatgaatgagagccttgtgagacatacttcaaa

SEQ ID NO: 8995 - DNA, 412 bp, Glycine max
  unsure at all n locations
agcttgtangaatatggttgtcccatcacatgttgtactaggtggcagtcgggcgatggtgcacaacaagttttccacatccacaaagcgcgcataaacccaccattccctgttggccacctccaactgagctcacgtactcccacgtagcccataacctcgtttctctcaacaccgggtccccatcaatcctcccaagcttccccaacatcaaagtaaatcaacattcaaacagcacaaattaccacagccaagaaaacagggcaaaggcagaaaactctgcccaaaacaccaaccaaaatcacagcttttctcacttaaagaccccagtaacaatttcttcgatccaattcgttaaccggtggagtcgactccaaattttactggaagtctatagtacataagcctacat

SEQ ID NO: 8996 - DNA, 361 bp, Glycine max
  unsure at all n locations
agcttacaaaacctatgtatctctgcaaaagctgttcttcgtgctgcctncagagctatattcccgaaataggcactgtggtgtgctctggaatttgtgcaaatcatccgcttgccctaattctgcacaaaacaagctttaaatagcctctgaatttgcgacgttgcgcttagtgtgagtaagtgggtttgggcttaacgccagtcttgcgctgagcctggctgaagacacctgttgtgcttatcgcactgatctcacgcttagcatgtgaccttgatattgatgtcttgctagattcttctatcgcgctcagcgcgttgaagctgcgcttaacggtggatgcgtgcttagcctactgatg

SEQ ID NO: 8997 - DNA, 425 bp, Glycine max
  unsure at all n locations
agcttcctccttctttttctacagaagccttgaatttatattgtaagaaacacatactttatcagaaaactgacattcacagctccattgagttaaaataaatgtcttacaatgcataaaagacaagttccaattaagacatggtggaaaggagcagcccctgtggggggctcaatttacctaaacaattacatagagaaagaaatctaagtaacacactctttttaagataatctctatcgttatataaatcttatgtgaatgcactaaaatattgggctctctatctaataaaaacacacatgaataatagtgtgtgtgtgtgtgtgtcacagagagtattattaacaatgattcaatgatagtgataaatcataatanatcaagtgtatgtcagagcatggccagttttatactgtgattat

SEQ ID NO: 8998 - DNA, 338 bp, Glycine max
  unsure at all n locations
agcttgagatgaggaagtgttgaagggtgaaactttctgcttttattggtgaccacagagtggtacctggagatatgtcgcgggggtcaggagaccttggggacgtcaggtggggtgctattgcccaaaaccaagcttgaccaatcccgacccaacccgggcatagtccgtcagtgagaacctgtgatgtacctaagcaggcgagctcctggcagtcaacagataaaaggaaaacaagaccacaaagcaaggaggcttgtggtggctggccagctgtgaattntgtgtaatatgtgagatatggcctctggtaatcgattaccaagggtgggtaatcg

SEQ ID NO: 8999 - DNA, 329 bp, Glycine max
  unsure at all n locations
agctggcattcgatcatcggagccatagagagcatgatagcgctgaatacaacggtcctgcattntgctcagagctttggccaaagggtagcttatggcgaaaccgcccccaccataggccatgccgtaggagaagaatatgttctgcaagtgactctccgacaagctcccaatgtagtacatgtagttgtggtcgtacttgtttaaaatcctcagcagattgtccgtcacgaaaacggtgtcgtcgtcgcccatcacgaaccaccgcacgttcttgtgccccatacgcagcgtttccgtcacgatgcgcgatattcgaatcgcggagc

SEQ ID NO: 9000 - DNA, 408 bp, Glycine max
agcttgttcaacttaccataagtaatctgaaatctttcttgagcaaatgctatttgcaataacaatctcccaagtggacattgaacttggaaatttgaaatgtggttcaattcccacaacatttaatggccatgctgcaagaacattagtcgagaagtttgacaaagaaatgaggcaggaaattcttaactaaatactactaccaatttgcaataaccaagttatccaatattgaaattaattaatagggaaaaatcagtgttgtagaaatgcattacactgatgtggttgatgtatataacaattgaacaaaagagaaaaagagcaaggcagaagtaaaagaaagagaactaaacaagatcaaggtaacattattaatgaaattcctaatccctattgtgcaaacac

SEQ ID NO: 9001 - DNA, 293 bp, Glycine max
cacaaacacaaacccttgcaacaagtacatatttctgactcaaggccacctgggttacccagttaaccaatgcattcagtttgccttcaagcttcttaatatcagatgatgcagctgagtgtgaactacctcatgcactcctctaatgactatggaatcatttctggcgcttaactgctgagagttggaagccatcttctcaattatattactggcttcagcaggagtcatgtttacaaaggctccaccactggctgcaattatcatacttatctccatattactgagttctt

SEQ ID NO: 9002 - DNA, 341 bp, Glycine max
  unsure at all n locations
gtacgattgttgcccatggtatatggagacgctccgaaatgaaaaatgaaagttctcaagaaattcaaatggtcataacttttcactcaaatgtcagattcaggtatataatatatagagatgctcgaaattgaacacggaagctctgctccaattcaaactgatatgaaccctcatggaacaagggctgacttangatcgtctangattaaaccttgatggaaaatgcggaaattgattaacgtaaggatggaaaataaggtggttaatttcgtgggtcttaatcacgtggttcttggcataaaatggatgaatgggatggtaaaatgtacgttaagtgg

SEQ ID NO: 9003 - DNA, 166 bp, Glycine max
agcttcttgcgtaggcgctcttgctgctcagaatattccaaaaacaaatctctcttattactagctattttgaattctttagatcctgaatgtacaaccttcaaattgttgctcgttcccctctttgagaatgaggaggatcttcataggacttcatccagttgat

SEQ ID NO: 9004 - DNA, 174 bp, Glycine max
gctttgagacgcatgataacttgtggcatagtttttcattcagccagatcctctggcgacacgatggaagatgaactatcaccacttgtggcctctccatcatgggctatggctcttcagacgagaacattaatctagcatcttgtctgagaaatgacgtatgatatctactca

SEQ ID NO: 9005 - DNA, 500 bp, Glycine max
  unsure at all n locations
atataanaatttattatttttaagttcgggtntctggcccttattttcgtgcttagttcaacagtcaaacactggcgcctaattaaattatacattttatttnttagaattacatcaataanattattatatcttttctgcaatacactagtgacaaatacacnctctagatatgaatttaaattcttggataatgcactctataacaaacattcttcataatcttctaatcttctctaataagaagaattaactctacaatacacttgtctatttttaaatttgggaagcacttggcaccctaattaagaagggagaagttgccccgtcagacatgcaataacattaggaagtgaccctttaaaaacacattatgaagtggattttaaaaatgaagaacatttctataaaacaaggatgagaaacatttaatctgataaattctttaagattcatagttatagataaagttagattttcattatttcctatattgggtn

SEQ ID NO: 9006 - DNA, 438 bp, Glycine max
agcttatgcgcctattttcttacaaacgttctcttttacaagacatttaaccgaaaaaatgcacccatatacaatcaaggcagcttcgttacctagattatttacacgtaccttcaaggtgtatttgttacttacatcacacacatctccttggctaaattcacatacatgcatactcaaagcattttggggcaccaaaaattgcacatgtgcacatcttggcatttctaatacctatacatacgcaaacttcatgatgaatcttgactatctacacaataaggtgctacatttcatgctcttttttcaagtttttgctacctaaagccgcatgcaaattcaagcatattttcctttgctgactaaaattgtattcaaataaaaggtatattttttgtaatatgttttcttcacataacattgcaacatattatatat

SEQ ID NO: 9007 - DNA, 442 bp, Glycine max
  unsure at all n locations
agctttaattaatcgcgtacagaattccaggcatttctgtcgttcaatgtctcttgttcccaatcccaaacacctcagaagtttattagcaaaagccagtctagcaaatgacatgtacatgacataacctttcaatttcgtgttcgtgtattatatatgcaaactgtgatggcatgtattcaattcaccctataaaaaacattccagtttctattcatgaaaatgaattatcatttctatacatatttttaatttaatttaatcaaaatacatggacatttacatcattttttaatcctataggaagagcattatatgttatgcatgaccaaactatcgatatatgtattggaatgattttaaaagatacaattgagataattntaattagtttataatctaaaattctttgcaccaataatatatcaaaattattattttt

SEQ ID NO: 9008 - DNA, 454 bp, Glycine max
agcttgagggtttagtgcatatttcccatgccacttacatcatagatgagtcattaacatgccttcctagccttaaaccaagacctttcttctgatggaaatctttaatttttaatccttatataaggttttctttattctttatgcggaagcctagattcacaagtatacaacctataacaattaccaaaggtcctaagatctacaacatgtttgactattaaggattagatcgataaaatacttggatctatagttggtttctggtctaagtattctttgagagatgttataagatctttgcggctatccatcacaaatatagacaatgaaattatgattttttctcaatcgaagtctctttattcctcaacaaaattttcataactctctgtatggaaaaagagaactatgtgcacgatttgcatatatggaccataccttcttatatcgt

SEQ ID NO: 9009 - DNA, 353 bp, Glycine max
agcttatattaacaaaattgcctaaatcatttctctatatgcatgtgaattaggaagcatcaacaagaatcaagccaatgctattgtgcaagcaatcaatggggcaaaacacaccaaaagattatgatgatggatggctcaaaatctcacaaaggtaaacttatcactttcaaattgagctttcaaaattatcatgacatgtagaggaaaaacaaggatttcaaatcacaaaatgtcaacagacttttattttctgaacaattaccaatttcttgaacatatcctataattcaaagaaaaatatgcaaagttgtacatgcaaacagagttgaccttaaatattaaactagaaa

SEQ ID NO: 9010 - DNA, 287 bp, Glycine max
  unsure at all n locations
agcttccacaagaaacaacttganggagaagatttcactggcattgatcatggcgaaggggtttcaaggcttatggagttggccatgcccatggcaatggcggtcttgctgactaagacaattgcacggttttccagaccttgtcgtcgagacggcatacagctctaaggaggagtccaggtcaaggtcgtggatgtcgaagtgcatgcccaagcactaatcatgactttcacagagttttagctccgccattgtagaaatgatgaagacaatgggagggagaaaga

SEQ ID NO: 9011 - DNA, 443 bp, Glycine max
  unsure at all n locations
agcttgcaattattagaagagaatgagcatgtgattggaagtatgacagattatgttagtcagttgtcagattgattgtgaaggaatgcattaacagtatcctggtgagagtgtgatccttaaatnttgtgagaaatgactatcatttagttctgatttttgcgtgaatctctgaagtatggactaaatgcatgaaattgaggatgatgaaggccatgtttgattgtgatagccacttagccaaaaagctgaccatgtgcttgaatgatttatcccttgcacctagtttgagctgtatgaattaattgattgattgaaccttgagcctaaacagttgtatcttctgctaccatatcttangttgtaggagagcatcatccatagaagcttgaaattaatagtatacacacattngttctgtatatataatgtccctgtatata

SEQ ID NO: 9012 - DNA, 317 bp, Glycine max
agcttgttgtgcaccatcgcccgaccgccacctattaccacatgtgatgggtaccccataatcctacaagcttgagatgaggaagtgttgaagggtgaaacttcctgcttttattgttgaccacagagtggtacctggagatatgtcgcgggggtcaggagaccttggggacgtcaggtggggtgctattgcccaaaaccaagcttgaccaatcccgacccaacccgggcatagtcggtcagtgagaacctgtgatgtacctaagcaggcgagctcctggcagtcaacagataaaaggaacaaagaccactaaagca

SEQ ID NO: 9013 - DNA, 242 bp, Glycine max
tgacatgtttaaaatatgcatgattgagcgagggcgatctacagatgtgattctagtgaaccctcaaaaacgttgcacatcgcttatccacaccaagttatttaataaaatatttcacaaatacgatataatgtcttgttgcggaataaatgataagttcaataacaaagtctaaggagatcgaatacgtgagtattgtaactccttatatcatgttcaattcttatatataaaaaaaatat

SEQ ID NO: 9014 - DNA, 401 bp, Glycine max
gcttggaaaaaatcctcacacagagagtcattattagcatcgaatatgatatcgtccacgtatatctggatgattaagaattgactaccataatctttgtgaaacagagtagtatctacctttcctcttataaagccattttcaattaaaaatgaacttagcttttcatacaaagctcaaggagctatttttaaaatatacaaagccttgttaaatttgaaaacatgataagggtatatagaactctcaaaccccagggggctgttcacatcaacttcttccttgataagtccattgaggaacacactttttatgttcatttgatacaacatcataccgtgataagcaacacagttaaattggtttgtccagcttgtttctaaacactcactgagttctac

SEQ ID NO: 9015 - DNA, 303 bp, Glycine max
  unsure at all n locations
agcttanggaagagaagatgaaagtaatcactaattaaacaaacaagctaatatttgtcgaccatgtaagggagattcaataccccacacggtggtccaagcaaacctttgattnttgcgtaggtagcaaaataaaggaaaggcctcatcggtcgacctggaaaggaatcttgaaaaggaatttatccgacccaacaattgtttaacctctttaacgttgcttggactccgcatgagcatcaatcaggattaaccttgattcatcgatatctgagcatgaacttgaggaacttgcctactcgt

SEQ ID NO: 9016 - DNA, 377 bp, Glycine max
  unsure at all n locations
agcttgcaaccattatataaanaagaacatgagatttgaactttgactgaaaatgttagtcagtttgtcagattgattgtgaaggaatgcattgactatatcccgatgagagtgtgatccttaaattttgagagaaatgactatcatttagtactgatttttgcatgaacctctgaagtatggactgaatgcatgaaattgaggatgatgaaggccatgtttgattgtgacaaccacttanccaaaaagctgaccatgtgcttgaatgatttatcccttgcacccagtttgagctaaatgatttattgattgattgaaccttgagcctatacagtgttatctcctgctaccttgtatgagggtgtaggagagcatca

SEQ ID NO: 9017 - DNA, 178 bp, Glycine max
  unsure at all n locations
agcttncttctacaccttataaagagatgagattttactgatcgaggccgtacccaaatcaaataaacattaaaatgcagtaactaagaagtgatcctaagtcatttcccaacgagcaatgactaacccaatgttcataatatgcttcgttataacagtaataataacgaatgggggg

SEQ ID NO: 9018 - DNA, 303 bp, Glycine max
agcttgcactattctatttatcttggtaacagatatatttcgcctgaggtccggttatcacgatgaagcaagaaatgttgcctcaacttcacgtgcttcacatcaatttgctcctttgggacatactgcggtcactacttatttacctattcatgaacaatctttcttataattacttaatctacccctgacaaatggaaaattaaggacggatggtaccaaatgagattgcagctgctgtatctgatgaatgtgatacaatgttgagaactggcgaccgggtaggtctaactgcatatgaca

SEQ ID NO: 9019 - DNA, 322 bp, Glycine max
  unsure at all n locations
agcttgagatgaggaagtgttgaagggtgaaactttctgcttttattgttgaccacagagtggtacctggagatatgtcgcgggggtcatgagaccttgnggacgtcaggtggggtgctattgcccaaaaccaagcttgaccaatcccgacccaacccgggcatagtcggtcagtgagaacctgtgatgtacctaagcaggcgagctcctggctgtcaacagataaaaggaaaacaagaccacaaagcacggaggcttgtggtggctggccagctgtgaattttgtgtaatatgtggatggtggcctctggtaatcgattac

SEQ ID NO: 9020 - DNA, 371 bp, Glycine max
  unsure at all n locations
agctntacagcagatgcccctttactccatgttcttgaaggatatgttaacaaggaaacataagtatattcaccaggaaaaaattgtagtggaaggaaattgtagtgttgtgattcaaaagatccttccacccaagcataaagaccttgggagtgtaactattccttgttcaattagagaagtcactgtgggaaaagctctgattgactcgggagccaacattaatttaatgtcattctccatgtgcagaagggtgggagagatggagaccatgcccactaagatgactttacaactggttgaccgctccattaccagaccatatggagtaattaaagatgtgctggtcagagtgaaacattntatcttcc

SEQ ID NO: 9021 - DNA, 464 bp, Glycine max
  unsure at all n locations
agctnttcatatggatatgagaaggagaaacaacttaagagtgggtcggacttacagcaaatgatgacacgtgacggaaaaattggatagtgacatgtggattaataattggagacttgctcatgntaataattttttaagatgaagtaataatttttttccactacaatttaaattatttttttattcaattntaaattatttatatattcacattaattgcaatacaaatataaacagatgtaagcataatttttttttaccatgttttcgttttaaatatatatttatttttttaaaaaaatctaataattaactttaattatttattataaccattgcattaaanaatgaaagtttgggatgtgagtaacttcttaaagttatgagtaacttaatcttttctcatacacatannatgagttattcacaagttttatttgttaaatttgtaagaattaaac

SEQ ID NO: 9022 - DNA, 400 bp, Glycine max
  unsure at all n locations
agctnttctttctcaaccaacctatctactaactatcaattctaattgcaatctcacattcttgttctttctttgtctaacatacacactagctcaaacttatgaaaaaggacacaatcttcatcacaatcatgcactcaatccaaaatccgtttataacacgcacttcacaaaaagataaaagtgtttcagtgcatattcatcaagatcaagtcaaactattccatatgcttcanaacatgcatactaactatccacanaanacacaagtatatataaaaatcaaccaaaatcactaaaacaatgtacagaaatataatagtcataataatttccaaaagcaaaatcatcaggaatttaaaatttctgagacaaatcctangtaccctgagtctgagca

SEQ ID NO: 9023 - DNA, 370 bp, Glycine max
  unsure at all n locations
agcttctatataagcagaaccatnttatcaatattgacaagttgagttttattcagaanattagagtttatctcttttatcttagtgagagtgattctcctaaattcttgagtgattcaagaacaccttggctgtatcaaaggactttcacaacctttgtgtgttgccctcgctggaaagagtgattctttccttcctttcatcttcacccttgttctttcaaaccacaattccagaaaatccacctctgcccagaattatctcgtggccataactccaattttacgcactcaaattaagtgattcttgagcctaaattgaattccaaaacgagagcttccacctcgttttggaatcacttcatttggag

SEQ ID NO: 9024 - DNA, 376 bp, Glycine max
  unsure at all n locations
agctntctatactaatgtcaaaattcaagaaagctctttgatctctgaggtttatgggataaaaatggtcattgaccaatcccttttctatgacttgacccaattatctagtgaaggtgtaccatttgaaggtacactgaatgatgattggaaatttgatttctctgtgcatgatgcccgccggttggtttgaaccaaccaagaggatatgactggaaggcttcttgctggatcattggcttttgaaagccatatccttcactatctcattgtgtgtattttacttccaagatcttcaaacctttgctcaggttctgaagacgatcttatagtcatgtgggcttttcataccggccgacaaaatgatttggcacac

SEQ ID NO: 9025 - DNA, 389 bp, Glycine max
  unsure at all n locations
agcttccattttcctttctactttgaatgagtaattcttaagnttcatacattcatcangtccatccttatatttttgtttccttctaattattaaataaaaatattgttttcttgaagactcttccttccatgttataatgaaaccgtaagatgaccaaattaattttacttgctagttatttgaagaaccaacgtcgcacgccaaaagtcaaaacctacaacccatctgtcatcccgattcattactctcgggattacttcagggcatttcattggtatctcttcttccttttcacaccctcatttaaatgttgaaacacctagaatacccttctttctctttaaaatttaaaatcttctctcctactcatgtccatgctgatattt

SEQ ID NO: 9026 - DNA, 415 bp, Glycine max
  unsure at all n locations
agcttagtctnttggtaatattttaggaatntatattttgtcaatccaaccattcaatgatgtaatattatataaatgatcatgcattccaaattttaaataatccataaattcataagtatgtaatttaataattgacatattttaaatagctcgttatatgtaaactaccttcacaagcaaaatgtaattttcataatggcaattgatgtttattattgtttactgacctctatgcagatcttccccctgataaggaaccactagattggaatactagaatgaaaatagttgtcggtgctgcaaaaggattagaataccttcatgataaggcaaaatcatgaacaatttctttaattccaaccaataactaattttcataagaaatggagtactaatcaaagtcgaatgtatg

SEQ ID NO: 9027 - DNA, 379 bp, Glycine max
  unsure at all n locations
agctntgaatgcactattcaatggagttgacaatatcatcttcagactgatcaacacttgcacagtggccaaagatgcatgggagatcctgaanatcactcatgaaggaacctccaaagtgaagatgtccagattgcaactcttggctacaaaattcgaaaatctgaagatgaaggaggaagagtgtattcatgacttccacatgaacattcttgaaattgccaatgcttgcactgccttgggagagaggataacagatganaagctggtgagaaagatcctcacatccttgcctaagagatttgacatgaaagtcactggcatagaggaggcccaagacattngcaacatgagagttgatgaactcattgggtctctt

SEQ ID NO: 9028 - DNA, 400 bp, Glycine max
  unsure at all n locations
agcttgngaatgcattttggcatctatttgactttcctatgctgnctctacatatataaaacagccccactatcccaactctgcaaaatcatatatatatatcattggggcaatgtggcatgccccattgcttcaaaatacaacctatgcctaaggccttttcattctaatcctcaattcaagaaaacaagcagcaaagcaaaccaaaactaccttacaaatataagcatgttctcacaattcgaggcaccaaaagatgaagaaagcacatcaatggaaagcaaaaacatcaaggatggaatacttacttgttggagtgaattgaaataccaaanacgaaagcaaaacgcgatcaanaggcttatgggagcaagaaaccgcaagccttcctattctctat

SEQ ID NO: 9029 - DNA, 206 bp, Glycine max
agcttgaatcggacatccgcgtgaatagttatgatcttttgaatctctcaagagcttccggtggtcaatctcgatcctcttgacatattatgcacccgcatcggacctctgtgtgaaaaggcatgatcattcgtatctttcgagagcttccgatgtttaagtcccagcgtatccatatattattaactctgaatcggacctcagtc

SEQ ID NO: 9030 - DNA, 401 bp, Glycine max
  unsure at all n locations
agcttacacaaacattcactagtccaacacacaattaacaaatagtcatcattcgtccatagttccaatgctcggtatgatgcatgcacctgatctcaactctcaaatgcaatgtggtaccatccccaaggaaatagcctaagcgtgtccacacaacactctcacttaggaaaactaaacagtaagtgtcgaggtcaccatgtcatgcacaggcaactcctcccccccacggtgatcatcctaagtctcaagggagttccaaaccaagtgacatgcccncaagtacaagtattcctcctcatgagaaactacaagtacttactgaaaagggttgtactatttccatgcaatatgaagtatgaaacatgagcatcatccatgcactaaccatggataattaa

SEQ ID NO: 9031 - DNA, 430 bp, Glycine max
  unsure at all n locations
agcttgtatgaattaagagaaatcttttgtgcctttttctatttaattattatttcgatttctcgcatctttctcgcgtatgttattgactagtggtgtgcttatgtttaattaacttttatttgcaatcgatgagaattgaagttgtaatatagagctcttcaatttactcttaanaaaaaaattgaatgtgcctttcgatatggtgaatgcgatattattttagatgagcagtatanatgtcacctttgtgttgtgccttttcctcgtctcaccacaatacgatgcagttatgcaaatagtatttattcccctcctcaagaactaaaaagnagaaaaacatgcaaaaaaaaaanagttacctattatagaacttctagtcacctccaacattaaacaacatcttcgataacctatgaagcacagacac

SEQ ID NO: 9032 - DNA, 276 bp, Glycine max
  unsure at all n locations
agcttcactcgaagaatatctgtncatttttttgttcctgtgcaaaattcctctacaaattttcccactatctctctctctcttactcagcttcattgtgctcttcttcttgggatctccctcgccgtcctgtgcttccccttcccacagccgccactccctttgcaacaatgccgtcgattgtgagacctccgttcatgaatccaccacccttcattccaagtccaaatcaaaagccctttcgcgtcctggtgacttggccatgcccatggcgat

SEQ ID NO: 9033 - DNA, 318 bp, Glycine max
  unsure at all n locations
agctntatatagcctttagaacttcaatttgctgatagatctcaactagtctttatctaatagctntggcatttgacatgaggctactactatgcagagagagtggggaccacaaatactttttgcagcatgtcttcagagaagtacaatctaccaatgttgcctagtacttagagctgactttcaacatacaaatcanaagaaatggtaacaacgtaagacaaaaggagttaggaatgtcaagacaagacaatttaaatcttccattntgtgtgctatggcaccagattcttattgacatatggagatctacttctt

SEQ ID NO: 9034 - DNA, 182 bp, Glycine max
agcttcggtcttcaattttgagcttctcgacatattacgggactcaatcagatattcgagtaaaacagtgatggtcgtttgaatttgctcatagctttcacattcaattttgagcgctttgatatattacgatactcaattggacattcgagttaaatgttaatttcgcctgaattgtttca

SEQ ID NO: 9035 - DNA, 334 bp, Glycine max
  unsure at all n locations
agcttccatcacanagtcctgtgatcaatgtgggataatcccaggccccgttggacttatccgggtccaaagggtgcctggtcggtgccatacctgcaaatagataaatggcatcagcaatcaactgagccacgtgaatgctcatccgtgtcaggacggcgtacaccagctgacacttcgacagggggaggtcggaattatgatcgctgggctggatgttgctgagcagcaacgtcatccatatctgggttagggtggtcatgttggtgcgcatgaatccgacccgcttcccagcaacaatccgagcaaaatcctgccccggtatacacagcaa

SEQ ID NO: 9036 - DNA, 163 bp, Glycine max
tttcgagtgtctcaatatattatgcgcctgaatcggacctccgagtgaaaagttatgaacattcgaatatttcgagggctctcgttgattaaattccagcttctgtatatattatgcgcctgaatcggacctccgagtgataacgtatgaccattttaatatc

SEQ ID NO: 9037 - DNA, 382 bp, Glycine max
  unsure at all n locations
agcttcgaaatccaaagatctaatccaaggtagatgtttcataaatgggattcctttgcttgtgttgtttgattctggtgccacccattcctttatatcttggttgtgtgtagaaaaacttaagctttttgtgtcttctttaaataaagatctagtagtagagacccctactagtggttctgtgttaacttctgatgtgtgtttgaattgttctgtggagatttctggtaggatattcttgattgatttgatttgtttgcctttgagctagaatgatgttattcttagtatggactggttatcttccaaccatgtcttgttgaactgttttgaaaaagtgtggtgtntgatgattctggagtgagtaaggatatgatgttta

SEQ ID NO: 9038 - DNA, 413 bp, Glycine max
  unsure at all n locations
agctnggaaataagattatagtaggatgcaaaagttcaactatgtaacgtatgctccaaaatcaaagaaatcaatgtttaaatcatccaggcccttggattcaaaatctaatgaaccactggatcccataaagtaacaacctaatgattcctgccaagaggaagtaccagatatataataccgtcgtgatatctaacagctagtaaatattatagatcaagagtatggagtaagcaagacgcagtgacaaaagttagttaagagttagaaagaaaagagagttttcagttactataaacctaattgaaacagttaacaggaagagaaactaatataagatatacacataaactggtactaaatactctagaaaatgtaatctgacataagcccacttagaagtccaaagatca

SEQ ID NO: 9039 - DNA, 379 bp, Glycine max
  unsure at all n locations
agcttatagctctagtttccaggttgtaaagatgatatctcttcctcatgcattaattgtcactcaagatgctagccagtggatccctcctgagattggtcaagttgatgtcagttgtgatgcttcagttccttaattggggagtctcacaacttatggtggggtgcttcatgattatacatganattttctgtgtggactcaaatccaatattggagattcatctgtgctgaatgtagaattgttgactattctaatgaatctcgcctatgaaattctatttccttttatgaatggatcatggaatagtgggaaaagaactattacattacttctattgaggggctaataatgggagctctatcatggtgatgtcaaa

SEQ ID NO: 9040 - DNA, 376 bp, Glycine max
  unsure at all n locations
agctntgagggtgcgcattccaccatcttttcatagtggaggaccgataatgtgtctaccatcacgattatcgtctccctttccattattgggggtaccacctgggccgccagctccctccactttttgggcgtgttctttgaaagatccgtccccctttttgcaaatgttctgtagttgcatcctatccagaaccatatcaaaattgtactaatactgcctaacaaaggcaaccattaggtccttccaagaatggactcgggaaggttccaagttagtgtaccacgtaacagctaccccagtaagactttcatggaaggaatgtatcaacaattcctcatcttttgcgtantcccccatcttctgacaatacatc

SEQ ID NO: 9041 - DNA, 291 bp, Glycine max
  unsure at all n locations
agcatgagctaattctggacagccataggtttttattcttaacaaactcagtattggagacgaggatcgacactccttatcttgaatgatgactgttcactacctttgatatatctatttacncttggttacctagggcttgaccatgatacacgaattcatattaacaacaagattttaattggttaatatcaagcacgtctaagactggaacttattaaatggaccactggttgacaagatggttggagaaccatcaaatgcaactattgtcaaaattatgagttatat

SEQ ID NO: 9042 - DNA, 320 bp, Glycine max
  unsure at all n locations
agcttacataacctaggtatctctgcataagctgttcgtcgtgctgcctccagagctatattcccgaaataggcactgtggtgtgctctggaattngtgcaaatcatccgcttgccctaattctgcacaaaacaggctttaaatagcctctgaatttgcgacgttgcgcttagtgtgagtaagtgggtttgggcttaacgccagtcttgcgctgagcctggctgaagacacctgttgtgcttagcgcactgatctcacgcttagcatgtgaccttgatattgatgtcttgctagattcttctatcgcgctaagcgcgttg

SEQ ID NO: 9043 - DNA, 383 bp, Glycine max
  unsure at all n locations
cagctggttaatagaactagaacatgcaagaatatcgtacactacgactataactgaactagattctttcaagcaagaactcaccaaaataaggcaggattttgatgcagttttggaggcaaagctggcagcactttaagcagcaggagaggcttcacgttcagcaaaattaaactcggaaagaatcagtgaactctcaaatgaaattgcaaccatgaaagcatcaattgaacaagtgagacttgcctctgaacaatcccaaaaagaaagtgaagcccaacttggtggttattacacaactgcaaggaagaagcacagatnacttggagtccttatagaatgaatacgacactgaactcatgcaaagtctagatgccaacttg

SEQ ID NO: 9044 - DNA, 437 bp, Glycine max
  unsure at all n locations
tcatttccaaatatgcatgtgatttangacgcatcaacaagaatcaagccaaggctattgtgcaagcaatcaatggggcaaaacacaccaaatgattataatgatggatggctcaaattctcacaaaggtaaaatcatcactttcaaattgagctttcaaaactatcatgacatgtagagaagaatcaaggatttcaagtcacaaaatgtcaagaacttatattttcaaaacaattacccatttcttgaacatatcctataattcaaagaaaaacatgcaaagtcgtacgtgcacacaaaatngacccaaaatattaaactgaanatccgacgaaactaacaacactaacanaataacacaactaacaaagtaacaaaaccaacataactagcaaaaccaaagaacacttccccgcccccccgcatacttaaacaac

SEQ ID NO: 9045 - DNA, 477 bp, Glycine max
  unsure at all n locations
cgctggtgactctnggcatgagtttcaattaattattatcatgtatcatatatcatctatctttcaatctatctttcaatatcttctttcatctctttctacagaattttctgattcatttctcttgatctttctaaaagtttttgatcaacactttctcttccaagaaaatttctttgttcaaaaacttgtgttattcatctttttcattctcttctccctttgccaaaagaacgaaggactaaccgcctgaattctttgtgtctctcttctcccttacaaaagattcanaggactaaccgcctgagaattcttttgattcttcccttccccttaaacaaaagatttaaaggactaatcgtctgagatantctttgtttccccttacaaagattcanaggactaaccacctgagaattctntgtcccaacacatnggaggatacatcctttgtggtacaagtagagggtacatcta

SEQ ID NO: 9046 - DNA, 317 bp, Glycine max
gcgtgtatgatatcgactccacaaagtttaagtttatgagaccttcaatcctattacgcaacgtggcggacaaaagtgggctgcttacttgaatggtcattattgtcaatgccgaaggtattctgcgcttcactatccatgttcacacagtattgcaacttgtgggtacgtgagcatgaactactaccaatatatagatgttgtttacacaaatgaacacatcttaaaagcttactccgcacaatggtggccttttgcgaatgaagcggctattcctccttctaatgacgcatggacacttattcctgacccaacta

SEQ ID NO: 9047 - DNA, 382 bp, Glycine max
  unsure at all n locations
ggatgctctctcttttgtgattcactcaatttggactgcttcttagtccaatagctattaaggtggttggccccttgcttcttgactcaaattcttcaagggatggcatcaatcctcctttccaatttcctatatggcaactcacaaacaaggaaacaaagagacaagcaataaccaaagacaaaaaaaaaatgaaatgaaagctaaaccaatggagttttaacaagacaatttatcaaggattattcaacaattaaagcaatgaanaggacatagaagcaagctaggactcanagagaaacttagaatggctctagagtagagtaaaanaactataaaaaaagactcacaaaacctctagctttggaactttgtttcacac

SEQ ID NO: 9048 - DNA, 323 bp, Glycine max
  unsure at all n locations
actaagcttgtaggattatggngtacccatcacatgtggtattaggtggcggtcgggcgatggtgcacaacaagttnttccacatccacaatgcgcgcataaacccaccatcccctgttgcccacctccatctgagctcacgtactcccacgtagcccatatcctcgtttctcccaacaccgggtccccatcaatccttccaagcttccacaacatccaagcaaaacaacattcaaacagcacaagctatcacagccaagcaaaacagagcaaatgcagaaaactctgccaaacaccacccaaatcacagcttttctcactta

SEQ ID NO: 9049 - DNA, 220 bp, Glycine max
ctggatctttgagcttcaatggcgtcctttaatggtgacttatcaccatggagatgcgcggaagacaaaggaaaatatgtgagaggaggcgccattcattaatgaataagccatggacgaaggagcttcaccaccaagatgagccttggataataagctaggagaggatgcttccatggaggaaaagaaatacggagagaaagagagaggggggagcact

SEQ ID NO: 9050 - DNA, 472 bp, Glycine max
  unsure at all n locations
gcatgcaaccttgccgtccagctcgcccaggcgagccaggttgcttcctccataagaaacagccttttggaggaatcttctggaaggcccaagtgggcctagttgctatttacaccccccttttactaaatgcaccccccttttctatntttttgtaattcttttttccgtaacgttacgaaactttaccaatttcgtaatgatacttattttccttccgcaaggttacgaatatttacggattatgtatttacttctttttagctttcgaagaagttacggaaacttacggattgcgcaaaaacgcctcttttcgacttccgccacattacggaatttcacggatcgcgcaagcctgcttcctttagatttctgagacgtctcgggacttcatttattgtgcaacanaggacgccaagtatctcgaagcggctaaccaaagaatgcatgtcatcaagtaataatccccgga

SEQ ID NO: 9051 - DNA, 417 bp, Glycine max
  unsure at all n locations
tgtagaggcttgttgccttggtgagacttgttgcctcggtgccgattcagatgttggctatgattcgtttggcttgtctaagcttgtccattgcttgcgcattcacagacgtcagcgtcgcgacattgaaatctcagcacaccggacaaacaagctccaccttatcctcttcctctttcttcaatttgatctcattccattgattcaacctttcttcagttcctccaacgtcngcgagggtggatctcaatccggcgaactcgtctcatcaccgcctcgaaatgcataaatgattggtgttagggagttcttggtttggttagttggagggaaagggaaaggttaaaggcagatactatanggtgcttgtctgagtctgagaaggaggtttataaacaaaaatcatacgaatttgaa

SEQ ID NO: 9052 - DNA, 345 bp, Glycine max
  unsure at all n locations
acgcgtcactaacacttatacaacgactacaatgcaagtagcccgctcgntgatggcttatttttttatatataaaaaaggagtaaaattttaagttatttcgttaggggtatattttaaagaatgataaaaaaggagtaaaactttntttatatatagtttacgactttaaaagttataaacccgttttccttttattaatgtttaagttaattattttaaaaaatatatatataatttttttatgttttctttctttctcaatttttttttaaaaagtatttaaatgtataataaataatattaacttganttatttattattatatttttttatgactttac

SEQ ID NO: 9053 - DNA, 354 bp, Glycine max
  unsure at all n locations
ctgatgcatctaccccgcagggcattggatagaatagtccaataacattggaccaaagatgcaagagaaggccctagggttctcatgagtcttanggtagatntcgggcccatgggctaagtacgagcccacttatctttgtaaatattagattaaggtttcattatttttgggccttgtagttagggctccataatgtaggtagggtgccttagaaatataggatttttcagcccttgtattttagggcacctagactagtttttgtattatgggtagttttgtaatttcatatgcactaagtgaatatttgatcgtgtggttggaaactaaattaattgaattggtagaagc

SEQ ID NO: 9054 - DNA, 502 bp, Glycine max
  unsure at all n locations
ngacagantgtggatgacacgacacacgtcgatcgatgcttgctgtgtggcagatggtgcacacatacgaatgacgatccactaagctcgcataatatcaccctccactgttgcccaactattacttgagcgctactcacatctctcgtanaactcatattctgtgaataatacttgatagccggggcacaccataagataccttccattgctgaacacatacattcttgccaatcagcttggcttcagaacaatctatgacatatcatcaaagcaaaggaaggtccctatctcatctcatctcatccactactgtcatagcttttctacttatagaccaagtcacattccattcgatcaatgactaacctgtggtcgacatcaagatctactgtgagtctatcgtactcagactacattatgaccattgcatcttcatcatacatacacaacaagtgtgctctgctcttacacaccaaaaatacgtgagttttttcactcn

SEQ ID NO: 9055 - DNA, 336 bp, Glycine max
agcttggatagatcttgagcttttagtagattatggaagttaaacccttgctgagagaaccactccaagtccagatacttgggtattcttacattctccatagcataaatcatcttctagtcattcttcttacttttgttagtaaaccatgtatctagcctgttgatagcaacttaagagcattcaccttgcttcctcttggaatacttggctttcttctgagctctggaagggttgctcgctcattttggaagggaaacaaagggtttggaagcagaagaaggttaggttcagagatgggtgtttcaaggaggtgttggtgtgatttgtggatgg

SEQ ID NO: 9056 - DNA, 364 bp, Glycine max
  unsure at all n locations
ctttgcgtaagaaccagtttatccaatggaacgatgactgtcaagtggcattcggaaggatcaaatgatgccttatgaatcctcctgtgcttacgccactagtgcctggaaggcccattatcctatacatgactatgttggatgagtcaatggggtgtatgctggggcaacatgacgagtctggaaagagggaacatgccatctattacctaagcaagaagttcacatcatgtgaaatgaactactctntgcttgaaaggacatgttgtgccttggtatgggcagcccaccgtctaaggcagtacatgttgagctacaccactnntgtggtgtccaaaatggacccagtcaagtacatatttga

SEQ ID NO: 9057 - DNA, 449 bp, Glycine max
  unsure at all n locations
agcttctaaaaaggctacgtgaatatgggaggtgttccaccactaaggatggcgacatgcatgtgcatgtgtttcgctaatggtgatggcgaaacccatggtggactcgctggcaggaatggcgacatgcatgggcatgtgtttcgccaatggtgatggcgaaacccatggtgtttcaccaatgtggatggcgacacacatggcactcacgtgaacctactacgctgacatggatgcatgcactgttactgcgtgttacgctggaaggaatggagaaataaatgtttcgccaataggaatggagaaacccttaccaaacccttacaaaatagaccctccaaggaaaatgtttgaaaataaaccccttttgggaataagtttctaaaagaaaccccctgtggtcatnttgccgcttaacacacacaccaacaacaagaagaacaacaata

SEQ ID NO: 9058 - DNA, 399 bp, Glycine max
  unsure at all n locations
agcttatccncacaagagtgcataacaactggtgagtctgcattgattataggaggctgaaccaggtaacccgaaaagatcatttccccctgccattcattgaccaaatgcttgagcgcttggcaggtaaatctcattatttttttcttgatggtttttctagttatttacaaattcatattgctcttgaggatcaagaaaagaccacattcacctgtccctttggcactttttcctataggaggatgccctttggcctatgcaacgcccctggtaccttctgtcgcaacctacccttttgcgggcaagcgaggcgaggctcacgggtgccttttccaaaggaggaaaatgcgcggagtcgtcaccaacgtttatttgtggaaaacgtcgaaaaaatcg

SEQ ID NO: 9059 - DNA, 520 bp, Glycine max
  unsure at all n locations
aggccggcgcgcgcncccagtaactgatacntttgtannnncngacacaggagagtgcgtaagctttgttgatttagttctcaccggtgaaaggatcgaagtgtgtctttatagacgcacatttgatcatcccgccttgacgaatgagaaaactggagctaatgaacacggtgagaatgaaggagaaaaccttgctgtgactgtccctcctacctggctcatatcccctacctctcatcaacactaatccttaccactatattcattatattactccctccccgtcgtgcatgtggttcttctgacgccatcccaacctcttctcccttcaattcattcaagaatctcctcttcaccactgatcacccaccccggctgatccttagcaaatgccgtacaactacctccatctcagttcaatcgtcactctctcccattcatctctacttattgattccctctctcacactacatactccttcttcatgagcattctacgctactctgatccttccccccc

SEQ ID NO: 9060 - DNA, 449 bp, Glycine max
  unsure at all n locations
tggaaggatgcttcaatggaggaaaagaaagagggagagaaagatagaggggggagcacgaaatcgaaggaagaaaaagggagagaagttgaactttgagttgtgtctcacaagactctcattcatcaaagttaccacaagtgttacacatgcttctatttatagactaggtagcttccttgagaagctttcttgagaaaacttccttgagaagcttctttgagaaaacttccttgagaagctagagcttagctatacacacncttctcataactaagctcacctccttgagaagcttctttaagaagattcctaaagaagctagagcttagctacacatacctctctaatagctaagctcacctncttgagatgagaagctagagcttagctacacaccccctataatagctaagctcaccctcatgacaaanaaaacatggaaatac

SEQ ID NO: 9061 - DNA, 211 bp, Glycine max
tatacacttaaaatggaagttcttagtatttattacctatacttaatagaaaatacttattacactacaaaataaccataaattggaagagtttgatacaatttacaccatttttatacacaaaagttagtccgtttgactgactaacaatatacttatgtttccttgataacatatcttttcaaaaattggagtacagtgacatttgcta

SEQ ID NO: 9062 - DNA, 176 bp, Glycine max
  unsure at all n locations
gctttagccaatggacttaccttgactntaattccttgatagcccttttgagctttgtntctccttccctggtntgaagctcactacaagccttaagtgaaaaaccatgatatcaccatatccttaaggaatcttggagctttggaattgctttgggaataagtgtgggggttttt

SEQ ID NO: 9063 - DNA, 149 bp, Glycine max
  unsure at all n locations
gagttcatctagggcatgctntgaagcaaacatatccactccggagatcnttctttccatttctttcgttcaatttcttgtcttcagcctctgatgactatgagagactcacttactcactgttgggggcttgagtaccaaagactctg

SEQ ID NO: 9064 - DNA, 339 bp, Glycine max
  unsure at all n locations
agcttatgcgcatacttctttacgaacgntcacttttacaagacattcttataactaataaaaatgcacccatatacaatcaaggcaccttcggtacctagaatatttatatgtacttccaaggtgtatttgctacctacatcacacgcattttctttgctaaatttacatacatgcttactcaaagcactttggctatcaaaattgcatacgtgcacattctggtatttttaatacctgtacatacaccaactttatgatgaatcttgactatctacacaataaggtgctacattccatgctttttctgaagtgctttctatacctaaagccggatgc

SEQ ID NO: 9065 - DNA, 463 bp, Glycine max
  unsure at all n locations
atatngaacatcacaagctctcgagagattcagatggtcatatcttgtctcacaaacttcgattcaagcgccatatataccgagacgctcgaaattggacaaccgaagctcctctgaaagtcacacgggcatagacttttacacggaagtgctcactaagcgcatgcatatccagacgcgctaagttgacaccgaagcgctcgcgaaattctaatggattaactattcaccggaagcccgttccagcgcatcgttatccaaatcctggcatgtactacgaatgtctctaacaattaaacgtgcttccttggcctcggcccccaggccttggtttttcttttgcaccctacaattcctaccctatctcccttcgcttcttgcttcttttctttcctctcccctcttgctctcaattctaacccttcatctactcccaagtctcgtactccattttgtcttatcc

SEQ ID NO: 9066 - DNA, 419 bp, Glycine max
gaagcgtttgtgaaagagcatttgtatgcatcacgtatcgctgtaacacatttctaatagtaacatgctcaaagtatgttaacagataaaatgattcttatagacctgccattaccattccaccacatacttatctgtctatgtgttaaaggagaggtacagcatcgtcatcgcttatactcgtgactgtacaatgcgcagatacaaccacattatgttcatgtgacaacgcgagtgattgtactgtagtccaatgtgcattttcgaagacaaaagataatgcatgcatctagaacatagtggtaattaaactaattcttcttaaaggtcagtgctctcgaatacgtaatgaattcaagaatatacgaactacgaagacactgacagaggtaaaatcttgtaaaaaattaagaaggagg

SEQ ID NO: 9067 - DNA, 452 bp, Glycine max
  unsure at all n locations
agcttccattntctctttctacttgaatgagtaattcttaagtttcatacatcatcaggtccatccttatattnttttttccttctaattattaaataaaaatattgttttcttgaagtctcttccttccatgtaataatgaaaccgtaagatgaccaaattaattntacttgctagttanttgaagaaccaacgtcgcacgccaaaagtcaaaacctacaacccatctgtcatcccgattcattactctcgggattacttcagggtcatttcattgttatctcttcttccttttcacaccctcatttaaattttaaaacacctaaaatacccttctttctctttaaaatttaaaatcttctctcctactcatgtccatgctgatattntagaagtcctaggcggattaataaacaaaagttatacattttttcgataaccatatntattat

SEQ ID NO: 9068 - DNA, 419 bp, Glycine max
  unsure at all n locations
tctcgccattggcagcagcgagacaggtgctgactgggcactaaggcggtatcgccattatcatcagcgagacaggtgctgactgggcacaaaggcgtaagtgctgactgggcattccgccagtagcaccagcgagatcatcatgcacctctgcacgcgctacagacaccttcttcacgtcttgcatagcttctggcttgacacaacagcttatgacactcgtgtttgcaggtaagggcacatccaggctatggttctattcatctgcaggttatggttctgctcattgcacgctanggcatggcatggtgaggagtcacatgggtacagtttcatattcacatgcgcctgtaattattgtagaacatcatgggtgtagactgcgttaaatgagagcattctaagacaaaatttacata

SEQ ID NO: 9069 - DNA, 413 bp, Glycine max
  unsure at all n locations
agcttccttgagaaactatcttgttaagatntctatagaagctagagcttatctacacacacctctctaataactaagctcaccttcttgagatgagaagctagagcttagctgtatgccccctataatagctaagctcaccctcatgccaaaagacatgacaatacgaatgacagtccctactactaagactactcgaaatgccctgaaatacaaggctaaaaccctatattactagaatggccagaatacaagcccgaaatagtaaaaacctattctaatatttacaaagaagagtgaacccaaccttggcccatgggctcaaaaaatctacccttaggttcatgagaaccccagggccttctttagcagctctagcccaatcctctgggagtcttctatccaataccctt

SEQ ID NO: 9070 - DNA, 453 bp, Glycine max
  unsure at all n locations
tctatggaggctggatctttgagcttcaatgagatccttcaatgttgattntacaccatggagattcagcggaaggcaaaggagaagaggagaggggagacaccatccactatggaataagccaaggaagaatgagcttcaccaccaagaattgccttggataagaagctngaagaggatgctttaatggaggaaaagaaagagggaaggggggagcacgaaattgaaggaataaaagatggagagaagtggaactttgaagtgtatctcataagagtttcattcatcaaagttacaacaagtgttacacatgcttctatntatagactangtagcttccttgaaaagctntctttgagaaaacttccttgagaagctcgagacgtatctcatatgtatctgttcacctatgtttcttaagtcatagttggacacacctagttgctcataatc

SEQ ID NO: 9071 - DNA, 396 bp, Glycine max
  unsure at all n locations
agctnggatttcctntgctccggatacctctcctttctcatgtgaacccaaacctaatctccgggttggaaaacaaccttnttgcgccccttgtttgcttgtttaacatagctctcatttctctttttaattatggccttgactctttcatggagctttttcacgtagtccgctttggcttgtccttccttatgcttaaaaactgaaatattaggcattgacaacaaatcaagaggagttagtggattgaaaccatatacaaccttcaaaggagaacaactagtggtgctatgcacagtcctattataagaaaattcaatgtgaggtaagcaaacttcccaatttttaagattctttttaaaagggtccttatcaaggtacccaatgtcctattca

SEQ ID NO: 9072 - DNA, 329 bp, Glycine max
  unsure at all n locations
ttcacanagcttacngtataatctgggacttagccatggtagatttctccacataggccattgcctccctcgcctagtattatgatcagccgatgaggtgcttcacctttggggacttccagctatcacctatggtagaagaatctgaagagattctaggatgccctctatggggaaggaaaccctacctcttctgagggttctatccctcattacctagaatttccaagatagtccaaatctcgacgcacgaattagaccataggacgcaagtccaaaatggggtggctgggataccaagaaaatatttggaggccaaagcaagaatc

SEQ ID NO: 9073 - DNA, 366 bp, Glycine max
  unsure at all n locations
agcttagatcaatataccatctgaattgatattcttatgtaaaaggatggttntattttctcttaaacctcacaaactaatctctttatttgtatttcttttatattggtatagcagaattgttagctttgccaaagctgcacaaatgatgttgatgtcaaatttgcataaatcagtagaaggggttcagagtactcattattgtaggggtctttgggggacttaagcatgttatggccataccatattgacatcttgggcagtgctaatataactgatatatatttaccccttaagattnttatggctggagaattgtgtgttggtgagtatgtgttgttatctataggtatagaatggttgtat

SEQ ID NO: 9074 - DNA, 223 bp, Glycine max
cttatgatcagttaggatgacaaaggcatgacctataacgtattgatgccatctcttcaccgcggtggttatggcgtgcaactcgcggatgtatgttcatgaacggagtagtttatggcaacaatacttactgaagaaagcaatttgatgacctcgttgcatcaacacaactcccattcccgacctcgactcgtcggtcttgacgataaaaggaacactggaa

SEQ ID NO: 9075 - DNA, 466 bp, Glycine max
  unsure at all n locations
agcttttccattaccctagttaatttctaanaatatatgatatctactacttcaatatgataatggaaatattcaactataaacatagttcatttaagaaaaagatgaatccgctaaaaagattatatacttgactaaataagaaattgcaaatttaatttcatatggtcatcccccatcaatgcaatatgataatttatcttttacctttactatcacaagtttgactgatgggtcattttcatacactctagaacttctatatttgataaatctaaaaaatagtagagaagccactgccattcttttacaacaaaagaactatagttttttattgttaattattctaacatcatccctttggttaatgcgacatatctttaattagtgtctcatccttgcagctagctaggagatgaaaagggatatatatctcttaaaaactacaccacttgagatctcacct

SEQ ID NO: 9076 - DNA, 473 bp, Glycine max
  unsure at all n locations
tcaagctcgcttctacaatgatgatggagtntaaagaagacattatgaagatctttgagatgaccgacctcggtttgatgagttacttccatggcatagaagtaagtcacagaaatgaagggatattcatctcacaaaagaaatacacaaaaggcttacttaagagattcaagatgtatggttgcaaacctgctgctactccactcaaaacaaatgagaaactacagaagaatgatggagcaccaaaagtntatgcatcccaataccaaagtctaattggaagcctcctatatctgaccgctacacggcctgatataatgtatgctacaagtcttctatcaagattcatgcagagtccaagtcacatacactttggagcaggaaaaagaattttaggtatctacaacgaacaaaagagttccgtatatgggatactaccgataccaactcacaattacttggctacactgaca

SEQ ID NO: 9077 - DNA, 544 bp, Glycine max
  unsure at all n locations
aggacgcccgcgcgcatgcgcccttgtttgancccctgcatnacggacctatgagtctcagcttgtgatgtgaatcgcgtctantgaagatgactatgcatgccctatcatactgattacaagatcgacccaacaagttcgcaatctcgaatgcttacatgattcgggcatgagactcacactcgatgagcgtatgtttcgacattcattgcaagagatcgaggcgctgcgggttgccacttcgcttcggaagtcttggcanggcttattgccaaccattcatatctcagctccgctatacaagcagagtattctagagctttctgatttaccagagtagctactcttgtggaactgatgcctcgtgacacgattttggttagccaaattatcaacgtgaattgcactcgctcgagatgagtgtatatggcgtgataagggcagcatatcgcaaccaaggacgcttgtggctgatcgttgaattcacactcgagcgtgaagagtcacgtactttgtggaatgcattgtgtatcgatacatgccg

SEQ ID NO: 9078 - DNA, 446 bp, Glycine max
  unsure at all n locations
agcttaacctctatacccttaatccanaactctattaactaaaccctaaactctaaggcttagacaccaaaccctatatttgaaaacccgaaacccttaacccaaccttntaagcccttaaccctaaaatataaaaaataaaccctaaaccctaatggtttagacaccaaaccccaaacctcaaaaccctaaaccataaacccttaaccctaaattctaatccctaaaccctaaactcagaattctaatacctaaacccaaaactatgcattataaaccctaaaccctaaactctaaaccacaagggttagacaatacaccatacatcttaaaccctaatcccttaaccctaaaatttaaatactaaaccctaaacccttaaccctaacctttaaacccttaatcctaaaatatcaaaaataaaccctgaaccctaaacctaaaca

SEQ ID NO: 9079 - DNA, 377 bp, Glycine max
  unsure at all n locations
acacttagaaactaagctcacctttggtcctcctatagttgntgtatgagaaacatgctctatttcatctccactgcngtaggcctncggatcattctttcctttaaagggaggaatgttgagtttaataccatcaattcggttttgtctaggaacaccatcattccctcttctccttctttcttcttcattatgatctctattctccattngatccaacctctcatggagcgcatcatcttcgtgttcattaaccctctcatatgttgcatcaaagcttgcatttggatttgcgaaagcccccctccatcattaggatttgttcctgtcatctcanacaaacaaatcaaacctaacaagacaattatagttgttgt

SEQ ID NO: 9080 - DNA, 344 bp, Glycine max
aactagcgatgaagaaagtgaacttgtttccctttctcttggaattttatccacaggccaacatgagatgaagaacaagaagaatagaaatgaaaagatgagagaaaatgaggatttgaaagatatacttgcacttggattagatatcagatttgactcttcagctataaaaaatctaagcactgaaagtagttgtgatggggaaaggaatgatgaggaactttcatagacatggccaccaagtaaagtttgccagacaattatgagaactagagataaaagtgaagtttctcaacatgctgaactcaagaaggccagggtgtgtatcacagcgagatgtgata

SEQ ID NO: 9081 - DNA, 383 bp, Glycine max
  unsure at all n locations
agctnggagcgctatccgcagactcagcagaagttatgtgtgaaagatatcagactatgtgcacgaatcttatacccaatgggttatggataggaccaagagctttggcctaccctaccgcttacctagatacctatcgtccaccatcccaccatcatccttgcctatccccttcgacaccaaggaagaagttcatgaacaattaaccaaaagaaaggcaagaaaaagaaacttggaagaggagatgccaggagctcgagcaagagaatgagactttgaaagggaagatagcccaacagagccgtgagctttttatccagaaccagaggatgatcgagaaggacgacttgcttcgtcagaaagacgccttgctccaccgagat

SEQ ID NO: 9082 - DNA, 421 bp, Glycine max
  unsure at all n locations
cttgtccatntatcacatgtccagcaatcatactattctaaganactgaatccttgttctccatgttatcaaaaacaactctagcatctcttaacatccctgactttgaaagcatactaattagagagttgcacacaagtctttctgtctcaaaaccgagctttacaaccaaggcatggatttgcattcctatagccaccgcaccctgattggccaaagctgcaattacagtacaaacagtataatagtcaggtctgtatccctcaacttgcatcagacagaacaattcccacacctgatcattaaatctattccatgaataacccgtgagcaaggaattccacgacaccacgtctctgtcacccatctcatcaaaaactctcctcccatctctaacattccccgttntcgtgtacatatc

SEQ ID NO: 9083 - DNA, 471 bp, Glycine max
  unsure at all n locations
agctntaaacaacttgtataatcgataacaataatgctgtaatcgattataaataaagagtntttccttctgaagaaacttttctaacttggaaatatttcttctcactactaaaaaaaatgctttcaacatcgctactttaacatcggttntatgaaaaccgatgttaacaaaagaacaatggcattttcgtaaataaattgattttgttaacatcgattcttgataaaatcaatgttaatcattntttggtcaaaaaccctcttttcatcttcagccacatccactctcacttactcactcagtcactcactcattcgttcttggccaaaagccatctttcattttntgccacgtccactccaccattctcctcaccctcaacccttacccttaagttcagtactggcttcaaccatttcctccttgtcacctctcttgacgcccatgacgacaattcttaccgctcca

SEQ ID NO: 9084 - DNA, 307 bp, Glycine max
  unsure at all n locations
atactaagcttccttcaacctcctccttgctaatgttcctaaaggagacaagattatagactcacaaatngcacaaacctcaactcttcttgaacanctcctgtctctaacctttccatcactcccctagctactccctcagcactagcaagactcttcccaacaatgactgtgtttctcctcttgctcacaagttcactcaaaacactagttacatcatctacatgatcaccaacatggtctatagactngaatgatgccccaaattgaccaaaagatctagatggngacatgctgctgctaccac

SEQ ID NO: 9085 - DNA, 418 bp, Glycine max
agcttgtcttttctcttctggtcaaaaatcatatttacgagaattattaatttgaattctgcgaaggacatttgggactacctcaaatcagagtattaaggtagtgtgcaaactaaaggtatgaaggcacttaacttggctacagaatttgagatgcaaagcatgaaggagacaaaaactatcaaaagttatgctgacaaacagttgagcattgcaaacaaggtacgtctccttggtaagggatttcctaacgaaaggatagtgcacaaaatagttgttactatacctgaaaaatatgaatccaaaatatcagcattagaggagtcaaaagaattgtcaaatatcaccctcggagaattggtaaatgctttacaggcacaggaacataggagaatgatgagacatcgggtggcaatac

SEQ ID NO: 9086 - DNA, 516 bp, Glycine max
  unsure at all n locations
tgtccggcgcgcgncggtgtnctaatatcctcgacnnacngaaacngaaggtnatagatctctcatgagcttaatatcacaaatggacacaatatttatgagctttatttatcacgagcctttcaagctgaatgggactaagctgcgtatgagcactgcttaccatcctcatagtgatggacaaactagagtgcctgattgagtatcggaacaacttacgtaggtgttttggataataagccatcctaatgggataagtttttgtatcgtgtctaatggagctacaaccccactacttagttgaccactaattgaacctccatgaaattgttgatggaagcctcctgcctatttgtcctatcataagctggtactttgcccggaagcgatgaatctatcttgcttttgcccgaaacattccctctctcgactacctggacagccgacacattcaaataagtggtttcctttcgaatgtcaaacgtcttgcatgggacaagtgaatggtcccacaac

SEQ ID NO: 9087 - DNA, 483 bp, Glycine max
  unsure at all n locations
agcttacggcccatgaaaatactccaaaacttaacttttaaaatatagcangaaacaaaccacaaataaaaatttcatcctcatctctaagaatgatcccacagtgtcaacttacatagtataaaaaaatctgtaagtttgttctagatagtgtttgaaatttagtaagatcaaattacatagttaaactcaaaaaaatgcttttggtctcttagccccctccccncggatatttggtcttagttttttattttcaaactgatgaattaaaaaccaaattttgaaatgactaatttatattttaacattaaatataaaaaaatatttacaaatcattattcaataatatttcattaattaaactnaatttgaagatatttntaaactaaaaaagacaaatacatgtggttggtatatttaatttaatattttttaattattaacacaacaacctttccttaaagagaaagtgattacaaattt

SEQ ID NO: 9088 - DNA, 435 bp, Glycine max
  unsure at all n locations
gtgcaccttcaatctattgatcaacttcactttgtcattgacattgaaattgaatngtatcgccaagacttaaaagtgttacaatgttaaatggattgatcatgttggaaccctaaacattattaactntgaacttctaagatggttgtaaaaaaaatcatcgtacaaatttggactttcctctcatcgcgatagattgtatttctaatttattttatatttaaaaattgaaaatagtgacctaattntattttaaaattattttatgtcctaaaattaaacattaaatagggcctgaattagcgaccgaaatacatttttaatntagtttacatttaacaatcaattataaattagcgaccgaattggccatcgaacttacttttaattcattttatatctataaaatagtcaccaaatcagcgaccgaatgta

SEQ ID NO: 9089 - DNA, 457 bp, Glycine max
agtctttatcactgccagactatttatgtgagtctctttagaggtaagggatgagtttatcacaattacggttagaatgaacatgtgcagagattcttacaggatcaaattggggtttattttgggatgtttattgtattacaattcttcatgtatgattataataacgagattgttttatttgatggattaattgatgccctaatgcgaattggttgatatagtgagtgctcatggtgtgaaattatttgcggggcccatgttgtgagaagcattttgtataatatgtctgtgttttggacaagatttactatattagctcgatatattgttatatcgtgatcatgaaattgtgattaaaactatgtgttagtgatatattgaatatgtgacgaattatgagacattaagttgtggacatgggatatggtatgaataagtgtgggtaatattgatg

SEQ ID NO: 9090 - DNA, 370 bp, Glycine max
tctaagcttaatattgcaacaattggcaagaatgaaatatttttttagctatattgtggactttgtgactatcatcgacaagatggtagtacgaacaattttcacttgctttgcaatttttaaagcagaccaaagaagttggatgtgattctacatatttacagagatatgtacaccactacaaatttgtgtatatatagacaggggaatcgattgctagcagtttacaatcaaacgcatacgtggaaggacaaatgtttcgttgtgtttgcataaatttaacaaacagttaaaaatgtgactataagaagcataatatggtatgctcctccattcatgcatatattctcgctcataaattcacttatta

SEQ ID NO: 9091 - DNA, 432 bp, Glycine max
  unsure at all n locations
ntatgtgcttganatataagcagtccacatcacagtgcttttaaggttagaaaacttcgacataaaagaattccctaccacataaaagacccctcttcactatagcacaatggatcagcatttctaaaattaccttggcagaacccttgcaaacatctatgaggcttgcaaatgtaatctcaaatggtttcactctcacatttgcatcttataaagaagagtaatagaatctttcttgttgtttatagcatcatctcgcatctgagcattctctccgactccccttttgcttcggtctgctatagataatatattgctatcttccatgctcctctctcttctttatgtgcaatcccttaatcttctccctctcgtctttcctcaacttctctctctcactcttttctcctcctctgtccgactcttccctcg

SEQ ID NO: 9092 - DNA, 377 bp, Glycine max
  unsure at all n locations
tatcctggtgtttcttacccgttttctgtgggtaaacattataattagccaattctaaggcttcgttaacaatggtgttcgactaggttttcctttcacttgatgattntaatnttatcagtgcagtgaagtatatggggaatgtctctaacagaattaccccccaactcacagtgatatatttatggttatcaaccaagtgctgtaaatgactgttgccattgggaagggatgtctatgctgcttctaacttttcagattagcctttggtgttctatcaatgtaatgtcatattactcatgtctgaatgctatgtactgtgttcatccaacgggccatttcgtagacttgagccgtcctatcttaattacttaact

SEQ ID NO: 9093 - DNA, 326 bp, Glycine max
  unsure at all n locations
agcttncatcaagtggtaatcatatcacaagagtttatagtggtgctccttaaacctnncattaatttttttctttaccttctcttccattgnntgttcttcatttttctccatgtatctcctcacatgtcttggtctaaatgttgttaacatgattctttagagtttccaccgattaaacttgctatagaaactagatttgatttctatggttcaaatttcttgttcttggtcttgaaccatgaattgtgttgaagttaagccctatgagttttgcttgttatttttggggctgaacctacaccattaaattcttacaaaatatt

SEQ ID NO: 9094 - DNA, 389 bp, Glycine max
  unsure at all n locations
tctggtgggacatcttgactggctntccaatctgactattacctcatattctgccttcttctattttcagattgggaatgcctctaacagcacctttgtcaatgattttcttcatgcctcttaagtgcagatgtccaaatctttgatgccatattctgacttcatcttctctggagaatagacatgtggaggagtaactggtttcttgaggtgtccataggtaacagttgtcctttgatctgctgcccttcattaggacttcactcttctcatttgtcaccaagcattctgactttgtgaagtttacattgaatccttcatcacacagctgactgatgctgatcaagtttgcagtcagtcccttcaccagcagtacttttgtccagact

SEQ ID NO: 9095 - DNA, 363 bp, Glycine max
actttctgtgattggttaaagatacaatctttgctattagaatgcttcagaaacattaagaaagctagctgatgggcctaaaagaaatgttataacctggcaaggatacgacatatataggtatttattttacacaaaagcacaagatgacaaaagtacaatgctcaactgcggcgtcactctaagggctgaatctaccactttgcaagtgtcaatgacgccaatccttgcgtagcattcatccctaactgtgtgttcattgatgaaattcgggagccttactatgtgaaacttacggtatgtgttttcaaatgtaaatgggttgacagcaacactcggtgtgcgcactgatgatatacgatt

SEQ ID NO: 9096 - DNA, 343 bp, Glycine max
  unsure at all n locations
acacaagaaactaagctggtttcaaacttgggccacctaagtaccatcggattataatatatagaaatatattgacatgcttgattcaagtttacatttaaacgaaagatatatnttggtgcaactaaataacttggtaattgaatcttagattcggaagtgtgtgattatattatatagagcccaggcaagaaacataacataagtgtacatccatgactccttaaagacgttcttgtaggctttctagctctccttggaattgtggttggagattttttttcttgttggatggctggaagataggacatgttatgtaaaatagaaagacattgatattaaa

SEQ ID NO: 9097 - DNA, 349 bp, Glycine max
  unsure at all n locations
agctngattctttcaattaagtatattaaatgtcttagttntgagaatgttacccctgcatttcacaaatgtctctgccataattaaaataattttggttagcctacagtatattaactggtgatagtattgtaatttttatcacccaatagcatagccattgtcattctaaacactatcttttttttccacttacagaagaagaaaactacttggtcaattaaaagcttatagtaaataaatatttaagtgaaagtaaaatatattgcaataatttaaaaacaataccaaaattgaatctgtagtccaatgattacaacaaagaaacaaaatgagggggaaaaaagct

SEQ ID NO: 9098 - DNA, 438 bp, Glycine max
tcatcctcaaatccctcttgttggactaggcccaatttatacgatcctcttaggtttagactaacttaaactgagtttcatccgtagatccctcttgtaagactagactcagctcaagcagcttacaaaagtttagccaaaattggtccgcagattcctcttgcaagactaggcctagactaaacagcattattgtaacaacataattaaaaccaaaactttatctgcagatccctctcgtaagactaagttttgatcctgcttcaatcaagttctaaggcaacagtacatttccaaatgctaaagtcacctaactatgcacacaaatggatgatcaaaccaaaaagcatacaaacattaagcattgaacgaagcattgaacacagaaaacataatcaattagatatcaagtatttacatcagttgttcattagaaat

SEQ ID NO: 9099 - DNA, 441 bp, Glycine max
  unsure at all n locations
agcttagtttttatacacgatagttggactggtattattttctgaagtgttagaaactctatcaaattgtttgatgatcatacacttgtgattagagagtttattctttgcttataaaagatatatgttcgtgttcgagcttaactatatatcatccagctctttgagagctctaaatcttatattcatttcaaattgttggttggattccaacttacattcacgtatattcgctaatctccttcatatgaacttgtaccaaattaaaaagctataaagtaagtagaaccctctttcacaatattntgaaattngtattaagtgtttctcttatagaagcatcgaattgataccctacgtttggaaagaatataataaataacgagtaaaccaacctccatgaagcatcaaaagaaaactcaaaacccatattgaatgaag

SEQ ID NO: 9100 - DNA, 144 bp, Glycine max
gtcatggcgggtatcttcgacgtatgttacaagctctatggctgccgatatagtcctcacctaatctctatgtgcaggtgacagccgtgagtatgaaagtaccgagcttagaggatagcgaaccaccattgaagcccctgatgt

SEQ ID NO: 9101 - DNA, 406 bp, Glycine max
  unsure at all n locations
tgtaggaatatggngtacccatcacatgtggtactatgtggctgtcgggcgatggtgcanaacaagttttccacatccacaaatcgcgcataaacccaccatccnctatggcccacctccaactgagctcacgtactcccacgtagcccatatcctcgtttctctcaacaccgggtccccatcaatcctcccaagctttccccaacatccaggtaaaacaacattcaaacagcacanactatcacagccaagaaaacggngcaaaggcagaaaactctgcccaaaacaaccaaccaaaatcacagctttctcacttaaagaccccagtaacaattccttcgttccagtttcttaaccgttggatcgactcgaaaatttactggaagctctagtacataatctacat

SEQ ID NO: 9102 - DNA, 69 bp, Glycine max
  unsure at all n locations
agcttgtaagaagtatagcaatataggagaatggttttgnttgatgataaagacttagattttaatcat

SEQ ID NO: 9103 - DNA, 375 bp, Glycine max
  unsure at all n locations
actaagctgtgcanataaatcactcctacatttcatctctagcatgcattttctttctttacccactcctcacgnttggttttttagggaaaaacaccataactaaacgcgccgcaaggtatccctatcgcaccagatccaaatctagaacgatgggtgatcaagaggagacgcaggaacagatgaaagccgacatgtcggctctgaaagaacaaatggcctccatgatggaggccatgttaagtatgaagcagctcatagagaagaacgcgaccaccgccgccgctgtcagttcggctgccgaagcagacccgactctcttggcaactacgcaccatcctccctcaaacatagtatgacggggaagggacacac

SEQ ID NO: 9104 - DNA, 413 bp, Glycine max
  unsure at all n locations
agctnttntaaaaacntttttttagataaaaggcctttgtcaaactataaaaaaaagctcgttaagtttgataagccggcttatttaactaataataataataactcttaatccataacattttatgacattatgaatgacaggatgaagtatcataaagtgcttagagaattcacttgtatgtggaaaanttttaaaaagaaaaagactctaagttaaaaggataatgtaaccagaataatactttcaaagaaaagaatgttttataaagacattntcagacaatttaaatatttttatttggctatattagtataaatcatctctaatccatatnatttttaatatttatgctctctttnttcattntcttttgatatactttgtggtttaataacttgaattcgatatga

SEQ ID NO: 9105 - DNA, 457 bp, Glycine max
  unsure at all n locations
ctaagcttacatcttcctgagtagctgccattggttgtattgtagcacttttataccttctaaaggaacaagtatagctggtaaattgtttgtttgtctgtgatgaattcctatggtattctccttttatagagctaggaatcaggactagctagtattcagcagatacgtaatcaattagaaaagatatacctatatacatatcatgggtatagtcaatagtggggacgataacaaaaaaatgggaaagtgctaccgtgtattaaattcattttgattgctgcgtatgaatgcggagacattgcacatgagaaggatctaganaaaatatgaaaaaactnttccctatcaagaagaatcctcagagntaacaaatgtggaaaaataaatgatgtaagagattgcgtaaaccgtgtagagaagattcctctaatatactcgatcctcaatcaaatat

SEQ ID NO: 9106 - DNA, 430 bp, Glycine max
  unsure at all n locations
agcttctatataagcagaaccatnttatcaataatgtctagttgagttttattcagaatattagagtttatctcttttatcttagtgagagtgattctcctaaattcttgagtgattcaagaacaccttggctgtatcaaaggactttcacaacctttgtgtgttgccctcgctggaaagagagattctttccttcctttcatcttcacccttgttctttcaaaccacaattccagaaaatccacctctgcccagaattatctcgtggccataacttcaattctacgcactcaaattaagtgattcttgagcctaaatggaattccaaaacgagagcttccacctctgtttggaatcacttcatttggagccgtgtagcttccgntattgccatctctatatttctggccagcccccacataacctacat

SEQ ID NO: 9107 - DNA, 227 bp, Glycine max
gctgtacattcaatttcgagcgttccgatatattacgggactcaattgtacatccgagtaattagttatcgtcgcttgaatttgctcagagcttcaacattcaatttcgagattttcgatatattacgggactcaatcagacatccgagtaaaaagttattgtcgtttgaatttgctcagcgcttccgtattcaatttcgagcgtctcgatatattacgggactcaa

SEQ ID NO: 9108 - DNA, 347 bp, Glycine max
  unsure at all n locations
agctnggaatggtacgatatatctacaaggctgttttggatacaagagtntgtgcccgcaaaatatttggaaagaaatcctgcacctctggttcgaactcctcttaagactctagtaatcaattccctttacgtagcaaagatagacccttagatacaaaatgatggagtgctattttaagaaaaaaagaagtattctggtctccttgagcatgcccttagaatctcgatttttctcgccataagcattcctgaaagtgcaaaactatntgcatctccttttgtgctagaacttcttgattaaataatgcatccgagtatcctatattcacaatctattggtggata

SEQ ID NO: 9109 - DNA, 376 bp, Glycine max
  unsure at all n locations
actaagcttcaggctactcaatngctccaggttgctgcatggaagggcaaatgtctgtattgtggtcagcagaggagcacaaaccacaaacccttgcgacaggtacagatttctgattcaaggccagctgggttatcaagttaaccaatgcatccagtctgccttcaagcttcttagttttagatgatgcagatgggtctgtagctacctcatgcactcccctaatgactatggcatcatttctggcgctaaactgctgggagttggaagcatcttctcatttaatttctggctcagcanggtcatgcctctaaaggctcaccactggagcatctatcatactttgtccatatactgaggcttcataaaaaattga

SEQ ID NO: 9110 - DNA, 252 bp, Glycine max
  unsure at all n locations
tgttgtaacattntcaattaagggggtatgatgtagtggactaattcatatgctcgtatacgttagtttatggtagttaaacaattaggtggttataactaactgggattgttgttgtaagttccctccatgtataaaaattattcattgttaatcatttcaagatgatcaataatacaagtctcattctcaattccatttactctatcacttctcttaattctctctaaacagaaattgtgtgtgtgtgtg

SEQ ID NO: 9111 - DNA, 262 bp, Glycine max
ccttcatctcttcggtgtggcaagcttgttttcttttgtgttaggatatctacatcgtctgcctcagtcattgtggtgcagtttatatatctgttggacaacttcacttaatgccacattgatttaagatgaaatctaacatgatatcagagcttatagtccggcttagttctctctaccatgttggttgtaaaagcagcagtacctgagattctcattcagttgtttgctcttagaagagccctacatactactaatctca

SEQ ID NO: 9112 - DNA, 351 bp, Glycine max
  unsure at all n locations
agctttatgaatgctatngccgattgttaacaggttgattagagtatcttcccaaactgtaattgttatctttatattttctttcaccgtcttgatggctttccacattccgatttcagattgataacaattcaagtgttgatacaaaatgtgatttcgaacttggtaggtgcagctacaataaatctgtctcggggtggatgggtgccaattataacattttttctccgtctttcgttatgttatgctggtcggtgcaatcacaattggactgttcttgttattcccgtgtaacctttgagttatgacttatgataacacagcttttatctatattccctcatgcatctc

SEQ ID NO: 9113 - DNA, 288 bp, Glycine max
  unsure at all n locations
agctctgaatgcactattcatgtttttgacaagattatcttcagactgatcaacacttgcacagtggccaaagatgcatgggagatcctgaaaatcactcatgaaggaacctccaaagtgaagatgttcagattgcaactcttggctacaaaattcgaaaatctgaagatgaaggaggaagagtgtattcatgacttccacatgaacattcttgaattgccaatgcttgcactgccttgngagagaggataacagatgaacagctggtgagaaagaatcttatatcct

SEQ ID NO: 9114 - DNA, 341 bp, Glycine max
  unsure at all n locations
tgactnnggcgatttgatttagccttagtttcactttatttattattcaattcaattaagaatgagaaatcccaaagagaaaatgtccgattgattcttgtgcttcattttactaaaagatatatttctttattattatattattattttacctctgtttttttatttccaacgtggttatggcacgaccaaacggtgggaattcattntaacaaaaattatacgaatactacaattcaaatgatcggtggaaatttatttttttagattacgcgcgaaatgacttacataaatgactgaagcacgtcaaaaggtggtacgaaaagaaaatgatacgagaa

SEQ ID NO: 9115 - DNA, 291 bp, Glycine max
  unsure at all n locations
agctngagtacaaatcaatgttgtttatataatnttacatatgtactctcatatatgttcatgatgaacaattattttaagctgttctaagatttgtgtctggagaagcttctttgttgttcaataaaattacgcactacaacatttgttctttccttgaacccggccgtaacatttttcttttctctattagggaagtggcaccagattatctttctctaaagttcagatgaggcttccaacanattccaatgatatcctcagtcatttcgcatgtcttatgaaccccat

SEQ ID NO: 9116 - DNA, 359 bp, Glycine max
  unsure at all n locations
ttcaccatntgttacagagtttaatgccgntaactgttggtcattgtatttagtgtcctctttaaactcttctgcattgaacttgaaagggaagggaaaattcatttcattcaagaattgtggttggctggatgaaccttctctccactgcattatgaagggtgtgtcaaaatgagattgtaaaaatgatagatgaagccaacaccaaanattgtaataataaatctgtgaaggtctgtttcccgggaagcaaagtcccaagccagttcaaatgtcaatcaacagactcctcaatcactgttaatctgtcttcttaccttaatgaatatatgggatcaactctgtgtgtggttctttca

SEQ ID NO: 9117 - DNA, 384 bp, Glycine max
  unsure at all n locations
agctatgatgatatggtcttcatctacgaaaggattatagtgggtctaanaagaggcaaatctgatcatcatgctttgataaatgccaaaaaaaactagggcaaatgaagaacaccacctttagcacaaacctaaatcaaccacaaagtctgtctacccgcacttcaatgacgaacaccacctttagcacaaaccaaaaacaccaaccaagaaatgaattttgcagtgagaaagcctgtagaattcaccccaattccagtgtcctatgctgacttgctcctatatctactngataattcaatggtagccataaccctagccaagggtcattaacctccatttctccgagaatacgactcgaacgcaacgtgtgcttgtcacgga

SEQ ID NO: 9118 - DNA, 401 bp, Glycine max
  unsure at all n locations
tctacttatgtggcagggcgggcttccttcactntcttgtctcttatgcgagctctgaccactgttcttccttcctgcgatgcttcttttcatgtccgcctgagtgggattatagcctaaaccatacttcccacgatttccttgggtttttatcaggctagttatgccgccattgtctntgcctaaacccatcccgggttcataaccgttccccaacataactcgggccatcattaccgccgcatcggacagacaaggttgcccaaagagggagtccacggaggaaatgctgaccacctcaaaagactggaaaagcggttctaacgattcttctgcggcttccacataaggcatggaggatgggcagcttaccaagatatcttnctcgcctgacacgatga

SEQ ID NO: 9119 - DNA, 447 bp, Glycine max
  unsure at all n locations
agcttgtaatatntatagcttcttttattaagcgtgtattatctcacagtggatgaatttcctgagtgaaactggtgtctgatgcttatgacccacggagtattaactgtatacattaaatgcacagccttccttgtgcaaccgaaccactttgatagactaattggtatagcacttctgtacaaaatcaattccttttgcctgaaatgacgtctacactacagaatgtgtcttctgataaagaatgacaacttctagatcttgaacttcatttattcttcaaggattcgacagatcctaggagagtgcttttgcataatggatctcagacaaagtatcaaatgaagtcttatatgtcatctcttacatgttgagtgcatcatggctatagtcgactatcgtatgatattccacatgcaaactcatgatgcatttttgatatccgat

SEQ ID NO: 9120 - DNA, 136 bp, Glycine max
ctaagctggatgcgtaaggctcactatagaagcatgctcatgccacaattgttattcgtggctatacgagacatcttgccatacactggccggttaactacaactcgcctgcgctgaaaattccatgcgtatatgc

SEQ ID NO: 9121 - DNA, 385 bp, Glycine max
ttcggagcgtcgcgatatattacgggactctattggacattcgagaagaacgttattgtcgtttgaatttgatacgagcttccgttttcaatatggagcatctcgatatattacgggactcaatcggacattcgaataaaaagttatcgtcgcttaaatttgcttagagcttctattttcaattcggagcgtctcgatatattacggcactgaatcagacatccatgctaaaaagttaatgtcgtttgaatttgatacgagcttccaatttcaatttggagcgccgcgctatattacgggactctattggagatcccagaaaaaagttatgtctcgttgaaattgatatgagctcccatattcaatttggagcgtcttgatatat

SEQ ID NO: 9122 - DNA, 374 bp, Glycine max
ctgcataccccaaggatccattaggaaattacttgtgaaagagatccatgagggtgggctcatgggccactttgggatagacaagacccttgtcttcctcaaagaaaagttttattggccccatatgaagaaagatgtccataagcattgcactaggtgtgtggcttgtttacaagccaagtctacggtgatgcctcatgggctatacacacccttacccatcccatctgcaccttgggtagacattagtatggactttgtccttgggcttcctagaacccaaagaggtgtagactctatctttgtggtggtggatagggttagcaagatggcacactctataccatgccacaaggtggatgatgcttcccaca

SEQ ID NO: 9123 - DNA, 265 bp, Glycine max
agcttgtatgataaaactgtcttgagaagctagagtttaactacacacacgcgtctaagagctaagctcacctgcttgagaagatgtcgtaagaagctagagctcagctacgcacaactctttaatagcgaagctcacctgcttgagatgagaaactagagcttatctacacccccctataatagctatgcttacccccattccacaaattcatacgaatacaacagttaaatgtccctactactaagactactgcaaatgccct

SEQ ID NO: 9124 - DNA, 314 bp, Glycine max
ctgcggatgtggtcttctccagagagaggtatcgattttatctgtactaggcaaatctaatcatcctgcttagacgaatgagaaagctggtgcatatgaagagggtgagaaagatggacaaacccatgctgtgactgccattcctatacggccaagtttcccaccatacccatcaatgtcattactcaggcaataacacactttctccttacccaccaccccattatccacaaaggccatccctaacactaccacagagtctgtctacgcgacttccaatgacacacaccacctttagcacataccataaacac

SEQ ID NO: 9125 - DNA, 432 bp, Glycine max
  unsure at all n locations
tgattgaangatgaagttgtggtgcgtgatcttgtttggtgtcacccaaatgcaataaaagtatgcaatggatggtatcttggtgtttttatagacaagacctaccaaataaacagggacagaactccactaattgacttttgtggagtgacaccaacggcgatgacattctctgctgggttngcatatctggaggctgagcgtgttaataatattgtatgggctttggaaacgatttgaggcctaattttaagacacgatcgcctcctcttgttattgcactgacagagactagcactgatgaatgcagtgaaactgtgtttctcgagtctactaaaattgtgtgcaggtttcatatcgataagattgtgacgcgaagtgcacattttaatcggcgaaaaaatgtgtgtactatgaatggataccgacgan

SEQ ID NO: 9126 - DNA, 221 bp, Glycine max
  unsure at all n locations
tttgaggagagtgtacattattcagaagccgttgganaaatctctaactgtcataatgctggtgttgtagagaataagactatagagagagagagactaacagtgcttcgggaaaagagaaataataatctgcggagagagaaagttgttaaggcctgnggaacacttgcatgccaggcgccaaacggaacgaccactaacaccctntctttctcctccac

SEQ ID NO: 9127 - DNA, 549 bp, Glycine max
  unsure at all n locations
tcgcccccccgcgcgtatgatctcatgacatctgacactatgatactcaagctgagtggtaggaacaatntgagatcgctctcgaatgaactatgagcgctctaattttaagaataggaaaacgtagtcggcaactgatgcgtgatcatgaatctgacaaccgatctaataaagatgaatatgagaggacacattactcacactctaagttacagacatgattcttgtatgctccacaaatggaacgctatgagaagattacaagtacaagagactctgataggaaagtgaagcatgaatatcctatggatctaatgaggaatatactcgggcgcatgactcacacctaaatcaaaggatatgatggtggttctctcgcatatacgaacgcattctgatagtgaatagacataggaaacgttgacaggaatacgaaatatgacagctcataaaaataatgaagaatatatatgggcacatgagtcacacctcagcatgtattaaagcttactaagtatangaatgaaagttattgacacgtggtgatcn

SEQ ID NO: 9128 - DNA, 458 bp, Glycine max
  unsure at all n locations
agctataatgctcatacattctntaatatgtttaatattcggaaattaagaagttgtaagtgtcatgttaagccttgtccttgtgttatttagacttgttattatgaggcaattcacgtagtaaactccaagttcattagtttttccatcaattactgagtgttttatgtgtctgtatttttcattccgttcacgtctttctccatcttagcttcggctttgcattntattgactcgtttcaaacattttcttggctgccttgttcttcttctgctagtcttttgttgtttttggtatttatgtcatctgcttcattggtttgtctaccactgacatctnctgcataacataacacccgtgtttcttgttgagttccaatctctttcatttgtgcattttccagtgtggtttaaatagtctcctgccactgtggctgatctccactgccatatcatca

SEQ ID NO: 9129 - DNA, 381 bp, Glycine max
  unsure at all n locations
tactaagctataaggcaatgatgaaataacttaatcatattattttgcattacctgtttcataatattctaaatgatatcaattgtgatttgttgttgtaggtacttgatgaagattcccccaagacattggagtaagtctcggtttacactagatgcaaagacaaacatgttactcaataacatgtctgaggcatttaagagtgtaattgtggaggccggacacaaaccaattgtaaccgtgtgtgatgatataaagatatgtntaatggaacggtgggctntaaatataatgaaggtgcttgtatgggaaggaagtgcgttacctaagataaagaagtnggtggatcttaagtctattaacacacaaaactggttatgc

SEQ ID NO: 9130 - DNA, 438 bp, Glycine max
  unsure at all n locations
agcttcatgatggatgaatcaagtgattcaagaagttttgatattgacaaagatggtgacaaaaaacccaaagaatgatttcaagattaaatcaagatccaattccagaatcaagagaagtttgatttccagattcaagaaaagatgaattcaagttccaagagaagaaatcaagaagacttcacaatgggaagtattgaaaagattttttaaaaaacaaacatagcacaattttgtttttcaaaagagttttcacaaaattttctatgttaccagagtttttactctctagtaatcgattaccagtttcctggaatcgattactagtgggcaaagttgatttcaaagcttttaactgaatttacaacgttccaattgatttcaaaatggtgtaatcgnatacaagatattggtaatcaattactagtgcatctgaac

SEQ ID NO: 9131 - DNA, 307 bp, Glycine max
  unsure at all n locations
tatgagaattccaagctntataagtaaagagtaaaaatntatcatgatcaaaatctttcaaaaaagaaatttcagcctgtcataccctaattttgtccagggactatcgttcgttgatcttttgatccttgctagttgacttacggtcttgaatgccagttacagtgcaaagcaaggaaccattcagtgtttcgatcaggaatgcgaaaaataccaaaaaagaggggcaaaaaggtcttttcattgagtttcctggaccctagctcgcccaggctagcctctggctcacctgngccctcaaattact

SEQ ID NO: 9132 - DNA, 463 bp, Glycine max
  unsure at all n locations
agcttagggaagagaagatgaaagtaatcactaatgaaacaaacatgtctaatattgtcgaccatgtaagggagattcaataccccacacggtggtccaagcaaacctttgattnttgcgtaagtagcaaaatagaggaaaggcctcatcggtcgacctggaaaggaatcttgaaaaggaatttatccgacccaacaattggttaacctctttaacgttgcttggactccgcatgagcatcaatcaggattagccttgattcatcgatatctgagcatgaacttgaggaacttgcctactcgtaccccanacgagcacttctcanagttcaactaaagttggtattggcctaacatatcanaaagttnttagaggtcagcaaaacgtttaccaacttctaaggactntactaccagttcattaacatangcctcaacaattntcttggataagttggcaaaat

SEQ ID NO: 9133 - DNA, 420 bp, Glycine max
  unsure at all n locations
atgttactatttattaaatatgaatcatctttattttgtttatattcccaaaatcttatgaaatgaaggggatggagaaaaagaaaaaagaaatccattagcaagctaaaataacctncttaaaaaaaaaagctaaaataagccctaccaatatttcattgtcgtgcaatagtgaaaaggacaaaagggaaaaatatcttcctctactaatagtataaagcgtctccttttctcgtgtacgtgttttgaaaactgagtttagacgtcaaattgaagcanaatcttaatgttatcttatctttaatcttaataaatgtaaaagtaacatagtcgctgatgtgtaaggataactctctatactcttacataaaatataataactcttaccgcgaagtagagtgtttctaatattgcagaaat

SEQ ID NO: 9134 - DNA, 422 bp, Glycine max
  unsure at all n locations
agctatagaagaccgnggaantatttattgttgtgtggnctggatcttctgttggactagtttgacccctttgcttgacaccatgtggcccaagtactccacctgngtttgggcgaaggaacatttcgagagcttaatgaagaactggccctgcaacaaaaccttgaaagccaattccaaatgaagtaaatggtcattgaaggagctactataaattagtatgtcgtgatgtggacatcaaagcccaagcccatgacaaccaccagccccaggcccatgactagatggaagcccaagacccaatacaaggcataggaagacccatgacaagagcaagagctaaaaaggcacaagatgctttggaacatatggtgattattctgagggtagttcaaatgcagggagaggcccaacacttggag

SEQ ID NO: 9135 - DNA, 379 bp, Glycine max
  unsure at all n locations
cttgatgccatggtcaacctagtaacttagcttgtcatgaatcagaaatctgcatctgcacctgtngcaagagtttgaggtctatgttctatagcagatcaccatatagatctttgtccttctttgcaacaatctggagtcaatgagcaacctgaagcttatgctgcaaacatttataatagaccccctgagcagcaaaaccaacaacaacaaatacaatctatggtggaggaatcatccaaatatgagatgggcaagtcctctacaacaacaatagcctgtcccttatttccaaaatgttgctggtccaagcaagccatatgttcctcctgcaatgcatcagtagtagtaacaacaacaacaaagacaacaagcaact

SEQ ID NO: 9136 - DNA, 443 bp, Glycine max
  unsure at all n locations
agtcacctgcggctgcaactgctttacaacatacattatttttattgactggtcatttaaaaaatcaaaacctttaaaaaatcattccaaaagaggtgagtttttttacaaattaaaagtgtcattacaattgtaattttccctaaaaagtgttcatggatctaatttaactataatattttacaataagtatttttttacttgaacctttcatgaagcatgggagtacaaaataattatttgcgagtttctaaaacaagtattcttttttcttttagactcaatttaatttacaacgttttatcattaatttaaaattaataaagcanatacaaaaataattatttattatattgtttcttatttgaaattttttctttcaccttaattgcatgatctaaattntagttagcaatcaaatcanaaattttaatgtacactaa

SEQ ID NO: 9137 - DNA, 429 bp, Glycine max
  unsure at all n locations
tctcaaggaagttatctntagaaagcttctcaaggaagctacctagtctataaatagaagcatgtgtaacactngttgtaactctgatgaatgagagtcttgtgagacacaacttaaagttcaacttctctccctttttcttccttcaatttcatgctcccccctctccctttctctccctctntattttcctccattgaagcatcctctccaagcttcttatccaaggctcatcttggtggtggaagctcttcttccatggcatattccctggtggatggcgcctcctctcaccgcttctcctttgtcttccgctgcatctccatggtggaaaatcaccattaaaggacctcattgaagctcaaagatccagcctncatagaagccccacaagcaagctttcatcaagtggtatcagagcacaagagc

SEQ ID NO: 9138 - DNA, 393 bp, Glycine max
  unsure at all n locations
tgttgtgcaactctcatgggactaaagtntaaaagtacaatatataaatcaagctttcagcttgtgcaactcagcccacaaaagggattctataatgaaaggaaaaaaaatcaccaactaaccaagaggtaaagaaatgattggtcaatcctaaatgcacaccacaatgtagaagataaaccaagtagaagaaaatgaaaaaatgggggaaggaaagttcaacaaccaacccttactctgaattggaaaagaaaaactatcaaataagcaagctatgggtctattagaaaaagaataaaattagactnttaatttaaatacttgaattggaaaaaggaaaatgctagtttgtatgaaaatgttntcgtaaaacagtatacaaaggagctaatt

SEQ ID NO: 9139 - DNA, 416 bp, Glycine max
  unsure at all n locations
agcttggttcccaacgctttgttcatactctcccataacctagaggtgaatctaggatctctatcagacactatgctagatgacacaccatgtaatctaacaatcttactaatgtatagggaggccaacttctctaaggaaaacctaatattgatggggataaagtgtgcagatttggtcaatttgtcaacaataacccaaatagaatcaaaacctttgggggtcataggtagtcctaaatcgaaatccatggagataccgtcccacttccactgnggtatctctaagggttgtaacttacctgaaggtctctgatgtttatcttagccttatgganactaaacatgaatacacaaacttcctaaccactcttttatgtgggccaccaaaacattatctttagactctaatacatc

SEQ ID NO: 9140 - DNA, 239 bp, Glycine max
  unsure at all n locations
cgaataggatgctntaatggaggaaaagacaaagagtttgtggtgtgttctaaatcgaaggaataaaagacggagaacagtggaactttgaagcgtgtctcataagactgttattcatcacagttacaataagcgttacacatgcttctatctatagactaggtaactttcttgggaagctttcttgagaagcttctttgagaaaacttctttgaaaagctacacaatggcttcacaca

SEQ ID NO: 9141 - DNA, 377 bp, Glycine max
  unsure at all n locations
agctntcactcggaggcccgatttatgcgcataatatatcgagacgctcgaanatgaacaacggaagctatcgagaaattcaaatggtcaatacttcgaactcggaggtcctattaaggtgcataatatatctagacgctcaaaattttacaatggaagctctntggctatacaaatggtcataacttttcactcgaaggtccgattaaggcgcataatatatcgagacgctcaaaattgaacaatggaagctcttgagcaattcaaatggtcataacttgtcactcggaggtccgattcaggtgcataatatatcgagacgctcgaaattgaacaatggaagctcttgagcaattcaaatggtcataacttgtcac

SEQ ID NO: 9142 - DNA, 416 bp, Glycine max
  unsure at all n locations
ctgatgtaaccattggagaggttaatgaaacaacgatatgatgctctccatgagaggttggatcaaatggagaatagagaccatatgaattgctcaagagcttccattgttcaatttcgagcgtctagatatataatgcgcctcaatcggacctccgagttaaaagttatgaccatttgaaatgctcaagagcttccattgttcaatttcgagcgtcacgatatattatgcacctgaatcggacctgcgagtgacaacttatgaccatttgaatngctcaagagctctcattgttcaatcttgagcgtctcgatatattatgcgcctgaatcggacctgccagtgacaacttatgaccacttgaattgctcaagagctctcattgctcaatttctagcgtctcgatatattatgcg

SEQ ID NO: 9143 - DNA, 442 bp, Glycine max
  unsure at all n locations
nggaaactaattntatgctacaacaattgttacaagatccactatccataatgagagaacaagttttatctaaaattntgcatcatgtatgaaagatgttctctccttgggattaaaatatatcacaagattgacctccaaggagccttctaaccattaggaattcaccttcttcatgggggtagacttcctcactagactcttcaccccttacttcatcttcaattccactagaggaaggggaagaagtagtctgctttcgagtactataaatgtctcgacccctcataatcattgcttgctctatggggggcattgagaggcaatgtgacctctccaagaccttcttagcatttaatgttctcttccttctgggaacatttaacgggtgctttctccatgacctacctaatcttcctgggcgtgcccccctctctatatc

SEQ ID NO: 9144 - DNA, 419 bp, Glycine max
  unsure at all n locations
agctntgaggctgtaaaaactatataacagcaccaaggttctagtttagctcatctctctctctcctctctctcttctatttttcggttttagcctctcttctctttcttttttattttcggtttttacaattccagttcagacttttagttttatcaataaaatttcgttctctatttgattaatggaaggctaagtccgcaacattggtttctcttgaggatcaagcagagttctctttgaggttctattattcatgttaaattctattcagtttttcctcttcactaattactttgaattttttctattaattcgtgcatgcttagtgcttgattaattgtctctgcacttaatttatgttcatgcttaatgatcgtttatgattaattggtgtgtgtgatgcttaatcacataat

SEQ ID NO: 9145 - DNA, 420 bp, Glycine max
  unsure at all n locations
nttccggaaggtttccgganatacttctttcggaagaagaattgttgaaggggcaattggccacttcactgtttgctgggtgccccagcaataatgctgggtgcacgtagcaactccctttaacatgccatgaacttggtccaaattcgataatgtattaaacataaagtttaaaatgttattaaagtaggaatgtgtgcattggaccacaaagagcaaatgctcaacaactttggaattgtgttctaagaggcgcaagtgagaagtccaaagtggagaggtccaatacattacgtgcatgttatcacgctataaaatgtaatattctaaagtccttcaaaagctataaactattcagaagcaactatgaaggttcgtatagaaaagcttttgtgttgcctactaaaagatcttttgtac

SEQ ID NO: 9146 - DNA, 309 bp, Glycine max
aactataactatttgactgaaatttaaaagttgaactgtgaattaagaactagggcataaacataagatgtactaaagaaagaataataatggagatgttcaaaatgcaagaaaataaagatcctgtggaacattctatgaatgatcctctgcatgctcgttcacgtccagtgctggtgcagatggtggatcctgagaaataggcaactttggcactggtgtagatggctctgcctgagacgatatcattgaatcatcctcaaaaatgaaaggctcaagtggagagggctcagagatgtaatataagca

SEQ ID NO: 9147 - DNA, 385 bp, Glycine max
  unsure at all n locations
gtggcagggcgggtttccttcactttcttgcttccttcgcgagctctgaccactgttcttccttcgcgcgatgcttcttttcatgtccgcctgagtgggcttatatcccaaaccatacttcccacgattcccatgggtttttatcagactagttatgccgccattgtctttgcctaaacccatcccgggttcataaccgttcnccaacataacttgggccatcattactcgccgcttggacagacaaggttgcccaaagagggagtctacggaggaaatgctgaccacctcacaagactggacagcggtttctaacgattcttctgcggcttccacataatgcatggaggatgggcacctcacaagatatctttctcgcctgaca

SEQ ID NO: 9148 - DNA, 226 bp, Glycine max
actatgagactaagctgctctaattacatgatgttgtattatggaggaggttgttgccatattgtttaagagtagtggccactggtaaactaactttccaatttttgccttcgcaggaaatggccccgaggaagcttgcctcaaagaggttcatgaaagacaacggcagccaaggaactagttccgctccggagtatgacagtcactcgcttatgagcgctgtaca

SEQ ID NO: 9149 - DNA, 317 bp, Glycine max
  unsure at all n locations
tacttattcatctatggaatcatatcaaagcggattttcaatatattgttctggatcaagccgaactatgcttgtgagaacagcgaaattcattgtatccaaanaatacactcaccttcattgtgccctctgaactcaagcaggtatttcttaaacaagttttgaattcccataaataactcacaagtaatgaaataaagttccagatattcttgatgattattcattttcttcgttatatagtgcaacatatgccccaaaatacaatattgncaanatacatatactatatatatatatatatatctacatatcat

SEQ ID NO: 9150 - DNA, 410 bp, Glycine max
  unsure at all n locations
agcttgtagaacggctggtcatgatatatgtcatgttttggccagcggttcggngataatggggatgtcctacattatttccatgatacacatgcaacaatgatgattagggaaatttatgcaaaactggtcatgcatgcacccatgtggacactcaagcatcaagtttttatggtcatgtgacactagggctcaggattcattttccctatttaagtcaacccagtgtttccaaaatatgctcttttatcaatttatgcattcatccgagtcccttttgggcgttcgggaaaattttcacagtattcaccctttaggtgtatacacnatttttttttcaaaacaactggttatgatagtgaaatcattttcaaagaaaagctggaagttatttctcttctaaagcatgt

SEQ ID NO: 9151 - DNA, 384 bp, Glycine max
  unsure at all n locations
gcgagttgatttagccttagtttcactntagttattattcaatttatttaagaaacagaaatcccaaagagaaacgtccgattgattnttttggtttattttactaaaagatatttttttattattatattattattttacctctttntggtttccaatgtggttacggcatgaccgaacggtcggatttcattttaacggatattacaaatcaaatgatcggtggaaatttaatttattctttgattacgcgagaaaatgccgtaaatgatacaagaactaacgaattgaaaagtaaatgaaacaagaataaaagtacgtgaaacaaatggggaccaccaagggtacatagaatgaattgaaaagttcgacttcaggaactta

SEQ ID NO: 9152 - DNA, 421 bp, Glycine max
agcttaagcacgagtaaattgctacatgcttaagttgtgtttaaggtgcatccttaaagtgtatgcttaagaaagttatgcaaaatgcttttttttttaaaaaaatggtattccaagtgtgataaaatgaaaattggttcatgatatgagtatttatatatagtatggagttaattgtatgctaatatcatgcacttcacattcatatgaggattttgatgtggtgattgtaaaaattcatggtgttggatgtcttactatgcttaacaaactattgatggattcataagtgtgatgaatatatgaatggttaacttatgatatggtaatttgatgaaatatcgttataatgaaaagataattatattgataagataattatgtaaattattgaatgtctgagttatgtcgggttaatttc

SEQ ID NO: 9153 - DNA, 461 bp, Glycine max
  unsure at all n locations
actaagcttattgacatgggatttacaggtttntcgaacattgattatagtttattgatttattggatgagagttaataattaataaattttcttaagtatagacccatgtatatatagctaactccattgtgtctcttcctttgtttttaaaaacttatcttcttatacttttgcaaattaatggctcttagaatttctttcaatgataagattgcgtgtggaagcattgattggtgaatcacagtaagagtagctgttcatctttggaagcaaactcaatatagtaatccaaatgaaatacgtaatactgaatcgatcattttggatgaaaagatattttatataaattgattttgggtattattctacaatgtctattttggaacacaattgatatcaacccttattatacatatgacaattgagagtctcaaatatatgcttaatctcaatttattc

SEQ ID NO: 9154 - DNA, 374 bp, Glycine max
ccatgaatcagaaatctacacctgttgcaagagtctgtggtctatgatcctctgcagatcaccatacagatctctgtccttctttgcagcaatctagagtcaatgagaaacctgaagcttatgctgcaaacatttataatagacctcctcagtagcaaaaccaacaacagtagaataattatgacctttcaagcaacagatacaatccaggttggaggaatcatccaaatctgagatggacaagtcctccacaacaacatcagtctgtcctttctttccagaatgttgctggtccacgcaagccttatgttcctctctcaatgcagcaacaacaaagacaacaagcaggtgaggcctccttttcaaccttctta

SEQ ID NO: 9155 - DNA, 401 bp, Glycine max
aacaagagggatatgaggatgaagcttagtttaagttagtctaaacctacgagggttgtctaaattgagcctagtccaacaagagggatctgaggacgaagcttggattgattcagtctaactagtgatcaaggcttagtaatttaggctgcagcataaaacacaaaagcatgatatattagagaaacatccttatatgcattaactggtctgttaggaagacccaacacttctacctactgctgtcaattctacttacttgcatatttactgcttctagcctacacttagtttaatcctattctaaatattaattatcaatgtttctttaacaatgctctatatctaattaaacctgtctatactattccttgcgttgatacttgattcatcatttaatt

SEQ ID NO: 9156 - DNA, 389 bp, Glycine max
agctctttgaactttgtcgtacttgtgggacaactttcagaggaacaatatctgggttattttatgagtggtttgaagccacaaattcatcggagggttcggactctcaatcccctgaatcggatgcaaatgatgcatatcgctaaagacgtagaggaagagttgagagaagatgatgatgacgcacgcaaatatggtagcaaaaaaggagggcaggatcggttgggtcgtaatgattgggccgggtcagtcttttggagcaggagcgggtcaaacccaaaagagacacatcgttcccgttgggccaacccgactcagaaaacaggatccagtggatctaacacgctctctacgatgtcgttagtttcaactgagaaaaagggtgcaaa

SEQ ID NO: 9157 - DNA, 340 bp, Glycine max
  unsure at all n locations
cggacatcccagctngaggttaatctcaaagctctattatcatattcttgttagaggacttccaaagctatcgtatcaagattcattttgtgtagcttcccaaaaagggaagcaagttaaaagttcttttaaagccaaaaaaaatctttccacttctaggccttttagagctcctacaccttgacctttttggaccaaccaagaatacacccctctttggatgcangtatggtctggtcatagtggacgattacaccagatggacatgggttaggttcctaacccacaaggatgagtcttttgataccttttataaactttgtaaatgattcaaaatgaa

SEQ ID NO: 9158 - DNA, 501 bp, Glycine max
  unsure at all n locations
agtactccacgcatacttgaacccngttganccngtgagatccgtgatccttaagtcacctgaggctgcagctgtacagttttggtatatttttatgtgtgtgtgcataatagagcacagagnttgaactatagttcatgtaatttcacaatccttcattaccacctctaagggaactgttcaagttaaaaccatgcaatgaannaaaaacgttttgaggttaaataaaatcggcttggtttaggcttttaaaacaagctaacttcccatcactcaatatcatgtgatctactgtagccaccactcggtcaccacttggcgcccgtgcgaattcttaactgaattactctctctttgaaacaacactcttattctcctattcttgcattaacaactgacccgtcactcctccactcctactcaatatttttccaactcttttccaattaattaaatatatcctatcgcttatgctatcattccctccctctccacttctcg

SEQ ID NO: 9159 - DNA, 418 bp, Glycine max
  unsure at all n locations
aatagttattcttaattatataaagataatatatatataaaaatataaccacccaaatctaaatatataaatattataattaaaatatcgtttcaacaaaaaaatgaaatgattttttttcaaattttctatantttcattntctacatattaaaagggttttataagtctactaatcagcttcaataattactatgtagtttcttaaactggaattctcacttactttcttatacagtntaaatntcaaagaacactcataagatatatataattacacattgcatganaaatagaatntaattatcatgcctcgacagtgtaattaatataaaaagctcttatagatacccgaaggtctntatacagtgagtgcatttaaatgaaatttatcagaaaccgatatctactatagaat

SEQ ID NO: 9160 - DNA, 185 bp, Glycine max
taccatcagatccgagtgaagcctgaggatatactaaagactgcttttaggacccgttatggtcactatgagtatctagtcatgctctttggtgtggctaatgctccaggtgtgtttatatacttcatgaataaagtctttcacccttacctagatagttttgtggtacgattcatagatgatat

SEQ ID NO: 9161 - DNA, 366 bp, Glycine max
  unsure at all n locations
tgaagtgaggaagtgtggaagagccggtcttcctacttttgttttgttgaccacagagtggtacctggagatatgtcgcangggtcaggagaccttgnggacgtcaggtggngtgctattgcccaaaaccaagcttgaccaatcccgacccaacccaggcatagtcagtcagtgagaacctgtgacgtacctaaacaggcgagctcctggcagtcaaccaataaaagaacaaagaccacaaancaaggaggcttgtgtggtggctggccagctatggatcttgagtggtatctggaatntggcctctggtaatcgattaccaaggatgtgtaatcgattacaaggcttaaaaatgaagacaggaag

SEQ ID NO: 9162 - DNA, 302 bp, Glycine max
  unsure at all n locations
atattgcactgagacaataatctttgcctcacttgcaaagttaatgagtaaatggaccattatgtaaaacaatgaggaaatattttaaagacaaatattattagaagagggattgaattgtacattttactaaacttaaaatcttttttgaatacaagaaagatattgtctgatatagttaaacttaagagaacatatgagatttttgtaggacaaatcaaacgatagttcagatctttgtaaaacaaataatntgttaaaagtaaatctcaaattaaatcctaagtcagttaaaaacaaaa

SEQ ID NO: 9163 - DNA, 404 bp, Glycine max
  unsure at all n locations
cctagactcgtaagcttcttgcgtcgccgctcttggtgctcagnaaatcccatatacaattcctcttattactagctatttggaattctttagttcctgaatgtacaaccttcaaattgttgctcgttcccctctttcttttctgcaaaaaagaaaatcaaatgctgtgaaaacatggatgaagtcctaagaaaatcaatatcaaagaaaacatggatgaaatcacaattaataagcacaaccacctatctttcagagtcctttggttaatgtgtcttgtctccttatgtggtggggttttgtttaataatattatacttttgccttcccaaaaaaacttatgactgatcctctctccattaatccaattctgtatgttattgtataaaagatcatgggttctc

SEQ ID NO: 9164 - DNA, 320 bp, Glycine max
gatgatatctcgcggcgtcatattgattgttggacatcaaactgctgggtttggaaaccaaaacctaatggtcaattttctacaaggagcacatactgtatgctactagaaggagcagcagatcatactgtggatgaggctttagaggacctatggcagctcaaaatccctttaaaaccaacaatatttgcttggcgattggataaagatagaatccctactatagggaatttttcaagaagacagctggagaaaggctctgcccaaccctacaactatcgtgtctagtaattatcaacaaacattttttattacggtag

SEQ ID NO: 9165 - DNA, 296 bp, Glycine max
  unsure at all n locations
tcttgcgtagccgctctnggtgctcagattatcccaaaaacaaatccctcttattactagctattttgaattctctagttcctgaatgtacaactttcaaattgttgttcgttcccctctttgttttatgcaaaaaatgaaatcaatatcaaacaaaacatgcatacaattgtcatcgttattgctacttgaaccataaggaataccatctaaagaagtacttcaaaacggttatttatttcttttgggattttttgaattacaatttgacttcaatatctaattctttaatgtac

SEQ ID NO: 9166 - DNA, 231 bp, Glycine max
  unsure at all n locations
actaagcttgcagagtgatgacttccctncncaaatgctgcattatgtaatccgccnnncacncccatgtacaggtttctgtatgtaggattgggcctcgatcttacctcgaccacttatttgtgtgctcttctttagcacttgaatgtggcctctttccaacttcgtccgaataagagggccatggtgagggccttcgaaattctgtgcctcttcttcaacattcgacct

SEQ ID NO: 9167 - DNA, 435 bp, Glycine max
  unsure at all n locations
agccaatgctatttgcaataaccatcttccaagtggacattggacttggaaatttgaaatggggtttaatttccacaacatttaatggccatgctgcgagaacattaatcgagaaggttgaccaagaaatgaagcaggaaaatcttaacttaatactactacccattttgcataacccaggtatccaatattgggaataattaatagggaaaaatcagtggtgtagaaatgcattacactgatgtggttgatgtatataacaattggacaaaagagaaaaagagctaggcngatgttatagaaagagaactaaacaagatcaacgtaacattattaatgaaagttctaatccctattgtgcaaaacacttcaaaaagaaatcctatctagccaccaaagccaagaaaactgtatagtcaatatcacctacagctg

SEQ ID NO: 9168 - DNA, 527 bp, Glycine max
  unsure at all n locations
agttgtttcnnnnnnnnnnaaggggncccccncgnnatggaaaccttannnnagtctatctcgtagcgcncaagctcnacgancgtacacgtnnaactacatgtatccttcattggaagttcttagagtggacatgcaaaataaataacgctgacactcaaataagtccatgattgagttgagtttgaaaattgaaaggggtganataagatctgatctttataacgtgagataggagtttcgaagtcttgattgtaagagagttataacagtgatgtaacaactctagatattccctacttggtaataattataggagaaaatcatagctggtaaatatagttatagatattcatccttatagataatcaatggatatagaaattcattatatagatattcattctagagatagtagtcctgtacctgtaagaaatatacatttcctcaaatcaattatgttttgtacacatgtggcctatcttactgggccattccccactgtagatagcttcaccggtggtccn

SEQ ID NO: 9169 - DNA, 446 bp, Glycine max
  unsure at all n locations
catgacaacaacattattacttacatgtttaatattctttttattcctggaaccctttggtcgaccacgcttctttggcctcacaatctcacctaggcctgcaccttcatcatcggcactaccttctctaacagaaagcaatggcctttcagactttaaaactgtgataatactcatcctatctgaaccctttggtcgatcacgcttctttggcctcacaatctcacccaggcctgcaacgtcattctcagctntatcttgctcaccagaacacaatgatctgttagactctaaaactgtgacattacttattctagttgaaccctttcgtcgaccaagcttctttggtttcacaatctcacccagacccacaccttcatcacctgccttatcttcctcaacagaaaatacagatctttcagactctaaaaatgtgacattattca

SEQ ID NO: 9170 - DNA, 278 bp, Glycine max
  unsure at all n locations
gagatcttcattctggtttaatagattactggaccactgtatcgattatactatncagccgagaccatgtctgagtctcatgagtctctactttaatcaattaccaagtgattgtgatcgattacatcgctcttgaaagtgttcccagtactgatcaagaaaactttgatcgattaaatcaagagtctaatcgattacattgttcttgaaagctttctaggtgttcggaagaacactttcatcgactaacaatgattatctaattgattacttcttta

SEQ ID NO: 9171 - DNA, 267 bp, Glycine max
  unsure at all n locations
ttaagtcacctgcggcatgcaagcttcttgggtcctgcanacatgacaacaacattattacttacatgcaaaatattctttttattcctggaaccctttggtcgaccacgcttctttggcctcacaatcttacctagggctgcaccttcatcatcgcactaccttctaacaaaagcaaggctttcagacttaaactggatatactatctattgaccttgtcacaccttttgcctacattaccagctgcactatctagttattctaca

SEQ ID NO: 9172 - DNA, 400 bp, Glycine max
  unsure at all n locations
tgtagagagatcttcattctggtttaattgattactgatatttgtaatcgattacactattcagttgagaccatgtctcattttcatgagtctctancttaatcaattaccaagtgattgtaatcgattacatcgttcttgaaagtggttccagtagtgatcaagaaaactttgatcgnataaatcaagagtctaatcgattacattgttcttgaaagctntctaggtgttgggaagaacactttcatcgattaaaaatgataatctaattgattacttctttaaaataatcgattaatgtggcaatntaatcgattacatgccaatatgattgtcttctctatatatagccaccttgtgttctcagctcttacgactccacattctagtcttcattcct

SEQ ID NO: 9173 - DNA, 463 bp, Glycine max
  unsure at all n locations
gtcacctgcggcatgcaagcttgtccattggcaaagttacagaaggccaatttataaaaatgatctattcagtcaattattcttcaccatcatttttaattatctaaagttcattggttggatttaacattaacaattagtcagtcaagttcaagaggacttaattacatgggttaaagaatatgtatctttttttctccaaaaaaaaaataagtcccttgatgcatttcataagttaatggaaaataaaaggtgtagaagaaatgcnattaaaggtgataagccatagcaagtgtttgcagtttaccgcttgaactcangtgactgcttatattngtcaaactcttgcaaccattcttcatccgagaaaggagggagagtaccggtgaattccaatcagtcattgaagaccagatcggtgagtcttgtaaactcccgagcaccaccatgctgaacacccatg

SEQ ID NO: 9174 - DNA, 409 bp, Glycine max
  unsure at all n locations
gcttcanaaagtcaagcagaacagcttaaagaagaacaatgtggcgatctctgatgtaaccaatcatgctcggaaagaagagttagaaactggccgttaataatttgcatctgtaattacagaacttgatgttgcaaagcaagaactgagtaaaattcgtcaggggtatgatttatccttggaagcaagagtttctgctctcaagcaaacagcagaagctgaagatgcaatgaaggcaaacatggaaagagcatgtgaggtatcctaaagaaatttggttgtgcaggaatcagttgagaaaatgaatgctgaatctgtccaagcacatcaactgcaagaagagacattagccggacaaaaagttcttagacaatcatatgaagccatccttgaagaatcaaaaaagaag

SEQ ID NO: 9175 - DNA, 280 bp, Glycine max
  unsure at all n locations
agctntaggcctcactcantgttgngcctgcccttgtgagaactcttttatttgagaaataagaacaataaaaatatgctactactattaaaccatatttattttgagactagaggtgtcattggcttttgagatgtgtcttttcttctttttcttccccctccctctccttttttaaatacttcagatactacactttttactggaattcttattcgtacataaggcanaagagggttggggggagcataccatgtagtgatgcaaacttcgtggacag

SEQ ID NO: 9176 - DNA, 426 bp, Glycine max
  unsure at all n locations
cacggttgcaccggcctctctagtgatcctccaaagtgttatcctgttcaacactgcacatggagagtgagtcatcctccacatcaagcagtgcaagaattatatgcgactgtagattactaggtggacacgcttcatcgtcaagcatttctggtgcgtccaaagcattaacttgtaacctagcccgcttgattgcctcggcgtcaccctgaaggagctntgagatctgtggtccaaatgtccgagagaatatccatgagattttcaataaaaaggactaatgtactgaatgagaatatttctatggngatcaaacaagaagataaagttaacggctgcactatagaggtcagataccacattgattaggataagcaaaacgcagaaagtccgtccattgtccaggatatacactcaatatgcaac

SEQ ID NO: 9177 - DNA, 428 bp, Glycine max
  unsure at all n locations
agctgggtgataagatcgcgagtttctagccaatctcagatantaatgagaatgtntattttctttgtgaanaataagaaccttaagattattaatatattatgctgctatgtaagtagaaatagccatttcacatatactgcacctttttcttcaagagaaattcagtcaatgttgcattttactgatatccttaatacagtaagttaatactcgaaacaggtaaatatttgtagagtttcccttcaaagacccgttgaaaatggtcatgcatagatagacaatgccagctgagcatagtacaggacattnnttgattttgttggtctcgggactcataattcatgagccaatcactaatccaaatattggaaataaaatatggaactggcttacgtaaacagtaattaaagtacatgctcctacga

SEQ ID NO: 9178 - DNA, 330 bp, Glycine max
  unsure at all n locations
tcccgcatccgcacttggaaggaactgattaccgccttccttatgttgtatcagtacgattctgatatggctcccgactggactcagttgtagaacatggntaagagggaaagtgagtcccttaaagactacgctcggcgttggagggacctggtagcacaagtagcccctcccatggtcgaaagggaaatgattaccatgatggtagacaccttgccgatgttntactatgangaaatagtgggctacatgccctccagcttcgtagacttggtattcgccagggaaagaatcgaagtgggcttgaagagagggaagtttgattacgtc

SEQ ID NO: 9179 - DNA, 264 bp, Glycine max
  unsure at all n locations
agcttgagatagagcttgcaagtgttagagctagttgtggcagcgaacaatacttgtaactttgataagttagtgaaaatttggtggttgtcaagaatcggacgtagtctcaggatcgagatgaaccaatataaattctttgtgtgctctcttgttgtttaaatgacaaaggcgttgaatttgctnttagatcttatatctctttctatttttcaaggaaaactattttcctcatcgtttaatacagcctaaataaatacctgt

SEQ ID NO: 9180 - DNA, 441 bp, Glycine max
  unsure at all n locations
ggatgtagagctngattgtgtaagagtaaaaagtgatactaaacttatacttgtaactngtgtgaagttagtggaaattgatgattttcaagaattggacgtactctcaatggtagagatgaaccagtataaaactttttgcatttgatctttcttgctttcctttaagttttatctaaccaaagggtgtgaatttgtttttagatttaaatagatatctcgtggtttctaaaaaccattttacatcatctaatagnttctttgaaaaatctataatatgctctntacacaagtttatcagatgaaaactttgttttaagtgaaaaaagaatttaaaatgtataaaatcagaattcaatccccattcgtgatagttgcctttacattaaataaaaagatgaaaatttagatagatatcaaagctgtgttaacatttgtttc

SEQ ID NO: 9181 - DNA, 303 bp, Glycine max
  unsure at all n locations
agcttccatcataagcgtnggtttagttggttttattcttaattgcaagatatattntgactgaacaaaagtcgttntaaggcgttgcaccatttaaacgatattttgattctttttgagttgattttagccttagtttcactttggtttctagaaagtagtgacaaagttatgcgttggctttaggctttcaaaagtccacattttcaccaaataaaagcaaagaggatcattcaaggcatcggaccttanaatggtttttaggtgatgacaaaagcttgacttgtgagttgattntagcct

SEQ ID NO: 9182 - DNA, 445 bp, Glycine max
  unsure at all n locations
ctatgctgcanacatntacaatagacttcctcaacctcagcagcttattcaaccacagcagaacaattatgacctctncagcaacagatacaaccctggatggaggaatcacnctaatctcagatggtctagccctcagaaacatcagcagaagcctggctccttcttccaaaatgctgctggcccaagcagaccatacattcctncaccaatccaacaacagcaatagccccagaaacagccaacagttgaggctcctcccgcaaccttcctcaaagaacttgtgagacaaatgaccatgcagaatatgcagtttcaacaagagaccagagcctncattcagagcttgaccaatcagatgggacaattggctacacaattaaatcaacaacagtcccagaattctgacaagcttgcttctcaaatctgtccaaaatccaaaaat

SEQ ID NO: 9183 - DNA, 431 bp, Glycine max
ccctctgtaactggtttaaacccaatcttctttttcggccctcctcattattcgttctaaagctctggatgggccctgttgacatccttatctcatcacactctttcctaaccttgaaggctgtcatcttgaactttctcttgaccacttgcattctttcaagctccacattcaaagcttgcacttctttgctgttcttaaggacattagccttgttcccacttgaaatatttagttcgggagcccagttataccttgcatccgagccttcaaccatttatgatattcaccaataacaccgttgaagctggcttcaagctccttatactctctttgcccacacttcatgcttttctgactcgtccaagcatctatgcaattgcgtcacatgagacacctgctatcataggcgtgaaactctctttctatcg

SEQ ID NO: 9184 - DNA, 192 bp, Glycine max
  unsure at all n locations
ttggaagcctntacaaggatccagctagactaacacatagaaattgaactgtttgattgatgttatcaacggctcacaatgatttgttntggtaatctgtgtctttccaaaccagtcaataagatgtcattatatggtatccatttgttattcgatgtgcgttcttttaaatcctaattggattgagatgtg

SEQ ID NO: 9185 - DNA, 437 bp, Glycine max
agcttcatctatggcagccaagttctcagcaacttttaaatataatctcctagatccgatcaattggttcagtgcgatcctgcacagcaatcccttctgagacatcggcgagtgatttgagattgcacttaattaaggcctcaacgaagtagcaggtttcatctttggtgttgccctcaggtacatccaccacaaaagattcaattaccagtgtacctggccttccatcaataatttctgggtggagggacatgatagatgagtagttctgaaagataagagatacaacttatgttaaaaaaaattattgtgtcaggtgacacggacaagatagcttaatcatttagcccaacttcttagacaggccgggaaaacaaaaatctatataattactcatggtggacgtaatgcttggtgcgtctttaatacatgaatat

SEQ ID NO: 9186 - DNA, 405 bp, Glycine max
  unsure at all n locations
gacacttaaaactaagcttcgttttcataaatttaatgagcaatttgccnctatcttgtttttctttaaatntactacgccttccagttttacgcttcctttgtgtttcacttacactgtcgtgtcctgtgtgctgggtggtttttgcaagctntggtggtttttggcaagttgttggaagtcgttgttcggtgaaggttaaatattggtggtttctatcatagttgctcttcttattccgttggaggtacgcattntatgattnttctgttttttttttgtgtgttcatgttacagaagaagcagtaaaatggcaaggaaggttattcagtaaaaacttctttcgaaagaagttccttttaccggaagaagctgttctggaagtaatgctacttatttcggaag

SEQ ID NO: 9187 - DNA, 286 bp, Glycine max
  unsure at all n locations
atccttaagtcacctgcggcatgcaagcttgaaagtgtgtaaccaaccattnttcattgtgaacaccggtaacgtgtatactatcattgtgatcatctttttctctgtcattgaaggtgccacttgagctgtcaagtccctccacctttgggcgtattccttgaatgactcatngctctttttacacatgttttgtagttgcgttctatccggagccgtatcataattgtactgatattgcctaaccaaggcaaccatacgttcttccaagaaagactcgggaagg

SEQ ID NO: 9188 - DNA, 366 bp, Glycine max
  unsure at all n locations
aaagtatgcccgagtcattcatccctatgagatgttgtcgatgtattggcgatcagaattgccattccttggatnatannggtgaaccaagctcatgctnttacaaaaaggttcatcaagtcaagttgaaatatggaagtaaccgtcttgcaaaattgnggcaaaagatgaatngagtcacatcactgcttcgtctactgccaaacatatntaggattattgatgntccttgtacttccagtttcaccttgacaaagatgtcatggaccatgtngaaaatctaaatngantcaaccccatatcttgcgtaaaaattcgcaatacttcaactgtgcatcattcgcatgcatccatgcttttcattgg

SEQ ID NO: 9189 - DNA, 422 bp, Glycine max
  unsure at all n locations
agctntacatgttttcaaacttataaaaagctnttgaaaagggaattttagcttggacaacaggttntattatttaattatagattgagaatgtttccaggtaagccggaatctatgtggtatggaacactcatcatcaatntcgtcaagccacatggagctatggtattggatgatctagccacanagatgacatggattgtgaatggcagcaggatcaaacactacttgggtggtgatgttgagagccttaccactattgtccaatngaaggagtctaaaccatgacaagaacgtccagctaataagatgttaaagaagagctactangaggcaacctaatgtttctaaactttgtctcaatttgtgttacctgaattntatgtctcgggtttttgaatatgtttatgaaatttactttt

SEQ ID NO: 9190 - DNA, 178 bp, Glycine max
atactcagcttatgatgttgaatcaagatgatcaaggagttttgtgatatctaagatgagacaaaaagccaagagaatagttcaagatttgtgacaaaggatcaactgatgttttgatgatgcccaagatacatgtttacacgctttattcacgactctaaatcccgatattcatgat

SEQ ID NO: 9191 - DNA, 439 bp, Glycine max
  unsure at all n locations
tcttgagtcacctgcggcatgcaagcttcatcttcaatccaagaagaaagtgataatgtttactntaatgatttggatgaagatgatgatcttaacctttntggaaaaaggttcaacaagttcctcagaatcaaaggaaatcaaaggagaccaaattttaaacctaaaagaaggacagaagattcatcctctacttcaaaatgctatgaatgcaatcaacctggacatctgagggttgattgcccgatcttcaagaaaagaatggagaaatttgaaaagaaatattttagtgaaaagaaggtgaagacggcctacatcacatgggatgacaattatatggaatcatctaaggattcaaaatatgaagagataaacctgtgtctaatgggctaaaagtatgaaagtgatgaagaggtaacatcttcaaataacaacttat

SEQ ID NO: 9192 - DNA, 357 bp, Glycine max
  unsure at all n locations
agcttaggagaaaaaggtggattcaccactagagattgtggatcagctggctttggtttaacccgtgtagttgtgggctcagcaggagcagcctcgtcgggtctcaccaatggaaagtgagcttcaagccaggctacttgcttaagaaaatgctccataggtatgaatggccctgtgtgagccaactctcgcaggctgtgcatgataataaactatcctcagaataagctttgtagcatagggactaaaagttgagagcgntggacacccagtcctatggctgctgacggaggagctagagtggatgatgaagggatgtcatctgttctagcccttttcttgatgccatcattacta

SEQ ID NO: 9193 - DNA, 369 bp, Glycine max
  unsure at all n locations
agcttcatcttctattcaggaagaaagtgactcatgactnggaagaattatctcagtctttntgtcaaaagaattaacaagtntcttaaaatgagaggaaatcaaagacgccaaaacttcaaaccaaaaaggagaattgaagaatcatctcatactttaagatgttatgagtgcaatcaacccgaacatctaagggctgattgtccaacttttaagaaaaggatggagaaatccgagaagaagaactttggagaaaagaatgcaaagaaggcctacatcacatgggatgataacgacttagaatcgtctgatgattctgaaaaagaagtgattaatctatgcctaatgggcaaaaactatgaaagcgac

SEQ ID NO: 9194 - DNA, 197 bp, Glycine max
  unsure at all n locations
atgcatgcatatatgtagcatgtgactaaccaacaagcggctaatcataggggtcaggtgcagctaaatgagagcttctaccagtacaccctacaccagcaaagccaggaccctagacctttcccgtggtccactcccgagcagttnngngccacagntgcatggctgagagatacgctcctattttaaacaggggc

SEQ ID NO: 9195 - DNA, 427 bp, Glycine max
  unsure at all n locations
tattgttgcattctactaatatatggaattgtccactgcttttgcttgataataacaattgcttgaccacaacaacgctggaggcggtaagggacaatggtctttcaaataaacctgttgtacatgaacaaagattatatcatgcggtgaccgtgtcaaatgaaccagcgaagtcattgcataattgttatactaactatattcaatgtacctgaacaaaatgatttccaaacacgtgactgacacatatcatgcggtgcccagaagaatcaggtggtgattgacttctaagaggaaaaaatgtcatgctnntgtgtcgggacaacgatacaaggattacattataccgtgatacaatcacatantccatctnncgtatatccatccacttgtncacactaacctgaatcaaccaaacatacacatg

SEQ ID NO: 9196 - DNA, 379 bp, Glycine max
  unsure at all n locations
agcttgaacctcacagacccaattccaattatcttttacaggacttgttgtttccatggaggactgaaccaccaacttgtttgtcaagatcctcaaaccaagacttgtttggagtcatatgaaatgaacacccagagtccaagatctatttgtctcagtgttcttatgagacaccattaaagcctcagctgaatcataaccatcttcaactagagtagcatttccaggttctttagatcgatcttgctggtttcctttctgtctattaggacagaatcttcgagtatggccttctcttttacagtggtaacatctaatgtttagtacattagatccaaatcgagttggtgactnggatcttttcccttctgtcttatca

SEQ ID NO: 9197 - DNA, 395 bp, Glycine max
  unsure at all n locations
agctggttagaattgttggtcaataccatcaattacgctnttaaaaacttatgactttcttacaaagaagtgaaagaactatagctagttcagagatggtgaagatcgaactaaacaagttttgattaacagtggctgtttttgttttaatagtattagagatatagattagttcagttaattacaagttaattattaagttagttaattagttacaaattagttatttttgtaaccaattatgtaacattactagcattagttatataaggatgaatgtattcatataaaaactgatttactcatttntagcattatccaaattaatatctcagttttcttttctcttttcatctttctatcttaactctatcaaatagtgattggaacacatg

SEQ ID NO: 9198 - DNA, 335 bp, Glycine max
  unsure at all n locations
agcttganattgaataatggaagctctcgagaaatataaatggtcataacttttcactcggattgccgattcaggtgcataacatatcgagacgctcaaaattgaacaacagaagctctcgagaaattcaaatggtcataagttttcacatggatatccgattctgtgttataatatatcgagacggtcgaaattgaacaacgactcgagaaattcaaatggtcataacttttcactcggatgttcgattcaggcgcataacatattgagacactcggaattgaacaatggacgctctcgagaaatacaaatggtcataacttttcactcggatg

SEQ ID NO: 9199 - DNA, 401 bp, Glycine max
  unsure at all n locations
tgcatttggaanttgcgaaagcccactccatcattaggattagttctctgacatctcaaacaaacaaatcaaacgtaacaagacaattatagttgctgtttgaatacctcacccactcaagtgtatcacacaattatggctnttctctaatgaaacactcttgccttttaccactctaattccccttgagttcttaggcaattcaagagattatggccacaacaaagaacaattcaccaatatgtgtaaggtaaggctagacaaggaaaaggttaaccaagaaaaaggctaacaatgtttttaggcacaaatgaagggaaataaattcagaatttaggaattcaagtaacaatccttcatgcaaccaatatattaccttaaagaagtttttttttaagttc

SEQ ID NO: 9200 - DNA, 454 bp, Glycine max
  unsure at all n locations
agctggtctcagcgtttatgcgatacagagaccattatgttagccatcgtcagcangtaccaagaagaattaaatctagccacggcccacaagcacaaagtggcagacgagtatgcccgagtgtacgcggaaaaggaggctagaggaagggtgatcgactcgttacatcaagaggcaacaatgtggatggactgatttgctcttactttgaactggagtcaagaacttcaccgatggctagccaaggccaaggcaatggcgaacacctactccgtcctcaaggagatccaggaacttcttagctattgtcagcatatgatagacttaatggcccatataattagagaccctaggaagtttgtattgtcactcagatcttgactagttataactttctgaataaaatgagtttattccaccgttttactccaaaaatcagtgtgaatcaaatcac

SEQ ID NO: 9201 - DNA, 341 bp, Glycine max
  unsure at all n locations
tcagacaacttgtgtaatcgattacaataaggctgttatcgatgttaacacaatntgtgtaattgattaggataaggctgtaattgatctaaacaaagagttctttcttctgaagaaacttttctaacttagaaatntttcttctaacttactcatgataatgcatgatgcacaaaagatatgatatggactaagatgcaaaattcagtataataatcaatacaaatgccactcaagggagttgggcatgtaaaagacaaaacatcttcaagatnttgtccaaactccaagctntagtctntattttgttcatgttgctcnctctatctaacaatctcccc

SEQ ID NO: 9202 - DNA, 460 bp, Glycine max
  unsure at all n locations
agcttaacctctaagggttaagcacctgacaacgtttagagaaaaatattctaatggaaaataacaaccgtaatggagctaaatacaaaagctcgttatactctaacatgtgctctgtccaggaatgagtataacaagatttgtagattgaagacaaccaaagagatctaggacatgctgagaatcaactacgaatggacaagagatgttcaactgagaaaagttgtcaccctaacaaggcgttatgagattttctccatgaaagaaggagaatctatggatgatacgtttggaagacttcaagtgcttctaaatggacttgaagctctgggacacatcttcctcanagctcanataaatctgaagattctagatgactttcttaagatgtggaatgtaattctcttcattaaataacaaccctaataaaagtatacttgttcataacataataatttat

SEQ ID NO: 9203 - DNA, 294 bp, Glycine max
  unsure at all n locations
tcttctnttctcaagttcagcttctccatagtaagaatacatgtgtgttaaatgctcagaaattatgtggaattcaagatgcattcccaatgagcttgcttcttccacaagcacattcatactagcttgaagttttgagttttcttcattgccagttaatccggtgatccggagtgttggaggcccttcaggccttgaagaaagggcccttattagggaagaccactgaagggtatgctccattcctaaatcaacaatgtgtatnngagctctttcttgtgatgcttggcatat

SEQ ID NO: 9204 - DNA, 456 bp, Glycine max
  unsure at all n locations
agctngatcaaccncattntcaatgcanaacatgttgattaatcattcanacaatcacaaacaagtattctcaaactaaatgcaattaacataaaattaaaaaggactgggtttcctcccagcaagcgctcgtttaacgtcattaacttgacgcatcttactttatgggtctggatcaaatttggttcccaccttcaaaaccatctcttcccatactttatntacctctgaacaaacattctagttgagcgaatgctnttctttctcaaataagtcgaaacagatcttttgatcagcaattcccatctcaagctntttctttcccatgtccactacatagctagcggtcaacatgaagggacgacccacgatcaaggggatctcagtatcctcttcgantccatcctacaaactcagctnnggaaagtaatgctcactctaaccaaacatgatgta

SEQ ID NO: 9205 - DNA, 430 bp, Glycine max
  unsure at all n locations
tatcctntcttgatntactgtgattactatctacattctccttttgtctatcattcttcctttcaaagtttctgttctaagtgcttgctcctcatgatangttacccgattaactttntcttgtttcttttttaccatcaaggacaacctaaagtgttttgctaattgagaatgactttaaaagaaaaacttatattgaattgctgaacacctcgtttaatcttatttctttgtgatctggaaaagagatgaaaataaaatttaattgtaaggccaaaaaccaatgtgatgtgttaatgatcttgtttaaagggtggtctgcattagaatcgaagtattcaccgganaaaaagttatacttttcttgaaaaaatcttccattatgatttcatctttaaaaccttccattctactatcatttctattaact

SEQ ID NO: 9206 - DNA, 365 bp, Glycine max
agcttatccttatggcttgcctctggacttcacttttcgtgccaccctataagatttaagccaagcccctactttcgaggggcagctccaaccttatgacgactatcccgggcaagacgatgaggaaggagatacccatctcggtcctctgctccacctcaaagatccgtccccccatgaactaccccaaccgaacatagtccgccatatcccagctttacctacacccgtaaaagaatctgttcccgtcacggaagataggggaaagattgaggcgcttgaagagaggttaagagcagtcgagggccttgacaattacccattctcggatttggcggatttatgtctcgtgcccaacatcgtca

SEQ ID NO: 9207 - DNA, 482 bp, Glycine max
  unsure at all n locations
ntgcactgtcatggatattctcatggcaatatcgttacagcatgtctgaaaagacaaaccaatatccatcactacaaaggcacgcattcgtaaaatggtgggcataatttcactcatccaaagcggatccagaacaagtaaaactctggttccaatcccatccagaattcctcaaagcagctgatccagaaacttctgtgtttntgaaccaaaagtctcatctggcagcatttttagcaggatcgacatcaaaggaggtcttagctaanaatctgaaggaatttctacaaatgttacagcaggaagaagaagcttcatcctcaaagaaggaagaaacaagttctgctgaagaagaagaagaagatccctcttaccaaaacgaagatgattgttttggtatctggttagaattaaattaatttcggtcacaaaacacgctgtttgtaataatgtgtaattaatgctcgacaatactacctgtc

SEQ ID NO: 9208 - DNA, 457 bp, Glycine max
  unsure at all n locations
agcttaacatgtatagnatgtacacatcatcgatattattccaaaaggaatgtgttcagttctgtaagttaaggacgttgaagtataacttctcaatggttcttttgaaaaattgcatttgcaggtgcaagaaagaaaaggactacctatataagcatgaagtttagccgcttcaagaagctgggacttggctttgatatgcttatgaaggatagggacacaggctagtaaattagtgtcgagcaagagtaatgttataaactatcgtgcaaattattttcatgtattcattatgaatagaaagggttcaatctttagtgacaccctgatattcgaatatttgaaatgtgtaatttgctaagatgaaattcaatcgtcacgatatttcatctatgcagtagnttgttgtatgttatgactatggtgattngatcgacaattacactataatggggga

SEQ ID NO: 9209 - DNA, 277 bp, Glycine max
  unsure at all n locations
ctcatgaatgccaatcatgccagaaactttttgtgatggttgttataaaaacgcgagnagcaaacacttaagttaggtggcatcagaaaatcggaaccaatggcagcagcctcactatagtagcttgctgtatgctaatgagctcgctgtgccaaagaaattgcttattggtgaaatagttgtgtctcaaaatatcacaagatgaatgatgcctcaaaaggtggtcactactcactagtagcagggttagtatcatgctgcaatacatccatcggtg

SEQ ID NO: 9210 - DNA, 443 bp, Glycine max
  unsure at all n locations
agncttggcagatatgcgcggtcataccagatctttttttacttctttcttttcctccgcgggccccaggtttaccaattcagtttcttcttggtgaggctttatttcacgttcttcctgagcgaccaacctcttcaactctggtgacaggacatcctcttcctcttcctcgtttatcgtttggcttatatctcaatcgaaatcgattatcacaccctcgttgttaggatcctcanagaatcgaccctcatatttataccaaacaagacaaaagaaacaaatacatgctaaatgatatgagaaaaggtggaaccacaagaacagatgaaacaagatctctttgtatatttaataacgtaggtttcacaaaacaaaagagaaaggaaatctatatgctctaattacattgaatcagcggtatagacttctgattggcttatcac

SEQ ID NO: 9211 - DNA, 339 bp, Glycine max
acactatgaaactaagcttcccaagttcccattgaaaaccttattcaatctttttatttctagtgagaaggataaacgaaaaattagggaacttcgaaaaactaaattcttaattgaaggcgtaggtgacaaccatagtgaattactaaccaagattggtagtttacttaaggtcatttcagataccccccaagcctcggaaaatacttcgaaaatggttacaagaagtacctccaaagtaattaatgttatttatgaagatagtgaccaaaactcagataacacaactgagataggatcagtgtcataaaagaatataaatccaattaattccaaaca

SEQ ID NO: 9212 - DNA, 329 bp, Glycine max
  unsure at all n locations
agcttctcatatttaagaagtttatntattccatttctttctcattcttagctgcgtgtttattctgacgtgatgaattctataattgtgggcacacctcttgaaccataaaagaaatgtcacatcttattggctgaatttcatggatatagctgttgtatcctattccatgattctttaatatttctgttatcatttgtaggcttatagaacatgcatttgtcgactgccgctcatcagcacatgagcatgtttggtattggatattggcatgcatgtcggacatattagtagtagtacaatctaattattcaattttgcacttttct

SEQ ID NO: 9213 - DNA, 277 bp, Glycine max
  unsure at all n locations
gagaaaggcatcaaaatttctcttttatgattatatattccnncgtcatcggctgngatttatattattaaatntctgtatgctcttaaacttccacataaattggatgatgcttcacttaatgactngagttatgtgtttgctatctatcaaatacagctttcttaattatatatttgaactgtatgttgactttcctgttagttcttatcatcaaattaaggggaaaagtgagattgaaaagtattacttctaaatttccctcacatacaacatt

SEQ ID NO: 9214 - DNA, 530 bp, Glycine max
  unsure at all n locations
cgccccgcgtgaatcactgcgacacgcgatcctctgagtcacctgctgcatgcaagcttgatggagtgtacacacccgactctcctattatgtttgtggctgagggtgaatctaatgcacgtctgaaagaccttgcaagtgtcctcaccaaactgaattgtgcgggccaataaatccatcgtatggcgccgatacgcctaaatcccatgaatgactttcggggctgaccaccatggtttcatagacatgggcatgagcaacaagcggcgaaggactttactcccgttcgaggtcggagcaaacccacccctccacgtgagtgcctctcggagtgagtagtctaccaccctgcacctagccttttttgtcgaaagacttgtgcatactcgactanattatatgcgtcgggccgcggataaacctaactctttacgtaccttggcgaagagaagaacatagatggcgtcatgttttatagggctgtgacataccctttttggacctgtaacaagcattttctcctccttctg

SEQ ID NO: 9215 - DNA, 481 bp, Glycine max
  unsure at all n locations
agctnttattattaataaacgtattggtttaatgcatcanatagttattaccatgatttanaaattatttatctaattttttcctagctgtctctggtcccaacctagagctaaaccttgtgacgttttatcaagatttcaagggaaagggctggtaaaaaagccagtttaacgagcaagtattataagtaagtttttgtattatcaaacaataaaagctgattnttgttatgaagacttttaaaataattatatattataaaaatcataaatttatcatacataataatttaaaattagatgacggtgaatagtttaccatttattcaaaattaagaagaagaanaatcaatggagacggaagagaagaatggaatgatggagaagtgcaattngaaatcaaactcctttacttcacatatatcatttactnggctcataacgtatccaaagattttgtgaaaaaagggaaaaaagaaac

SEQ ID NO: 9216 - DNA, 501 bp, Glycine max
  unsure at all n locations
ctaatgaanaatcatacttgggatctagttcctctgcctncacacagaanaccaattgtctgtaagtgggtgtttagagtgaaagaaaatgcagatggctcaatcaacaagtacaaagctaggcttgtggcaaaaggtttaaatcaagttgctggctttgacttttctgagactttctcccctggggtaaaacctgttaccgtcagacttatttcaacattggctatcactaatcagtgatcctaacctcatatcttggtggtcccacaagcagcaacttgttgctagatcccatacggaggcagaatatcgtagcttagctcagatngctgcagaaatcttgtggatgcagacattgttgactgaactcaaagttcccttcagcactcctattgtcttctgtgataatcaaagtggcagtgccattgcccacaatccagtccttcatgcaagaacaaaacatatggaactcgatgttttctttgttcgtgagaaaaattn

SEQ ID NO: 9217 - DNA, 492 bp, Glycine max
  unsure at all n locations
agctntgatataacatgatatagttcttcacctatacanatatattaaaatggagtgaaacatatactttntatcttagagaaataatggatactaacttattttattcaaaaaatttccaagtcgaatctaattgattgtgtggatgcatgtcatttgtgaagataattatatgtaggttatttcatatgtgtacaaagaaacttgtgctttatctttagggaaaatggcatcaactatcatatgcatgtgaagacaatttgcatatattgctcagttganagatggacacactaaagaggatagaacaaaacatatntcttctaaagtcttctacactcgatctttgaaggaatggtgatataaacattcaacaaatttgttcaagtgagaatataacagatntctntacaaagtcttttgctaaggagaactntntagtaatcggtacacaagaattgaacttcgtgtcttatagacaatcatctacat

SEQ ID NO: 9218 - DNA, 477 bp, Glycine max
  unsure at all n locations
tatcccaataacactatcaacatagtatgaatnctacactatgagaatcctaattactgatattctaatcatttaacaccttgaagggcatacatgatattaagtaacaaaagcaagcagaagcttctttcccattaccaagcaaatgttctattctagacagaacaaggagataaaatacacctgttaatagcaattgtccatttactgtctataaagtcagttgctgcaagtaatgcagctggccaagccaaagcagttaagagtgagctcaaaacagtcatcattgcccctcgtttcatagctccatcgcaagtcctgatgcaagtcacagcaatactaacatcattcacagcactactaataaactgantacttagttttataagcacccctaaacctacaacaattacttgaagtaagccaatcttgaattcagtgctcacagaatcagatcttgactccactgagtgatac

SEQ ID NO: 9219 - DNA, 520 bp, Glycine max
  unsure at all n locations
ncccgcgtgatctgctgaccgtgatctctaagcacctgngctgcagctgtgtcanaaaaacttatttgattgaatgtctgtaagcgcgcggcctgctagtgagcctgtgagaaaccaacgtctcactggctcgcttagcgcagcggtcctctaagcgaaagtatcaaaaaactgcttaagtgagtgtaacaacagttacactcacacttgccagatttcggaaacttcgtctttgcattctctctctcaaaaatttgcacattttgcatctgtgctttctttttgcattatcaacttcgaagcaaaaaccatacaccatccccagaattccttgattccttttctctgttttcttggccanacttcaagatagaagacttcacttgtagntntagattttaggggttaatgggttgtagattagttaagatangactatgacgctgttactatatgagatgtgccacattatgttgattgcctttaagctganaggcagaaacgacttgttttagnatgn

SEQ ID NO: 9220 - DNA, 413 bp, Glycine max
  unsure at all n locations
ttacccgttgaagatcgaagaacgatgaagaacgaatgaagaacgtcgaagaacggttcaaacctttgcgagattcctcacggaaaacgttacggaaacgtttcggaagcgcctcggcttatattttcttcacggaaacaatttttcaagcaaattcgaaagagagagaagtgcctaaggggctggaccccttccttcttcatttcttcccctatttatagcaaaataggggaggtggttgccgcccagctcgcccaggcgagcagggttgcttccttcagaagcaaccgccttctggaggaatcttctggagggcccaaatgggcctgggtgctatntgcacccncatntttactaagtacacncccctctgctgtttttggtaattctttttcgtaaagtacggaaactta

SEQ ID NO: 9221 - DNA, 419 bp, Glycine max
  unsure at all n locations
agcttccttgagaagctagagcttagctacacacncatctaanaactaagctcacctcttagacaaaatacatgaaaataaaanaaaagtccctactacaaagactactcaaaatgccctgaaatacaaggctaanatcttatactactagaatgacaaanatacaaggcccaaaaaaaggaaaaacctattctaatatttacaaagaagagtggatccaaccttgacccatgggctgaaaaatctaccctaaggttcatgagaaccctanggccttctttagtagctctagcccaagcctcttggagtcttctatccaatacccttgnggggtaggatngcatcactagctagcttcgtcagtgcacctcacctgtgtcgacattggaactggcgagacagtgtccatgtcacgggtc

SEQ ID NO: 9222 - DNA, 484 bp, Glycine max
  unsure at all n locations
catggcttagtagtttgttccatgatcaatgacttcttttaattagctggcaacttatatggacagtagctaatttccaacttatatagagatcatataaggtacttttaagatattctaacatgaataatcatattctgagatatttcctagatactttggtgtcaacctagtgaactcttaaattgttgcaaggttgttagccagattgaatatccctcactggttgatctaaaggngcttcttctagacttagttgctcaactctaaggtgctctgtctcgtatcaggtatcccacatatcagagttgtattttaattntatccaacatgataaaaattatctaatgattatgaggttaatacatttaatgaatacatcttcatatcaatcagattcattnngttttgatacatacacaacatttntatgggctctacgagttatagacataatatanttttgtgactgatctacatatat

SEQ ID NO: 9223 - DNA, 478 bp, Glycine max
  unsure at all n locations
cctcatcgtctctggcagtctttagatttgggagccaatccaatccttgtgttcggactctcagccacttatgatagccgtcgatgatcccattactgcttcccctaagctctctgtcctttcttcacgccgcatcccatgccttgcgaactccttggagtaccctcgcgttgtggtcactgaaaccccgtgcgatgaaaggcgtgatgctttcgtctaatggcgctcctctcatggggtagccaagctgtcttatggcgagaacgggattataattaatacaaccccttgttcccatcaagggaacatttggacatccttcgcatgaagatagaatcttgattcttccttccttctagcgagggaaccaattaacagacgcccccccatgctagccaagagttggtcccaattcgcctttcctttntcaacgcacgagcggtgaccttgtagcggatagacgggcctaccttcttgg

SEQ ID NO: 9224 - DNA, 292 bp, Glycine max
  unsure at all n locations
agcttgtgcaaatcanatcactcctacatttcatctctagcatgcagttttttctttacccactcctcacgtttggttnttgtcaagggaaaaacaccataactaaacgcgccacaaggcattcctatcgcaccagatccaaatctagaacgatgggtgatcaagaggagacacaggaacagatgaaagccgacatgtcggctctaaaagaacaaatggcctccatgatggaggccatgttaagtatgaagcagctcatatagaagaacgcggccaccgctgccgctgtcag

SEQ ID NO: 9225 - DNA, 472 bp, Glycine max
  unsure at all n locations
tctacttatgtggcagggcgggtttccttcactttcttgtttccaacgcgagctctgaccactgttcttccttcccgcgatgcttcttttcatgtccgcctgagtgggcttatagcctaaaccatacttcccacgattcccttgggtttttatcagactagttatgccaccattgtctttgcctaaacccatcccgggttcataaccgttccccaacataactcgggccatcattaccgccgcatcggacagacaaggttgcccacagagggagtccacggaggaaatgctgaccacctcanaagactggaaagcggtttctaacgattcttctgcggcttccacataaggcatggaggatgggcagcttaccaagaatatcttctcgcctgacacgaatgaccaagtgcccctcactacgaatntcagctnttggtggagtgtagaaggcacaactcccactgagtggatc

SEQ ID NO: 9226 - DNA, 411 bp, Glycine max
  unsure at all n locations
acactcgtccggatccttaagcacctgcggctgcagcttggaaagatngtntcaccttctcgctaagccaatcttctggcttagtgagcatccnctaagcgcaacactactgggctaagcatgaggaagaatctagaagaagatgagttgtacaggtttgctaagtgcaacgcttcagttcatccgctaagggagaaaggcacgctaagccaaaaatcactaacatgcgctaagcggtccatacatgcactaagcgcacgagcacgaacaaggccacctatttaagcatgaaatcagaatttgtgaagagagtttggactangattcagagttttgcatgtctagggtttctagagagagaaaggtccaagttctagagagttttgacagaatctgctgtgtgaagatcta

SEQ ID NO: 9227 - DNA, 427 bp, Glycine max
  unsure at all n locations
tctaaactntatacaagaatgaagctcagataccacttgttggacaagtggcctcagatatcttaagaaggggggggggttgaattaagatatcacaaactattccccagttaaaaattctacttttaatttaacccaactacccaagattccttttaaacaagaactccttgataataatgcaaatttatcttactaaataaaaataataagcaataaatagtaaaggagtttaagggaagagaaaatgcaaactcagatttatactggtttgaccacacctttgtgcctacgtccagtccccaagcaacccgcttaagagttccactatcttgcaaaatccctttacaagatctgaaccacaccaggacaacccttcctttgtgttcagaattctttacaacaagagaaccttggtctcttaatc

SEQ ID NO: 9228 - DNA, 414 bp, Glycine max
ctgagcagattctatcgacaataactgtttacttggatgttcgatatagtcacgtaatatatcgagtcgctcgacatagaatacacaagctgtgagataattctgacgacaataactatctactcggatgtacgattgagtcacgtaatatatcgagacgcccgaaattcaatacagaaactctgagcaaattctaacgacaataatcttttacttggatgtccaattgaatcacagaatatgtcgagacactcgccattgagtacacaagctctgaggagattcagatataaataccctttgactcggatattcgattgagtgccgtaatgtatcgatacattcgaaatagaatacagatgctgtgagcaaattctaatagaaataactttatactcggatgtgcgattgagt

SEQ ID NO: 9229 - DNA, 443 bp, Glycine max
  unsure at all n locations
agcttcgttaatgattatgcatatggtctggtactaattcaaatttattaattccttttcttttgttatatatataccggttacgttataataattgttttaggcatgagggaactatagttagatatctcacagtaactaaaaaagtggttaatatacttctcataaaacttaagcaaatgatccttccttgaagtagctnttggaaaggaattaggtttggttcatttctaaagatatatatatatatatatcatangtaaaatttattacgctctgaaaaaaaatggcatggtgttctatactactttttttttgaacttcagccattacaaaanaacgtcatttgaatatgttacatggcttcgatatgaatcaactcatcatgagtactacattntactattatcactttatgaagtcagtattttatccccatttta

SEQ ID NO: 9230 - DNA, 442 bp, Glycine max
  unsure at all n locations
ttggctgcagttgaattggcttgaaccttgaagcttatgaaatntttatagtatgatataatgtggcatgacaaagttaacttttttttccaaataaatttgagcaaggaagacagctttactttgatctaatgaatttcaacacatgattagtttaagattactataatctcattagttggtgttgataatgattgctgctttagtacggagttgatcaaggaatttcagacagtgaagattacattttttttttgaaggagtgttgaaacctgtttctctgcttttggaatcctatactgaacttttgtctttatcttttgctgtttggaatgttagtgaagaacattagatattgttttaataattggcatctgttatgcatatctgaggagaatatctttaagacactagaatttacatggtctctcacttggtaagt

SEQ ID NO: 9231 - DNA, 437 bp, Glycine max
  unsure at all n locations
agctngctgatctggagagntttgttcgtcaggtatgatgtaatcacttcggggagctaaatntaattagaaattctaaatcctcgtacaagtttttcctactagtccttctactgattaaatgaataaaatattgagtttttttaaagatatttaatgtactttttcatttattacttgagaatgaattctctcatgaggaaacttagtaagtttaataattattcactagttntaattaaccacgctccatctatttatacttatgaagagagagatacaanaattcaacctatgtgaaattttgacatgagaggatctattcctcattntctttacatggggtataggaaagctaacacggatagngntntatcttactcataatatattatttgaaacccttgggtgtgcttaatacttggncgaataaaatg

SEQ ID NO: 9232 - DNA, 363 bp, Glycine max
  unsure at all n locations
gcttttccaccaccgcacgcgtaacagcaccaacactttttctataagtaactcatattatcaacgttaagagttcattatttcatgtatgcatggctaatatgaagaatcttccgctattatacataataataataatacaaaataaatatacattctataataaaataatttaaataactcctagaagtatttacccaccaagacacgaaaatgaactccagcaggctcaacagggaagttcaaaatattntagcaccaacgatttcgctataagctctggcgaaacaaggaacaaggaggaagaaggcaatattttaacacccaagcatcacgaaaatggcgcgttaaataagcacacac

SEQ ID NO: 9233 - DNA, 410 bp, Glycine max
  unsure at all n locations
gtcacctgccgcatgcaagcttgtaactctnggcaatttcttagtcacttaanaagttatgactttngaaataatcttcagaaacaagtcacttgaagaattgtgacttttggaaatagtattttcgaaatcagtcactggtaatcgattaccattgaggtgtaattgattacacatcaacatatgtgactcttcattntgaattttgaaaatcttaaagtttaaaacactagtaatcgattacagcttttgtaatcagntngaaaaacaatgcaagctactagtaatcgattactaccttctggtaatcgattaccagagagtaaaactctttggtaaaagatttgtgaaacttcatgtgaactcaatggtttgaaaactttttagtacttatcttngatgagtcttct

SEQ ID NO: 9234 - DNA, 225 bp, Glycine max
tatgctgtacacatgtattataaacctcctcagccgcgaaacctacagcaatagaataatcatgacctttaaagcacttgatactatcctagttggaggaatcatcctaatatcagatgggctattccttcacaaacacaacagtatatatctccttttctgaatgctgctggtccacgcaagccatatagttcttcttcaatgcagcaattgcaggaacaacaa

SEQ ID NO: 9235 - DNA, 199 bp, Glycine max
gcaagcaattaatggggcaaaacacacctaatgattatgattatggatggctcaaaatctcacaaatgtaaacctatcactttctaattgagccttcacaattatcatgacatgtagaggaaaaacaaggattgtaaattacaaaatgtcaacagatttttatcttctgaacgagtaccaatcccttgaacatatccta

SEQ ID NO: 9236 - DNA, 268 bp, Glycine max
atatgtcatatagtgttgataaaaatgttcaaataagtcaccagaattttgaattgcatcaaataataaaataaaatttcaaataacttaatgcaaatccaactgagaagataagaacggtagtagcttttaagctagttcatttctcatgagctatataaaataagcttgtgaaataataacttaatattgtcaaagtaacttataaagtgatcaaatgagcttatagtggtggttgtttcgcccataatattaacataattattta

SEQ ID NO: 9237 - DNA, 488 bp, Glycine max
  unsure at all n locations
agctcgcgccgagaaggaatgcacggagganatgcttaccacctcgaaagactggaaaacggtttctaatgactcctctgcggcctccacatacggcatagaggatgggcagctcaccaagatgtcttcctcgcctgatacgatgaccagatgcccttccactatgaatttcaacttttggtggagtgtagagggaacaactcccactgagtggatccacggacgccccaacagacagctgtaggggggattaatgtccattatatggaaggtaactnggcatgtgtgagggcctatctgtactgngagatctatctctcccctaacctctcggcgggtgccgtcgaaggcacgaaccaccatngaactcggctttaagtgggacgcattgaatggtaatttctccaaagtgctcttacgcatcacgtntaaactgggaacattatcgataacactntggctatgatatggtccatacacttgactga

SEQ ID NO: 9238 - DNA, 467 bp, Glycine max
  unsure at all n locations
gtactattattttgtatacacagtttctacattaggaagccttgaaaataagctgaataattatgataagtaggccattatgtcacaactaagccttctaatctgtctttctgaacaaggtgctatttgtataaatgtctggcttgtttgtcacgtttagcttatgcatgtacttatacaccaatttctagagattctgcgaaaccatgaataataactatgactgcatagctatgccatgtaaatttacaatgtagttgttggatttcctttttaaagttattagtttaatttatgcatctattttgtttattggaagatgtgtatgtatgtcaaatcgggttatgatatcatatacatgatgtgtggaatacatntgtaatttcataaatctctcgtgatttcatctgatatatntgggatggaacatactagacttttaatgatgatcatttttatatgataag

SEQ ID NO: 9239 - DNA, 567 bp, Glycine max
  unsure at all n locations
cccttgatcactcgacncccgatcctcttagtcacctgaccgctgcaagcttgtatagttctccaattatggntatttnggagtaaattttgtaattaaatcttgtttatggggtaacgtggctctagaacatctncattggatttaatgatgaaatctatgcattttcaggtgaaaaagaagcttagttttaaaattgcaaaagtagcagttgggctaagcgtaaatcaccgctaagcgcagcttcagcgcgcttagcgcaaaagagaatctggcagagcatcagcatcaaagctgcgcactaagcgcgagatcagtgcgctaagcgtagcaggttccttcagctaggctaagctcgagactgacacctagcctaatttcactttactcgcgctagcgtganggtgggcgctagcgtagcgtcgcgatttcagagtctatttaaagtctgtcttgtgcaaaantanggtacaccttttatgccaccttttangacataattccagagcagccacaggcctatttggngaaaagtgcccttaagcaganaagaggacaacttgtgat

SEQ ID NO: 9240 - DNA, 281 bp, Glycine max
  unsure at all n locations
cactaacaaaactggacaaaagaaacacatattccaatccaaattcagttgaaataacaagaacaaaaaatagaaagaaataaaaaatatataaatacgaaccaaaaatgaggataaaaggattggcatatccagcatcaccatgaacaaaaaatcgaccacctcgtcaccaccaccacaaatatcgcaccttcgccatctcagaattncaaagtcgtttcttaccccaaacctgtcttcaactccgatgattccatcttcgacttctttagaaatgtcat

SEQ ID NO: 9241 - DNA, 424 bp, Glycine max
  unsure at all n locations
ctataaaagaggaagaagagaaggagaatagacaccaaatattccagagaatacaattccttatagaaggtaaaactagaagcaggaaaatcaatcattaggaagtattccttcccttcattccctttcttacttacccccttcactactcattaccctcttgcaatggtaaagcatttcatgacaatgagatgctaaaacctctcttggttggagcttacaaccaattgcttttgatgaattactcttctatctagtaatgtatttaatttcatggctttttttcgtgctaatttaatgatggnggttgatcaccatattatggaagtttaggggtgcatgagaatgttatcttaaaagactaaaaanggatataatcatcattatagatatatgatttattagctatatacatgctattcta

SEQ ID NO: 9242 - DNA, 396 bp, Glycine max
  unsure at all n locations
atgcatgctaagctataagctctacaactgaataacacttggactcttaccattcttcctcctcacaaaactgccattgggtggtcgtgggtatataaaatcaaataaataaatgatgggtctatagaaagatacaaggcacatttagtcacgaaaggatacacttaaacagaggggtttggattatctcgataccttctcgccagttgcaaacctcaccaccattcatctncttttctagctntggttgctttccatcaatggcatctgcgacaactcgatgtgaataacgccttccttcacggtgagcttaatgaagagggttacatgcatgtnctctctggacttctagtcacaagcccgaaccacggttggtcgcttcaacgatctctatat

SEQ ID NO: 9243 - DNA, 529 bp, Glycine max
  unsure at all n locations
cgctgtccttcgacntgtgatctcgagtnaactgccgcatgcangctnntatanaagagatgacccagagggtcacggtgaactatctcttcaatggtagggagggaaaaaaatcaaaggagctgaattggagcacgttgaagaatactggaccacacgcctgggcttaacgcatgctgtgtgacttaacacacacctttagcgtgaatttacgaaaattcctaatttttggttatttgagtaatgggcttgagcctgatgtgaatagaccttatggttacttgttgacaagtgtccaattcattttaagtagtaaaagacctggaagtccgagtgtaaattcaagggactttggttgacttaagtgatgcaacctcattttaagcatgagagaagtaaaagataagactggagtgtgaaattgggtctagaaaagaagaataaagataataacatggttaatgcgaagagaatcagatgtgatatatggactacatgcaaactctatatgcatgtatgattcttatat

SEQ ID NO: 9244 - DNA, 490 bp, Glycine max
  unsure at all n locations
tgaagcttaaggaaaagcttgaagaagttntggctttcacatgcttaactcccttgaatggcatttgtattggttgttatcttggttgttgcaccttagtatatttgatatttgttttgtattgtgcatcatcatagtatgtgtggagacaattttctaagttagacaaatttctttagaggcaaaaacactctattttaatcgattacaacctcattgtaatagattacaacaagttgtctgaagcttgtagagttaagtcccatatcggtttaatcgattacggcaatattttaatcgattacaccgctgtttgagataatgactgatttattcaagggtctccgctctaatcggttacaaagtggattaatcaattatttctctcttgtttaagtgttcagaggtgaacaagaacactntaatcaattacttaagtcatctaatcgattacattgttcttgagtttgtttcaaatgttggataacac

SEQ ID NO: 9245 - DNA, 448 bp, Glycine max
  unsure at all n locations
agcttctttggcatcatgttgatccgaaagaaccttacggatcaacttgatccgtanaatgtatgaacaacgtttacggatcaagttgatccgtaacattcacgttcaatcttatttttttaaaaatgctaaatattacaaaaatatcaaagttaagtatactctaagaagaccaacttcaagctcttaggcgtgagtttacaaaagctcanaactatataaaaatcttaaattgtctttcaaggcatggagcaaaaaaccatgatataaaccttacttaagagatggagtctactactactctaaccaataatattttgtttcaagataggatagtttagtgtgcatttgtttgaaaggaaagaaacaatgtacaagggaaagtttgtactttgttttgtcggatgcacatctctctactttaattcaaaagaatatcttctatttc

SEQ ID NO: 9246 - DNA, 386 bp, Glycine max
  unsure at all n locations
agagcttatcgaccatattntattcctttattttcacgtgacgacctacaataatggctggtatattcttccttttgaaacagcaaaatagtttagagattatgagcggtnagaaagaaatgactccgaatagagttgtgaactggccattcaggactctatagtgaggattttccttctaaacctaattattgtgaaaagagaaagaaatgaaaaaaaaaagaaaaaaaaattaccatggtttttgttatttaaatcattactattaaaccagtcattattttggggacgccacaacgtgccctcttgcgggcaagcgaaggtgaggctcacgggtgcgctttccaaaggaggaaagatgcgcggagtcaccaccaacgtttatt

SEQ ID NO: 9247 - DNA, 381 bp, Glycine max
  unsure at all n locations
agcttatccaganatcgaagcactatgatcttctgctgaatattaggttgagaaacattctctaggaccctgagaacaatcatagggaaaaaaactccaatttctgccttcaatccagctctaaatcttgacaccagactgatgaaaatggagcatgacagttgaaacacaatcaaaagagttgaagcactgttcttcaacaaggatagacataagtactgcttgatggcgcctaaaaacctgctcatccacaaccaaatttaaccatcaggactatttttgtcatctggaaaaattatgaagtanaaaaaaaatatagtgtcaagtggtgtatagaacaaagaaagaaaatgttaatttgcattaatgatgagggacaaa

SEQ ID NO: 9248 - DNA, 456 bp, Glycine max
  unsure at all n locations
tatntaaacaatatataattgatgttntgtagtctatgatcaatgtacacatgtaacatgttatacctttcatcattcttccttcactttattcttatattactcttataaaatttatacataatgcttattttttatcaactttagtcgagtgatcagcctctaattttaaaaaatttccttacaaatatgttgataaataaaaaatattttaagttatacgaaatctttttatcttctttaataaaaaatgatataaaatatctttttgacaattatatttttaaacttagtttatgaaagaaataatttatttaaatatttctttaatgatttataaattggcgcaacccgtgaatgtgtgtctagttagttttaacagtcaaatacacgttctgtagtattaccacttaccagtgtaaatggctagttcctaaaaattctacaatacacttt

SEQ ID NO: 9249 - DNA, 475 bp, Glycine max
  unsure at all n locations
agctntctgaaatntctgaatgaagagagagatattggctntntaananaaattattttcttttcctattnttttttctcataaagcactctccacttgtcccattttaagtggagcaataagggcccacctttntcccttgatttgacttcatactcagccacaaaggagaaaaaaaaactgaccttntggatgttgtaatcctgtctcggtttgcatgccgcctctctggttccaattcctcgcgtttctatgcacccgttggggcccgttttcgaaagttggcaatatatatatcanaacgctcagaatgagaccctgagcgtggttcagagggtggtttcnngtaaatttaagttccacgccaaatggataattttagactaattcattggcgaataatctataactggtccagtatgggatactcttcgttaatagtctaacccgcgtatctttcccccatgtacatact

SEQ ID NO: 9250 - DNA, 395 bp, Glycine max
  unsure at all n locations
ggccacccagcttgcccaggcgagctaggttgcttcctccagaatgcaccgccttttggaggaacttcctggaaggcccaagtgggcctggttgctatttgcaccccctgtttactaaatacacccacccgcctttttttgctgattctttttccgtaacgttacggaactttacgaattccgtaacgatacttgttttctttccgtaatgttacagaaccttacggattacgtaatcatcccttttttggctttcagaatgttacggaacctcacggattntgcaacaatacttccttttgatttccggcatgttacgaatcttcacggattgtgcaacaatgctttcttttgacttccggcacgtcacgaaacttcacgaattgcctaacgat

SEQ ID NO: 9251 - DNA, 419 bp, Glycine max
  unsure at all n locations
agctntagaagaccgtggaattagccattggtgtgtggcctgtgatcttctgtggactagttngacccctttgcttgacaccatgtggcccaagtactccacctgngtttgggcgaaggaacatttcgagagcttaatgaagaactggccctgcaacaaaaccttgaaagccaattccaaatgaagtaaatggtcattgaaggagctactataaattagtatgtcgtgatgtggacatcaaagcccaagcccatgacaaccaccagccccaggcccatgactagatggaagcccaagacccaatacaaggcataggaagacccatgacaagagcaagagctaaaaaggcacaagatgctttggacatatggtgatattctgagggtagtcaaatgcanggagaggccaacacttggagt

SEQ ID NO: 9252 - DNA, 390 bp, Glycine max
  unsure at all n locations
ggagggagaactggatgccttggtcaacctagtaactcagcttgccatgaatcagaaatctgcatctgcacctgttgcaagagtttgtggtctatgttctatagcggatcaccctgtggagcgggagcatctttaatgaaataatctggagncaangagcaacctgaagcttatgctgcaaacatttataatagaccccctcagcagcaaaaccaacaacaacaaatacaatctaggttggaggaatcatccaaatttgagatgggcaagtcctctacaacaacaatagcctgtcccttatttccaaaatgttgctggtccaagcaagccatatgttcctccctcaatgcatcagtagtagtaacaacaacaacaaagacaacaagcaac

SEQ ID NO: 9253 - DNA, 433 bp, Glycine max
  unsure at all n locations
agctntaagtttctgcacacataggagaacagtacacattgaattggcatgttatcagcaaataaaatccaataaatctataattaggtcaattaanaatgtccctttatgcatagacccacccaaaagcatgggtaattactaggtgaaagctcatgaatgcatagacctaccacctactttatgctaaaattcaatagttaatcataagagggtaacaaaaagataagcatcccaacttaactntgatatcatgcaaaaaaaccaacatttcaattatatgttaagctaccagacaacagataaattaaaaaaataaaaagtaaaaaagagctacttttaagtttctacacacagtagaacagtacaaataaaataggcatgctatcggccaatgaaatgcaatanatcttttaatcaagtcaattaaaat

SEQ ID NO: 9254 - DNA, 432 bp, Glycine max
  unsure at all n locations
tccatcaagtggtaatcagagcacaagagcttcaagtaggtgctccttaaacctccattgngtttttgctttaccttctcttccattgttgtttcttcatttttctccatgtatctcctcacatgtcttgtgctaaatgttgttaacatgattctttagagtttccaccaattaaacttgctatggaagctatatttgattttctatggttcaaatttattgttcttgttcttgaaccatgaattgtgttgagtttaagttcctttgagttttgtcttgttattttttgtggctgaatcctaaaccataaaattcttacaaaaatattaaagtagaagaaaacctcacaaatctagagtgacttgttcacctattgtagttntgtcatagaagtcatgtctagtcatgaaacttgtcacataagatttctta

SEQ ID NO: 9255 - DNA, 328 bp, Glycine max
  unsure at all n locations
agcttatcattacacagtagcaagtagctcaaatcatttcactttatatgattaggcactttcaacaagataggtaattntggcttacatgcacctttaccattgcctatgttaataggattacgaaaagcatggcatgcatctcaaccagatgtttaaaattaattaatgataaccgtataacaagaagcagaatcttggcaatgaaatcagccgcagcaaagaaaaggaaaaccaatcagatcccacaaatagttaagctggtacaacagaattcattcgacttcataaattaaaaactatcgcaaccatttacatcacaatacct

SEQ ID NO: 9256 - DNA, 371 bp, Glycine max
gtctgcgccgggttaaagtcctacaacgatactcttcaaatattaagagccttgtgcagctgaagaagcttaacctactggggttaaagactcatgattgtcacatgttgatgcaacaattgttagccgtggtcatacgagacatattgcctaacaaagtcaggttagccataactcgcctgtgctttttcttcaatgccatgtgtagcacagtccttgatcctgtcaagtttgatgacctggaaaacaaggctacaattatactgtgccagctggagatgtattttcctcctgctttctttgacatcatggtccacttaattgtttaactggtcagagaatcaaatgttgtggtcctcgttatctgtgct

SEQ ID NO: 9257 - DNA, 219 bp, Glycine max
ccccccccccccccccccccccgcccccccccccccccccccccgggccccccgggcggccccggcgccccacataatttccggccgcccccgccccccccccgcccccccccccccccccccccgccccccccccccccccccccccccccccccccccccccccccgcgcccccccgccccccccccccgccccccgcccccccccccccccccccc

SEQ ID NO: 9258 - DNA, 316 bp, Glycine max
  unsure at all n locations
tactaatggtctcccttatgggacagntgagatcaaaagcgactccacaaaccagagcttcaaggtcaatggacaccgacttaaccctttactcacaaacccttctttagtggacgtaatggtggaagagacttccttactccaccctactcttcctctaccatgacttangcgagttttctttcccatctccttctttacttttattacattattcccattctatttgatgatttaatcgcttttaatcttctaatcgtgccacattgacgacaatgtgctgtttaagtatgacgggggggggacctaatccgac

SEQ ID NO: 9259 - DNA, 499 bp, Glycine max
agcttcgattggtgaaaggtatgttgctgaagaatctcttaagtattgctcgcagtacattgaagctgctaaatctgtcggggtacctaaacctcgtcatgtggcgacactagggggcaagggtacacaaggctacaatgttgtgacaatgactcgccacgagatctcacaagcacatctatatatattgaataatgcagcagaggtcattccatacatagatgcccacaaaaaagaagtcaccgcacttaacccaaaattcaacatgatgagggttttgcaagagcacaacagaactttcatgaagtggtttagacacacaatatttgctgatgaggctacttcgaaaacattacgaaatgtagctcttgggccaaatctaaatgtttcgacgtggcaagggtatcacatcaacaattattccttctatactaagtcccaagatgagaaaagctcgatgcaaaatagtggggcgactgttgatgctgattcggatcac

SEQ ID NO: 9260 - DNA, 496 bp, Glycine max
  unsure at all n locations
gcttatttctcactggtcctggatcaattgcatggagaaaggtctccatatacattctaatcaatggtcgtcttgcttaaaggaggaaatagtcttatgggtttttgtgtttgggtaaccacctatcgtggttaattntttgtaattggggatggcagattctgccttgtataatatgttttttcagtacatctagtactgacccctattaatactatcagatttttgctgtgcaaaaaaaaaaaagagttaagtacaattacactatattcataatcaagtttcagttttcacagtattgaagcttttgaaaaaatattgaaataattttctcaattcacaacaaaattttattcaccataacgacaatcttatnttttntattcttccatttataaattgtttttcatctattatttgaaatacggtaagctcacaatatgaacctgacaccaagatattgtgacccaatttgtgtatagaatcagtgtatata

SEQ ID NO: 9261 - DNA, 212 bp, Glycine max
ttcatggtagctaagccgaattccttacggcaatgtgagcgctaagcgagtccttatcagctaagcgcatgctcctctgtacttaagatgcatcattttagctaagccagccattgccttgcttagcgagagttgcaacttttcggatctacaaacctcgctaggcagtcttatcctagcgctaagccaagcatgtgtgttaaaaaaactga

SEQ ID NO: 9262 - DNA, 430 bp, Glycine max
  unsure at all n locations
ccctctttttcctcttctctttcaccaatattaagtagaataggcttactcaaagttttaggaattttacggaagcattacgagagcctcgaaagctgcggaacattttattttttttatgnggaggagctttataagttcaccccctcccctttgctaaatgcactcctttntattttcacacccctgtttactaaatacactccccttttgcttttttttttttgctgattctttttccgtaacggtacggaactctacggattacgtaatgatacttgttttcttttcgtaatgtcgcgaaactttacggattacgcaaccatcccctctttgacttctggaatgttacagaactntatggattgcgcaataatgctctctttcggctncgacatgttgcagaacttcacggattggctaacgatgg

SEQ ID NO: 9263 - DNA, 491 bp, Glycine max
  unsure at all n locations
atcctctaagcacctgcggctgcagctgctttacatgattctgtttgaactgcctgcttattgaacaagcctttaccaaatgaacaagttccctgagttcgatactccattcacaccgttttaattatttacttgacgactcagtgcacttgctggtagattntgcatccacacaaacaagtagtatcccggagagcgaaacaagtattntggcgccgttgccgaggaactttntccattttggaaagttagttcagtttgaaggcattaattcattattctttggattattaattnttggttntggtagtattttttgagttcagaatttattttcttcttcgaatggntaactactggctctattagtgtttgcatgcgtagatcttctgcaggtgaattggttcattggattagaaattgaagaaccttcagaagaacaacacagagagaaaaagaaaagctttgacgatagaacagtagcatcaatc

SEQ ID NO: 9264 - DNA, 376 bp, Glycine max
  unsure at all n locations
acatgagttacatgaatgccgtaaaatgattgggtagaattagtctaattggtggttaaaattgctacaccatgatgaacacattgcacctagattggtgtagagtgttaatttctttcaaaataatatgcactgagttgtgatttgttttattagttgcatgataacacatgcaattagcaaaaagaaaaaaaaaaccccaagttgattgacttcttgcttgcttangataactgacataatggttgcgtatttcatgtaaactaactttttatggatgcgtcattgcaggcaatggctccaaagaagcttctcactaaaagggcaaggaaggatgccgcaagggagggatccaaaagaaccccacaagcagaaa

SEQ ID NO: 9265 - DNA, 433 bp, Glycine max
  unsure at all n locations
agctntgctgatttagttntcaccgacgaaaggatcatagtatgtgtgaaaagaggcatatttaatcatcatgctttcatgaaaaaaactggngcaagtaaagagggtgagaatgagggagaaacccatgctgtgactgccattcctatacagccaagtttcccaccaacccaacaatgtcgttactcagccaataacaaaccttctccttccccaccacccaattatccacaaaggccatccctaaatcaaccacaaagcctgtctaccacacaaccaatgctaaacaccacctttagcacgaaccaaaacaccaaccaaaaaagaattntgcagcaaaaagcctgtaggattcaccccacatttcgatgtcatatgctaaacttgctctcatatctactcgataattcaatggtagccataacccctgata

SEQ ID NO: 9266 - DNA, 465 bp, Glycine max
  unsure at all n locations
tgatgataacaatgatgacaacaaaagattatgacaaaggtgatgaacaaaaagctcanagatcatctcaagtgaatcaagaacaagtcaagagttcaagaatcaattagaattcatgactcaagaagaaagcttagaatcaataatcaagattaaagattcaagatctcaagaatcaagatcaagattcaagattcaagaatgaagaanagactcaatcaagataagtattaaaaagttttttttcacaacattgaatagcacatgagtttttgacaaaacctttacgaaagagtttttactctctggtaatcgattaccatattggtgtaatcgattaccagtagcanaatgagtttgaaaaagttntcaaactgaatntacaacgttccaattattttcaaaaggctgtaatcgattacaatgatgtggtaatcgattaccagtgccctcgaacgttgaaat

SEQ ID NO: 9267 - DNA, 395 bp, Glycine max
  unsure at all n locations
agctngngctctngcctcactcaccagccttttggtttcatttctagctatcttatacttatcccaaggttcagaatttctacatctagaccactccttganacactccttttttactctaactttgctctgaacattttcattccaccaccacgattctttacccctaggtccaaaacctctagattcacccaacgtctctttagccactttaataatctcttatctaccaaattgtgacatccgcgtgaaaagttatgaccatgcgaatttctcgagtacttccattgtgcaatatcgagcctctcgatatattacgtcccacattctgacatccgtgtgaaaagatatgaccattcgaatttctctagagcttccgctgttcagtttcgagc

SEQ ID NO: 9268 - DNA, 379 bp, Glycine max
tgcacaacggaagcactcgagaaattcgaatggtcataacttttcactcggatgtccgattcgcgggcataactcatctagatgctcgaaattgaacatcggaagctctcgagaaattcgaatggtcataacttttcacacggatgtccgaatttaggacataatatatcgagacactcgaaattgcacaacggaagcactcgagaaatttgaatggtcataacttttcacacggatgtccgaatttgggacataatatatcgagacgcttgaaattgcgctaccgaagcactcgagaaattcgaatgatcataacttttcacacggatgtctgatttgcggacataactcatctagacgctcgaaattgaacaacgga

SEQ ID NO: 9269 - DNA, 455 bp, Glycine max
  unsure at all n locations
agctngaactgtgaacaaagcacagcctaccagtatggtgaaaaagaaattgaatttcaatttaattatgaagactgacaattgtaaagaattgagcccctaaacaattgtccatagaggcagcaagcaaggatcaactctcttaaaaacttaaacatctaggcctagtgcagaacctaagcattgagccatggccttgaaaaccatcaaattatatggctaaaacaactacaatgagctaaagtttggtcaaataggacaaattatattgctttcccttctttaacatgtatatattaatgtatntttttcatatattctagcatgcaaaatcttgtaaagatatgcttgatgaaaatgaaaaaaccataatacataaacgaagttcttgagtagcttaaatgtctattcttgatactagtgtcaatggatcctattctattcaacttacaact

SEQ ID NO: 9270 - DNA, 441 bp, Glycine max
  unsure at all n locations
tggcattggaatggcgaaagccccactccatcattaggattagtacctgacatctcanacaaacaaatcaaacgtaacaagacaattatagttgctgtttgaatacctcacccactcaagtgtatcacacaattatggcttttctctaatgaaacactcttgccttttaccactctaattccccttgagttcttaggtaattcaagagattatggccacaacaaagaacaattcaccaatatgtgtaaggtaaggctagagagacaaggaaccaagaaaaatgctaacaatgtttttaggcacaaatgaaggaaataaaattcagaatttaggaattcaagtaacaatccttcatgcaaccaatatattaccttatagagattnttttttaaaagttcttcaagcatgaaccattcagcccaattntatttttttntttta

SEQ ID NO: 9271 - DNA, 306 bp, Glycine max
agcttgagcaaattcaaacgacaataactgttaactcggatgtccaaatgaaacccgtaatatatcgagacgctcgaaattgataatagaagctcatagcatatgcaaaccacaataacttcttactccgatatccgactgagtcccgaattatatcgagacgcttgagattgaaaacagaagctctgagcaaattcaaacgacaataacttttaactcggatgtccgattgagtcccataatatatcgagacgctcgtaattgataacgaaagctcgttggaaagtcaaaagacaataaatttta

SEQ ID NO: 9272 - DNA, 388 bp, Glycine max
  unsure at all n locations
acgacaattactttntactcggatgtctgaatgaatcccgtaatatatcgagacgctcgaaattgaaaacagaagctcatagcaattgcagacgacaataactgtgagcggcggaagataataaatatttccgcnanacaccgagacgctcgaaattgaatacaaaagctctgagcaaattccaacgacaataacttttaactcggatgtccaaataaaacccgtaatatatcgagatgctcgaaattgaaaacagaacctcgtagcaattgcaaaccacaataacttttaactcggatgtacgattaagtcccgtaatatatcgagacgctcgaaattgaaaacaaaagctctgagcaaattcaaacgacaattactttttactcgg

SEQ ID NO: 9273 - DNA, 428 bp, Glycine max
  unsure at all n locations
agctagaagaggatgctntaatggagganaagatagagagaaggagcttcaagttaggatgctntaatggaactttgaagtgtgtctcataagacttttatttatcaaagctacaacaagtgttacacatgcttctatttatagactaggtagcttccttaagaaaacttccttgagatgcttctttgagaaaacttccttgagaagctagagcttagctacacacacccctctaaaagctaagctcacctccttgaaaagcttccttgagaagctagagcttagctacacacacttctttaataactaagctcacctncttgagatgagcagctagagcttacctacatacccccaataatagctaagctcacccncatgacaaaatacatganaatacaaaanagtccctactacaaagactactc

SEQ ID NO: 9274 - DNA, 415 bp, Glycine max
tgccacccagctcgcccaagcgagcagggttgcttcctccagaagcaacaaccttctggaggaatcttctggagggcccaagtaggcctggttgctatttgcacccccatttttactaagtacaccccctaccttttttttggtgattcttttttcgtaaagttacggaaacttacgaatttcgtaacgatacttgttttctttccgtaatgttacggaaccttgcggattacataatcatccccttttttgacttacggaatgttacagaacctcactaattgtgcaacgatgcttccatttgatttccggtgtgtcacggaaccttacggattgtgtatcaatattttcttttgatttccggcatgtcccggaacttcacaaatggcctaatgatgggtgccaagcacctcac

SEQ ID NO: 9275 - DNA, 376 bp, Glycine max
  unsure at all n locations
agaagataaaatctctgattcattccttgaaagtggttgtctaaatcttttattnttaaagaacaacacctcatctcanagagttcatcatttccaagccaaatacacatttatacttttaaatatattttttttattccttaaccagtatccttatgaacaaggaggatgaggcanaagagtgagggttgaaagaaatccaagcatgtcatgccagctcctgttcctcattggatcctctttgtccatttcgactgtcggctntgtcactagcaccgaattctatcattctgtataactgccagaatttntggtttgttttgttntgatggcananataaaatacttttattaatcagcaatagaaatatagcag

SEQ ID NO: 9276 - DNA, 489 bp, Glycine max
  unsure at all n locations
ntctcatattacttctccacaagctacattttaacctatgcataaactagttntagtttatgaactagttntagtttatggagaagcttatttcattttttcttttattttcttctctcataagtatttatggagagatttatccaaacaaaaataccatgaagaacataaaattagtcagcttaacctcaaaagtacaaagaaggttaagtcaattcataaactatcattatgttgtaacacttacaatttgtgtacaaagaaggttaagtcaattcataaactacagcagttaaatcatctcccccgtatatatgtttgactntgaatgccacattccggtccatgcaatgagtgagcctctttgtgatgttggagtttattcccagccaatggcatgaagctcgatcaggttggtaatttgactacagcatccattcactagcaatggcaactcgctgacactaatatattcttgctatatgactt

SEQ ID NO: 9277 - DNA, 421 bp, Glycine max
  unsure at all n locations
agctatgagccatactattccaaactaaaacttctgtaccaaatcgacgaaaggtgttggaacttggatacatactgatgcttttggtattgcaaaaaaatggaacatcttagaatgtggattttggtctaactcaaccccaaaagctatctcttatggtgagaggtgccctccacttatatactctatcttggtactatcgctagtcaatgaaggacttggattgttttcaatacaccccctcacgtccaagcacttttgagcttggcgtgtggataacatggtgggtgaccctttgaatggatctaggataggctctaataccatcttagaatgtgggtttaggcctaactcaaccgcaacagctaactcatanggtgagggtttcctccacttatatactctatcttccactatctct

SEQ ID NO: 9278 - DNA, 398 bp, Glycine max
tttaaatatatgattataatttattaaaaaatattattttcattattatatgctctatgtcaaatcttcaatcattctaaagaatataaaattatttttttaagggtttattttccaattcccacacatgaatgtatctatcaaatattaaattagtaaaaaaaatatttcaaataaatgatgagaaaattaagtactccaatatacaaactttaaaattaattaactcctttaaattaatgagctaaagttaagtttttttttttcttccacaattgaggctaaactctaaattcttaacacaactacactccacaatatcaataaatgtgttttaaaaaagatcataaacatcaatattcaaaatatctagggataatctctcatgcatcttaatt

SEQ ID NO: 9279 - DNA, 464 bp, Glycine max
  unsure at all n locations
gcttgtacacataactcggttggttggatatttataattacactagcctatatgactcanacaacaaagacactaaaagtagagaattacataccctgcagaagagcaagaatattaataattacactagccactgtgaaaatttcatggcaactaatttagtaactacttaaagcagaagagcaagaatattaataatcttacctcaatgccccctccaagaccttcaaatacatttttcagatttctagatgcatcccagacttgaacaattccatggaagcaccctgatgcaagaaactgtccatcatagttaaaatctaaacttgatacacaatctttatgacctacacaaaatcaatgacaaactcacgatggaaattcaatcaattgagagtaacatgacattaccaatcatgatgtcgaacctatcctaattagaaaaatacacatccagtagtagc

SEQ ID NO: 9280 - DNA, 439 bp, Glycine max
  unsure at all n locations
ctaagcttgactacccaacatggcgagttcaacatgctttcaacaaatttcttcacatttaactatcatgaagcagaaacctagcaaaactacccatcatatctcccaaaaccccatacccacgaacatcaagagagaaagaagtctacccaaacctgaaatttcgaggtcccacacgtagagatgcgcttcacgactctgaaaatgccttccttttgcgatttggagcagaagtgggcaccaaaggttggagctttaatggagtttcaatggaggatgaagaagaaagaaaatggcaacgtgagagagagaaaaagagctgtctaaaattatggggctgagtgaagagagagagagtgttgctttctggtttaaaaaggctntttctctcttctattantttaatttaagctatgccacatggtctcatttgagtgga

SEQ ID NO: 9281 - DNA, 421 bp, Glycine max
  unsure at all n locations
agcttggcaacatagttgacacggaagggatatctnctctatatagaagcataatatcatctgcaaaagtcaaatgagatagctgaatacatgcacaattgggatgaaatttaaaattggcatcatccttaagactgctcatatctctggaaaagtactccaaacaaagcacaaacagataagggaagagaggatccccttgtctaagaccccgctaccccttgaagtggccataaatggatccattgactgtgacactaaaggaaaaagggtcaacaaaaatacaccaatgaaaacatatttttgtggtgtaagtatataatagaatcatgttttttgtttgttaaatgatagcgaaaaagttatcgacggaaacaaaatttatntcatatatatacaaacatgtacaacgagtgaaatg

SEQ ID NO: 9282 - DNA, 353 bp, Glycine max
  unsure at all n locations
caggatcatactccagcattggttttacaaccctattgagagaagaataacagcactgttagtgcattcgtgtcattaaattctgaaaagattcagttaatgccatcaacaagaagctatttgaggtactgctgcaatcaaaccattatctactctcgcagatgttccattccccatgtttcttggtcacagtgcgatatcatagacacaaaaaagaggttgaatntggctctagacttggtcaagagtgaacgacacacggaaaggatatatcacattggtatgtggaaagaaacaagacagatgacggattccaaattttctaactgatagttttaataaaactaataaat

SEQ ID NO: 9283 - DNA, 284 bp, Glycine max
  unsure at all n locations
cgagtatgacagtcatcgctttatgagcgctgtgcaccagcagcgcttcgaggcccatcaagggatggtcgttcttcgggagcgacgcgtncagctcanggacgacgagtatacttgattccaggaggaaatanggcgccggcggtgggcaccactggttactcccatggccaagtttgatccagaaatagtcctttgagtttatgccaatgcttggccaacagaggagggcgtgcgtgacatgagatcctgggtaaggggtcagtggatcccgtttgatgctg

SEQ ID NO: 9284 - DNA, 436 bp, Glycine max
  unsure at all n locations
agcttagctcaacattggccagcttagcggaacaaatcagcctcagatgcaagggttgggcgctaagcgcttgagactcacaacttagcgcattaacagagttgcgcttagcgcgaggcttgtgcttaaggaaaggactatttttcagaaaaaagttttctgagttatttttcagtcctttttccaagaaattgaaacccttatgttaaacattcaaagaatggttgatatactcctatgtacagattatatagcangttccaaatgattaaatgcatganaaacanagacaacagaaattaaaactgggttgcctcccaggaagcgcttctttaacgtcattagcttgacgcttttacctcactgggtgatcttatgttttggttcttactttcaaaacctcttgacctcccttcattacctgtaaccaaacatt

SEQ ID NO: 9285 - DNA, 356 bp, Glycine max
  unsure at all n locations
gcttataagggcgtccaaaggtgactntcttctgaaacccacttttgggtggttccaattcctgtgagggatccctcctatgtttctcanacagattcctagcgaatattgtttgagtgattttctttgttttgcacttctgaagggttgtccatgcaaaagttagtgtaacctcagtggatggacaaacacgttgagttccaggtgctagtcagtgtggttgcatcttgatgacttgtgactgcattggacgtgtccactgaggaggctgtaaatgaactatggtatctaaaggaagagttgtaaaggcttcagatgaggtgtgtgaatagacatatcaagtccacctgtggagc

SEQ ID NO: 9286 - DNA, 383 bp, Glycine max
  unsure at all n locations
atcgaagtggttctgaatagaggaaaaattgatcatcctgctctgatgaatgggaagcctgnggcaaatagagaggatgagaataaggaagcaacccatgctgtggctgccattcctacatggccaaatttcccaccagctcaacaatgtcattactcagctaatatcaacccttttcattatgcaacacccaaccatccacaaaggccatccttaaatcaaccacaaagcctgtctgccgcacatncaatgccaaacaccacccttaacacanacccaaacaccaaccagggaggggatattccagcgaaaaagcctgtagaattcaccccaattccggtgtcctatgctaactngctcccatatctactcaataattcaat

SEQ ID NO: 9287 - DNA, 326 bp, Glycine max
  unsure at all n locations
agctttanacaagctaccaaacaaactataactataaactganatttanaagttgaactggaaattaanaactaaagcataaacataaaatgtactaaagaaagaataataataaagatgttcaaaatgcaagaaaataaagatcctgtcaaacatcctatgaatgatcctctgcatgctcgttcaggtccagtgctggtgcagatggtggatcctgagaaatangcaactntggcactggtgtagatggctctgcctgagaagatataattgaatcatcctcaaaaatgaaaggctcaagtggagagggctcagagatgttagta

SEQ ID NO: 9288 - DNA, 373 bp, Glycine max
  unsure at all n locations
ttcacttttcttgttccaacgcgagctctgaccactgttcttncttcccgcgatgcttcttttcatgtccgcctgagtgggcttatatcccaaaccatacttcccacgattcccatgggtttttatcagactagttatgccgccattgtctttgcctaaacccatcccgggttcataaccgttccccaacataactcgggccatcattaccgccgcctcggacagacaagggtgcccaaagagggagtctacggaggaaatgctgaccacctcaaaagactggaaagcggtttctaacgattcttctgcggctttcacataaggcatggaggatgggcagcttaccaagatatctntctcgcctgacacgatg

SEQ ID NO: 9289 - DNA, 479 bp, Glycine max
  unsure at all n locations
agcttctggaaggattacgtgatatcttaactagcatgaatgaatattacaataggaatattaatattgcttgctgccagtaaccgtatttgtcacgtagcacataccatgcatatgctggaatattctagacagcactaatgattagctctaaatattccctttgatatgaaataaagcaagcagaatatattcagttcactttccctctctctctcgctttattgctttcttcacggagactccctttcggtctcgaatacgaaggatattacccatcattggtccgacctgccgaccggcgacgccatggccgaacaccatacacgttccaagactaccgaccgcctggaagaggccatcagccgccttacccagaaccagtccacccttacagacgctcaccatgacctcacccttcgtctcgattccatccangaccaactactttaacttcaacttcactttccaccccacac

SEQ ID NO: 9290 - DNA, 422 bp, Glycine max
  unsure at all n locations
tatcagttgagtgggctccacttcaacagtcttatgtgggactntaagaggatattaaagaatatcttgaagataagttgaagcattccatttaaagaaacttgagcttggtctttgtgtcagaaatctacattttctattataaccctctctgttgagaatgaccaacttatgtattgaacttgtaatttgtaatagatctaagataaaagtaagaaactatattttcctaagtgtagatcctctatgaggtgaaaatatgtgtttgtgcaatctgaaaacacagaaaccctttttgttgttgaaagtgcaatagtgactagcattgttgaaatccagtggtgttgttggtctagtttgggctacgtttaaagtccagtgggagtactagcaagttgttgaaatccagtggttcactacaa

SEQ ID NO: 9291 - DNA, 464 bp, Glycine max
  unsure at all n locations
agcttatccatgcctccttagtggatgttgcatcanaaatcttctcgaacgcaccatcatctaatccttgatagatgaggaagagagctttcttgtctctctttcttgaatccttanaagtctattnttgtgcttggggtagtgaagtcactactagaaaataaggttttaacattggttatttaggactttcaagatcggttattaacaaatgttgaaagtaccgacgttgaaagtattaacgttaacatcagtttttgaaaactgatgttaacgtaaaataacaacatcagttatttaaataaccaatgttatataataagaattacaaaaaanaggtatatatgttcataccaacgttgacagttaacatcgattnttcattcaaaaccgatgtaacttccanacgttaacacgtttaacatcggttttttaaaaaactgatgttagttacaaacgttaac

SEQ ID NO: 9292 - DNA, 485 bp, Glycine max
  unsure at all n locations
gggactagctagtgatggaatgaatccatatgacaatttaagcactcaacatagttcatggccagttctactagtaatttacaatttgcttccttggttgtgcatgaagtgaaaatacatgatgttgtctatgatgatatcaggcccaacacagccaggaaatgacattgatgtttatctaagtccgttgattgaagacttgacaaagttgtgggacgaggggattttagtgtttgatgggtttcagaatgagattctcaaatgtgtgcaatgctcttttgtaccattaatatcattctagcatatangaatttaagcagttacagtgttaagggtcatcatgcatgccccatctgtgaagaagacacaagctacatacaactgatacatggtagaaaaacagtctacactatgcatcgacgttttctaaaacctcatcacccttacagggcgatgaaaaagcattaatggaagtcagacatgaa

SEQ ID NO: 9293 - DNA, 409 bp, Glycine max
  unsure at all n locations
agctngtgggattatggggtacccgtcatatgtggtactatgtggcgatcgggcgatggtgcaaatcaactctcccacatccacaaatcaaacatgaacccaccatgcccagttgcccaccttcaactgagctcacgtactcctacgtagcccttatcctcgttcctctcagcaccgggtgcccatcaacccctccaagcttgcacaatatccaagcaattcaatttccaaatatcatgaactaccctaaaccaagaaaacagggcagaggcagaaaactctgcccaaaacacattcacatattacaactttccttactcagatatcccagtaacattctctttggtccggttcgttaaccattggatcgacttgaaaaatttactggaggttcctagtacatacatct

SEQ ID NO: 9294 - DNA, 499 bp, Glycine max
  unsure at all n locations
nggaaggtagtcatacctcacanaatatatatatatatatatatatatatatatatatatatatatatatatacatatatatatatatatatatatatatatatatgtgtaggtagagagataccttggatatgcatgtatgtagcacaaaaaatttcacaaaatatatatatgtgtgtttaggtagcaagataccttggatatgcatgtatatagcaaaaatatctcacaaaacatatatacgtatgtgtaggtagcaagatacctgggacacacatgtatatatcaaaatacctcacacaaatatacgtatgtttaggtagagaaataccttctgaganaaaagagagcgagcgcgacaagaactagaagacaacaaacatagagagacatattatatanaaatatatacaatcattaacgttgtctagctacaaaacaacatgcgtgtgagaagagatactatcagctcttccttgaaaatgcactgatcataccg

SEQ ID NO: 9295 - DNA, 423 bp, Glycine max
  unsure at all n locations
agcttcttagtttcagatgatgcagatgggcttgtagctacctcatgcactcctctaatgactatggcgtcatttctggcgctaaactgttgggagttggaagccatcttctcaattaaatntttggcttcagcaggagtcatgtctccaagggctccaccactggcaacatctatcatacttctctccatatttctgagtccttcataaaaatattggagatgaagctgctccgaaatctgatggtgagggcaactggcacatagtttcttaaatcgctcccagtactcatacaggctctctccactaagttgtctaatacctgagatatctttcctgatggttgtggtcctcggaagcagggaaattttttctaagaatactctcttaaggtcatcccagctcgtgatggaccttggagca

SEQ ID NO: 9296 - DNA, 502 bp, Glycine max
  unsure at all n locations
ctgagaattcacccaagaggtttagattaatgcgtgaacttaatttgatatcatatattagatcaaacactactcattactagactaaaagatgtagctgatggtaaaaataaaattctgttaatttcctcaaagaattttagagttacaactaacttaagagtatggaaattaaattcatcatggagtactgtgagatgttaaattcatcaaattcttgttggaatcgcgttaaccaaattaaataaaatcaacacatcttataaagttttaaagtcaatatatagttgaaagtaaaaattaactgttgatcatattaagaattgcaaagggagaaagcatagcccttaaaagtctttntttttacataaaataaatagtaagtttagcattactactttctatacgtacattntacggataatttcatttgaaaaataatgctactcanaataaatgcatatatattaccattngctataaactattacaataattatgg

SEQ ID NO: 9297 - DNA, 343 bp, Glycine max
  unsure at all n locations
agcttcaggttgctcattaactccagatcgctgcanagtatgacaaagatctgcatggtgatctgcacaagaacatataccacaaactctcgcacaggtgtagagttctgattcatggcaagctgagttactacgttgaccaatgcatcacagtttccttcaagctgtttatttccagaatatgaagatgaatgcgtggccacctcatggactctcttaagaacaatagcatcatttcttgcctgaattgttacgagttggaagccatctctctatcaaatttctagcctcaacaggtgtcatatcaccaaagagctccaccactggcatctcaatcaatact

SEQ ID NO: 9298 - DNA, 346 bp, Glycine max
ctataatactcagctatgatgatcattctatactccttccacagtggtgcctcaacaccgaagcttgcatactacgcgtataatctgtagcatggagagacgtgggaaagaccaataacttgcaggtcattgtatggtttattttttggtggatacaggggattctagtatacatacagactacatacatatatagcacatatggtacattgatagtgggtctttcattgcttttgtttgctctgggtatagtttctttggctataaccacacgcatatttgcaagacgtactcgggtacttcttggatagcatactgtgtacttgggtactccatgtgcaacgtt

SEQ ID NO: 9299 - DNA, 402 bp, Glycine max
  unsure at all n locations
tattggatgctgannnattttgtacttgatgtgcttaacatatcttantttttcattctagcgcactgntaaggtatatcattagaaagatggatgtctcacgggtcacgaggttgctaacttacaccaaatatgctgtgtatggtcgtctctgtccaaagntggatggggaaggtgaatcgtgtaaaatactcagaacaaacttctgtgagttcccttaaccctaaagcttacatganagcttacacaatgatttttcactctaattttgctttttgcgatttcagatttgctgtcaagctagcttttcagtttcatgtcaacgttaaatatcttcgcatctactaacggtcttacaggnagaatgttntacctatatttgattataatataccttaagtt

SEQ ID NO: 9300 - DNA, 436 bp, Glycine max
tatagttagtgtcccagagccaccaactccaatgttaccaaaggaaaacactaattcagaggcactgtttgcgggattcattaaatgctaaaattggatacagtgaagttcattaattttctttatttgttcatgtagtatttgcaaaaggattttttaaaaaataaataaatgtacgtatgttttagtttaacattactagtaatttttaaaataagaaaccaaatgattaagtaatactaccactattaatgtaatgattttattcatttatttgtattaatatcacaactatatcaatttttaatctaaaatacaatatttttcttcctttccaaaactcccaaagtaataaccttgttttctcttccccgcaacgcttcaaccattctcttacagtgtccgtcatcttttgacgcgtggtggtataaatggc

SEQ ID NO: 9301 - DNA, 444 bp, Glycine max
  unsure at all n locations
cgagcagggttgcttcctccagaagcaacaaccttctggaggaatcttctggagggcccaagtgggccagattgctatntgcaccctcatttttactaaatgcacccccctttctatttttgtaattctttttccgtaacgttacgaaactttacgaatttcgtaacgatacctattttccttccgcaaggttacaaatcctcacggattatatattttactcttttttacctttcgaagaagccacggaaactcacagattgcgcaaaaacacctcttttcgacttccgccacattacggaatttcacggatcgcacaagcctgcttccttttgatttctgagacgtctcggaacttcatttattgcatgtcatcaagtaataatccccggacgaaaatagggtatgacagttgcccctctctacttacctctcatcggagat

SEQ ID NO: 9302 - DNA, 431 bp, Glycine max
  unsure at all n locations
caagtactaagaagaatcaaaactagccacgacccatgagcataaagtggcggacgaatatgcctgagtgcatgcggaaaaggaggctagaggaagggtgattgactcgttacatcaagagggaacgatgtggatggaccggtttgctcttactttgaacggtagtcaagaacttccctgattgctggccaaggccaaagcaatggcggacgcctactccgcccccgaggagatccacgaactcctcagctattgtcagcatatgatagacttaatggcccatataattaggaaccactacgaagttngtattgtcactcagatcttgactagttataactntctgaataaaatgagtttatctcgcgtttttactccaaaatcagtgcgaatcaaatcactcccacattttatctctggcatacattcat

SEQ ID NO: 9303 - DNA, 249 bp, Glycine max
  unsure at all n locations
aaagaaattcccgatcaaagatcggaagaaagaaaagaaaatccccaatccaagatttggagaaaacaaaagaaatatacagaaaggtctttggaccagacaatatctgaataacatgcagaattgtcacaaacaagaaaaggaaagaaaggaaactanggcttgcgacacatgaagtggtcccctttttattaccaaccaaaatcctttgtgtcggcaactctttcgcctcgcactanacacaaacag

SEQ ID NO: 9304 - DNA, 429 bp, Glycine max
  unsure at all n locations
tttcagtataaaatggggattatatcaccttttgcatattcaacatattatattggatccatcttatgaagtgatgaggatgcaacaaatacaattctagttagtggataaaataaataatgcttcaagcataacctgtgattgcagagtgggtatgaaagcaaaattggattggatacttttaagtctggaaatgctttaaagtagtgaatcttgaagagtaaagtgctaacaagagacaaacaaatgtgcagtggagaagagaatgttgagatggcgatgagttcattagacaacagataagattagaaatgaatgtattcaggagaaaagtggaatagcagctatccagttaagaagatagacacacattcatagcttattgttcanaaaacatgtaatgtgaactggttgcaatcttcatactta

SEQ ID NO: 9305 - DNA, 331 bp, Glycine max
  unsure at all n locations
agcttgtatggtctanaacanaccccaagacaatggtacaagaagtttgaaagctttatgcacaacgaaagtttctagaagtgcaacgccgatcanttgtgtttctttaagagatataaatctagttatattattttgctactttatgtcgatgttatattagtagttggatcagacatggatgaaattaanaacttaaagatgcggctataaaaaaaaattgacatgaagcacttagatctagcaaagaagatccttggtatgcaaatcacgaaagataagtaaatagggattttgcagttatctcaggtaaagtacatcaatcgtgttt

SEQ ID NO: 9306 - DNA, 481 bp, Glycine max
  unsure at all n locations
agaattcctctataataaaggttattacatcaatccttttcattttttggtggtaaggacggctntagcccatcaatcctttntctatatctatcatattaatgatccgggctcctttgaatattttacaggaaagattctatttcacctgtaatccgatttcgtaatcccgtgatgtgaccgttttatttcatataaattaattccttcttttatatgtgcacatacaagagttgggttagcggtttttttcttgtacaaaagtaaattaaaccattttcaccagtttagcggctntcgccaccttcttctacctctacaatatcccaccactgccacaatgccccctccacgtgtcacctcagggcgtcggacatnctnctctgtcatgttgcctctttntaccgtcatgtcacccaccacccatccaccatgcactacattattgtcgtcgtacattcaaataaccctctaattttta

SEQ ID NO: 9307 - DNA, 406 bp, Glycine max
  unsure at all n locations
agctgtatatatatgatacannaaatgaaattcanaacaaaattggtgcagtaagggtaatagtgtgttttgactctatttgcattaaatggctatgtgcatttttttattcaattgtgataccgttaaatgaatgactatatgcatgacatgttttaaacttgtgcaaggcaaaatatacttgattcacagctggtctccaagttaaaagaaatgtntgatgaacacaatatgnttgctaagtcttttaggatggccaaagatagatatgataactttcagacatagaatcatgacctacaattgatagctgacagaaaaaaaagatggaagaatctataatttgcacacaattttaaagggtggttgcagttattgttggtgatgcaagtcaacctatcaaatc

SEQ ID NO: 9308 - DNA, 461 bp, Glycine max
  unsure at all n locations
gcatcatgcacagttgttggatattgtctacttgtggcctcacaagcaaagaacaattgatccctatattttctttctttntgaaggcaaaatgtatattatattaatgagataaacagaacagtacaagtggtactgaaaaaaaagaaaatacaaagcacctctggtgctgcctcccaaagatacaacccaagctaacccatcagaaaatcaaaaccacctagattaaccaaattgatcctttatattagaggaccaatgattaaagctagtgttgaaccctttctccctagctnttagccaagaccaagctgaaaacatagcctcttccatgactttcgaggagtcaaattgttttccttgaaatatgaagttattcctatgttgccaaatagtagtagttagggccacccaccacccataccatctgctatggtttccattagcttcgaatccttcac

SEQ ID NO: 9309 - DNA, 441 bp, Glycine max
  unsure at all n locations
agctntaagtttccacttctttaagtgcacatttatcttttattaatttttttaaaagaaggagagagagagagagagagagagagagagagatcgatgtcacgactcacatctcattaataatttttcgaaaactatctttcaatcatggcaaaaattatgacgcacatttctcaataaaaactgaaatgtttttgtctttttgaacacgtncctccttctgtctatacacttcaacaaacattagtcccaactgattaatgaaaataaagtaagatgatgctatcgtctaaaaagagatctctttaatccgatacactagtcatatntaaatgttcccttatatagacgaaaccattttcaagcaaaggcttagtgaagataccaaaaacatctttttgcacataatcatgaatgagatgatatcttatctcaatatgc

SEQ ID NO: 9310 - DNA, 228 bp, Glycine max
gcgtctcgagatctgatgcgcctgagtcgaacgtccgagtgagaagaggtgaccatccaaatttgtcgagagagtacggtgctcaatgtcaagcgtactgatatattatgtgcctgaatcggacatgcccgcgaagaggcatgaccatttgaagttctcgagagcctacgctgtccaatgaacaacgtccgcacctgtgattgacctgaatcggtcctcgagcgcgtg

SEQ ID NO: 9311 - DNA, 313 bp, Glycine max
  unsure at all n locations
agctggaattatagtggttggtgactaattggcacataanagcaaagtaaagctccaagaagcaaaattaaagatctaaaattactcgctcagcatttctcaggtgctcagcgcaacgcagatgcttagcggacaacgcacgcttaacgccagatagtatgaagacgtctgaatcatgaatatgtgcttagcgcgagtcactcgctaagcgcgagattactatcatactcgctaagcatgaaattgcacttagcgtgaaggttacgttaaaatcaaactgaactactcctataaaagaaggagagagaataag

SEQ ID NO: 9312 - DNA, 409 bp, Glycine max
  unsure at all n locations
tatggaattatattattntctgatggcactaatttgcaggactgagagtagcgtctcgaagtggcctttggttccagtagacgaattgttttctctggttagcattaataaaatcatttccagtgctcgtttttatgttatttcctggattacatattgctttctatctttcttatccttggtgtttatcactatcccaatttccaattagctctatttcattgtacagctcaggttcattgtatcttaagaaattgagataattacccttatttgtgagtgtactctattaacaatctctgtatacatatcatttaactgagtgtgtgtaagtgtgtattgaccattcaagaatattcacacganatcaatcttatttttatcttcaactatatttttcacgcctcac

SEQ ID NO: 9313 - DNA, 428 bp, Glycine max
  unsure at all n locations
agctnggcttcattcctgccccacttctaatacttttatcattntctaaaggtttaattgcattttaagaaaattatgtgacaatttaaaagtaggagacaaaaaattgcggataagaatagattagatcatccgttaggtatctatggtctcaccaataataagcttatgttatatcatacttctttagaaaataaataggttaagaccttttaaaagtctatttagttaaaaaaaattggactctatcacttaaaaaatcttttagacataatagatcaatcttagtgttattattatattaaatttgttatgatatattgaatacttgtttatcggaaacatttgtttcaagacatcttttanttgcgaaaatgtaagagtgagaattattattntcatatcttttagaaggttatgacaatata

SEQ ID NO: 9314 - DNA, 426 bp, Glycine max
  unsure at all n locations
gcggattggtcttcgccagtgaaaggatcgaagtggatctgaatagaggcaaatttaatcatcctgcttggacgaatgagaaaactgtggcaaataaagagggtgaggatgagggagaaacccatgttgtgactgccatccctgtacggccaagtttcccaccaacccaacaatgtcattactcagccaataacaaacctcctccttacccaccacccagttattcacaaaggccatccctaaatcaaccacaaagcctgtctaccgcacttccaatgacgaagaccacctttagcacaaaccaaaaaacaccaaccaagaaatgaattntgcagcgagaaagcctgtagaattcaccccaattccagtgtcctatgctgacttgctcccatatctacttgataattcaatggtagccataaccct

SEQ ID NO: 9315 - DNA, 493 bp, Glycine max
  unsure at all n locations
aagtcagcaacacttccaaatgccaattcttcctgtcgcatccgtcttcaagacgatctatgcacatagtttcacttattagttaggaggagatnttgcccccagtgtatctcgaaagcagataaaatagaactcattctagagagcttggtggtcttaataatggttcgggtggtgggttctcttaagaataaataagacgaatagaatctaattcatgttcatgcaaatagaagagcggatctaagacacagacaacttctttctcaacaagtactagctgcacttctttctcatgaagttgcaagacaggagctagttccctctcggggttctaagagccaatgctttctatcgctcagcccttacgcctgaactccttaacacaagcactaagaaagcccgcgaagggcttcaatatcgcacctactaagacagnaatgtccgttacgatatgactacttccttctttttngacgctatggtcgtgccg

SEQ ID NO: 9316 - DNA, 519 bp, Glycine max
  unsure at all n locations
agcttagccgccacaaattactntagaccaaaccatttcatatgtcacaaaatcaacatcaaacgttgtctattaagatgcaaacatactagtctaacgtcttatagatacacaatattaagctcattgtctttttctctcaggatttacaagatattttgaaagctntttacaacttataaattttgaattcagagacttaaaagatgaaaaatgaatttgacaaaaaaaaaatactaataatttcatcgcaacaaaattcacaacaaaggttgtgtgagggaattgtcaaacaagtatggaaaggtagaacttgcaaaagtctttgaacagtcatcgtnttaaacttttatgttatacttttcaaagtcattcattatgtttccctcaaacaatngtcaaacaagtgcattaacatgcatgcatgttgtgaatggaacaacattataccttatcctnaaacctnnctcattnccctgcacttcctaactaacttgcaacaatacttcacactctcac

SEQ ID NO: 9317 - DNA, 491 bp, Glycine max
  unsure at all n locations
tcttacgcagcgaacataaccaaaggacaacatcctntatagaacacanaacaaccagttgtcgatgggccctacatttgaaaataattgggtacgtaaaataaaaacattctatacatgtatttgataaattttacttactgattcaagtaagctcctaaatagaccttttgttgggattccttaacccatgttttaatgtaatgttgacatttagcacgtctgtcctttgcattgtgatggactgaggctcaaggaacccatacaccacaccatgacccaaggtcgaactccactcatccataaacctattntcatcatttgaaatgaaaaattgaaaatcatgtatgttataaccaatattaattaatagtgatatggtatagaatgtacttacatcatccacaattgtagtacaagtatgtttagacatgtgtcacctaatattatctcatttacatcagaatatgttaagaagaatgatgcatctg

SEQ ID NO: 9318 - DNA, 406 bp, Glycine max
  unsure at all n locations
agctntgagcaaattcaaacaacaataacgttntactcggatgtctgattgagtcctgtaatatatggagacgctcgaaattgaatgttgaagctctgagcaaattcaaacgacaataactctttactcggatgtctaattgagtcctataatataacgagacgctcgaagttgaatgttgaagctttgagcaaattcaaacgacaataactttttactcggatgtctgattgagtcccgcaatatatcaacacgctcgaaattgaatgttgaagctctgagcaaatncaaacgaacatatatctntaatcggatgtctgattgagtcctataatatatcgagacgctagaggttgaatgttgaagctctgagcaaattcanacgacaataactttcactcggatg

SEQ ID NO: 9319 - DNA, 440 bp, Glycine max
  unsure at all n locations
ctcagcttcacattcaacttcgagcgtctcgctatattatacgactcaattagacatccgagtataaagatattgtcggttgaattntctcagagcttcaacattcaatttcgagcgtctcaatatatgacgggactcaatcagacatccgagtgaaaagatattgtcgtcttaattggctcagagcttctacattcaatttctagcgtntcgatatatgaccggactcaatcaggcatccgtgtaaaaagatattgtcgtttgagttggctcagagcttcaacattcaatttcaagcgtctcgatatattacgggactcaatcaggcatccgatgtaaaagttattgtcgtttgaattggctgagagcttcaacattcaatttcgagcgtctcgatatatgaccggactcaatcagacatccgagtanaaagatattgt

SEQ ID NO: 9320 - DNA, 359 bp, Glycine max
  unsure at all n locations
agctngatgcattcatcttgtgggatacaatgctgctaatgttaaaagaatcacctttgngtagttntgtaagctatcttgtatggntcctcctagttntctaggagtttgttgcctcaagtgtttatctttgacatatactcatcttaatagttaacacagtgtttctcacttaaaattcacaaggtttgacacaatgattatatttaaaggacacccttttcttggtagcaacttcttttaattttggaatatttccttttctcttctatcatatccatcccttcccttaacaattggttattggagcttgatgggaatgatattggaggttcgagtacaccttggataccaaatgc

SEQ ID NO: 9321 - DNA, 290 bp, Glycine max
  unsure at all n locations
cgtctttttaagggtatacaaaagaaggcccagganattcaaaaatttaatgactgcccacacgtactgtctcgtggggggtatgaactgcttgacaagaaacttatggaggagaagagcaagtgtgggcatgaggaacattcgtgtactgaaagcccaacactcaatgtcaacccaccatccccagttgcaagacacttgaagtggaagatcgcctgcacaaagcggcatggccaaatgacgtctgaagtggcacaagaaattgtagacaaaattgtgagttcatatat

SEQ ID NO: 9322 - DNA, 401 bp, Glycine max
  unsure at all n locations
gcttgtagaaaccaaagagacagagatatatagagaatattcagcttgtagaaaccatagaaagaaaataattttntgaattgatnttttttgctgctntgagttgcttactaattataacaaaatttcacttctttcacatttgtgcatttgctgtcacatgaaggcttgtctgtttggccttattgtgaaatattatggagtacactcgttgacaacaattntgtgtgtctactactctgctgtcatataaaaacactaaaaagaatttgacaaaacactatgaagagttaaaagatatgtctagctttctacatcggttcaggccanaaccgatgtagaattctagacattctacatcgattatagaatgatcgatgttgaaatctgacatctacatc

SEQ ID NO: 9323 - DNA, 487 bp, Glycine max
  unsure at all n locations
gaattcaccccaattctggtgtnctatgctaacttgctcccttatctacttgataatgcaatggtagccataacccctgctaggtttcctcaacctccatttttccgaggatacgactcgaacacaacatgtgcttatcatggaggagttccggggcattccattgagcattgtatggccctgaagcataaggtgcaaagtctaattgatgcgggctggctaaaatttgaggagaatcgcttgtgaatcctaacattgacaagcgacaccacacatggngcaatnttgaaagctgttgttatatgtctctaatgactcatcaggatttttaagtctatgccattattaaccatagttacaacgctaaataaaatggataaatttgacatctttgtcccacatnctctcataattacatctgttgcttcactggaatatgggtgcgagccattgatttgtttgctcaaacaactgancgctctgagtg

SEQ ID NO: 9324 - DNA, 137 bp, Glycine max
tcttgtgttgaaatccatatgctaattatgtgcagactaaatttctacaagcaaagttaaatccttctaatacttatatactgaaacttatgatcacgaaggagatattatatatctctgctggtaatgttaactat

SEQ ID NO: 9325 - DNA, 478 bp, Glycine max
  unsure at all n locations
ctgcagcagttaactgaacaaatgaagtgtccacagtcattggatggttgcctggtagaggtacatgttataaactaataagatttcctgcgtgttaggtataattattaagaagaggcactatatatatagacttttatatataaagcttattagagttttaacacactctttttaacacactctccactgttggtcctcaatttattgagaattataaaatcagaataatgactcatcatatgagtagttggacctgtcaaatttgtgatntttaagacatttgagccaacaaaaaagagtgttcaagagaatgtgttagagacagagttgctaccatttctctggttaggaatggtgtttgtagttattagtgaaaatagaaatagaaaatattttccttatgtcaaacaggcttctgcattactaattttacgttttacaacattatgatagatgcatatatattctttctttc

SEQ ID NO: 9326 - DNA, 85 bp, Glycine max
ttgatactgaacagaccagaccaaccactagtgagaatcaagaaatgtgctgccaatcaccctaatcttaacataatagtgatgc

SEQ ID NO: 9327 - DNA, 163 bp, Glycine max
taatgagctggtgaagaagactgtgacatatacttggtgtgaaagacaagagcaagccttttatttgctcacagaacagcttaccaagacacttgttgtagctcttcctgacttatttaaaactcttgagctagaatgtgatgcctctggaatgggtgtggga

SEQ ID NO: 9328 - DNA, 305 bp, Glycine max
  unsure at all n locations
agcttgtagcatttgtcctttatgtgtcccaacatgtcacagtgagcacanttgggtctttctttcttgatgtatttccctttattgatatcacattggttctttgatgcagaattaacagaaaatactatattttctaaagtattggtgggtgggtgagtaaacaacaatctcctttgagcttcttcttgaaggattagggagaaaacattaccaattgaaggcaaaggatcagagatcaggatctgacctcgtatttgagagaaagaatcattcaaacccatcaagaatgacattacatactc

SEQ ID NO: 9329 - DNA, 412 bp, Glycine max
  unsure at all n locations
cttaaaggatatgttgactaggaaacccaagtacattcaccaggaaaatattggtgtggaaggaaattatagtgctgtgattcaaaagatccttccacccaagcataaagaccttgggagtgtaaccattccttgcttaattggagaagtcactatgggaaaggctcttattgacctaggagccagtattaatttaatgccattcttcatgtgcagaanggtgggagaagtggagatcatgcccactacgatgactttacaacttgctgaccgctccattaccagaccatatggagtaattgaagatgtgctggtcagagtaaaacattttatcttgccgacagactttgtggtaatggatatatgtgaagataatgacattcctgtaatttgggaaggccatcatgtaact

SEQ ID NO: 9330 - DNA, 468 bp, Glycine max
  unsure at all n locations
aagcttccatatggggtgtntaataagacttcccgttgtacataaagcacgaagatctgtctgaaattgcacacggtggtcaatgtctcaacatatctgttatacagttgtggattctgtaagtcaatttaaattatcgttaattacttaagttattgttttaaattcatacataattaactttgtgttaataaaaataggcatctgactgagacaagtatgcgagcggngaattccgatgtgtatggattcctcgagccacagtccatctagagatctaggcaatcggaatttgaattagaaagttacatgataaaatggatgcataattcanaacgcgatgtttacctatgagcctacctgaatggataagtaaaactgaacaactgaatttanatagtgtataatactacaataacccatattggtctccactgcagtgcacactggcanatggtcgtcattttg

SEQ ID NO: 9331 - DNA, 511 bp, Glycine max
  unsure at all n locations
tactcagctatataatttttggtagagaanatatcagactattttttgtcccaaaaaaaaaaaaatatttgaatccttctccacttgtgtcaaaccaaagaatctcctactaataacaagttttaatcagctaaaatagtttgtttgtgttataagaaaactaccaacacctaaaactaactattaaaatcacgcaaaatatagctaacattacaatactcttagaatacatggcaactttctatatgcctttggatttcaacttaacaagaacataagcaaacaatcagtatgaagttttggatttcaacttaacaagaacataagcaaacaatcagtatgaagtataaaggaaaatccaagagagagaatgagaggatagtaaaacctaaggcttcacaggaagtccatcaataatcaaataattaananaaataaggataatttttaagtgagaaatgaaggataaattcttaaaacaactataaattattaataaatataatattat

SEQ ID NO: 9332 - DNA, 298 bp, Glycine max
  unsure at all n locations
agctnnggattcctttagtaaggaatctatccttcctaagatggagccaaacccagtcaccctcattaagaaactagctttttcttcttctattgcctttagttgaatacancctttgttggttctctatttggttcttaaccctctcatgcaacttctttacaaactctaacctagattccccttctttatgtatanaagaaagtgtccagtgggaggggaatgacgtctaacagtgttatgggattgacccatagacaacctcaaaggggactgcttggtggtctatgaacccctc

SEQ ID NO: 9333 - DNA, 432 bp, Glycine max
  unsure at all n locations
tctagccaaatggacttaccttgaattaattcctttgatagcctctttgagcctatgttcccctttctttgttttgaagctcattacaacccttaagtgaaaaaccatgatatcaccttacccttaaggaattttggagctttggaattgttttgggaataagctgggaataagtgtggggggtatgtttcattggaagatatgatttttggccatgcttgatgtatttgtatattgcctagttcttgctttaatcttcaaattcgttcttaacaaaaacaaaaaaaaaaaaattcaattgctgcaaattcgtactattcaaaanaaaagaagaaaagaagtgaagttgaataaatgaggtcttgttatgaggacttgatttgggagccttgattgattctcgtgatattagagggtctgggtttagtactt

SEQ ID NO: 9334 - DNA, 495 bp, Glycine max
  unsure at all n locations
agctttaggttgtgctgcacaagggggaggtatgaacatttcaactntaattgttgtgttaagagtgtgcaggtagtttctaacatttgttacttatttttatttgtagaacaagttgaaaataccatgcatttcatataaagatggggcatgaactagaagaaacaactggcatcaaggatcaagctggacttcaacacagtgttgtgattgttgtggaggtcgacaatggaaaaggcaaactgagagcctactttggcgatgaaattatgtttattattaatgagtaccacacttatcanagttgttatggtcaatttcaattcatgggtgaatgcaagtntatgaacccatttacccccgatagtccattagcaatgcctcatactcaatgcctgactcattccanaatcactctntanaggatagtcattcattgggagaaaacgtacctcgaaggccctatccggagtcaagcattggtgtatatcatct

SEQ ID NO: 9335 - DNA, 533 bp, Glycine max
  unsure at all n locations
cgccacggcnnnntttgacgctttattagtgcactatgatactcagctggagatatgggacccatacatgtggaccacgtggctggtcggcgatggtgcacaacaagtttcacattcaaatgcggcataacccaacttcgctggtgcgcacctccaactgagctcacgtacttccacgtagcccatatgctcgattctcttaacaacgggtgcccgataatccctccaagcttncacaacattcaagtcgaacaacattcatacagcacaagctatcatagtcaagcanaacagaggcaatgcagaaaattctgctcaacacatcaagcaaaatcacagcttttctcacttaaagaccacaggaacaatctcttcgatcaactccgtaacccgtggatcgacttcaagatctactggaagtctacagtgcataagcctacattgcgaccggtgggatctacgtagaaacattcataactcattctacattactcttgtcacaatcagcagatacatgggattgtctgcacttg

SEQ ID NO: 9336 - DNA, 469 bp, Glycine max
  unsure at all n locations
atcctcagagtcacctgcggctgcagcttgaggaatatggngtacccatcacatgtggtactatgtggcggtcgggtgatggtgcacaacaagtttttccacatccacaaatcgcgcataaacccaccatcccctgttgcccacctccaactgagctcacgtactcccacgtagcccatatcctcgtttctctcaacaccgggtccccatcaatcctcccaagcttccccaacatccaggtaattcaacatccaaaacatcacaaactaacaaaccaagcaaaacagggcaaaggcagaatactctgcccaaaactcaaaccaaaatcaccgctntttctcacttaaagaccccagtaacctttttctctagtacataagtctancgtttgaccgttgggatctactagcaaacatccagaactcantttgtactactctntccacagccaaccacacacaangcattt

SEQ ID NO: 9337 - DNA, 413 bp, Glycine max
ttatctaatcattccaatccactcaaatcatacaattgcttattcaaatcattctcaaacattcatttcatgcaaaacaatccactgcatatcattttcaatcaattcactattcaaacacgctttatgtacaagcaaacaactcaaagtgctgaaatttaaataactgaaattaaaataactgaaatatgacaacgaaatcagctggaaatataaggtgtttaaccttcaccaaaacatcttcaatgactccatatggccttgtgatggagcggtcaactaactggagggtcatgcgtgtgggcattatctctatctctccaagtcgctggcacatggaaagaggcattaaatcgatactagcttccaagtctatgagagctttgcctacaacaacctcaccaatataacac

SEQ ID NO: 9338 - DNA, 431 bp, Glycine max
  unsure at all n locations
agcttctatcactgccagactacacatgtgagtccgcttataggtaagggatgagtntatcacaattagggntagaatgaacatgtgcagagattcttataggatcaaatcgggggttattttgggatgcttattgtattagaattcttcatttatgattataataacgagattgttntatttgatggattaattgatgccctaatgcgaattggttgataaattgagtgctcatggtgtgaaattatttgaggggtcccatgttgtgagaagcattcttgtataatttgtttgtgttttggacaagatatactatattagcttgatatattgctatatcgcgatcatgacattgtgattaaaattatgtgtaagcgataaattgaatatgtgatgaattatgagacattaagttgtggacatgggatatg

SEQ ID NO: 9339 - DNA, 288 bp, Glycine max
  unsure at all n locations
agcttctacattcaatttcgagctcttcgatatattactgtactcaatcggacatccgagtaaaaagttattgtagttcgaatctgctcanggcttcggtattccatttcgagcgtctcgatatattacgggactcaatcggacatcagagtataaaggtattgttgtttgaatctgctcagagcttcggtattccatttctagcatctcgatatattacggcactcaatcagacatccgagtaaaaagttattgcagtttcaatatgctcacggcttcggtattcca

SEQ ID NO: 9340 - DNA, 445 bp, Glycine max
  unsure at all n locations
ttgagcatantcaaacgacaataactctctactcggatgtctgattgagtcctgtaatatatcgagacgctcgacatggaataccgaagctctgagcaaatttaaacgacaataacctttttactcggatgtctgatcgagtcccgaaatatatcgagatgctagaaatcgaatgtcgaagctctgatcaaattcaaacgacaataactttttactcggatgtccgattgactctcgtaatatatccagacgctcgaaatgcaatatcgaacctccgaccgattccaacaataataactttttactcggatgtccgattgagtcccgcaataatccgaacgctcgatattgaatgttgaagctttgagcaaatccatacgacaataactttctactcggatgcctgatcgagtcccgaatatatcgagacgctcgaaatggaata

SEQ ID NO: 9341 - DNA, 391 bp, Glycine max
  unsure at all n locations
gcaagcttcttaagaagattcctanagaagctagagcttagctacacatacctctctaatagctaagctcacctccttgagataagaagctagaacttagctacacacccnctataataactaagctcacccccatgacaaagaacatgaaaatacaaaananaagtccttactacaaagactactcanaatgccccgaaatacaaggctaaaaccctatactactagaatggccaaaatacaaggcccaaacgaaggagaaacctattctaatatttacaaagataagcgggcttatacttagcccatgggctcgaaatctaccctaaggctcaagagaaccctagggccatccctgggatctctagcccaatctacttggagtcttcta

SEQ ID NO: 9342 - DNA, 331 bp, Glycine max
tcgacctcgttctttctttcggaccctctttgtttcccgttccaatgcttcggctgtggccacattgacgtctctcagttcgtcgcattatttttggacctttatagttgtcatcttgaacttttccttgactgtttgcgccctttcaagttctaccttcaaagcttgcacctcctcactctcctcaagggtttcagcctcttcctcactcgaggtttttagcttcgggagacaatctagctcttgcatccgagcctttagccacttgtgatatctactgatgatcccattgctgcttcccttaagttctttatcctttcttagtgaccct

SEQ ID NO: 9343 - DNA, 223 bp, Glycine max
  unsure at all n locations
agcttgagatgaggaagtgtagaagggtgaaacttcctgcttttattgntgaccacagagtggtacctggagatatgtcgcgggggtcaggagaccttatggacgtcaggtggggtgctattgcccaaaaccaagcttgaccaatcccaacccaacccgggcatagtcggtcaatgagaacctgtgaggtacctaaacaggcgagctcctggcagtcaacaga

SEQ ID NO: 9344 - DNA, 402 bp, Glycine max
ctcacaacattcattagtccaacacacactcaacaaatagtcatcatccatccacaattccaatcaatcatgctcagtatgatgcaatgtggtaccacttgacctcaactctcaaatgcaatgtggtaccatccccaaggaaatagcctaagcatgtccacacgacactctcacttatgaaaactaggcagtaagtgtcgaggtcaccctgtcgtgcacaagcaactccccctccccacggtgatctgcctgagtctcaagggagttctaaactgagtgacatacccccaagtacaagtatttctcctcatgagaaactgcaagtactcactgacaaagtttatactattttcatgtcatatgaagtatgaaacatgggcaccatcaatgcactaatcacgg

SEQ ID NO: 9345 - DNA, 373 bp, Glycine max
  unsure at all n locations
acctttagaaatttgaatctaaatttcacagtctataatcgactacagagtgtatataattgattaccagagttaaaattcaaatctcaaatatgaagagtcacaactctttagaaaacaactgtgtaatcgattacaccattctggtaatcgattactagtgaggaattttcgaaaataactcccaacagtcacatattntcaaatgtttttgaatggccatcaaaggcctatatatatgtgacttgtgacacgaatttctagagagagtttttctgaactgagatgtcttatcctctcaaagagattcctaggtcaaacacttgcatattcaataaggaatcttgattgattttaattgaatatccttctc

SEQ ID NO: 9346 - DNA, 432 bp, Glycine max
agcttaagtgttcacgggtgcatgcaaaggcacaaggatagcgtatgtatcttctagaagcttaggaggaataaagaatattcactgttagcatttctgttaagcagttaagcagttacgtaataacagaatgtataaaatgcaagaaaaaatgctcttgaataatatcagaaaacgcattctctagttccttcctttatctctctatctctctacccttctccttccacggaggttgcttgggcctcgaaagccaagcctaacattggtgctttcattgatcctttccgccatggccgaagctacatgatccaagaccagtgttgatcgctggaagatgcattcgtgaagctttcagcatcaatgtttccaaagtttgatgagctcttatccgataaaccagaagagactcgcttccaaatcttatgttca

SEQ ID NO: 9347 - DNA, 423 bp, Glycine max
  unsure at all n locations
aatctgtacctatcacgagagtctgtggtttatgctnctctaccgaccaccatatagacctttgcccttctatgcaacaatctggagcaattaagcagcctgaagcttatgctacaaacatttacaatagacctnctcaacctcagctgcaaaatcaaccacagcagaacaattatgacctctccagcaacagatacaatcccggatggaggaatcacccaaatttcagatggtctagccctcaacaacaacaacagcctgctctttcctttcaaaatggtgctggtccaagtaggccatacgttcctnctccaatgcaacaacaacaaccacagtagcaacaacaatagagacaacaatcaactgagacccttctcaaccttncttagaggaagtagtaaggcaaatgacaatacagaatat

SEQ ID NO: 9348 - DNA, 57 bp, Glycine max
  unsure at all n locations
tcataatctntatttacttatgctgccacttgtgacaacattacatcatacccagat

SEQ ID NO: 9349 - DNA, 340 bp, Glycine max
  unsure at all n locations
caaaaaatgaagcttcatatgagctcttcatgatcctactagtaaacctagcacatcatatacacgagtagagatcctcttcaattactggaaatctctagtagaagagaagactaaccccatacgcaccactcccctttgcaaaaggcaagatgacatgtagcatagataggcaatatactcactatacatgcatgccaagttatgtgtaataaaattgactttttttttcttttgtttatcaaaataagttatctcgcaaaactaattatcaaaatagatgttttacataattacttacctgtcatgttntatcacgaagaatgtaagatgtgtcacc

SEQ ID NO: 9350 - DNA, 413 bp, Glycine max
  unsure at all n locations
cctcattgtctctcacagtctttagaattgggagccaatccaatccttgtgtccggactctcagccacttatgatagccgccgatgatcccattactgcttccnctaacctctctgtcctttcttcacgccgcatcccatgccttgcgaactccttggagtaccctcgcgttgtggtcactgaaaccccgtgcgatgaaaggcgtgatgctttcgtctaatggcactcctctcatggagtagccaagctgtcttatggcaaggacgggattataattaatacaaccccttgttcccatcaagggaacatttggacatccttcgcatgaagatagaatcctgattcttccttccttctagcgagggaaccaattaacagacgcccctccatgctagccaagagttggtcccaat

SEQ ID NO: 9351 - DNA, 485 bp, Glycine max
  unsure at all n locations
gctttggagtagaaacatgggaccaactcattatatttcacaaagtggtatctagtcaaggtctgagagaccatacaagtttcctagcgatttctaattatgtgggccattaagtctatcatatgctaacaatagccgagaagcccatgaatttcttcgggggcggagtaagtgtctgccatcgccttggccttggctaacaatcggggaagttcctgactcccgttcaaggtaagagcaaaccgattcatcaacatggttgcctcttggtgtaaagagtcgatcacnctgtctctagcctctttnttcgcgtatacttgggcatactcgtccgcgatcctgtgctcgtgggccgtggctaaacttaactcttcttggtactcggcgatgatagctagcatgtnggtcttcgtctcgcataaacgctgagacaagctccttttggacctcgaacaggcaactaactcttctttcaaaccatgcta

SEQ ID NO: 9352 - DNA, 496 bp, Glycine max
  unsure at all n locations
ttatcaatatatgggtctaacacanataattaaagggtttaaattgattatttctagagaagtagatgatttccctgaacacaatttttatttgataggtaatatgataaaattactgcgaaagttacgaacttagaaatgaagagtaatttgaagaaataactttatatctttgtgtactgactccaactgaattgtttggatgaaagaaatcattttatctactaatcatagacaaattggagtattaccaaatgatgcacgtattgccaatgtcgtagatataggtactttgagaatgtcttcttaaacaccaatggctctgatgggcagttttactagagaattttgtaaagttcaaacctttgaaactgattgaagaaggtaagagttcccagaaggtggagaatgcaagatcttgaagacaattagaatcgttatttacgaacaaatgtgggagctttgaggtgtgtgactgtgaatgacttgcacacat

SEQ ID NO: 9353 - DNA, 438 bp, Glycine max
  unsure at all n locations
agcttctaaactntgtacaagaatgaagctctgataccacttgttagacaagtggcctcagatatcttaagaagggggggttgaattaagatattccaaactgtttcccctaattaaaaatctatttcactntntactcaagttatgaattcccttaatgacaatcttcttaaatattaattcaaatgaagcaacttgaatatgaatataaagcaataataaataaaggagattaagggaagagaaaatgcaaactcagttttatactggttcggccacacccttgtgcctacgtccagtccccaagcaacccgcttgagagttccactatcttgtaaattccttttacaagttctaaacacacaaggacattccttcctttgtgntagagatcctttacaacaagagactcacagtctcttaatcccttagagaatg

SEQ ID NO: 9354 - DNA, 485 bp, Glycine max
  unsure at all n locations
acttaccagttgaagatcngaaaanaaagaagaacgaacggtgaatatcgaagaacggttgaaaatcttcgcgtaattacccacggaaacgttacggaagcgcctcagcttggattttcttcacggaaacaattttcctcagcaattttaagagaataagaagtgctaagaaggatgaaccctttcctcttcactcctcctcctatttatagcaaaataggggaggagcttgccacccaggtcgcccaggcaagcaaggttgcttcctccagaagcaaccgccttctggaggaagaaactggaaggcccaagtgggcctgattgctatttacaccccccctctttactaaatgcaccccccttntacttttttggtgattctttttccgtaacgttacgaaactttatcgaatttggtacgatacttattttcttttcataagggtacgaatccttacggatcatgtatntactctntntaatct

SEQ ID NO: 9355 - DNA, 382 bp, Glycine max
  unsure at all n locations
agctnntggctttntcccagtcattgattcataacttgtccctgatgtaagctccattggagcttgtaggcctatgatcttcttcatcaatggattcctttgcttctcggaagatgaatggaagcggatgagtctagaagatgctcaccaccataggtggccatggataagagcttggaggaagaatgagatgaatgaagggagaggaagagaagagcatgannatttgtgctctaaaagagctctgaaatctgaagtttaatattcaaatgatcatagtttaaaaaatgcacacacatgacctctatttatagcctaagtgtcacacaaaattggagggaaattcgaatatcaattcanatttcacttgaatttgaaattg

SEQ ID NO: 9356 - DNA, 436 bp, Glycine max
  unsure at all n locations
tggtggtcttnctactgggtggactgatgttactaaggatgttctctacctaacaatgttcctgagttctatgttgtctcctggactactaaaccccgatgtctcgggcatgttcagcctaatcctaatcaagcatcatcctcagatgtctcttgttggaccaaacttaaccagaaccacattaagacataacataccaaaaactaagttaccgtactctgatgtctcgtgaaaatacgataagctagccccgtcctatcaggttctaaggatcaaaccatttcccaatgttgagtgaccctaactaagcatgcagttgcgtgatcaaggcaaaggcccactagaattaagtactaatagcacactgaacacataaaacattattagataaatatgaaagtatntacatcaggtaccccataggaagaaccaactg

SEQ ID NO: 9357 - DNA, 346 bp, Glycine max
  unsure at all n locations
ttctaggattcanagatttagattccaagagagcacaaatcctagacttatccaaatgatcttttccatacaagtagctttctcactatcttttcctattactttgcttctgaccttattataacaacacaatttttttttctttcctttttttttaacatacaacttatttgttgtgtgtgttgatgctttacccttttctttacatccctattaacttcactcccnccaaattggggtaaatttgccttgaaccatatgctctcctagaatctaagcaaggtatctggagataattatttaagttcaagggttcaaattttgacaatatcattcagctcataaa

SEQ ID NO: 9358 - DNA, 472 bp, Glycine max
  unsure at all n locations
ntattcaagacanagcaattaaagatattcaagatggatgatcaagacagtctatagagtcttagaaagggtatattaaataggaagggaattccaattgaagtagcaaaaggtttggccaagaattttaagttaaaaagtcttttacaagaaatttactctctggtaatcgattaccagaggatgtaatcgattaccagtagccaaaactgatttacaaacagctattaaaatttgaattcaaaatttgccctgtgtaatcgattaccatatatggtaattcanattntaaagcttgtaatcgattacacatatactgtaatcgattaccagagcagattttcagaanatattctcaactgtcacatctttttatgtggttcttgaatggctatcanaggcctatatatatgtgacttgagacacgaatttgctaagagtttttcagaacaaaaaggtcttatcctcttat

SEQ ID NO: 9359 - DNA, 511 bp, Glycine max
  unsure at all n locations
ngctntangaataagcttaagagacatcattattntgatagaattcaaattcacatgtccaagcctagcatgccacacatcanaacattcaacatttgcaacaagagaagaaatgctagatattctattaatagaaagaggcataagacttaacttaaacaaaccatcacaaatgtagcctttaccaataaaaacaccatgtctagtaataacaactctattggactaaaaaacaaccttgtatccttgttagactaacaaagaagtacttattaaaantttcctaatatcagaaacatgatagacttcatctaaaacaagaaaattccctagagatagctctagcttcacttgaccttctcctaacacatgtgtcatactcttattccccatgttcacagtacgcgtgcttgattctngatataaagaaaaatattttttttatcaacacacatatgataattagccccgagatctataaaccaatcatttgagttaaaacacaattaac

SEQ ID NO: 9360 - DNA, 489 bp, Glycine max
  unsure at all n locations
ctttatgagggaggcttcgggcaacatagatgcttttcaataaaaggcaacatttgttagatgttctcttgtgtccatacttttgcagttgtcgttttctctgtattatttatttcataaagccattaatgtttctttatgaggatgattattttttgtgtgcttgaaattcaactttattggaaaaatgaaaattctttggccaagtgattntgtgttgctaaacgcatgccattattgatttctaatgagaaggtcatacaatttttattatagttgcagcctttggatgtgcccctttccttaataaatttgtaaaacctacattgtcacttaattatttcattagtgacactgacacataattaatgcatatgcagcactntanaagcataattntgagcattactaattcagtactgagattcattntcaccaannaattagtanataaattgtgtactacaaaatcagttttatcaatcacat

SEQ ID NO: 9361 - DNA, 198 bp, Glycine max
  unsure at all n locations
agctagctactacanaagtccagtgggattaaatntattagtttggtattaattgttgatggcatcctactagcatcatacgatntagtgttgcacaatagttatatcgcaatntatcatgaattctgggtgtcctaaggtgatatatgagtaatcttggtatgcaacactggaaagtagtaaaatgtattatgtgct

SEQ ID NO: 9362 - DNA, 347 bp, Glycine max
  unsure at all n locations
atggaccttntcaggtgttggagaggatcaataacaatgcctataggttggaccttccagaagagtatgaagtcagcaccacttttaatatttctgatttaattccttttgcaggtggaactgatattgaggatgaggaaccaacagatttgaggtctaatcctcttcaagggggagggtatgatgcaatcctctctaggaagggaccagttaccagatccatgagcaagagactccaagaggattgngctagagctactaaagaaggccctagggttctcatgaatcttanggtagatttttgagcccatgggtcaaggttggatccactcttctttgtaagtatt

SEQ ID NO: 9363 - DNA, 479 bp, Glycine max
  unsure at all n locations
agcttncatcacatgttgtataattcttcttaatcccattacactacagatgctcttgtatggcgtccaatatttgtcgtctcccgttcaaacaatttatacaaggacaaaaaaaattttgtccccaactggttgacttctttcgaaagcaaattgtgagagctcttcgaaaccttcctcatatgcaaggctcatgcaactttcattcatccaacttcgatccatctaaataataactctgtgatactcgcaaaattatttgatgcatgaaaatctcactttttcattataggtgtggccctatcccattcaggaagacattntttatggtagcttcatacgtcaaggttaagtctaatttgtaaatttgacaaaatttcggaacatttcgattgatcccaagtaccaacatgaaatgggtggattaattcccaacatcaagatgcctcagaaacactagaatgcatatccggatttat

SEQ ID NO: 9364 - DNA, 361 bp, Glycine max
  unsure at all n locations
tgtgcattcaatatcctgatgagggtgttccatatgttctcaaaactggactaatacatttgctgcccaagtttcatggtcttgtangtgaagatcctcataagcatcttaaggagttccatattgtttgttccaccataaaactccctgatgtccaacaagatcatatctttctaaaggcttttcctcattctctagagggagtggcaaaagattagttatactaccttgctcccaggtccattttcagctggtgtcacaacatacccttcggcggaaaggcgacgcggngctcgcacgtgcgtcttccacgaaaggaaaatgcgcggagtcaccaccaacgtttatttgatgaaaacgt

SEQ ID NO: 9365 - DNA, 600 bp, Glycine max
  unsure at all n locations
ctgtgcatttcttctttctccatcgccaattttagtacatcatntacctcnttctnnnnnnnnnaaggccgatgcgcttagacctctgaaaccgtgcgaccgcgatcttctagtcactgagctgcagctttcgatatatcttgtcccgtatgggcnacactgtgtgtcgagcattcttatacttcgtatgcgtactatttatactccgcggtgaccggcctaacgcatattacttatgtcgtctctcgctccaccttaacggaaaataaattcccgcgaacggtcgaagtcgattatccattaacttcgtgtaaaataaatccggaccgtcgagatagccgacacacatttgatattaaaataggtagaaataatatactaatctaacaacatcttttattgaataatgccgataacaatcggacgattcttctgtggatgtttcattctaatcctattgactataactcaagtgaattaatgcttaaataagtcgcctagtcaggtcgtcactaaataaggtattgagtgtttatttcattctcactagtaaaggataattttaagccaacgcttatatgtatctctaaatcaaaaaag

SEQ ID NO: 9366 - DNA, 458 bp, Glycine max
  unsure at all n locations
ntaacanaatggaaactctaaagcctaggcccaactatagagctnttaaaaccgtaaaggtttacattatgcttgttgcgtaaatgccggggcgttcctccactcgccaatttcccagctggaaatcaggagagcatggtcgtaccaaatccaaagtactcggaatatcatcttcgcatatcgcgaacgcttgacctttgtctcccgaacccgcacttataaagcttctacttatgtggcagggcgggcttccttcaccttcttgtctccaacgcgaactttgaccattgttcttccttcccgcaatgcttcttttcatgtctgcctgagcgggcttatagcctanaccatactctccacgatttccttgagtatntatcaggctagttatgccacccgttgttnttcctaaacccatcccgggtcaaaaccgttccccacataactcggccatcata

SEQ ID NO: 9367 - DNA, 428 bp, Glycine max
  unsure at all n locations
atcctctgagtcacctgccgcatgcaagctngctctanattacatngatgtttgcatttatgggaggaggttatatgccatttttgctttaagagtaatgtcccactggtaaaactaaccttccaaatgtttgccttcgcaggaatggccccgaggaagcttgcctcanagaggtccaggaaggacaaggcggccgaaggaactagttccgccccggagtacgacagtcaccgctttaggagcgttgtacaccagcagcgcttcgaagccatcaagggatggtcgtttctccgggagcgacgcgtccagctcaaggacgacgagtatactgatttccaggaggaaatacggcgccggcggtgggcaccactggttactcccatggccaagttngatccagagatagtccttgagttttatgccaatgc

SEQ ID NO: 9368 - DNA, 397 bp, Glycine max
  unsure at all n locations
gcagcttacatatgcttgttgcttgacattacttcagagcgcaattgctcttcccaagaaagcattgttctcaacaggttcacctaaaagataaattataaacagtgtcatgtttcataaatcaatctactggaataacggggggtaataaaacatcaactttcactttgcatggtggcagacaaacaatactcttatacccaaattttggccaactccgcaaattagactaaccaatttctaccatcttagcggtgttttgaaattttaaatttgcaactataaccattaccaaaaatataaatgatctgcaacanaatatatttggctctgggtcgagcaaatttcagacaagtgaatcaacaactttttagcatgtgaatagtcagtgacactg

SEQ ID NO: 9369 - DNA, 437 bp, Glycine max
  unsure at all n locations
tactcagcttccaaccacgacgacggcgcgaagctcggcgaggacttcaaggttgtgaccgtcgacgacccgccggaanattgccttcacttctcggtgctctcggaggcgaacgagagcgacgcgccggaggttgatatccaacccgacgacgcggtggcgatgccgttctcttncggcacgacgggtttacctaaaggagtggttctcacgcacaagagtttaacaaccagtgtggcgcaacaagttgacggagagaaccctaacctctacctcaccaccgaggacgtgctcctatgcgtgcttncgttgtttcacatattctccctcaacagtgtgctnttgtgcgcgcttanggccgggagtgcggttttgttgatgcagaagttcgagattgggacgctgttggagctcatacagcggcaccgcgtgtcggt

SEQ ID NO: 9370 - DNA, 349 bp, Glycine max
  unsure at all n locations
tatgttcacctgctgcatttagatcaaaattcanaatcttcaatgctcaataggctttgtgccccaactcaataggtaagtgacaagntttgccatagataaattggaagggagtcagtcctataggagtattgtatgcacacgtagctttatctaatttttgagactagtccttccttgactgagcaactattttctccagaatcttcttgacttccctattagaaactttagctcgcccaatggtctaaggatggtaaggtgaggctaccttgtgtctaacactatagtgttggagaactttcttgagttggaatgtatagatatgagatcctctatcacttataaa

SEQ ID NO: 9371 - DNA, 494 bp, Glycine max
  unsure at all n locations
gcttctcccaatttctataatagggggagaagtgaagtagaanagggttcagccccttaggcacttctctctctttcgaatttgcttaggaaaattgtttccgtgaagaaaatccaagccgaggcgcttncgtaacgtttccgtgagtgatttcgcgaaggttttcatctgttcttcaccgttcttcatccgttcttcgttcttcaacaggtaagttttcgaatccgagactctcaattcatttcttgtttttgttaagctttcatctttatttcgttcattttcgatttcttttcttccttctttaacgcgctgttaccatttatttaagccgttttctcacctaataaatgataaaatgaatttcaaccgatcatttgtgttgtaatctcatttaatcacttttaaaacgaaatctaatcgatcgttcacgctataacctcggttaaaccacaaaaaagtaaaataatcaaaatatcttggaaaataataat

SEQ ID NO: 9372 - DNA, 427 bp, Glycine max
  unsure at all n locations
agctnntgaagtagatattatttattattataatacatgcttatctattngttaagtatgtnttgtagttagttaattgagacttgngggtgtatatcagtgttttatacttactactttgatttggttagtgtgtgtatattacatagagtttatattttattaattaattgacactaaagatgttatagttttgctatgatatgaatttgaaaattattcgagtcgatgtatatgtatatgggttgggtcttgtaaacattgctacgaatgtataatatgatatatgagaataagtgaagtatgcgatgaattgtgagctatgaactgtgtagtcacacaactataatactctttaagggcgacgagttcatgcgcaatgagttttgtgatgggcttcactatgggaactcgacgagttaatcac

SEQ ID NO: 9373 - DNA, 458 bp, Glycine max
  unsure at all n locations
ctgtttgaaaagtacagtgtctntgaaagctataataactacttgcaagttgatgctgatgacttgcacaattggaaaggttgggtggaatcatgccttcaccaactaactttgatggtgtaaaacagatgttagtcaactgttttttattggcaagattattttacttgactgaaactaaaagaaagggtgttactctttctaatcttgggttaagatttaaccaattctgttgtgatttgagttgtaaatcgaagcaatcattcacgaaccgcgtttgttctataattggtcatgtggttttatgtgcatagatnttttcacctatgtatgttgtttcaatacaataagttgaactgcctggtccatttctttgtaattagaagctntatatagataaacgtcatanactagaaatttcacaactcataatgatgttattatntgatattttcatt

SEQ ID NO: 9374 - DNA, 330 bp, Glycine max
  unsure at all n locations
agctntcctacaagtcctaattganattctaaactagaatcaactcactntagaatccaatttccactaaccccaaatntggctttntaaccctcaaaatctcacactnttccacctacaacactaccattctcacattcaactctaagttaactctccccatcctctctaccaattgtctatctaacctttaagcatacatatatctcaaagcatcattattaaacccttaatcaacatgcgtagttnttcttacatcaaacatgtcaagtttagcataattacaacaatttccttcacaaacaactaccctanagcaataacctagta

SEQ ID NO: 9375 - DNA, 473 bp, Glycine max
  unsure at all n locations
tctataatgttgcattctactaatatatggagttggccactgcttcgcctgagtatgacaattggtagaccataacaatgctatcgacggtaaaggacaacgatttttcaaataaatctgtcgtacatgcaaaaataaataagtattaactcaatcgtacacaactgattgcataaatataaaaaaatttatatctacaatgtacttgaacaaaatgatttccatagacgtgaccgatacaaattatgcgatgcatcgaaggatcntccggtggttgacttctaagaggaaagaacgtcatgctttgttagtgagacaaggatataatgattacattataccatgatgcaatcacatatccncatgtcggntatatccatccacttatccatagtgacctgaacgaaacaaatatagacgtcaaagtttattttatagttaagtcttataaatcaaaaacacacattaaatac

SEQ ID NO: 9376 - DNA, 440 bp, Glycine max
  unsure at all n locations
gaggaacacaaccatcaacatttaatttgttggaaacttactctagggcttttaacaaatgaagggcaaaagaagaggacatatatgagagcaagatgacaactttaacatatatcagcatacagtgaaccatgttcaattcatatgtatatatttaagagatatactaataaaatacaaattatgttgttagtccttcaatgtttatcaatctttgttcttagtccttaaactctacttgatcggtcttggtttcagaattanttttcttcaatatttctaagttctatcatcatagagatttatctgttggttttataagattcattgttaatttctagacgtattaatattttttctacatactcttattttagtatttattttaaatattataaaaataattaagagataaaaaagaaaaacattatttaaataac

SEQ ID NO: 9377 - DNA, 495 bp, Glycine max
  unsure at all n locations
tgagtcgctgatatccacctagtccatcatatttagttcgccgattctacacgtctccaaacggaccgaatctccgtgactctgtctctatgctagttcgtgctaggtcatttttcactctttntttttagtaaaaggaatattttatgcattttttttatctataaaagatttcattgcatttttcaaagcttatttttgacttaaaggccttaggttttggtataccgtatacttgtaccaagttttataaaaataaattgtctatttctttttcataaaagtatacgagaatattcttatgtggcaaatgaacaatntttttcctcaataaatagcataaaccttattaattattttctaacaatttttttacatccttttagtattaacatcacctcttagctgagtatattgagaacactttaaaagtgcttctgaaacattcatttggtgctagagggaaatatgtacacaatacacatgcatgaattt

SEQ ID NO: 9378 - DNA, 471 bp, Glycine max
  unsure at all n locations
gcctgatcgctaagcgacaacttatccttggctaagcatgacctattgtcaccaagctaaattccttatgaccataactgaggttcatgaagctaagcgccaatcatggcagctaagctgaattccttgcagcaatgtgagcgctaagcaagtccttattagctatgcgcatgctcctctatacttaagatgcatcattttagctaagctggtcagagcctggcttagcgagagttgcagcttttcggatctgcaaacctcactaagcggccttatcctcgcgctaagccaagcttgtgtganatattaaaaaaaaacttattttgaatttgaaacgttggctaagcgcgtgggtccactaagcaagccttggtgagaaaccaaatgtctctctggctcgcttagcgcaacagtncgctaagcaaaagtatcgaaaaactgcttaagtgagtgtacgagtagtacatcaca

SEQ ID NO: 9379 - DNA, 419 bp, Glycine max
  unsure at all n locations
agctntatntaagtcatacctctaagcaatatgagactaatcacacctccttgaggctataattaaagtgggctaagggtgaccacaattaaggtaactntacaacacccncttcatgcccagagctatggacctagagtgtggtgttaagaaccttgggagaaccacaccacaaaagccaattattgtgattagagagtcatagaatgtgggtttgagcctatctcaaccccaaaagctagctcataggtagggttgtctcccaattatatattctgttgtggtcttatctctagccaatgtgaggcttgagttnttctaaacacaccccttcatgctcaacactattggacttgatgcgtggatgacatggtgggagggcccgttaatggatctatgatagactctaatatcatctt

SEQ ID NO: 9380 - DNA, 463 bp, Glycine max
  unsure at all n locations
ctataatatatagtcacctgcaccaatgaaagatccattcgcaatagttatgttgccttggctgctcagagtgataccaagatttagcagagttgctcctaatacggtatacatagttgccatttgtaaagccgttgctttccgagcagctctttcagactagcaaatcaagttaaataatttcaaatttacaaaacaaaagttccagaataacgacctccgaattagaaaattgttctcattaggaaaatgcttagaaatacttggtcacacatagcatacaccatgtgaagaaaaataaagatttaactattcaattggtcattatgattatcttcattntaagttgtagtccttatatgaaaaaanttgtaagctntaatcatataaaagttacatttctgtttgctaacactagagtccggagaagtattgtggacgatatacaactgttaatagacac

SEQ ID NO: 9381 - DNA, 395 bp, Glycine max
  unsure at all n locations
tgcaagcttctctgaccaatatgatagatcaagataacagcagtagcggctgcaacaggagctgaatatgcaacagcaatccaaggacgcatacccaaacgaaaactaagttcccactcacgcgccatgtagcaagctacaccaagtaagaagtgtagaacaattagttcataaggaccgccgttgtataaccattcatcaacagatgccgccttccaaataggataaaagtgcaaacctatagccgcagaagtaggaataatggcaccagagatgatattgtntccataaagtagagatccagagacacgctcacgaataccatcaatatctactggaggggcagcaataaaagcgataataaatacagaagttgcggccaataaagtatgaat

SEQ ID NO: 9382 - DNA, 498 bp, Glycine max
  unsure at all n locations
catcctggtcatggatagatcacccaggttcgggtccataagcagtgacaattgccctgtgaagactcgctttcgctacggctccggtggtttcccttaaccaagccactgcctatgagtcgccggctcattcttcaacaggcacgcggtcagagtcccgagcctcctcccactgcttgggagcttacggtttcatgttctatttcactccccgatgggggttcttttcacccttccctcacggtactacttcactatcggtcacccaggagtatntagccttgcaaggtggtccttgctgattcacacgggattccacgtgccccatgctactcgggtcagagcgtaagctagtgatgctttcggctactggactctcgccatctagggtgcagcattctctgctgcttcgcctagcagcacgacactttgtatagctctccacaaccccgttntcacggtttatgctgctcccatttcgctcgccgctactaccgg

SEQ ID NO: 9383 - DNA, 427 bp, Glycine max
  unsure at all n locations
agcttgtgatggttcttcaccaatcactttgttccttccatttccccaacttcaaattcatgagtacttttgacgtgttcctctntatccactccttccacttcaaccgttttgtctgcagtagtgcatgtttccgatttctctggctccccagatccacgatattcttttgtctcttcctgtgggtgctcaatctttacttcatcctttctcagaanaacttcagagccctcagttcctttgtcatcaactttatctttcaatgcaggtagttctccatcagcagcattggacttctcgtcaataggtacctcaacattntctacagctttagcttcttctccagaaatagtggatgtgttgacatctgtatcttccacacactngtcatcttgattttccttacaacatccttttccttcctata

SEQ ID NO: 9384 - DNA, 271 bp, Glycine max
acactatgaaactaagctgtagaccgggcgatctgatcaaacatgggggcgcgctcaacacacttcatctataacactcacatgtggaggtgaacttatcaattaaggggtgcactcaataaactatttctggaagactctcacacgaggtgctcttacaaatcttgctcacgaaacctcttagcagggaccaccttccctattctcctataaatacggggaggaggctgactctcaatggcctctgacctctatgctgagtatgaagttg

SEQ ID NO: 9385 - DNA, 357 bp, Glycine max
  unsure at all n locations
tgccgcatgcaagcttaatgattgagatattttaagagattctccttccttctctaatctcaactctaattcaaaaatcagaatccatttaatctnctacgcttgaatataataacttcgagaataaatcgatgtcatacacaattgtgttggatttgccatgccctataatataaaatngtctatggttgctagtaagtggtgaggacacaacaattcaattgatggaaagcttgagcctaacagaattcccactcctcttctaacagaatcgtatgcgtatggagctgtagagcatccatttcccataaattgcttnttacgagactggatcttgcgcctgacttctatcaatcc

SEQ ID NO: 9386 - DNA, 369 bp, Glycine max
  unsure at all n locations
ctgcacaattgactagggtctgttccaatagcattatattgctgtataatgtgttgacaattctgcagcctcattgatgatcacttgctggagataatccacggagcaacttccaatatgattttggattggagagaaaaattttatctgaagcagagaaggataacccacattggagcatatttggatcagataatatttcaactaaagtntctgattcatcaacagcaaaggcttgttcttcatttagagcgagttccaacttgtgctattcgtaactcataattatgcttctcctgaatttattgtacaaaggttatatcttactatttgttagctcatggctattttggtgcactgtctttgtgt

SEQ ID NO: 9387 - DNA, 324 bp, Glycine max
  unsure at all n locations
agctttcggtcagacctgtaccatttgatacacatcggatgtagaattccgcaaattctatgatttttcaggaatcgtgttcatttaaaagattgcagtggtaagtctgaggtttgagcttcaccaacaacttataaggggttaccttgatgaaatcttagaagcctagtgcttcttgtaatatacaagcatgcacatatactttatgaagataaatccctactggatatttcaatgggcagttttaacatacataaccncagagtaggtattgatgataataaaagctgttatgctactgtccttacaaatcagttgaatcat

SEQ ID NO: 9388 - DNA, 415 bp, Glycine max
  unsure at all n locations
ttggtcttagctcggctgtcaagtttgcgatatcattattgtgattgcaaaatgtggattctgaaacagataacaaagaagtggcagataagaggcttttgtctttgaatccaacttatgctgttggttttttgaggagacatagtatggagttgctcatgctttggctaagacatctccatccttcactagtcttcaagttttctatcaaactccctatttcattgctcatttaattaataatgaaatgccttgaatttgctttcgtcaaggaaaaaaaaaagagttgggtggtaaacaaactaaatntaaaaccctgcagagagaatcggactntntttttggtttgatcttatnntgtagtttctctctctctgatggttcttttctattctatattctatntatagntata

SEQ ID NO: 9389 - DNA, 282 bp, Glycine max
agctgggttcgaggtacttacccgttgaagatcgatgaatgatgaagaacgaatgaagaacgtcgaataacggtcaaaaccttcgcgaaattccttatggaaacgttacggaaacgtttcggaagcgcctcggcttggattttcttcacggaaacaatttttccaagcaaattcgaaagagagagaagtgcctaaggggctcaaccctttttcacttcacttctccccctatttatagaaaattgggggagaagcttgccacccagctcgcccaggcgagca

SEQ ID NO: 9390 - DNA, 155 bp, Glycine max
  unsure at all n locations
tattgagctcgatggtaacaagtggtggatgtaatccataaacctatcatcgatgctcctgaagttggggttattacttcaattgcaaaagactcattcataatttccaaattggctttgtaaggagataggcaaatctagntactcgttcataa

SEQ ID NO: 9391 - DNA, 354 bp, Glycine max
  unsure at all n locations
atggcttattccctagtggatggngcctcccctctcctcttctcctttgccttccgctgcatctacatggtggaaaatcatcattgaagctcatagatctagcctccatagaagctccacaagcaagcttccatcaacatgacttgaaaattgggtattgtccttttctatatttcttatattactttagggtcgacaagcaagctccacaagcaagtttccatcacatgtagatgaggttcaacaatatattgatgcaagatggatnttngctctagaagttttgtggaagatatttagaattaccctttacagaatatatatgtgtgttgagagattacaaattcatttact

SEQ ID NO: 9392 - DNA, 155 bp, Glycine max
  unsure at all n locations
agcatccattgcaacaaaatccttcatatataccattggccaaagccctanattctgcttcagcaatgcttctagctaccacaatctgcttcttgcttctcaaggcaccaagttctccctcacgtgatataatatggatgaaacaccaagattca

SEQ ID NO: 9393 - DNA, 359 bp, Glycine max
atttcactataatctttgatactaaataatacccttacagaaaaaaaaaacgaatatcaagacaaacaattagctgaatataacaatacttatgctttcaaaacataggttttcggtgttaaattaaatagcaccgtaaataatattgcctttttatcaagcgtattcctgaatctgttcatatttgaaactataatcacgtggcttattggctttgcattaaataggaataagaatatctaaaagacaaagttcaaagttaatgcaatgactttccatataaaaaaaattgccttttaccggaatatcaacaatcaaagcacatcccaatatccaattgcaataaactctcttacaaa

SEQ ID NO: 9394 - DNA, 494 bp, Glycine max
  unsure at all n locations
agctcgctgtgagagaaaatncacgtgagctcncatccatgtcagatatagcatcttgggtggagcaaactgtgaaggaccgattgttcttatagcattagtcactgccctgtgagaagaacttggtttgaaatttgatccattcacaaatatctttttcattaaattctgtgagtaaagctctctcttgcgactgtaaatcggtttccagttcgtggacatcgcttatctcctttgtagtacttctttgggtttacttntcctaaatcttaccaagtgaaggacaatgacatgggattatcgcaacaacatacacacttgggtttatctgtacatgcctatgtgaattttttccctctatatagcaggacaattccgcatttaatagagtcatttaactgtcaacagtgacttaaatggtttccaacatgaatctttgggtcggcctagtgattaataatgtgcacttgtcttgcttgaccacacttggcact

SEQ ID NO: 9395 - DNA, 125 bp, Glycine max
ccgcggctgagagttatgaagacttgaacacatgcattagcacttaacatcttggaataaggtcttaagcatgtatgtgactactctaacggtcactctattctcgcataacaacggcccatact

SEQ ID NO: 9396 - DNA, 422 bp, Glycine max
  unsure at all n locations
acgaacgaagaacgncgaataacggtcaaaaccttcgcgaaattccttatggaaacgttacggaaacgtttcggaagcgcctcggcttggattttcttcacggaaacaatttttccaagcaaattcgaaagagagagaagtgcctaaggggctcaaccctttntcacttcacttctccccctatttatagaaaattgggggagaagcttgccacccagctcgcccaggcgagcagggttgcttcctccagaagcaacagccttctggaggaatcttctggagggcccaagtgggcctggttgctatttgcacccacattattactaagtacaccctcctgcccttttttgggattctttnttcgtaaagtacggaaacttacgaatgtcgtaacgatacttggtttctttccttaatgttac

SEQ ID NO: 9397 - DNA, 179 bp, Glycine max
  unsure at all n locations
gctatacttttccttaaaaaataagcatnagcatattctttaatgtgagtgaaaacaaaaagagacaatatatctgtaaatgttacatggcacataagtgtaataaagattaatgaataagacaaaaggagtcgagcccaaccccataaaaaatagttggaatgaataaaagtacaagc

SEQ ID NO: 9398 - DNA, 504 bp, Glycine max
  unsure at all n locations
aagcgacctgcggcatgcaagtaannaactcatcaatcacactgtgaatatatttatattcttgtaataatattttttcatttgtaaaattttaatgaaggagattgagcttcactcggcgaacgaaatgttgatattttctgaactcctttnttgttgttaattgttttggccccattttccctaacaagccaaattcctaacatgacaataaatgaaggttgtatgcttcggcacgatatatacgatcagttctgttactcttacgtcataaagaaccagtaaatactcttttgcaaaaattcaatccatatgtaaaaagggacatataaaaagttgtgtatagtaaaagcataataaaattatacaattaaatgaaagaatcataaatgttttgatgtagaaaaggaaaattaacgaaagtgatacaatggatatatatccgattccaccctctagtctttgtgtgtattgactccatggtccctaccccttaagcaacac

SEQ ID NO: 9399 - DNA, 169 bp, Glycine max
  unsure at all n locations
tttacaaatcataatgatcattgatgcatgntcatactatgaaaagattgtatgattctttttcattattaagatntaagcttgtataaattatgtgtctccttttgttcttatgtttggacatgcagttaaaaaaattgtcttatgaaaataatatcatttttatgag

SEQ ID NO: 9400 - DNA, 289 bp, Glycine max
  unsure at all n locations
agcttggatttccttgtagtagggaatctattcttctaagatggagccaaacccagtcaccctcattaagaactagctcttttcttcctctattgcctttagttgaatacaccttttgttggctctctatttgggtcttaaccctctcatgcatcttctttacaaattctgacctaagattcccttctttatgtataaaaaaagtgtccagtgggaggggaatgaggtctaacggtgtgaggtgatngaacccatagaccaacctcaaaggggacttgttggtggtttc

SEQ ID NO: 9401 - DNA, 385 bp, Glycine max
  unsure at all n locations
tacatgcactaagcgcacttccaatgatgtaaacacagaacagtgatggcgcttagcgcctccatccncgctaagcccagctagagagctcaacttacagagtgaatctggggcttagcatangagagcgcgcttagcacaactataatataatttcacaaagaggaagtggcgcttagcaaatcatccacactaagcccactacttaaggtgaaacttacagtgaagatattgggcttagcgcagcgatgtgtgcttagttgaaccattcagcttaatcaatcaagggcccttgcgcctatgaaagggtctatctattntaggactcaaagggtgtaatcacctggattggccctagtcatgcaccatatgcagcanatcatgt

SEQ ID NO: 9402 - DNA, 434 bp, Glycine max
  unsure at all n locations
agcttcaggctgctcaattgcttcagattgttgatataaggtcaaaggtctgtgtggtggtcggcagaggagcataaaccacagagtctggctacaagtgcagatnttttattcatggccagttgggttaccaggttaaccaaggcctctagtttaccttcaagcttcttagtctcgattgatgaagatgaatgcgtggctacttcatgcactcctctaatgacaatagcatcacttttggcactaaattgctgggagttttaagccatcttctcaattaaatntctggcttcagcaggggtcatgtctccaagggctccaccactggcagcatctatcatacttctctctatgttactgagtccttcataaaaatatttgaggagaagctactcagaaatctggtggtgagggcaactggcacatagtttctt

SEQ ID NO: 9403 - DNA, 193 bp, Glycine max
  unsure at all n locations
tggatgtagnggtggaggagacctccttacttcactctacttctttctcaccatgactcanggagttctctttcttctgtctccttctttacttttattgcacttgtccaaatttaattgattgctttgattggtcttgatcttatgattgtgctacattgacgacaatgtgttgtttaagtgtgagggggtg

SEQ ID NO: 9404 - DNA, 446 bp, Glycine max
  unsure at all n locations
agctnttcacataaaaaacaacttcatcattattatcatcatcggtaacactaaatacaatgcacaagaagcatatctctataggaacacatgcataaacacaagacataaatgttaatgtagcataataatgacaataacaacaataacaaatatattataaacaacataacaacatccaaataagggttctcattaaggtatattcctagtactcaaaacttaacacttacaacacttaagtctgacaaatccccacaactgtgttggtgctcatgactatcaatttcttttctagtacccttctcacacatctgtgggctaggttacactattggtggtgaactcttgaggaaaattctcttctagcctctttccaacacatatgtgagcatagccaactagtgcgagcgtgtcaaaaattttgatagcaaaattttaagttt

SEQ ID NO: 9405 - DNA, 413 bp, Glycine max
  unsure at all n locations
atactaagcttctaaacntatacaagaatgaagctccgataccacttgtttgtcttctntaaagatcttcattcaggttttccaataatgataaccctcaccattgaacatatgagcctattgatagaatnttcctcagaaaatggaaatttggatgaggccatatctattcttgaagtttctaaactttatacaagaatcctgctctgataccacttgttggaccttgtggcctcaataatcttacgagggataggcttagaatacagaagaagcaacaacaatcaatttaacaatgttctttaaacatgcaagacacaattgattgcaacaaaataaataagataagggaagagaaaatgcacacacaactttatactggttcgggcactttccgtgcctacatccagtac

SEQ ID NO: 9406 - DNA, 393 bp, Glycine max
  unsure at all n locations
agctntcccacagtcctanaggacattttaaactattattaactcactntaacctccaattacaactaaatccagatttagctcttcacatccttaaagcatcggatgtttccactcatatcactacattctcactatttaaccctaggctaactctactcttcatctctatcagctttccatcagccatntgagcatacaagcatcacaagcatcatcatagaaaccctataacagaatgggtaagcttgactcataccaaacatgacaaggttaacatggctttcatcagattcttcacaaataactatcatgaggcataaacctagtaaaactacccatcataactcccgaaacccaatacccacgatagatcatgtgagaggaagtcta

SEQ ID NO: 9407 - DNA, 406 bp, Glycine max
  unsure at all n locations
tccatcacgatgcctctcatngccncaacgtaaggctttgagtgttccaatangcatctntcatcatgaccttgtacctgtgaacctattgagtgagaacttctaatctgcccctaggtttacttgaggctcatgcacggtgcctctcattggcctagtgtaaggctccgaggtactaatcgttgtctttcgtcatgaccttgtagtacggaacctattgtgtgagaacttctaatttgccctaggttcactcgaggttcatgcacgatgcccctcattgctccagtatacggctctgaggtaccaatcgttgtctatcgtcatgaccttgtagcatggaacctattgtgtgagaacttctaatcctgccctatgttcactcgaggttcatgcacgatacccctca

SEQ ID NO: 9408 - DNA, 365 bp, Glycine max
  unsure at all n locations
agcttctnntttagacctcgatcttttttctntcttgtccgacgccgactgtcatttgtttcgatcaatatcggtgaataatactctttttgccgaggtgggctaatgttntcctggccgaataaatgggaacatgccagtttcgggcgaaacgaaacatcggttgagctcgcacgaaaaaacctagcccacctacattgtaagttttttatgcaacaccgaaacaagataaccttccctgccgtaagaaaaacattatcgggcagcgagcttttttcttaanaaaaattgcgcaatgtcagctgaaaatatcacgccgngccatttcacgaccgatgtcgtgtattctgttgtttattcaatcc

SEQ ID NO: 9409 - DNA, 539 bp, Glycine max
  unsure at all n locations
ggcagtatacattcgannacggagagagtgaggaggaagccttgttcgaggtacttacccgttgaaaatcgatttacgtttaagtactattgaagaatgtccaagaacgggtgaaacctttgcgaaattcctcacggaatacgttacggaaacgtntctgaagcgcctccgcttagattctcttcaccgaaacaactcttccaagacaattcgaaagagagagaagcgcctaaggcgctgaacccctatcgtcatcactctcttccctatttatagcacaataggggaggtggttgtcgcccagctcggccaagcgagctcagcttcgccatccgagctcagttgcttactccacaagcaacatccttctcgaggaatattctggacgccccatgcggccctggtcactctccatctccatcttctctatccccatctatacatcttctcctcccccattcctctccacctcatctcttcctctcctccgcccctcccgcctccatatctgtcgcccactctgtctgctcctctctccc

SEQ ID NO: 9410 - DNA, 157 bp, Glycine max
ttaatatatggatccttaatcgaacattttcttcttttcttcttcatcatttaagaattcctttccttgctctgatagagctcaaccagagccaagctttgataccactgagtcctgaacacactaaaggggggggggtgcgctttccgtcttatcc

SEQ ID NO: 9411 - DNA, 440 bp, Glycine max
  unsure at all n locations
gttcgatcgaccttatatgaagaagaaatggactttcttctgcttacatatttattcaagattattacgaaagttaaaaataagtcatctatataaaatgcaaaactgatcatgttttgttttacttttgttttggctacaacctccccgacaaaaaatgcacaggcacttatttctgcatggaaaaccggtgagacgatgccattcatatttgacacggtaacttattatttatcatgcagatttaccatatggagccacttaatgctccaactgatttgtttgaattgtaattatgagttatgatagtttaaacttacgaatagtttggttcagaaatggtgtattattccttgatctggcaggtctgggacttgattaaattggcagattatctaacacacagagaggatgtagacncttctaggataggaatcact

SEQ ID NO: 9412 - DNA, 332 bp, Glycine max
  unsure at all n locations
agctntacgggtatacagaacaacatataaagccctcatatgacttatctctttnccagnnggcctatggaaaatcttgtcacctacctattgagttggaacataaagctctttgggctttaaaatttacgaacttcaactcagatacaactggtgaacataggaagctccaactctatgaattggaggaactgatggttcaagcttctgagaattccaagctttataagcaaaaattaaaaatctatcatgacaaaaagctatcaaaaagaaattttcagcctagtcaacaactattgttatttaattctcgattaagattgtttccaggt

SEQ ID NO: 9413 - DNA, 261 bp, Glycine max
gagcacaggacagtctcatggcattgtatagtgaccaacctgatgccctatgatcaaaacacaatgcagtgaccatgcattgaaagctttccaagaaacacattaagtccgggctcaagtaacgaactggaaacttctcgcttatgtctggttgaaacgagaaaacaagcttatgatcatatagtgattctattagttcttctatcaagagaacaagtggtcatataacttataacgatgcctacttgaattatgaaccat

SEQ ID NO: 9414 - DNA, 321 bp, Glycine max
tgcacgcatgcatgcttacaccacggtggtcttttagtagaagtgttcgttatcttgcaacgaaggatatgtaaaggcggatctgtgttatggatataacaacactggagggtgccaaagatggcaagatttaccaaagtgtaggaatcctggcgatttgtttgtgaaaaagactcttttccccgattatgaaaatgtaacttttgaaatgaatccggcttttggctacagtgatcgtgaggccagttgctggagcaattgtagttgcgatggattcagcgcatcatgggttaatgaaactggatgtacattctatcattg

SEQ ID NO: 9415 - DNA, 225 bp, Glycine max
  unsure at all n locations
aacaataaatgaattgaaattctcgaatttgaacacttaccggttaaagaccgaagaacgaacgaagaaccgtgaagaacggtagaaaatcttcacggattggctcacgaaaatgtctcggaagcgttacaaaagcacctcagcttggattttcttcacgaaaatacgtttntttttacttaaaacagctgaaatgcatagcatangggtcaaggatcctttgga

SEQ ID NO: 9416 - DNA, 318 bp, Glycine max
cttggcctttatgctgttcaccatgttgctctttctatctctattcattttccatagacaataaatgactagcagatcatggttactcgcttcttggagtgtgccatctcaaagcaacacagagagcatgcaaatccagtgcacaattctcccaacagatgtcaagaatttggatttaaactcatcatcattcttcttcaataacattttcataatcttgctctttttgaggcatgtgatgtcaaacaaatcaccatagagccttttgctgtcaacatgtacccccaaaagattcgacaaatgcttttctatgattag

SEQ ID NO: 9417 - DNA, 255 bp, Glycine max
  unsure at all n locations
gatcttagagcgacctgcggcatgcaagctngtggtttctttctcattctctcaaccaatgngtatatatagaagagagtgagagaagagaaggtgctcctcatctcaccgctctttagttcttcttccttcaaaactcgaatgacccatttctatgtttttcgtactcttgcaattcctgaggtaaagatacaagctttgctcttctgctcactggatcgggttccaggaattcaagggtaggttcaaaagggg

SEQ ID NO: 9418 - DNA, 220 bp, Glycine max
  unsure at all n locations
agcttgtctctcaaagctaataatcagctggcttagntgntgttatgaacataggcaactacgattntattatgaagcacgtatctcttacataggggacatcccactactacaaaaagcagatttaacatcggcagtttaacatcggtttttaacaaaaccgatgctaacgtaaatgcggaggcataactgtaaatactacgtatcgattaacattggt

SEQ ID NO: 9419 - DNA, 408 bp, Glycine max
  unsure at all n locations
caagcttgaatgctctattcaatggagttgactagataatcttcagactgatcaacacatgcacagtggccaaggatgcatgggagatcctganaaccactcatgaaggaacctccaaagtgaagatgtccagattgcaactattggccacaaaattcgaaaatctgaagatgaaggaggaagaatgtattcatgacttccacatgaacattcttgaaattgccaatgcttgcactgccttgngagagaggatgacagatgaaaagctggtgagaaagatcctcagatccttgcctaagagatttgacatgaaagtcactgcaatagaggaggcccaagacatttgcaacttgagagtggatgaactcattggttcccttcanacctttgagctaggactctcggata

SEQ ID NO: 9420 - DNA, 292 bp, Glycine max
  unsure at all n locations
ttcttgcttctttttcttccttctttgtgggaaacacagattgagtgtctctctctgaaagacgcgataactcatgagacctcatcctatctttttgcaaatctcttcggcggctccctcagagtgtatgttttgtctgatttagtcacttgacaactttggagtgactgcaagagagccatttgacatctaatcaatcaatcgaaatattgatcctanggttttcccctttcctcttaaaactttgattattctgcacaacaagaaatacataagactttgggatcaatcg

SEQ ID NO: 9421 - DNA, 135 bp, Glycine max
  unsure at all n locations
agcttggagtttccaagtgccaatnncgcctcttcntattccagtcttcttctggcttcaattcatcagtgggctttccttctgtgtccagcatcttgggatgatcccagcctttgatgacaggtttccatgttc

SEQ ID NO: 9422 - DNA, 436 bp, Glycine max
  unsure at all n locations
agcttgaacaccacatttcgatgtcgggtcttgctttgtgttnattntnngnnaaaccncataagatttacattataacggaacagtttaatcaacaaaaattacatcatgtttgaagtgatgaaatggtgtaaaaatgtgaaacattagactagtatgaaccactccattcgacttggtgtttgtgcttcatggattcaagttgcggtgttgccgcgtgtttgtcgttcatagattcaatttcacgctagcaggcgaattcagagtttaaaataagagaaacacaacccaaattcacattgtaatgatggtggtgagtgaggagccaagatctaatgttggagacctataaacaaggggattgtgcccatctgactgcaattgcaatatatatccacttggttgcaagtggaatagaataaacccttcaacaaaa

SEQ ID NO: 9423 - DNA, 285 bp, Glycine max
  unsure at all n locations
cgaatgattcgctattctcttgtatatattataccgactggtactctggaatntggactctactacttgcgtgcggcaaagttcaattctatgaccgtgtgttgcagttatcagaaactctggaatctggaatctgggtttaatttcactacaatattcntttataatactcaatggctcatactcattactcactcctgttctgtctctcagtgctccaacgattccctgccaacaatatagattgtgtggtctatgatactactgtcactgtactccaactca

SEQ ID NO: 9424 - DNA, 409 bp, Glycine max
  unsure at all n locations
agcttgagggtaaagtctcacgattgtcacgtttcatgcaataattgttagccgtggctatacgagacatcttgccaaacaaagtcaggttaacgataactcgcctgtgctttttcttccattctatatgtagcacagtcattaatccagtcatgtttgatgagttgggaaatgaggccgcaattatactgtgctagttggagatgtattttccccctgctttctttgacatcatgattcacttggttgtgcatctggtcagagaaatcaaatgttgtggtcctgtttatctacggtggatgtacccggttgagcgatacatgaagatcttaanagggtatacaaagaatctatatcgtccagaagcatctattgttgagaggtacattgcagaagaaccattgaattt

SEQ ID NO: 9425 - DNA, 420 bp, Glycine max
  unsure at all n locations
ccatccagatgtaatcgattacatattgtcaaatctgaattcaaatctctaatagctgttataaacagtttcaactgctggtcatcgattacatgctttgtgtaatcaatcacatatcgtcaaacatatctaaaatcattttaaaacatttcacgaagcattttggtcactggtaatcgactacatcctctggttatcgatgatcagagagtcaatctcttcttaaaaaccatttaacttgaattctttggccaaacctcttgcacgttcaacttggaattcccttcctaagactctagagatcttcttgatcattatcttgaatctcttgcattctcggattctcgtcttgactacaactngagaagcgtgtgatcctttggcatcatcaaaacatcagaatgtcattgcttctacaca

SEQ ID NO: 9426 - DNA, 176 bp, Glycine max
gtgaatttagaaaggaggcctctaggtgatacagctgtacatttgatgatgttatgcagtagtgatgaaaaatgtattcccgctctaataaacagagtgaaaagaaactctccgattcatccatgtggtcagatgcctgtttgtctggtatcaggatttgtccatgaccttgatgt

SEQ ID NO: 9427 - DNA, 395 bp, Glycine max
  unsure at all n locations
acctgcaggcaggcaagctgcttgtctcaccccaaactcccttcacaatttattatttcattcttaaataggcggcctggtctgtgctcgtgcgcttagcgcaattntgaaccgcttagcgcacattagtgaatttcggcttagcgcgtgctgcatgtctcgattcttacatgcttgtgacttgatcatccatttgtatgtatagttaggattgttagcattggaaagtgctttaaagccttagaacttgatagagaaagctagaaaactgtatgtctaggaatggagtgcagcaatctagtccatattatgttgtagactaaatgcaactcttttatgctgagtttgttgagggatcaaggatgaggtttaaagagagttaagcccattcactc

SEQ ID NO: 9428 - DNA, 547 bp, Glycine max
  unsure at all n locations
agccccgcgccggcgccgatgtcttcgtgaacgacggagagagtcggaagctcanagggtaatccttctcatattnatgtctggtaaatgatgtcttttctattctgcaacggcattggatagaagactccaagaagattggaccacagatgcatgacaagggcctatgagtctcatgagccttagggtaaacttcagtcccatgggctaagtgtgagcccacttatatctgtacatactacattcaagtctcattaatcttgggccttatatctagggctccataacatacgttatgcgcctctagaatgtatgatcttccatccctttgttattacggcacctagactagtgtttgtatcacgggcaattctatatgtcacatgcattacgtgatatctgatgcgtgggttggaatacaccaatgcattggagaaccaatcattactttcaacgcggagggcatttgttgtcctcccctgcacacataatccaacttgtgctttctctgctcacagctcaatacctaccacctacggaatctccg

SEQ ID NO: 9429 - DNA, 518 bp, Glycine max
  unsure at all n locations
ttttctgaatcgcgatcctcagagtcgacctgcggcatgcaagctnggaatagtcatacctcacacacacacacacatcactcatttacacacacacacacacacacacacacacatatatatatatatatatatatgtttaggtagaaagataccttggatatgcatgtatgtagcacaaaatacttcacaaaatatatatatgtatgtttaggtagaaagataccttgaatatgcatgtatgtagcaaaaatacttcacaaaatatatatatgtatgtttaggtagcaagacaccttggatatgcatgtatatagcaaaaatatctcacaaaacatatatatgtatgtttaggtagcaagataccttggacatgcatgtatatagcacaatacctcacataatatacgtatgtttaggtagcataatacctcatggaagcaaagagagcataaagagagcgagcatgataagaatatgacgggagaccacaaattgatatataatattaaacatcg

SEQ ID NO: 9430 - DNA, 248 bp, Glycine max
agcttctacataagagatggcaagagaatcatggatggctactcatcaaaggcaagaaaggaggaagccacaaagagctgaattgacacacctaggatattttcttaatagctcaattagcgacaccagctcgctaagtgcaattccgtctagaggaaataattcgcttagcgactctagctcactaagcgcaattccaaccagaggataaattgctcttagcgcgaatgtctcgcttagcggctacc

SEQ ID NO: 9431 - DNA, 538 bp, Glycine max
  unsure at all n locations
nggtaaattcgacgacgtacactatagagtactcaagctcntctttgagcaaagcaanggcttgctcttatttttattccattgtaattgccacattcttcttcaccaatctaatgagaggtgatgccattgtagagaaattaagaatgaaccttctattgaaacttgcttacccatggaaactcctaatatcttccacactttttggggtgggccattcttggatggccctgattntctcaaggtccactttgaccccatttctacccactacaaacctaagaagacttattatctacttaaagggtcacttctctatatttgcatagagtgtgtcnttctaaggactgaaagaacttgctgagatgcctaagtgatctctaagctctactgtcactaaatatataaaataacaactacaattactatgaatccctaaacatgatcataacctcataaggtgcttgtgcataatgacccaaaagatcatagccttcatcaaacaaacttgtttgaagcgtttcagtctaacccttcg

SEQ ID NO: 9432 - DNA, 229 bp, Glycine max
  unsure at all n locations
acaagtttcatagatgtggcatttatattggatgttttagtctagacatgatgnttgatatagtttaaagtttcttatatccatgtttagtgtgaatgaattantaaattatttcctgtttctgatcttggttagggttaccaagaaatttgggggttaatagtgtttcaattcctattctttctctcgtagggttcaaaagaatagtagaatctatggaattacatgt

SEQ ID NO: 9433 - DNA, 193 bp, Glycine max
  unsure at all n locations
tgagccttatcacaagtacgaatgcaaaacatacttttcttggcctattttatgatatgagtctttttctacgttgncttatgtaattaatgactattttttggatataattaatggtcatcatgagtgaaccttagattcccatttgagattgaatacaatgatgtcgatgatctnctatatatgataacat

SEQ ID NO: 9434 - DNA, 247 bp, Glycine max
  unsure at all n locations
agctngtttcttgttagtttcatcttgactttgcttcttttctgactttggaaccgccattgcatttcttatgcttcctttgaaaaatcttagagaaagagactctgtgaacgttatcctttcatgaaatgcatgttattttcgtaacctacactgaaccccggtcacattggcgtggtcggaatttccaaatgatgttcctttgtaaaacccaaaatgctctcagctctttcatgtagtgacgtgg

SEQ ID NO: 9435 - DNA, 264 bp, Glycine max
  unsure at all n locations
tattctctgacattgtgcacatctaactattcatttattaattcagattaaatcaataaagntaggaccctatatttcactacaaaagggttacatattgtcattcatggaaggaaatgtttaatctacaatataaccgccatgattcatgtgtaattaattcttagtgacaatatcaggtttaagttaacaagtgatggccatatttgtttgtcaacataaagattatatcactagtatttgtgggagaatggtagcatatga

SEQ ID NO: 9436 - DNA, 430 bp, Glycine max
  unsure at all n locations
agcttgccgccacggangtttccgactatgctcttgtgtggttgatcaagctacaaaaggagagagcaagagatgaagagccaatggttgatacatggacagagatgaaaaagatcatgaggaagcggtatgtgccggctagttactcaagggacttgaaatttaagctccaaaaactaacccaaggcaacaagggggttgaggagtatttcaaggaaatggatgtgctcatgattcaagcaaatattgaagaagatgaggaggtaactatggctcgatttcttaatggtttgactaatgatatccgtgatattgttgagctgcaggagtttgttgaaatggatgatttgcttcacaaagcaatccaagtggagcaacaattaanaaggaagggagtggctaagaggagttttaccaactttgattcttt

SEQ ID NO: 9437 - DNA, 207 bp, Glycine max
ctaagctgaccatcccacccaacccggcatagtcagtcagttagatattgtgatgtacctaaacaggcgagctcctggcagttaacagattacaggaacacagaccacagagctaggatgcttgtggtggctggccagctgtgaattttgtgtgatatatgggttgcggcctctggtaatcgattaccaaaggtgggttatcgatta

SEQ ID NO: 9438 - DNA, 455 bp, Glycine max
  unsure at all n locations
agctagtggatgctgatataataatttcctctgatctaatattacatagaaggaaaaaaatagagatggatattcaatatatagatagaagaaaagaaaacacaatcattctctactttctagttcttctaccaagctagtaaaatggaattgtttcaatccacatctttcatagaaacaaactaaatttgtcactcagtcaatagtaaagaggatacaaagtataatttaattgatgacattgtcatactgttagtccttcaaatgtattattattgttgatcacgcaaacttgttcatcaagtggttccccaacacctcgactatcatcatggagaatacgccttgagtagtaaacattgtgttaatactntgtttgcaataaaataatatggaattagcattaataaaagaaagctngaatacctatgaagcatcaattccacctcaccatc

SEQ ID NO: 9439 - DNA, 553 bp, Glycine max
  unsure at all n locations
cgccgtctgtgactacggcagtatgaaactcagcctgggtgctgccatggtnctctcgaagcctccgtatgttatgtgcctctggggagaaatgcgggtgcaaatggcttcatcccttcctctctttaaatattccccatcagttacgctcgcgcaggcgagctggccactcgcctctgtgagctaacttttttgaaagcctcagccaaattgtgttgctcatcgctatatatatatatatatatatatatatatatatatatatatatatatatatatatcttacaaaaatctattgtcgcatattacttacgtgaatactacatattatccaagaccacaaacaactgtaaagcacgagtctaaagagcctaattcgagatacttggctgcctcctacgagcgcttcttaacgtcttgagccaaactgcggatgaagatcgaacgatcatgtgcctatcacctattcgtcctacctctaagctgcgaaaagagagttgctcctgaacacatgtgaacactgtactaatgctcgtttactctctctcctccg

SEQ ID NO: 9440 - DNA, 329 bp, Glycine max
agctttgttgatttagttctcactggtgaaatgataatattgtgtctgagaagaggcaaatttgattatcccgctttgatgaataggaagcctgcggcaaatggagagaataagaaggagggagaaactcatgttgtggctactgttcctataaggccaaattccccaccagctcaacaatattaatactcacccaatatcagcccttcttattacctacaaccctatcagccaagaacactcaatcatccaccaaggccacccctatatcagccacaaagcctgcttgcccacatctgataccaaacaccacccttaacacaaaccaa

SEQ ID NO: 9441 - DNA, 609 bp, Glycine max
  unsure at all n locations
aggcactaccnnnnggnnnnncnctgnccagtcaacgatcacngacagagtngaagagtcaagcttntatgagaaaactngnctttanaatgcttagagcttaccttcctcattctctttctcataactaagctcaccttcttgagaagcttccttaagaagaatcctaaaggagctagagcttaactacacataccctctctaataggctagctcaacttcttgagaagagaagctagagcttagcttcacacgcnctataatagctaagctcacccccatgacaaaaacatgaaaataaaaaaaaagtccttattccaaagacaactcacaatgccccgaaatacatggctaaaccctatactactagactgggcaaaataccagggctagacgaaggaaaacctattctaatatttacaaaggatagcgggctcatactttagccatgggctcgaaaactaccctaacgttcatgagaaccctacggcctttcctcggatcctctagccaatctacctggagtcttctagccaantgcccttcgcgcgtacgattgcatcatttcgttcatccttggaaaggatttgacntcatactctcgagggn

SEQ ID NO: 9442 - DNA, 394 bp, Glycine max
  unsure at all n locations
gtggcggtcgggcgatggtgcacaacaagttttttcacattcacaatgcgcgcataaacccaccatcctctgttgcccacctccaactgagctcacgtactcccacgtagcccatatcctcgtttctctcaacaccgggtccccatcaatcctcccaagcttccacaacatccaagcaaaacaacattcacacagcacaagctttcacagccaagcaaaacagagcaaaggcagaaaactctgccaaaacaccaaccaaaaatcacagcttntaccactcaaagaccccagtaacaattccttcgttccaaattcgttaaccgctggatcgactccaacattttactggaagtctctaatacataagcctacattttgaccgntgggatctact

SEQ ID NO: 9443 - DNA, 317 bp, Glycine max
  unsure at all n locations
gctggaatcatntatctatctccgacagccattgtgtgagtcccgtctaggcagtctcagagaagaccgtgctcacagcgataaaaaatgagaaggaggagctgattactactcgggtggagaacagttggagagtctgcattgactataggaggctgaaccaggttaccaaaaaggaccatntccccttgccattcattgaccagatgcttgaacgcctgggcaggcaaatctcactactgtttccttgatggtncttctggttatatgccaaatactattgctcttgaggatcaggaaaagaccacattcacctg

SEQ ID NO: 9444 - DNA, 308 bp, Glycine max
  unsure at all n locations
agcttgactntgcgggnnganattagctcttagtttcattttagntattagncaattcaattaaaaaagagaaatcccaaagacacacgtccgattgattcttttgcttattttactaaaaggtatttttttgatattatattattatcttacctcttttttggattccaacgtgtgtaccgcacgaccgaacggtcggattttcatttaacagaaattaacggatattacaaatcaaatgatcgatgaaaatctattctatttttctataggcgagaaatgacttacataaatgactgaagcacgtc

SEQ ID NO: 9445 - DNA, 379 bp, Glycine max
  unsure at all n locations
tcctgactcaccatanaccttgacccanggtgttatatgccaattcttaccctcggaagcaaaanaaaaagaggagaagagaaggaaaatttccaatcaaagaggaagcataaaatggagagaaggaaaatctccaatcaaagaggaagcataaaaaggagagaaggaaaatttccaatcaaagagaaagaaaagaagaggaaaggaaattcccaatcaaagagtgtgagaaagaaaaaagaatagaaagaaaactcccaatcaaagaatgggagaaggaaaaaaagaagtcaacaagatgaaagctcttggtcaaagaaactagaagaaatgtgcagaaaggtcttttgaccggacgatatctgaacactacacaatt

SEQ ID NO: 9446 - DNA, 393 bp, Glycine max
  unsure at all n locations
atctctgagtcacctgcggctgcagcttctatataagctgaaccattntatcaatatttattagttgagttntattcagaaaattagagtttatctcttttatcttagtgagagtgattctcctaaattcttgagtgattcaagaacaccctggctgtatcaaaggactttcacaacctttgtgtgttgccctcgctggaaagagtgattctttccttcctttcatcatcacccttgttctttcaaaccacaattccagaaaatccacctctgcccagaattatctcgtggccataactcccatnttacgcactcagattaagtgattcttgagcctaaattgaatttcaaaacgagaacctttcacctcgtttggaatcacctcatttggag

SEQ ID NO: 9447 - DNA, 255 bp, Glycine max
aagtggtgaacaaacaatttatgcttaactagctcacaaagccttcaaaaatggttacgaacttagagaccctatcactaacaatgcttcttggctaaccatggagtatacaatctccttgtaaacacattaccacatgagaagcatcacaactctttacatggaataaatgagtcatttagaaacctatcacatccacgaaaagaatctctaccattgtcgttttggcgcccaaacaaatcatggtaataatct

SEQ ID NO: 9448 - DNA, 181 bp, Glycine max
ctgcaggctgcagcttaacatggctttgccttaaggggttatttcactttaaggatcccttttagaaatttattaccaaatagggtcccttttgcaattatttaccttgaggttttttttttttattacaaagaggtaccccgacaggtgctctccgcgacacagcgacacatggcgccgg

SEQ ID NO: 9449 - DNA, 656 bp, Glycine max
  unsure at all n locations
ctttcatcacaatantnntaaannnnnnnnnanatntctttttaccnntttttttnnaacggggnnnnnccggcggcgccgtccgtttcttcgtntacgtacatataganacgtaagctngacccatnanaaaactcgcttattcatctacagctgatctctctatctttacagttcactgcggtcaacatccgatatatgtggcacaacgagaaatggtctcttaatgaactccttttctattgtgcaacaagaggaaaggctgaagccagaaataactcaaagcgctcacgctgtgagtacctttcaagacaacggcaaaacgaaaagaaccgatgagccccacaatgaacctgctaatgcgtccacacacaagacacaaaatcacggcgacaactggttcttttgcacgtcagcctacacatgtcaagaagatatgtacccaatattatgcttggcgtgcanagaacggcatgcatcctacttcggtccgctctgaggtcaacttaccttcacatcactagaaacantcggtggttagaccttcgcgcctctactacgatacctgcttcaaccacgtgtcgccaaccctcccggagccactcatcctgaatatcgactcccgcggccacgtaccacgcgctctcccttcaccg

SEQ ID NO: 9450 - DNA, 535 bp, Glycine max
  unsure at all n locations
tcttctcctttttgagnacacagagagagcgagagctntaagtgagtntccncagcctgtctaattgtcctattgtattatttatnttntgtaatnacacaactcggaagcaccggtgtctttttgttgtcgtcatcgttcctaaaggaagggagataactacactggtctagtcatcaaggttcgcctggaaccgatgaattcaattgcttttcaagcatatccaacacacgaataactactgggtccacacagccctcatgccttgaacttgactttcttgtactacgtacaatctcatctctcctcctgcagatccgtcaagagccagtgagcgaactaccaaatataaatactcgtcaatcacaaatcaaatccatctactaaaccagacaagtaccatgtgttaaaatacacaggctttcatatttaaaacataaaagacttagttgatgcttttggttttacaagaattccttttctccagaagagatgtagttcacatcaactgactcaaccattatcctccataacc

SEQ ID NO: 9451 - DNA, 522 bp, Glycine max
  unsure at all n locations
gcgtttataccttgaaaccccttataagagtcacctgaggcatgcaagctttgcagatttggccttcgccagtgaaaggattattgttggttctaatagaggcaaaattgatcatcctactaggacgactgagaaaactggggccaataaagagggtgatgatgaatgagaaacccatgttgggattgtcatttctgtacgggcaagtttcccaccaaacccaacaattgtattactcaatcaataacaaaccttctccttactcaccacccagttatccacaaaggcgcatccttaatcaaccacaaagcctgtctatcgcacttncaatgacgaacaccacctttagcacaaaccaaaaacaccaaccaagaagtgaattttgcacgagaaaccttgagattcaccccattccagtatctatgctgattgctccatactacttgataattaatggagccataacctagccaaggttataancttcactttctgagatacaactcaacgcacggtgctatn

SEQ ID NO: 9452 - DNA, 501 bp, Glycine max
agcccccacgcgcgtataccatctattacggtcgctatgctactaagctggcttaataccctattaagaactagtatgtcaggcaggaagcgtctgcttcctattgatagctgccgcctctcatcaataagaccagatatcacttggctcaatctattcgctaataacttaactatcaccctgtacatacatccaatcaaggagattggtctgtagtcataaatgactggggggttggcttgggacataaactataaagaacattattgctctaggaactgcctgccatggattacttccaatctctgagtagtttcacattcccaaatctctatgattgaagtgaaccataggccagacattgtcccatacactcacctgttcttgtctccatcaaaaggacacccaactccttgtctgttatgaaaaatgcctcatcaagggctcaaactgtccataatcatgagaaatccagctctctacactgggctgacctccccg

SEQ ID NO: 9453 - DNA, 379 bp, Glycine max
caactatgtttacacatacagagagcgcgcataatcccaccatgcgctgttgcccacctccaagtgagctcacgtactctcacgcagcccatagtgtgggtcctctcaagaccggagcgccatcaatcctcccaagctttcacaccatgcaagcttaacaacattcaaacagcacaagctatctcagccaagctaaacagagcgaaggcagaaaactctgctcaacacatcaaccaagatcacagcgtttctcacttaaagaccacagtaacaattccttcgttccaattcgtaaccgttggatcgatccaaattttactggaagctctagtacataacctacatttgaccgtgggattactacaaacatccaaactat

SEQ ID NO: 9454 - DNA, 474 bp, Glycine max
  unsure at all n locations
agctntgtacgcatcatatagagcccatgattcttatgaacacatactagtttggntcgctggtcatttgtggactttntttggtcttggtgccaacaaagagttctttcattcatttgttccgtgaaatgtccaggattgattttcattatgtctatcaattcatagattccaatttgaccaaaaaaggagcaacacgttcatggacttttatttagtgaataaatttgaattctaccttgttttgaagaaggttttaatggactcttatttatgcaaaaatcccttataattttaaatctttattatttcaaatatatatgtattctttttttaaattttacctaagcttgaaatacctgtgcaatgcgtaggatacctactagatatagatataaaaatataagtcccataccttgccatattggtcacttggtgaaaggctctaatgccttttttatgtcacaacacaac

SEQ ID NO: 9455 - DNA, 388 bp, Glycine max
  unsure at all n locations
gtctcacaatngtcacgtgcttatgcttcaattgntagccgtggctatacgagacatcttgccaaacaaagtcaggttagcgataactcgcctatngcttttcttccatgctatatgtagcaaagtcattgatccagccaagtttgatgacgtggaaaatgagggcgtaattatattgtgcctgttggagatgtatttcccctcctgctttctttgacatcatgattcactcgattgtgcatctggtcagagaaatcaaatgttgtggtcttgttatctacggcggatgtacccagtagagcgatacataaagatcttcaaggggtctacaaagaatatatatcgtctagaagcatctattatagagaggtacattgcagaagaagcc

SEQ ID NO: 9456 - DNA, 469 bp, Glycine max
  unsure at all n locations
ttcttgacctggatccttaagcaccgcaggctgcagctgctggcttttatgggagatattggttancttcaagccctcacatagcatnncgcggctggctcgggggcggcctggaccacgacaanncntccggtaagaatagggacctcaattttggaggtggggggaaaaacctaaggttctaaactcaattcattatggccagcccatccaccccaaatttagaaggttgcgcttcaaaaattattacccttcagttaaacttcaccagagcttggccttgaccaaagggggtattaggtcacgtaacctctgatttctctctttctccgaaaaacctaggagtgtctgaagggcgtcgattccaatgagttggtcgggaactgcccattgataagacttagatatctgagtggccatacaaggagacatcatgggcgtccggtgatgggtaatgccttaatcttac

SEQ ID NO: 9457 - DNA, 382 bp, Glycine max
  unsure at all n locations
agcttcttgtcaattcctcagcaataattaaatagggtatccacttctaatagcatcctccagtatgttgataagatcccttgcattggttatctttgttgcaactaacagcaactgcataacataccatgtanagttataattaaatatgaaggatgttaaaaaataataacaagttacagggaaaacagacaaatgtcacaccttacagttctcatatccaacgcgcatcttctcactgtcagtaacaaagtatggagaaatataaccacggtcaaattgcatcccctcgacaacatatagactgttatcagcactcttaccntcctcaagggtcacaacaccctttctaccaactctgctcaatgcttcagctatcata

SEQ ID NO: 9458 - DNA, 104 bp, Glycine max
  unsure at all n locations
acttgaactaagctataattatttggtaacaactccccatgttctttatncaggactattctcattgggttcatgaaaacctcatggatcaatgcatataccac

SEQ ID NO: 9459 - DNA, 421 bp, Glycine max
  unsure at all n locations
agcttcttgacggcctatccgccactatttgttagttgtcctacttggacctctagattctttatggcagactttgtgcttttctggttagacatagaaacctgcataaattgagctagagtctcttccagctttgtggtgtgattatagagactaggcccttgtggtagcggccttatggatgatcccccctggtctctattgaattgattcccaggatgtttcctccattgtccctgttgttagttgtattgttggccatgctgaaatccggaaaatccacctacattaaaattggttatgggctggttccccatataattgacttcatgtgtgacttgttcttcattagggatacaacatccagattcatgagctccaccacanattatacattctgcaacctgcaaaacagaagaat

SEQ ID NO: 9460 - DNA, 562 bp, Glycine max
  unsure at all n locations
agaanctcncnnncnccacgggactcgatgctcnacgtgaccttagatactcagcttgaggtgagtanccaccatctttcatagtagaaactagttatgtgtctactatcatgggcatcacttntttctccgtcattgaggtgccactcgagctgccaggtctcttcaccttttgagcggtattctttgaaagatccgtgcccnccttttgcacatgttctgtagttgcatcctatccgaagacattatactgacactgcctaacgaaggcaaccactacgtcctttcacgaatggactcggaaggttccaagtagtgtccatgtaacagctacccagtagactttcttggaagaatgtatagccatcctatcttttgcgttgccccatcttcgatatacatcttagatggttntgcggcagtagtctccttgacttgtcaagtcagcaccttgacttgtgagggtgatgatatgggtctacgacaaatctcttggtagcaaggcataatttcactcctcaatggcctgacctgtcctttatgatcaacttcgcattctcgg

SEQ ID NO: 9461 - DNA, 393 bp, Glycine max
  unsure at all n locations
catttgcaagaaccagtcccggtcctgaatatgacatccattcggntacgaaggctacaacaccagcatctctttcatgccattaaaggatggtcaattattcaggagcgacacgtccatatcatggtcgactagtataccgcactccaagaagagacaggtcgccggacgtgggcatagctggatacccccatggctacctcgacccgaaatagttcttgggactatgccaatgcttggctacatggagggtgaagataattcgacctggtgaggggtagtgtatcattcaagcgctcgaaacccggcatggaatgattctcgaggaaaaggtagatatagtccgccttgcgaacggccctgggaaggttaagcctttatgtacaccacatc

SEQ ID NO: 9462 - DNA, 488 bp, Glycine max
  unsure at all n locations
atatatagactttgagactcgggaacctgtaagncacctctggcatgcaagcttggaggattgagggattcgttgtgttttatacgaggatatgggctacgtgggagtacgcgagcctcagtggaggtacgcaacacgcggatggttgtgttaatgcgcgcattggggatgtggacaacttgttgtgcaccattgcacgaccgtcacctagtaccacatgtgatgggtctcctattatcctacaagcttgacatgaggaagtggacactgactcaattctcctcattttttcgcgctccgtttcgatcccccatccctcgttccaattcatatgtttctctgcctttctcacttcctccctctcacatcgtctctcttctcactactttcatctcatccttccccttccttttatattctcctttccctctacaatcccctgtgcacctctcgaatcctttcccacatcactacaactcatcccttcg

SEQ ID NO: 9463 - DNA, 481 bp, Glycine max
  unsure at all n locations
actatgatactaagctaaagtatgcccgagtcattcatccctgtgagatgttgttgaagtatttgtgatcagaatagccattccttggattatagggttgaaccaagctcatgcttntacaaaaaaggttcatcaagtcaagttgaaatatggaagtaaccgtcttgcaaaattggggcaaaagatgaatcgagtcacatcactgcttcgtctactgccaaacatatttaggattattgatgtccttgttacttccagtctcaccttgacaaagatgtcatggaccatgttgaaaatctatattgattcaaccncatatcctgcgtaaaaattcgcaatacttcgactgtacatcattcgcatgcatccatgcttttcattggttgcatcgctcatcgcatattttccttgacaaataaaatacaatccaatgaacttatcaacaagacaaggacacgctatacggcgcccttaccgaact

SEQ ID NO: 9464 - DNA, 243 bp, Glycine max
ctaaacgagagcgaaagagcctactcagatacaacttgcttccctctctaggctgagacatatagaagatgatagtaaccacaaaaataagactatagaaattattttcttttcataaataaatcaaatattattatataatttttattctatctcttttcaggtatataagctagtaattacaattatttttctataaatggatgtacagaaataaatgggtgtacaatagttatgctttcc

SEQ ID NO: 9465 - DNA, 137 bp, Glycine max
gcaccttcagcattggagttgctgttcaacatttatcactcttgcactcgagggttaaacttttatcagtacaactatactaacagattattctgaacacactccctagatattaatatggcatcacttcgtaccac

SEQ ID NO: 9466 - DNA, 238 bp, Glycine max
atagagcgcgtacacaaatcacttaacatacttttatccgctgaaatattcacacataactccagtttaagtaatcttttccatcagtattaatagaaaatagaaaaaatggtaaactaattaaatttctccttgaatttaactcactaagtacataaaattacattatacactacaatctttttaatagcacctcaatgtttgcacaaatttggtgagcttgcacctcgtacatccc

SEQ ID NO: 9467 - DNA, 466 bp, Glycine max
  unsure at all n locations
anngcttgcggattggtctttgccagtgaaaggatctattgggtctgaaaaaaggcaaatttagtcatcctgcttggacgaatgagaaaactggggcaaatgaagagggtgaggatgaaggagaagcccgtgctgtgactgccattccaatacagccaagtttcccaccaacccaacaatgtcattactcagccaataacaaaccttcttcttacccaccgcccagttatccacaaaggtcatccctaaaatcaaccacaaagcctacctaccgcacttccaatgacgaacaccgcctttagcgtaaaccaaaacaccaaccaagaaatgaattttgcagcgagaaagccttagaattcaccctaattccagtgtcctatgctgacttgctcccatatctacttgataattcaatggtagccataaccttaaccaaggttcatcaacctncatttctccgagaata

SEQ ID NO: 9468 - DNA, 388 bp, Glycine max
  unsure at all n locations
acaacacttctcatggcacgagtgtcaacatgcactntataaaataatcatattggggtcgtgcctatttatgacacatacgtatttgcacacataaaaattttgtgtgaagcattttacgacacctatccatgtacatattttttgacanaccttttcatgctacatcctatatatatacacacacatctttttggaaggcttcttttgttacctactcacaaatacacatnatttgaaaaacacttttacgctacccatccaacactttgtangcacttcatgcatatatattcacatatgcaaggcatntattcaactntctgcaaggcatttatttcaccatttgcacggcatttcatgctatatatatttacatatatacata

SEQ ID NO: 9469 - DNA, 195 bp, Glycine max
  unsure at all n locations
gctttgagtgaaaggatgtgactcttcatantttatttaattcaacgccaaggaactggaatcgataccaaacattgaatcgattcagcatttcgaaatattagaacgttgtaatcagtttgaaaacatttcaactcaatttgttctggaatcgataccacagagaaaaactcttggtaaggtttgctaaaccca

SEQ ID NO: 9470 - DNA, 390 bp, Glycine max
  unsure at all n locations
agctttacagtatattattgataatgatgattcgaggtagctgccntggtgtggaaacattacattcacatctatactactctagctngccttccttcttgtgcgcatgatctacaaagcccaaacaaaacaaaattatcgcaatctttttttacaatgctgacaataacgtataatgagcattgttgcttaaaattagcaaatactacgattctgtatattaccatatatactcatatagacacaacctagcacataactgctagacacatctaattagaaatttataaatcatctaaatattaaaaatacctaatatgatcattaaaaataaattctaaaacacactcttatccaagagtgagtaccaacatataaagaggtggatgt

SEQ ID NO: 9471 - DNA, 459 bp, Glycine max
  unsure at all n locations
agcttggtttcttttggttntgtacatatatataaagcttgtttctttntgggtgaaagtgcctatacggattcctcctggtaccattttgttgttgagatttctataataataataataacaaataaaataagattatagaaattattttcttttcataaataaatcaaatattattatataatttttattttatttcttttcagttatataagctagtaattacaattatttttctataaatggatgtacagaaataaatggttgtacaatagttatgctttccggttaaatatgttggaaatattccttcatcattgggtgtgcagtagttacagtttctgctttaatactattcaaatattaatttatgcaattatatgtgttaataattgcnatattacttcataaaggctgtgcaacaattacgggttccgctnntacaaattacatatatat

SEQ ID NO: 9472 - DNA, 442 bp, Glycine max
  unsure at all n locations
gcgtagcccaccatctnttcatagtagagtatcgattatgtgtctaccatcacgatcatcgtctccctttccatcattgggggtaccacctgngccgccagatccctttcacctttgggcgtgttctttgaaagatccgtccccctttttgcaaatgttctgtagttgcatcctatccggaaccatatcaaaattgtactgatactgcctaacaaaggcaaccattaggtccttccaagaatggactcgggaagattccaagttaatgtaccaggtaacagctaccccagtaagactttcttggaaggaatgtattagcaattcctcatcttttgcgtattcccccatcttctgacaatacatctttagatggttcttgggacaagtagtccccttgtacttgtcaaggtccagcaccttgaacttgggaggggtgatgata

SEQ ID NO: 9473 - DNA, 163 bp, Glycine max
  unsure at all n locations
ttagagcacctgcagctgcagctaggaacccatctnttagcttaatgcataatacatactcagggctaggaacccaaattntggttttagaattagaaaagcatgaaaattacgacttgcttgtgagagtttntgctcgaattgggctgccccatgtttgatc

SEQ ID NO: 9474 - DNA, 559 bp, Glycine max
  unsure at all n locations
nacgttcagtagacnacggaagataganactaagctntggagtnaaacatgngaccaacccattnaatccatataatgatatntcgatctagncaaggtctgagagaccatacaagctttctaacgatttctaattatgtgggccctatagtctatcatatgctggcagtagccgagaagctcatgactctcttcggggccgactacgagtctgtatcgacctggccttggcaacaatcagggaagtacttgactaccgttcaaggctagagcaaaccgattcatccacacggctgcctcttggggtagagaggtctgcacccttcctacaagcatctatttccgatacactcgagtatactcacgcctgacactatgctgaggggacgcgctgcttcttcatctttccttataccacgcgtctactctaccttctggtcgtgcctcaaccacacanttgcgaagcgttcgcatcgctctactatacctatctatcacccgcgaaggcggtgctccctctcgatactgctccgctacctcatggcacgccacctacacg

SEQ ID NO: 9475 - DNA, 516 bp, Glycine max
  unsure at all n locations
cttgctagacctcagcgacctatgagacacctgaggcatgcaagctncagctggantgctaagngacaacgnatcctttgtgtaatttattacanancancgccaagcgcaaggccggacggacaagagngagggccacgaagccaagcgccagagatggcagctaaccgagactcagtggggccagngcgagcactacgcgagcacctaccaacgccaagcncatgcttccttagtacttaagatgcatcattctatctaagcccaccagagtctggcttagcgagagctgcaactattcggatctacatacctcgctaagtggtctgatcctccactgagccaagcctgtgttaaacaaaaagactttgaatttgaatctaccgctatacgcgcttatccactaagcgagccttgttgagataccaaacgtctctctggctcgctaacacagctttgcggtaagtgaaagagtcaaacacgctaagtgagtgttccacaantacctccgactcg

SEQ ID NO: 9476 - DNA, 398 bp, Glycine max
  unsure at all n locations
agctntaagagaagttgcaagagaaaagacttattctctcaatgtggttgaaactggactcattgtatatgacaaagtcccttgcaaatcggctatgcttgaagcaacaactgcaccttcaagatagcagagtcaagaacagccactgaacaattggctgatttcaacaagattcttaatganttggaaaatattgaagtaaagcttgaagaagaggataaagctctcttgcttctgaattccttaccaaaatcctttgaacatttcaaggatgcaattctttatggcaaagatcaagacattaccctagaagaagtccagacctcaataaggaccaaggagatgcaaaaacggcaagactccaaatctgaggataatggtgaaagcctgaatatttc

SEQ ID NO: 9477 - DNA, 62 bp, Glycine max
  unsure at all n locations
agctntagtaaaaataagtgagaggttcttgtaattatagaagaacagcaagcggctatgca

SEQ ID NO: 9478 - DNA, 146 bp, Glycine max
ggagaatcctgccgtgccattggcagatgtcactcaccacaccaaattcaatgagtcatttctccaatcaaagagacgacacctgttcaatattgcgacgaaccaaatatgatgttgtggctgacaacaaatgcataccttcttta

SEQ ID NO: 9479 - DNA, 387 bp, Glycine max
  unsure at all n locations
caataacttctgaatcggatgtccgattgtttccttttgatatcgagacgctcgtaattgaaaacggaagctctaaganaagtcaaacgacaataacttctaacttggatgtccgattgcgccctgtaatatatcgagacgcttgaaattgaaaactgaagctctaagaaaagtcaaacgacaataacttttaactcggatgtcctattgagccccgtcagatatcgagacgctcgaaattgaaaacggaagctctaagaaaagttcaactacaataactcttaactcggatgttcgattgagtcctcgtatatatcgagacgctcgtaattgaaaactgaagctctgagcaaatcaaacgacaataacttctgactccgatgtccg

SEQ ID NO: 9480 - DNA, 473 bp, Glycine max
  unsure at all n locations
agcttaagagatgaaatatgtccgtttagacacatctattactngttttgttaaggncnatatacactagaagctgtgaagatatgtatcttttttgtcgatcagctccaattgcatcatacgaattacaaaaaaaaaggttttttttgtatacttatagttattattttgaattctttcatttttaagatttataaaatttctaacattagatggtaacaagtctcaaatgtatgtaactagaataaaattccaacattagatgtagcgctcattcctccaaaataaaactagttacactcctaattcttcaatcattggatgtagtattcattcctccaagtaggtcgcaagggcatttcccatcatatcacttgcactatcacttgtataaaccacaaaccacaattttaaaataaagaagaaattgatcatttacaaatttacatgcttatatggcatataccttcttc

SEQ ID NO: 9481 - DNA, 386 bp, Glycine max
tttaagagaatctatttattataggtggtgacaatcttcactataaatagaaaacaaaattagtgaagaaacaacacatgaagcaagagtgtgtgagaagagagattgtgaaacaaagttactttgttgagagaaaagtctgtttgtgtgagagtgctatcatttcttacaaccattgagttgggtacttgatttgtagagtgatacactatctatggtgaattataatcctgtaatcatttttttctgatagtgaaatactctttaaatgattccaataagtattgaaccatgttaaattcttggcgttattattaaattggattcaaattgatttaaatggttgatttttaaatcaaatttgaaaatcagtttagaattcatct

SEQ ID NO: 9482 - DNA, 335 bp, Glycine max
  unsure at all n locations
attcctcacaaaaacactattcccaagaaaaagtcctattgatccatgatcacgtgtgtaatctttgattcgataggaaatgacttgcagaatccagtcatgacatatccatggttcggaattaggatgaaacacttacctgtgtgagagtgatacactttgagtgattctctcttattttgttggacccaatgtttcctctacatggtcggttagaaacgaaacgctaacatccaaaatctcatttatggttatgtgaaaatntcatcagcatactctcctttccaataacacattgttttcatcaacaatatatgttgtttgatcagtagagg

SEQ ID NO: 9483 - DNA, 364 bp, Glycine max
aaaagccattaacaaaataaactcaatgtagcatagatgagaatgttatgttggataagtggacatattagacaagataggattaaaatgaatgcattataaagaaagttgagaacttgagatagcatctgctggagaaaaaaatggtagaatctcacctgaggtggtttgggcatgtatgcagaagactagtagaagccccacttaagaggggtagcctgtagtcctatgtggggaagataggctcgaaaaaaatatagtctaaaccattaagaaggatctagaggtcaatggcttctccatggacatgatttgtaataaaacactatggcaccatctaatacatgtaactgacctcatgtaa

SEQ ID NO: 9484 - DNA, 260 bp, Glycine max
agcttccatcatgtgttaatcagagcacaattgcttatttatgtgctccttaaacctccattaattgttttgctataccttctcttccatcgttgattcttcattatttctccatgtatctcctcacatgtcttgtgctaaatgttgttaacatgattctttatagtttccaccaattaaacttgctatagaagcaagatttgattttctatggctcaaatttcttgttcttgttcttgaaccatgaatcgcgttgagtt

SEQ ID NO: 9485 - DNA, 394 bp, Glycine max
gttgtggaaattaaacagtatgcatatatgatttctatacatcggatcatcattcttctgcacttgctttagcccctagctatctgcctcgcttaaacttccctccttatgacggtcaattctcgtactcatggcttgcgttgcctctgccagctagctgtcatctcttataattacgaagctctaacatgctagtgacatcaaatgttgggcccataacaggttgacttatagaagacgttctccctctgcaaactactgaccatgtacaatcacaatgatcttcaacatataacacctgtcgcgcttgcactgccatgatgaatgggtcgtctttgtaacctaccttttgaaggtctactaacgtaaatcccactctgtcttgacgcacaca

SEQ ID NO: 9486 - DNA, 445 bp, Glycine max
  unsure at all n locations
agcttatgcgcatatttccttacaaacgttctcttgcacaagacattctattaaccaaaaaaatgcacccatatacaatcaaggcagcttcgttacctagattatttacacgtacttccaaggtgtatttgttacttacatcacacacctccttggctaaattcacatacatgcatactcaaagcattttggggtaccaaaaattgcacatgtgcacatcttggtatttccaatacctatacatacacaaacttcatgatgaatcttgactatctacacaataaggtgctacattntatgctcttttcaagtttttgctacctaaagccgcatgcaaattcaagtatattttcctttgctgactaaaattgtattcaaattaaaaggtatacattntttggtaatgtatcttctttacataacatgcaacatanttatgtatatt

SEQ ID NO: 9487 - DNA, 419 bp, Glycine max
  unsure at all n locations
tctaagttagtgtaccaaactaccgcggctccggccaagctatcttgaaagaagtgtattaatagcttctcatccttagagtgtgcgcncatcttgcgacagtacattntgagatggttnttgggacaagtcgtccctttatacttgtcgaagtctggcactttgaacttcgggggaataacaacatcgggtactaagcaaagatccgtcatgtctgcgaacgggatagtcccaaatccttccacggctctcaatctttcctcgaggagatcaaagcttctcttttctttggttgccggnggcggtccttccgtggacaaaactatnggttgtgtcgcgatgttgggttgaggcaacgtgctgggtgccggcccttcggcgatcggnggatagaactcgacatcccttcgacatagtct

SEQ ID NO: 9488 - DNA, 467 bp, Glycine max
  unsure at all n locations
agcttggaaggatgcttcaatggaggaaaatanatagggagagaaagagagagggggagcacgaaattgaaggaataaaagagggagagaagtggaactttgaagtatgtctcacaagactctcattcatcaaagttacaacaagtgttacacatgcttctatttatagactaggtagcttccttgagaagctttcttgagaaaacttccttgaaaagcttctttgagaaaacttccttgagaagctagagcttagctacacacacccagctaataactaagctcacctccttgagaagcttccttgagaagattcctaaagaagctagagcttagctacacacaccccctataatagctaagctcacccccatgcaaaaatacatgaaaatataaaaaaaagtccctattacaaagactactcaaaatgccctgaaatacanggctanaaccctatactactagaa

SEQ ID NO: 9489 - DNA, 285 bp, Glycine max
tccgatgacatccacaaataaacgttggtggcgacttcgcgcatctttcctactttggaaagcgcacccgttagctttgccttcgctcgcccttagaatggcacgttgcgacacctatcaacaacaacaaatatggaatgcttaccattacttgttctaggcagccctaaaacataagccattgatatatcaatccatggagaatccgaattcgttaaggggtaacaaaccataaagcattacctttgacttggcctttctgcatacaatacaacgctcacaaaa

SEQ ID NO: 9490 - DNA, 157 bp, Glycine max
  unsure at all n locations
agcttgccgcccaactcgcccaggcgagctcagcttcgtcctttctagcaaggnngcttcctccagaagcaacaaccttctggaggaatcttctggaggggccaagggtgccatggtgctatttgcacccctttttactaaacgcaccccacttcta

SEQ ID NO: 9491 - DNA, 382 bp, Glycine max
  unsure at all n locations
agcttacccattctgttgtagggttnttattattatgcttgttatgtttatgngctgaaattgcttatggaaaactgctagagatgaagggtagagttaacctatggttataaagtgaaaatgtagtgttatgagtggaaaaagagtgaggctttgagtgttggaaggccaaatctggatttagtggtatttggaggttaaagggagttaatcctagtttgaaatgtcatttatgacttatgaganagtgtagactgtgcaaatgaggaatatgagtgaccaaagtgaaaacaagagccatttctagggtaaaattgggtgttgaggagtcacattttgatttggtagagttttcgtcataaaaccagtttgagcgagttta

SEQ ID NO: 9492 - DNA, 592 bp, Glycine max
  unsure at all n locations
aggggcccnccgcgcgactcgcatcgatctacttagtgcactatagntactcaagctttataggtganatcaggtgcagccatntcccttagagtcctctcacgatgtggaaggtgtccatgttctcagaatgtgccaaatcagaatgctcagaatcagaatgctcaaaattattatgctcaagaacaggatgttcaaaatcaccaattacagaatgcacagattcacaagttatggaatgctcagaatgatcacaacggatttaaatgatgcctaactaatctatgaaatgtcctatctatcttacgatcaaagggttataagtcagatggattgcctctagtcatacactacattcagcatgcacacaactagttgccttgtcatgtanataaaggtgtnggtttgactacagctacccctcaatgatatccaaattgacttgaattttgtgaacaaccttataaaatgatgagaagatagcacananaatntcagacacaaattcacagtctactatgacagctacaatggtnggtnagaaaactagtgaataaacttgaaaataaacactttgacagatcgctttttg

SEQ ID NO: 9493 - DNA, 298 bp, Glycine max
  unsure at all n locations
agctngaaggtttgtacatgacctaatctttagttaatcgncnnnacctaaagcagtctttgtattcgtttataatgcatgaagatagatcagtcggagaacaattggatttgtttaataaactgattctagatcttgaaaatatcgatgtcactattgatgatgaggatcaaactctgttattgttgtgctctttgcctaagagttactctcatttcaaagagactttattgtttggaagaaactctgtttctcttgatgaagagcacgctgctctgaattcaaaggaattgaatga

SEQ ID NO: 9494 - DNA, 565 bp, Glycine max
  unsure at all n locations
cggggnctcgccgccggcgcattggtttcgtcgactgcannnacgngcacnagagagtgctgcaagctatgaatgatatgaatctaactcattctctatatttcttttcttatataactatcanccatacttcatttagtcatttactctatccagagacatgtaatgtgaatttaattaatcaaaacacatccactgtatgaatcattaaaatatatacattaagtatatctttggcttaaacttaataaccatattatgaaggaaagatcccttgagaaaaacatcatttatataactgacacacttctttcacagtataggtctgcaacacatcgtatggcgaggctccaatattggtcttatcacgcgtatgagaacggacgtatagtacccctttgagatctatccattgttatcatactgatgatccctgttgggcgcgacactaccttactcttatatcagaataggttgcatctattggtaatatatttaacatggcaatgggcttagataccttaatggttaaacaaatcccatagcgatcgtctgtggattttcg

SEQ ID NO: 9495 - DNA, 296 bp, Glycine max
gcttattattcactataaataaaatacatcaactctttcaactctgttttccatctgtttggaatcagaggcctgagcgtattattgacaataccacctccattaaataattagaagtcaacaaacacatcattagaattcaaaaaaagctttgttgcaagacattctctgttgagtaatgatatgaatacaatgtttcaatgaaacacaatgctcatgatcagtctgaacatgctatcacacctaagctgaaaatgcacatagtagcatgcatattgatatatatataaccaacg

SEQ ID NO: 9496 - DNA, 450 bp, Glycine max
  unsure at all n locations
agctntaggggaagttaggccaaagagtttctgtgtattataagtgtttagnngannntaattnagggaagatacttaatttattttactttcgtattttctgctcctgccaaataggaccttagtctattggcttcttgaagcttacattttaaaaactatactcagggcgcttgggagttattgatcatgacgtggttgagctgaataatatgcaccgacaggtattgtattttctgttttaccttcccaccctcttttggcatagcaggtgcagcgtgtactttgtgtattggtcatgtgtttgtgtctggcatcagcctttgggtgtttcaacctttgcacgtacaatttgttgatgtgtgccttgcttctgtgtttgtgttgatctactgatttattatcattattattattaaccactattgttattaatttggacaagtttgt

SEQ ID NO: 9497 - DNA, 116 bp, Glycine max
  unsure at all n locations
cttcaaaatacttataatctgtacttgctccctaagcttgctggagtgtgctgcaacatcaaaatatacaaaggttattattnagttacataatcttattgactttgcatgacata

SEQ ID NO: 9498 - DNA, 433 bp, Glycine max
  unsure at all n locations
agctngacgacctaatgatactagagctatcagatgattattataatggnngatagctttgcggagaggtgctcgtagaagacgtcgtaactagccagcatgcggagaagccactggaggttctcgacatcgtcgtcgttgccgggaaggatgcaggggaggatctcgacagcggagagagggttgttggcgccgccttgccagaggacgtcggcgatgtttagcaccatgggaacacttaccatgttgacatgtagagttcttaactagtattcatttagaataatattttntttaatttgacaattgacatgtagagttcttaactagtattcatttagaataacctaatagcatatcaataaatttagtgtctgtntagacaaagcattaacaaagtttattttaaaaaaatattatatttgtaaaaata

SEQ ID NO: 9499 - DNA, 366 bp, Glycine max
  unsure at all n locations
tagtcgaatgctcaaaatcataatattcataatcactcagcacaaaatactcaatatgctcaaaatgctcacattgcacagaatgatcaggatgcacactatgcctaactaatatatgaaagggtctatctatttcacgatcaaacggttgtanatcacctagaataaccctagtcatgcactatatgcagcaaataatgtgtttctcaacaagcacctaacaaggggggtaaactacagctatactcaaacgatatccaaatgaagttgaaatttgtgaggaacacnctacaatcatgaaaagatagcacanacactttcagacacactttcaaattcttactatgacaactacctaagaaaagt

SEQ ID NO: 9500 - DNA, 310 bp, Glycine max
agcttgctacacctaaatttgtgcgaaatacttttgctatttcctgcataaattattgtcctgcgccgtatttatacacatctatgaagacttgaccaatttgtcttgttttggagggagatgtataattttgatcatcaagtggtggactttgaaagtaaaagctagttaatcatcatggcttggctgcaaaacatatttaattaaaagaataattctaattattaaaaaagagaataattctaaatctttttgcaacaccttcctaataattctcataatttatgttctcaagatattaaatatatct

SEQ ID NO: 9501 - DNA, 461 bp, Glycine max
  unsure at all n locations
agcttgaaattgaacaaaggaagctctcgagaaattcaaatggtcataacttatcacacggaagtccgattcaagagcatactatgtgaagatgctcgaaattgaacaacgaaagctctcgagaaattcaaatggtcataacttgccacacggaagtccgattcagacgcataatataccgagacgctcgaaattgaacaatgaaagctctcaacaaattcaaatggtcaaaacttgtgacacagaagtccgattcaggcgcataatatatcgagaagcttgaaattgaacaacggaggctctcgagaaattcanatggtcataaagtgtcacacggaagtccgattccgggggatagtatatcgagaaggtcaaaattgaacaacggaagctctcgagaaattcanatggtcataacttttaaacggtagtccgattaaggtgcataataaatcgagaag

SEQ ID NO: 9502 - DNA, 433 bp, Glycine max
  unsure at all n locations
actccatcattaggattagttcctgtcatctcanacaaacaaatcaaacgtaataagacaattatagttgttgtttgaatacctcacccactcaagtgtatcacacaattatgggctttctctaatgaaacactcttgcctgttaccactctaattccccttgagttcttaggcaattcaagagattatggccacaacaaagaacaattcaccaatatgtgtaaggtaaggctagagagacaaggaacagggtaaccaagaaacaggctaacaatggttttaggcacaaatgaaggaaataaaattcagaatttacgaattcaagtaacaatccttcatgcaaccaatatattaccttaaagagattctttctaaagttcttcaagcatgaaccattcagcccacatttttttttttttaatatttgatatac

SEQ ID NO: 9503 - DNA, 441 bp, Glycine max
  unsure at all n locations
agcttctaaaaggatatttgagttgaatttttcttatagattcaaactcaacaaaaatctcttacaattgactaaattgtacctacaacacactacaaaaatattattccatgatctttacctctaattaggtatttatgattaatgtttcataacgaaaatcaaacggaagaattcaattgaaaaaaaagaaaagaaaagtacagaaacccagtaaaaaaaagaagaagttcatatgcctaattgaaaatctagggaaagatcgaaatcagtagaataattaaaccttagaataacttaaacatctgaatttgtttcagtagcttttacatttaaattnttcgtaaacatcaataagcttatgaacactctctagtataagatgggaatcacatacttatattaattgacaaggcctcataaatttaaaggtaatttgaa

SEQ ID NO: 9504 - DNA, 366 bp, Glycine max
  unsure at all n locations
ctataataagacangacacactataataagaaagactcatacagtgnatatacctcacgtctagtaaatgcaagtagttcaaaggtttctaaatcctcgaacgtcattgttctatttatagaacatgcaaaacagtttgtgaatctcaatacgtgtctcttcattggttcatatattagaaataaatcagctctaacttaatactaaagttagatcacaaggggaggagtggacaagccttaacatgatttactttagccacacaaacatctctatacaatatgggacatcttaacatcacacttatacaaacaataagtttgttgaaattctggaggtctggaggtagagaagacacatctatgg

SEQ ID NO: 9505 - DNA, 278 bp, Glycine max
  unsure at all n locations
agctnntgggtgaagacctatataacagcactcaggttttntagtttagagagagctctggagaggagaataattttaggtattgcaattccagcctttactgttcatgcacactgntcacgtagcaataaaattcattttctgcaatttcattttctgcttccaattgtaatttcatttctgctgattaatggaagactaagtctccaacgttgttttctcttgaggatcaagcacaactctctttgaggtcttggtattactaataaattctgatc

SEQ ID NO: 9506 - DNA, 463 bp, Glycine max
  unsure at all n locations
agctngcttgtggngcttctatggaggctggatctttgaacttcaatggggtcctttaatggtgatttttcaccaaggagatgcagcggaagacaaagtaaaagaggtgagaggaggcgccatccattaaggaataagccatggaagaaggagctttaccaccaagatgagccttggataagaagcttggagaggatgcttcaatggaggaaaagaaagagggagagaaagagggaggggggagcacgaaattgaaggaagaanaagggagagaagttgaactttgagttgtgtctcacaagactctcattcatcaaagttacaacaagtgttacacatgcttctatttatagactaggtagcttccttgagaagctttcttgagaaaacttccttgagaagcttctttgagaaaacttccttgagaagctagagcttagctacacacacccctctcataact

SEQ ID NO: 9507 - DNA, 635 bp, Glycine max
  unsure at all n locations
agagagagaaagaaganctgntnnnntatattnacatcntannnnnnnaagcccccgcgcgcccgtgtattactccatacgannacgngcacnatgagagaccaagccttnacaactaaannnngtgaccttacacagatcatgaataatctttcttaatctcagatggataaaaataaaagaataatttaaaggccacaatcaaaattacctcattttacacaaactcaaaccacatttaattatattatctaatattgaaatactagtgaacacttcacttgcactaatctcactgagcatgggtggatttctcgtatcatgaattatgccttctcttcttcacataccattagtacgtctaaacacatacataaatcaatcattttctggttaggggaagagacatatattagccctcaatacataactccatatanaaagaaagcttaatctgacatacatccgcaagccttatcactttttctttttgaaccccaagactggccagcaacccgcacgcaattgcacagatttcttattccttgacccggcgcactngctattcaacacaccaactgtgctttccaccaacacaactgattggatcgctttcccacttacgcgacacaggg

SEQ ID NO: 9508 - DNA, 372 bp, Glycine max
  unsure at all n locations
agcttgtcacaagtatatctaacctgttctctaatgattctnggcaaacataccagccagctgactgctggagttaacaaagttgggtgttatttcgctggatagcaccctttctctaacaaagagacagatgatcttgctatgcctttgatccttcatgtgcatgcctccaattttagctgatggagtacttgcctaagttgcataagctcacatgtggctattgccatacaacaaaatccaacttttgcactggatctagtaataatgttgtccttattgctcttccatgatattaagtttcctccagcatgaacacagatccttaagcggatctcgtgtctaagggtgaccttgtccagacaacatcac

SEQ ID NO: 9509 - DNA, 450 bp, Glycine max
actaagcttcaagaaaagatggcctcagcaaattcctcgtttccttaatgttaatttataaatagacctccaatctctaatggagagggttaccactactggacaacccgaatgcaaatatttattgaggcaatagatctaaatatctgggaagccatctgaatatggccttatatacccaccacagtagaaagagttgcaatagatgagagcttatcaagtgaaagcataaccatagcaaaacctatagatagatggtctgaagaggatagaaaacatgtacaatacaaccgtaaagccagaaacatagtaacatctgccctaggaatggacgaatatttcagagtctcaaattgcacgagtgctcaagaaatgtgggacactcttcagatatcacatgaaggaactacagatggtccaagacctacgataaatgcactaactcatgag

SEQ ID NO: 9510 - DNA, 289 bp, Glycine max
tctatcatatctaataattggcacatttatgtctaattgcccttttacttcattgtagtaaatttctaaggcatccattgcctaagaaatctcgggcagtaagtagacataactgtaacgtgaataatcatcaataatggtgataaagtatcattgctttctgagagaactaacatcaaaaggtccacaaatatcagtatacacaatttcaagaagctgagtgcttctctgagctccttcctttgcatgtcttgtctgctttcctctaatacaacgcacacaaatattt

SEQ ID NO: 9511 - DNA, 431 bp, Glycine max
  unsure at all n locations
attgaagctgacaggatcaacaatggttggttgaattatctccttagctgggaagacaccccatgtcacagcattaacatcagtttgacccacattagatntccagctcccgtctttattcacagccatataagttaaagatgttcgatccttgcatttatcaacaagtgcatccagcttttccttagagcagaagaactctacatatgccttctggtaaacatacccgcctggtccaccccagcctaggccaaatttcaaacaaaaatgaattagtgtatctcatatccaccaaccaatatggacaagatatgaataccctcagtcacaaattgcacccttttgagtacctttcaatcttcattatttgttntacaagaaaatatnagtaatataaagtggtacagccacacatctcactcaatactagt

SEQ ID NO: 9512 - DNA, 385 bp, Glycine max
acgcatcttaagcacctgcagctgcagcttcacttcccctatatggatggttgatcgttatatagatttgtacgcgtccagtctagtctctctaagccctgaaaccgtaactatggctatgttctgagattcgtcttttctgttgttcaaagatctctccgattccttttctttcgaagtggcattgcccaaagtcgaatcaaaggcttgacagggtcttcttagcccatgctaactagaatagttagtagcttataggatcccaaagcaataaccacagatggaggagcattcgtctttttaaccagttttcaaaaaccaagatatcctgcctatcccgaaaaacggactccctcaaaacaaaaagtagcttcatagcaagagt

SEQ ID NO: 9513 - DNA, 495 bp, Glycine max
  unsure at all n locations
aggggnnnnnnnnnnnnnccctggttgcacctangaacngcactatagagtagctcaagctggtaataggtgaccagtggtagtggatttcccagagatcactttggttattgacaccataccggagtggacccttttctctaaccatactttcctaaaatctgcgcaaaatcagaanaaaaaaaaggtggtcaaaccattacaattaaccaccctataaggaaaataaagtttaccacttagactttggcttacaaactttcattagctaaaagataagatctaatcccccatcaacagccaaaatggatgctcatgtacgataaactagttgattcacgataaaaatgactacaaattatgactccatcatagacgaataaaagggctgttagcacggacgttaattattatagtacaaaactggctgaccgtaagacaatatgatatatagacaaaactactgatgatagacgtatacatatagacaaattt

SEQ ID NO: 9514 - DNA, 133 bp, Glycine max
agcttgtaagtatttgttggtataatctgcccgtccattaggctcttaatgtctttagaggttacttcctcattgacatcttttgtcttgaatggaattgccatgacaggtttattgttactgtctttgatgt

SEQ ID NO: 9515 - DNA, 201 bp, Glycine max
ctggaagatgacatgcctttccatagactacccaataaggagacattcctatgggtgctttgtatgcagtccgatgtgcccagagagcatcatcaagcctggtactccaatctttcctgcttggctgcacaatcttctctaaaattctcttgatttcccggttagaaatttctgcctgcccattggtctgggggtggtatg

SEQ ID NO: 9516 - DNA, 314 bp, Glycine max
  unsure at all n locations
agcttggcatcttcctccaactntctcttgtgttcttcctcatatagngctttaacaaaggcaagcactcttcttctagctcaaaagcttcattcttctcaagcatctcatctaagttagcttttttcatgctttggccaaggattgcttcttagccttagcaaaagctacaacttcttttctactgatgagggataaagaaagnttgatttaaggaataggatgaaatggtgactaaggtggaagggctaatgaaggtgagggttgaggtgttggagttttaagaatcgcattattagattcttggtcttttg

SEQ ID NO: 9517 - DNA, 335 bp, Glycine max
  unsure at all n locations
cctcctgaaccgtctactcttaaaactaatactaatgatggctattntacggacccatggatgtcaagctctggcggtgtcattcgtaatcattatggtcaatggatgcaaagattctcaagctattgcggttttatgtctaatatcattgtagagcttattgcaattcaccacactgcaatctttttattgctaagtctagtggctctcagtccgaggtatgcaaaatagactcaaccctcgcacttcatcttatcaagacaagagttcctcgcactcatcctctcaccccccttggtcgacaattcaaaacgctaattacttctcaatgattc

SEQ ID NO: 9518 - DNA, 403 bp, Glycine max
  unsure at all n locations
agcttggaaggatgcttcaatggaggaaaagttagtggtagtattttagagaggngggagcacgaaattgaaggaataaaagagggagagaagcggaactctgaagtatgtctcacaagactctcattcatcaaagttacaacaaatgttacacatgcttctatgtatagactaggtagcttccttgagaagctttcttgagaaaacttccttgagaagcttctttgagaaaacttccttgagaagctagagcttagctacacacacccctctcataactaagctcacctccttgagaaacttccataagaagattcctaaagaagctagagcttagctacacatacctctttaatagctaagctcacctccttgagatgagaagcttgaacttagttaccta

SEQ ID NO: 9519 - DNA, 442 bp, Glycine max
  unsure at all n locations
agctntgactaaactatacatttgattaacagtttgagagagagagagagtagaaagacaattagacaagaaacaaataaaataacttatctcaaacaagtgattaagtggtacagtttatcgcttatagttctagcccgtagcttaagttggataattccttttcaaaagaattgacccaaggaaaaagtttctatgatttctggggagggaacccaaaaaaactaggcggcttcaggatcagtggacaatcatgaaaaaaagagagagaagacaatatatagtctaaaccaagaatagaagaactgatggatcttacaaattaaacagcaaccaacaagaacaattgaaaagaaatataaaacagtgaattaacacacacagaagaacaattaacatatgagatggctattattgatggagtttgagctacatgctggta

SEQ ID NO: 9520 - DNA, 184 bp, Glycine max
  unsure at all n locations
agctntagctctcagcccanactctctttcacaaattctgatttcaggcttaaataggcggccttgttcgtgcttgtgcacttagtggaattctgaaccgcttagtgcacattagtgaatttcgacttagcgcatgcctttctcgctcagcggatggactgaagcggtgcacttattgtgatga

SEQ ID NO: 9521 - DNA, 517 bp, Glycine max
  unsure at all n locations
cgcccggtgttgaagcatctgattcgcgatcctctgagtcacctgcngcatgctagcttgtangaaatatgggtacccatcacatgtggtactacgtggtggtcgggcgatggtgcacaacaagtttttccacattcatcaatcacggctatacccaccattccctgttgcccaccttcaactgagctcacgtacacccacgtagcccatattcttttgtatttcaacaccgggttctcaataatccttccaagcttccccaacattcaggtaatactacattctaatagcgcaaactatctcattctaaaaatcattgtaatgcgtaaaactttgtctaaacaaccacccaaaattacaatattttttatctaaacaccccacaacaatttcttctatccatttctgacggttgggggaatcgaaaaattctgggggctttagtaataatatacttttaactgtgggattatttcataataaaaactaattttaattctcttctctcaccacaaan

SEQ ID NO: 9522 - DNA, 337 bp, Glycine max
ctcgctaagccaatttgctggcttagcgagcatccgtcaagcacaacactcctatgcttagcgcaaggaagactctggaagaagatgagtgtcgcaacgtgccctttcgcgggcgagcgaaagcgaggctcaccggtgccctgtcgcaacgtttatttgtggaaaacgtcggaaaaaccgaatgaaaaccggctcaaatgaaaattctaagttcgggaagtgtatttacttttgacgaacgtattaacacctctcacgtttgtctcaaacgacaacagcctattttttacaattgtgaaattgcgttatggaaccttttatttcttttttatttttg

SEQ ID NO: 9523 - DNA, 340 bp, Glycine max
  unsure at all n locations
gagctctgggccaggccaccttcttaatgaatagctctacactcatgattggcctttgctgggccaattcttgcaagctacgcataatgagaatttgtcctttaaacaagctctgcaacctagcatctaaagtctgggagctctgggcagatgggtcgactgatcctggaggtggagctggagtaaaaaatgaagggatgcaaactattggtgcagaggaagagggaacatcagctgctctaagcttgggtcttcttgccactagaaaataatngattggtcattcacatgccaacagttccttgtaatataggccaagttaatgatcgcgctcaaactc

SEQ ID NO: 9524 - DNA, 426 bp, Glycine max
gctgtagggttaagtctcacgattgtcatgtgctcatgcaacaattgttagccgttgctatacgagacatcttgccaaacaaagtcaggttagccataactcgtatgtgctttttcttccatgctatatgtagcaaagtcattgatcctgtcatgtttgatgagctggaaaatgaggccgcaattatactgtgtcagttggagatgtattttccccctgctttctttgacatcatgattcacttgattgtgcatctggtcaaaaaaatcaaatgttgtggtcctgtttatctacggtggatgtacccggttgagcgatacatgaagatcttaaaagggtatacaaagaatctatatcgttcacaagaatctattgttgagaggtacattgcagaagaagccattgaaatatgttcataatacattg

SEQ ID NO: 9525 - DNA, 422 bp, Glycine max
tttctgagtgtgctcatggacgtatgaacatacattggctgctgatccacttcgaaactttgtgcctgctctatatgctcctaatgacattcgttacttcctagtcctctacactaacaattaggtttctgaacatttggtgtctccacggtatctccttaatttagaggaattactgggcaccttctcgtttacacgaagacaagggaacattggtcctcaaacatgcggataatgagatctatatatccactgtcaaaattcatcttttatagatgcaatatatgatatctattgtgaagagcggtatattccctatcagtgtaagccagacgcatgaagcacaaaatgattttctatatcacagctatgggtgatcaattacttaccggaacgttcttctcgtctatctataaacatct

SEQ ID NO: 9526 - DNA, 482 bp, Glycine max
atagcactcatagacttatgacggcttctgcgcccatagagaatcgtggtctacaatgccagagacacacgagagatctcattatcttccacgctcacaagatctgtcatattgacatcttactcccagctgctggcatgtatagtcctacggctatgcgcataatctttatggtgactgagaaccaattgcctgataacacgctgacacttgagtggtctattgcgccctccttcacggccacactacaagaccgttgacacacgcatattcatcatctcttactcacttgggcgtggtgtcatactgactttagcatcccgtccacgagtggatatacccgggaggttatcgctattgctaatccctcttagtgtgcatatgaagaggatatttgttgcacattgcagctatacattgaacgaagaggagcgtggccgtcttttctgactctattaagccgtatgagatttcgccgaccc

SEQ ID NO: 9527 - DNA, 481 bp, Glycine max
  unsure at all n locations
agctctctttggaccttgaacaagcaatcaactcctctttcagaaccatgctatgtgctcgcgactggtccctttcttcccttcgcaacttgagttcattattgcttccccatagagctccgcgaaatgtgttccggccatactcttccttgcgagccctcttggtctcttgttcaagggctcttgcggtaattgcattctcttcccgtaacccggcacactcctttcgaacgtgtgtagtagccaactgggacttctccttggcgagtgttgcctttcctaactcgctttngagagctnggacttcctcgtcctcttacggtgcttcaaaattctcttcgctgacgacttttaacttggcgagccaatctaaacctcgtatgcgaactttcagccattcgtggtacccaccaatgatgccattacgaacgcctctaagctcttgatctntccttaacggcggttcccatgccttatggat

SEQ ID NO: 9528 - DNA, 382 bp, Glycine max
  unsure at all n locations
cgcataaccgactaaggcattctatgaatttaaaacaatgaaggattggtgcttagcgcatcctgttgctaggcccaattcatgaaagttcaattccagggaggaaattgagcttagcgcgcttagcgctgctacaataattnttcaacaaagaaggaattgcgcttagcgcatcatctccgctaagcccaaatcagtgaagttcaattctagagaagaacatgggcttaacgcagtgatgtgcgcttagctgaaccatctagccaattggtgaaaggtcaaagcgcttagcgcaagcaacaaccgcttatctcgtgaagacatggcgcttattgcaagggttgtgcttagcggatggacaactgaaaaanaaaaattaagt

SEQ ID NO: 9529 - DNA, 480 bp, Glycine max
  unsure at all n locations
gcatcaaccgcactaagtgcgattctatgaatctcaaaacaatgaaggattggtgcttagcgcatcctgttgctaggcccaattcatgaaagttcgattccagggaggaaattgagcttaacgcgcttagcgctgctacaataatttttcaacaaagaaggaattgcgcttagcgcatcatctccgctaagcccaaatcagtgaagttcaattctagagaagaacatgggcttaacgcagtgatgtgcgcttagctgaaccatctatccaattggtgaaaggtcaaagcgcttagcgcaagcaacaacggcttagcgcgtgaagacatggcgcttattgcaagggttgtgcttagcggatggacaactganaaataaaaattaagtcttttcctgtccatctcttcacaagaacttgaaacccttgttaccaatactaaccaagcttaagtcacatacaatcacangcagttgaactaac

SEQ ID NO: 9530 - DNA, 537 bp, Glycine max
cgcccggccatgaaacattcgattgcgagctactctgaaaccgggatactgctgactcacctgctgcatctaacttgcagagttgaagatcagcacgacacttcttcgggatctagaatcatgtacttcacgagtggcataccatgggactaatatctgataatttcattgtttagaataccatttaccctatggcgacctcttttctaaccctgcattagaagtactttccatatgtgtatgaatagagacatatgagggctgctctgttttatgatttaagtgatcttatatgcattagcaaggtcatatagatattcttatactcgacacttgcatgaaataccaggataaattatatagcacgtcgtagctatgattatgcactgagtacactaccgtcgcataaacacattttgtacaacctgcttcagagatataagataacacacaccccacatgggaaagaaaatgcaagatatttttgctgtacccccatcagatcagctactacactatccaccttagagttctgtg

SEQ ID NO: 9531 - DNA, 267 bp, Glycine max
gtcatcataatatactgatcttatccatgttaagtatgtatatcacctaaccatgtcgtgctgccgtacatatctcagttctcaccattagttttctgtaaactagatcctggtacatcatcaatatgaccataaatcatgttcagttagccattttgatgtgcattgggagttgaaacttacaataatagttgtcactatcagtatcttaatcaaatactatctaaacaaggtccctctctcccccccaccaacctccccttctcc

SEQ ID NO: 9532 - DNA, 416 bp, Glycine max
  unsure at all n locations
agcttattaaaattgatgcttaaatgttctatagttattatttgcaagttgctacttttataatggatttattatgcacttatgcatgcattanttgtatgttatttgtttagatctaataagctttatgttcttagattgttatatcttgcccaactgattaaggcttctaatttgataaattcagtcttgaggatggagcaagatgttgagagtttgtctttcatgggcacacacacagactgcatgcgcaataatttggaagaaccaaaacaagataactctttcatggtaatggctggacgtataatttgattttttgttttgcgttattgcttaatgccctgtgtttcattttgtagtttgtaacatcacaggttaaaaatttagtctaacattnggtatcaaagcattaa

SEQ ID NO: 9533 - DNA, 364 bp, Glycine max
attatttgtatgggttgaatgttgaattctggttgttcctggtgcggagatgatggtacagccggtgaaccagaagctgcagtttcttttggtgaggtagccatggaaaaacagagcgtttggaacgatttcgtaaatctcggaaaactattgggaaatgctggtaaaaacacgaatgccaagcagatataaatttgaatgaagaatgtagagaggcgtgtgaagcaacggtcgaatttgctttgtggtgaacgtgctattaatgttaagtgattcgtttgggcacgttcagattgcagtagctgctataattcctctagcagacaaatgcccagcttgcccctcagtttttcaaactgatttg

SEQ ID NO: 9534 - DNA, 415 bp, Glycine max
  unsure at all n locations
agcttanggtttatggatacttcactaatattagggtttacgagtttacgatttatgggttattgagtatttaaggtttagggtttatggtatttgacaaattatgattttttgttacatcccaaattaccaaataagggtatttgactagtaagggtttacggatacttgacaaattacggttacttgactaagtaaggtttacgggtatttgaaaaaattaggggtttatggttaattgacaaatcggggcttatgtgtatttaactaattacggttacttgaccaattaaggcgttagggttactttacaaatactgngttaggggtatttgactaataacggttaatgggtagttgagtaattatggtttattgttacttgaccaattaacgcttaggattatttgactaa

SEQ ID NO: 9535 - DNA, 255 bp, Glycine max
  unsure at all n locations
ngcanacttctancaaaattaagtgatcacaagtttttcattggagaagaaggggataggtgacctgatggtagaaggttctttaacatcgtcatcatatcaagagctatggagaagcattangaatacgaatgggaaggggataggtgacctgcttcaatgaagttccaaacatctactaaaaatcacgttagttgctatttcaatgtgattctggatgatccaacactgaatcaaatgcgcacacaaactgac

SEQ ID NO: 9536 - DNA, 459 bp, Glycine max
  unsure at all n locations
agcttacctgggtaatgtatacgtcaaggtgttcatttggatcattagtaccatcatacttcttaatggtcaaaattttcagtttgaaggaagagtcgcttccatgatgtcgggcataaaagggttcttgaattgtagcaactgtctccccaaagtattaagtgatggggaaatagtttcttgacatacacttaagttagtggtcttggacacactgaaagtccttgacttaatgtctcttcctgaactttggggtgtgtgacctattacattcttgtagatgtgcattttcacgtcgaagggcgatgacttcttcggcgtgatgacgatgcatgtccaagacctaagcttgtagtcttcgcacgactgaggacaaggtagtctaatattctacatgaatctccttgttttgtngatctggtggttgttccattgttgctgtattcattccacttctag

SEQ ID NO: 9537 - DNA, 310 bp, Glycine max
tatccgggcctccattagcaaagccttcatagagaaatattgcatgcccagcagcaggaggaaggccagcagcagccagctgcaggcgcaccgctgccatctttataggagacaccatccttggagtccatatccgctcacctgaggaggatggagctctagatgcacgcttacatgcagcatgtgactagccagcaggcggctaatcacaagggtcaggtgtagctaaacgagagcttctacaggtacacccaacaccagcaaagccaggacctcagtcctttcccgtgacctacccccgagcaattta

SEQ ID NO: 9538 - DNA, 391 bp, Glycine max
  unsure at all n locations
cctatagaaggttcgttcctaatttctctacaattgcatcacctctcaatgagctggtgaagaagaatgtggcatttacctgtggtgaaaaacaagagcaagcctttgctttgctcaaagaaaagcttactaaggcacctattctagctcttcctgacttttctaaaacttttgagctagaatgtgatgcctctagagtgggagttggagttgtattgttacaaggtgggcaccctattgcttattttagtgaaaaacttcatagtgccacccttaacaggggggttcatagaactaccaagaagtccccttttgaggttgtctatgggttcaatcccttaacaccgttagacctcanttccctccactagacacttctttatacataaag

SEQ ID NO: 9539 - DNA, 449 bp, Glycine max
  unsure at all n locations
agctngtgggtgcgggatggtaggggatcangaaggaggtgttgacgaagaatgtttccaagaaggcgaagaagataaagtgctatttacaaaatgaataccaaagcctcaaataatgtattgggtcatgactcttttggattcacatttttttttattattgttgtatatagttgtttcattgtccctaaggttttgcttcaattntgtttaaattcaagctgccatgtcaaggaaaaggaaaaacacacgcagaggctcaattgtattaaatttggttttggttctcttgctttaagaattgacttctctaagtctgacaacatcaaaatatacaatggaattcatggatgcttatatcaagtagctatttgatttttaaaatttctaagtttctgattataaagcacttgatctccttngtaatctttcattatataattttcatc

SEQ ID NO: 9540 - DNA, 410 bp, Glycine max
  unsure at all n locations
ntagctctcatgagtgtctcaatcttcagtgatagagctcgcatctgctttcctaatttagttatggattcatctttctgcacctagttgacacctctcttcgtaatcgtcctatcccttaagttattgtaggggttagaacacatgtcttcaatgattttgatgatatatgtaagggctctaacatgagattgccataacaagcaacatctaaacttgtcctattatgtgaggacattccaccatagaaaatatcaaccaacctttgttgagaaaagccatggtgaggacaacttttgatcatctcttgcaatttttcctaagctttaggtagactcttttgctccatctgcaaaaagtttccaatgtcccctaatgtattgatttgccttcatggaaagagaaatacc

SEQ ID NO: 9541 - DNA, 442 bp, Glycine max
agcttccctattagaaatgacaaatcgcgccgatctacatatgttataagagacaaatcatctatgttgttaatgcgagtaaaactaataagctcgtcaaatattctaatagagataggcattagcaaaatacttcacattaataatatgattaaaaaaaacaaaccaaccataagctaaaagcctaaaactcatacatgtgaaaattcaagattttcattattttaacatagatgcttgaatataacatgttgcatcatgtggcatacgagattgagtcattgacaaactctcaagcaccactataatggtgatagagtatcttaaaaagagaaatgctgtatatttcctcttataatatttcttaattaattcttctaatatcttataaaacaaatactaaatgaagaattatgaagcttaacatttcgaccgattaaat

SEQ ID NO: 9542 - DNA, 284 bp, Glycine max
  unsure at all n locations
tgcataagtgatgaacggttatcttcctctgttataaatagtttgttccacccaaactctagtagcataaacttcatccaatttttcttataaagtttttcatttcaaatttaataattataggcattaaaagggagctatagaaatcacaagacaaaagggccaagttgagtgtactgggcatggctntgtgtatgaccattacagcatatagcttagttgacacactttcgttcttttggaaatgctctaacatttaagaaaatttgatcctttgaatctca

SEQ ID NO: 9543 - DNA, 366 bp, Glycine max
  unsure at all n locations
gcttgagcaaattcaaacgacaataaccttttactcggatgtcntgatgagtcccgtaatatatcgagacgctcgaaattgaatgttgaagctcttagtcaattcatacgacacataacttttactcggatgtctgattgagtcccgtcatatattgagacgcttgaaattgaatgttgaagctctgagccaattcaaacgacaataactttttacttggatgtctgattgagtgccgtacatatcgagacgctcgacattgaatgttgaagctctgagccaattcatacgacaataaccttttacttggatgtctgatcgagttccgtaacattttgagctcttcgaattgaatggtgaagcttt

SEQ ID NO: 9544 - DNA, 297 bp, Glycine max
tttcgagcatctcgatatatgacaggactcaatcagacatccgagttaaaagttattggcgtctgaattggctcagagcttcaacattcaatttcgagcgtctcgatatatgacgggactcaatcagacatccgagtaaaaagctattgtcgcttgaatttgctcagagcttcaacattcaatttcgagcgtctccatatgtgaccggactcaatcagacatccgagtaaaaagatattgtcgtttgaatttgctcaaagcatcaacattcaatttcgagcgtctcgatatattacg

SEQ ID NO: 9545 - DNA, 482 bp, Glycine max
  unsure at all n locations
agcttcaagaattatggcctcatcaaactacttgtttcccgagggaaattctataaatagacctcccatctttaatggagtgggttaccactactggaaaacccgcatgcaaatctttatagaggcaatagatttaaatatttgggaagccatagaacaaggaccttatgttccctctataatagctggaagtgcaacaatagaaaaacctagagcagattggactgaggaagaaagaagattagtacaatataatttaaaggccaaaaatattattacatctgccttaggaatagatgaatactttagggtttcaaattgtaaaagtgctaaggatatgtgggatacactacaagtaacacatgaaggcacaacagatgttaaaagatctaggataaacactntaactcgtgaatatgaactttntaggatgaatgtaaatgaaagtatacaagacatgcanaagaggttcacacacatag

SEQ ID NO: 9546 - DNA, 362 bp, Glycine max
  unsure at all n locations
cgcttctacatctttggcaaggcatgtcatcttcctgtatagagcacanagcctactgngctgtaaagacttgcaacttctctatggaccaagctagagaagaaaggaagttgcaactaagtgagctagatgagatccgtttagaagcctatgagaattccaaattctacaaggagaagacaaggaagttccatgacagattcatagctaagaaggactctgtggttggacaaaaagttntattgtataactctatgctcggactcatgagtggtaagttaaggtcaaagtggattggtccttttgtggtgactaatgtttttccttatggtacagctgagatcaaaagtgaatccacagat

SEQ ID NO: 9547 - DNA, 467 bp, Glycine max
  unsure at all n locations
cttgtctcatcaatcgactcaaccctttgccaccatcaagaacaagaatggtgctatgagatcctcttgcctaagtcccctttgaatattaaattctttactcgaactaccattcacaaggatggatattgatgcgaattcaactcctcatataatccacccaatctatttctcacaaaaacccaacctcttcatcatataatataaaaactctcaattagtcgattcatatgctttttcacaatcaactttaaataacaaacaatcttttttcctcctccttacatcattcaccacttcatttgcaacgagaaccccatcaagcaaanttcttcttcccataaaagcacattgcctttcatcaataacctgtcctaacactatttttagccttgtagctaacaatnttgagattaccttatacaagcaacctatcaaggaaatatccaaaagccttgaggattcac

SEQ ID NO: 9548 - DNA, 387 bp, Glycine max
  unsure at all n locations
tcaatcacaactatngcgggctcctctaccatctctntatcccaattccagtccttggattcatcaactaccacatgtgtactcacgagcacttctttggttactggattaaacaatttgtaaccaccagtggcatgataacccagcagtatcattatctgacttatgctatctaacttctttctcaactgatcaggcacatgtttataacaaatanagccaaaatttttaaaatgactaaccactggtttgtgtncaaaccatgcttcttcaagtgtgatgttattgagcctttattgtgggctctcatttatcacatacactgcactggagatagcctctgcccatagaaaatttggcagcttctttccattaagcatgcatctg

SEQ ID NO: 9549 - DNA, 201 bp, Glycine max
gtatgtgcttaatgcaaatgctcgggcaattcttgatagagctgacaatggatgaaactggctttcaattgtctcgacccgttattaatttcactattataatcaatgccagctaagttgtactgccatttgctaacacaaaatgaaatatttcgcttcttaagatcgcatattctacaggaaagtctaattgatcattgt

SEQ ID NO: 9550 - DNA, 75 bp, Glycine max
gatgtactctaccgagtccatcttggataccagctaggtggtatggctcggcatgtactgtctcggacgatggga

SEQ ID NO: 9551 - DNA, 359 bp, Glycine max
gaagatctctagtgatctacgaacggaattccaaatcgaaatataatatagtttggccaagagatttaagctaaaatgtctttttcaagagatttactctctggtgaatcgattaccacaggatggaatcgattaccagtggccaaaatgatttataacagccattacaagtttgaatttcaattctacactgtgttattgagtacacatgaatggtcatcgattaccagcagttgctaaaacgttttgattcaaatattaaagcctgtaatcgattacacaagtcttgtaatcgattaccacaggagattcttagaaaattatttccaaaggtcacaatctgttcaagcgggtttttt

SEQ ID NO: 9552 - DNA, 445 bp, Glycine max
  unsure at all n locations
agcttcatgatgatgaaccaagcaattgtgatgatgccaaaagcccaagtgattgattcaagacttcaagatcaagaatcaagaatccagtccaagattcaagattcaagagaagaaatcaagaagcaacaaatcaagacttcataaaggataagtattaaaagaattnttcaaaaaccaaatagcacagttttgttttacaaaagaattttctcaaattttctaagttaccagagtggatactctctggtaatcgattaccagttatcaataatcaattaccagtgatcagtttggttttcaaaatggtttcaaatggtttgcaacgttccaaaatgattttcaaacagtgaaatcgattaaactatattagtaatcaattacaagtgaatctgaacgttggaattcanatccaatggtgaagagtcacaacttttcataaaat

SEQ ID NO: 9553 - DNA, 351 bp, Glycine max
  unsure at all n locations
tgtcttgtgcataattagggtacactntatagaatacccagggcacaaaattacagaattgnggatttctaatgaatagcttatgtaaatacataatatataattgattgtgttttctatgatcaatgcttcatttaatgcttgatgtttgtatgcttttggtctgatcacccatttgtgtgtacagttaggtgactttagcattgggaaatgtactgttgccttataacttgattgaagcaagatcgaaacttagtcttacatgagggattcgcggatngagttttggttttaattatgctgttacaataatactgtttagttacgcctagtctacatggggatctggga

SEQ ID NO: 9554 - DNA, 332 bp, Glycine max
  unsure at all n locations
agcttcaacattcaatttcgagcatctcgatatgttacgggactgaatcacacatccgagtaaaaagatattgtcgtttgaatttgctcagagcatcaacattcaatttcgagcatctcgatacgtgacgggactgaatcagacattcgagtaaaaagttattgtcgtttgaatttgctcagagcatgaacattcaatntcgagcgtctcgatatattacgggactcaatcaaacatccgagtaaaagatattgtcgtntgaatttgctcacagcatcaacattcaatttcgagcgtctagatatgtgacgggactgaatcagacatccgag

SEQ ID NO: 9555 - DNA, 314 bp, Glycine max
  unsure at all n locations
ntgagccaattaagacgacaatatctttntactcggatgactgattgagtcccgtcatatatcgagacgctcgaaattgaatgttgatgctctgagccaattcaaacgacaataatattttactcggatgtttgattgagtcccgtaatatatcgagacgctcgaaattgaatgttgatgctctgagcacattcaaacgacaataactctttactccgatgtctgattgagtcccgtcacatatcgagacgctcgaaattgaatgttgaagctctcagccaattcaaacgacaacaactttctactcggatgtc

SEQ ID NO: 9556 - DNA, 460 bp, Glycine max
  unsure at all n locations
agcntttgagtgaaaggatgtgactcttcatatttaaatttgaatttcaacgctctagggaactggtgatcgattaccacaacattgtaatcgattacacgcatattgaaaatatttagaacgctgtaaattcagtttgaaaacattttcaaactcattttgctactggtaatcgattaccagagagtaaaaactctttggtaaaggttttgtcaaaaactcatgtgctattcaaagtgttgaaacaaaccttttaatacttatctcgatcgagtcttttcttcattcttgaatcttgagtcttgactcttgatcttaattcttgagatcttgaatcttgaatcttgattcttgtttgaaggctttcttcttgaatcttgaattattcttgattcttgaactcttgacttgttctcgattctctggaaatgttctatgattcacttgagcttgttttcat

SEQ ID NO: 9557 - DNA, 381 bp, Glycine max
  unsure at all n locations
tgggtaagaaaatgatggcatgactnttatccaatcttattatgttgaaaagctattgaagaagtctaattattgtgatgcgaaacatgctcttactccttatgactcatccatcaagttaaagaaaaatttgagtaaatgaatttctttacataaatattctcaaagtatcggttctttgttgcatttgacaaacttctctatgcctgtctgatattgcacatgcagttggtagattggaaagtaattgagggatttagtgatataaaatcgaagttctgattttgatgaaataaaaatgagaagtgcgtatgtctttgctctagctagttgcgcagcatcatgaaaatctactagacaagttattatctcacatgaaag

SEQ ID NO: 9558 - DNA, 450 bp, Glycine max
  unsure at all n locations
agtcttaaaatattaattattttataacattcattacatggaacaaaaaacattacttaatcgagtaaataatataataattaaataaagttctaataatttaaaatatttataattttattctttaaatttagttttagtttagattgcatctttcaattttttgaatctgtacttgagttttttaatttttaattgcaataatatatttattaaaaaaattatattattcattaaataattttaaatatatatctcaaccacttgcaatctctcagtatctcacacagttgtactatataaaanagttaaaatatgcttttcaccatcatataattagagatgtttgacatctatctttgntcttttacagaatctaatatattctctggttcttataaaattacaatattctttttgtctcgaggaagatttgaatattgaatctat

SEQ ID NO: 9559 - DNA, 298 bp, Glycine max
ttgattctatatgtgtgctctaattcaagggcataatgttgtcatcctatgtctaacattgatttccttatgatatattttctttttgtttttttagaagttatcctctctcgagcgcctaacccctaaaactgatttatgcatattttctttagatttttattaagagttaccctctgttgagcatctaacccgtattgtaaagatgagtattgcatgaaatataaataagaaaagacaatacgatagaaaacaccttctacatttataaatatggagtacatcatacatctctttg

SEQ ID NO: 9560 - DNA, 434 bp, Glycine max
  unsure at all n locations
agctntaacatcacaagtaagttccttgctctnttctttgttatttcattgaactttaggatagagaaccttagattaagttttagattnttagggttttaccgttttagaagtagttaacattttaggacttttcacatgttttgcattatatacattgaactgagggttgttcatgtttgatatgcctgttagaggcccggaaaaaagaggaaaacgagctgctttttctgcatttttttctggaaaatgcgatgaactcgctaagcgaagtcatcaatattcattgaatatatgcattntctggaagaactcgctgagcgcgcctaccgcgctaagcgaagttatcttttgaggatgaatattcattctcttaataaagtacctatggctaagcgaggctgattcgctagcccatgtacttagtcaaaatt

SEQ ID NO: 9561 - DNA, 275 bp, Glycine max
  unsure at all n locations
tgcttaactatgtatggcaaaatttcattactggtgttcaagacatacaagtgaacttgtaacaaatcttctacacttggagtgatcacatgtagtcctcttgaacccttaccacccactctgtcatcatgccgagactcangaaggccaacaggtttagccttctctaagtattctgaacaaaattcaatggcttcttctgcaatgtacctctcaacaatagaagcttctggatgatatagaatctttgtatacccttttaaaatctttatgta

SEQ ID NO: 9562 - DNA, 368 bp, Glycine max
  unsure at all n locations
agttttaccagtgggacgttactcttaaagcaaaaatggcatataaccttctcccataaatacaaacatcaatgtaaatttagagcaagcttatgcgcatatttccttacaaacgttctccgaaanaaatgcacccatatacaatcaaggcagcttcgttacctagattatttacacctacttccaggtgtatttgttacttacatcacacacatctncttggctaaattcacatacatgcataccctaagcatttttgggtaccacaaatgcacatgtgcacatcttggtatctctaatacctatacatacacacaactcatgatgaatcttgactatctacacaataggggctacatttcatgctc

SEQ ID NO: 9563 - DNA, 476 bp, Glycine max
  unsure at all n locations
agccttgacacgggtattcatgtttcatctaggccctttgagtgtgtgcattcaaatntatggggactatctagagtgaaaactcatggtggaagctcatactttctcaccatcatagatgatttctcaagaaaagtatggttgtatggtttgaaaaataagtcagaagcttttcaaaaattcagagaatgacatactcttgttggaaatcaacttggtacaaaattaaaagctttaaagactgacaatggcctgtagtntgtttcacagcagttcaatgagttttgcacgaaaataggcatcaaaaggcacaaaacagttcctcacacaccacaacagaatggtttagtagaaagcatgaataggaccattttggaaagagttagatgcatgctactaagtgcacgactgccaaagaacctttggggagaagctgcanatacaacagcatatttgattaatagatgtccttcatc

SEQ ID NO: 9564 - DNA, 395 bp, Glycine max
  unsure at all n locations
tcttatccaaggctcatcttggtggtgaagcttcttcttccatggcttatttccctagtggatggtgcctcttctcacctcttctcctttgtcttccgctgcatctccatggtggaaaatcaccaataaaggacctcattgaagctcaaagatccagcctccatagaagccccacaagcaagcttccatcaagtggtaatcagagcacaagagcttcaagtaggtgctccttaaacctccattaattttttttgctttaccttctcttccattgttgtttcttcatttttttcttcacgtatctnctcatatgtcttgtgctaaattttgttaacatgattctttagagtttccaccgattaaactcgctatagaangtacatttgatcttctat

SEQ ID NO: 9565 - DNA, 463 bp, Glycine max
  unsure at all n locations
agcttatgcgcatatttccctacgaacgttcacttgcacaagacatcctattaactaagaaaaatgcacccatatacaatcaaggtagcttcattacctagattatttacatgtacttccaaagtgtatttgttatttacatcatacacgccatcttgtcaaaatttacacacatgcatactcaaagcatttcggggtaccaaaaattgcacatgcgctcatcttggtatttctaatatctatacatatacaaacttcatgatgaatcttgactacctacgcaataaggtgctacatttcatgctctttttttttttttttttttcaagtttttgctacctaaagccatatgcaaattcaagcatatcttcctttgctgactaaaattgtattcaaattagaaggtatnatattttttgtaatatgtttccttcacataacatgcaacacatctatatatata

SEQ ID NO: 9566 - DNA, 389 bp, Glycine max
  unsure at all n locations
ccttctcttaattgtctntgggcttggcgaccacgatcaacaaagtactttcggcacctactatatgttgacttgaccaacgctgttattggaatgctgcgacaatctttcaacaccttattgacacattctgataggttggttgtcatgtgaccatatcgtcgtccagatgtatcgtaagccatgctccattnttcctttgaaatgcgatcaatccatcttgctatggctggactcagttgacgaacattttctaagttttgatcaaacacatgcttgcaaggagtgtacgctgcatcaaatttgttatcatcaaaagttgtacgtagacatcaaactccaattanattaatgtataaaatcaaccctacccaatttcttgaacatct

SEQ ID NO: 9567 - DNA, 443 bp, Glycine max
agcttgataagtgaaattaggtgcagccatctccctaagagttctctcacgaggtggaggttgagccatgttctcagtatgaaaattagtagtggaatgctcaaaatcagaatattcagaatcaccctcaacagaatgctcagaatgaccaggatgcacactatgcctaactaatctatgaaaggttctatctatttcacgatcaaagggttgtaaatcacctggattgcccctagtcttgcactatatgcagcaaatcatgtatttctcaaacaagcaccaggggtaaaaacggggtaaaactaggggtaaaactacaactatactcaaacgatatccaaatgagctaaaaatttgtgagcaacaccctaaaacatgttgcttcctcttgattcacaagcaagtctcttatcctacgttacgaagaattatcctaaaacatg

SEQ ID NO: 9568 - DNA, 201 bp, Glycine max
ttcttggtggtgatgaacaaaagcgcaaaacggaatcaaaaaatgcgaaaaaggatgaccctatggctgcaaactcgtcaatcccgtgggtatggcttttgaaaggggggaaaagaagtttttgaatgtaaaaacgccccccctttcgtcattcttataattaggtgcacgggtggctcgcccacgcgagctaacctgcac

SEQ ID NO: 9569 - DNA, 297 bp, Glycine max
  unsure at all n locations
ctatacgagacatcttgcctaacaaagtcaggttcacgataactcgcctgtgctttctcttccatgctatatgtagcaaagtgattgatccactaatgtttgatgagttggaaaatgaggccgcaattatactgtgccagttggagatgtattttcccccttacttttttgacatcatgattcacttgattgtgcatttggtcacagaaatcaaatggtgtggtcctgnttatctacagaggatgtacccggctgagcgatacatgaagatcttaatagggatacaaaaatctatat

SEQ ID NO: 9570 - DNA, 397 bp, Glycine max
ctctgacctaatattacatagaacgaataaaatagagatggatattcaatatatagatagaagaaaagaaaacacaatcattttctactttctagtttgtctaccatgctagaaaaatggaattgtttcaatacacatctctcatagaaacaaactaaacttgtcactcattcaatagtaaagacgatacaaagtataatttaattgatgacattgtcatactgttagtacttcaatgtatattattgttgatacgcaaacttgtcatcatgtggttcccaacacctctactatcatcatggagaatacgcctcgagtactaaacattgtgttaatactctgcttgcaatagaataatattgaaatagcattaataatagaaagcttgaatacctat

SEQ ID NO: 9571 - DNA, 392 bp, Glycine max
  unsure at all n locations
agctngagctnttctctcccttttcatttcagaaattcttttatggtatcatagagctttgtttgatccttgtgttgataacaatggcttccgcacaaaanattcaatctcctcctccatcgtcaatttcattaactctggtagaagattcttcaattcctgtgactagaacattaactccagtgatggagttttcaacagcagttcctcaaccgtttctgatgatggttcctcagcctcagccgtgttcgacgatgactctataggttgtgacaccacttcaggcattctgtattccaaccagcaattccggcaactgtgacttctttgtcttctcagccttcctctatctcgcatgcgatctctgcgaaattacaacatcaactacttgt

SEQ ID NO: 9572 - DNA, 536 bp, Glycine max
  unsure at all n locations
cgcacgcgggattgagnccatcgattttgccgagccattctatntacgcgacactatagaatactgcagctctctttacacaaagaacagagaacaatgatttgatgaacaaatacaagtagtgcggatgtctacttcacctctataacctcacaatcgctcacagactgctctcatgctctcaggatgaccttctcttcacgctctgttctgtgtgaggctacacacaacctaagctgtcataactctttggaacttggagctttctttatctcgtaaattctgaacatgcaaaacgcctgagaattgcctagctctagaacttcgagaataccatgaccatacatgccctccattccgtagttccctcgactcgctatccgcgcaccggccttataatctctaccgcgaattaatcatggcaaagaacctcttcccgggtggcttgacaccacctgttctctcttgagnnacancgcgatgcaatcctgcgtcttgtcgacccgacacatgatacgtggggagttgccctnacg

SEQ ID NO: 9573 - DNA, 429 bp, Glycine max
acttacgtcaacatttgtgctgagaggagttggcctactgacatttgaggtacattgacgggcggagataccctagtggatattcgtataaacattctttgttgctgcctgtcaaacgaagagactgatatcttgctgagactaaccttgaatggtgcgctcttcgtcaagagcggccggctagccctttgatccaccgacatttatgttgtttttcttgcacacaatattttgatatactaacatatcactcatgcgtaaagccgggaataacctggtggatatccccataaactattcttttttctgtctgttagacgaaatgtctgatacacgcctaactaacgtgttctctggccctcatgaacggttcgacaagccactgaaacggtgattacctcgtttttcgctcacacattgtctactacg

SEQ ID NO: 9574 - DNA, 202 bp, Glycine max
ctcaaatatatggggcaactttgatttgttatcttgcttgattaagttgaattgggggtttgtattagatggacctacgcctattatgcattctgaaacaataggacatgccacatttgtcccgctctcttgctattgatgcctaaacgcgcgcccaccaaatgttctgtgaaatgcctcaatggcattagcgtgtgacttt

SEQ ID NO: 9575 - DNA, 430 bp, Glycine max
  unsure at all n locations
tactattcgaactctactacttgcctgaccttatacaaagaagaagaatttacggttcttggtcaaacccacactagtttctccgtgtgtgtgtgtgtatacggattggttgattaacgatatgaattgtatttacaagattacatgacaaaaaatcaactacttaacagttaaacaccacggagacattaattatctgacaggcaccatatgaacaatcgaaatgacaagtatcatatacattttttttaaaaattcatgaactcctgtttaaacgacagcaatataaactgtactggggtgaatatgccatanaaacagtacactcttaaagatgcttttattgnaaaataactttacaatgttgtttatacgtaaagggttttggcttcaaaatggttttaactcctataaatgagcgataattgat

SEQ ID NO: 9576 - DNA, 299 bp, Glycine max
  unsure at all n locations
ctgatattgtagtgagtagtaaagttcactcacttagcttaagttntatcgcctttaacacacacacatatatatatatacacaatacaaggcttgatgagaagacagcttgatgggacattacaatgctgtcttctgaaacaagctaaacacgaaatagaagcatgcatgtctacacataatttaacaagactcactgcaaaacataaatttattactgagcaagccacaaaatcagatatttattagtataaacaacatatttaagcccataattcttatctattttttgctcctct

SEQ ID NO: 9577 - DNA, 398 bp, Glycine max
  unsure at all n locations
atattctttttattttatgaatttaattagaatacagtaacttcataaatgttttggaaatggttgatttatataataattactttaaacactatatttataataatctttaattcattaataatgtaaaaatattaaactcactatatatcaaaatttacataaatcttatataataataaaaatattaaaaaagaatatattatatacatgtaacattctgttggattctaacacattcctcatataaagaaggtcaaaaaagaaagtcttctctctctctctctctcttttttcttaccagaggaattgttctcttttttgctatgtatgaaggtacgaaactaccgtacaaggaaaccgngtaccgtatacgcagatgatcacgtgataaatat

SEQ ID NO: 9578 - DNA, 362 bp, Glycine max
  unsure at all n locations
tactaagcttatgctnttaactttagattgtgagttctaaataatagaanaatataatcatctacacgaaaaaaagaagatattttacaatatgttatgcattctgtaaaaaaaaaacatggtatgcaaattaattaacttaaaatagccagttttattacttatcattaggattgtaattggatctagttaagtgggagttatcgaagcttaagatagcttagttaatttgtgaaataattctcttttaaacgttgagttaatttatttagacctaaatactctttgatctcttaaatttgagctaacgttggtgttgacccctctaaaatattttcttaagccaataatttgaattacct

SEQ ID NO: 9579 - DNA, 305 bp, Glycine max
  unsure at all n locations
tgtatttgatctcctttnggtgctctaaattgtgggaatgtgctcaaatatatggcggcaatttggtttgttttcttgcttgattaagttgaattacgggtttgtatgggatggccctacgcctataatgcattntgaaacaatgggacatgccacattgtccccgttctcttgctattgttacctaaacgcgtgcccaccaagtgttcggtgaaatgcctcaatgacattagcgcgtgacttttgtaaggaaacaacccatgggggcattttgtttgtacatattttctttnttttgggacatg

SEQ ID NO: 9580 - DNA, 377 bp, Glycine max
tctaaagagaaacgttgttgctatatatgaaaaaaaaatgttaacaataacaatgatataataatatgatactgcaggtgagaatgagagaaaaggggtgcaatgcaatgttgaaaggcacaatgctgaatgcctgcaactctgcaaggaaactcaacacgtctgaatttgaaaattaaactccttgtccttacgtgtgacgctttgtttggtcggtgcagatattaatggattattactcttttctaacccgcatctctccaaattatccaattttaaccattttttttatttaatcaaatccgaagtccaaatccaagaaattttcaccccaagatataaaaaaattactcaaatactacccgctaaaaattatt

SEQ ID NO: 9581 - DNA, 428 bp, Glycine max
  unsure at all n locations
agcttagcatcattagttctaatgggcatgacttccacccattntgaaacataatcaactgctaggagaatgttaacataaccaaaagagacaggaaaatggcccatgaaatctatgccccagacatcaaacacctcatagaatagcataggttgctgaggcatttgttgtcgccatgtaagtgcacttcctgctctctgacactgctcacaagtgctacaaatcttccacacatctttaaagatggtgggccaataaaagccacagtcaagcactttgcgagctgtcctttgaacttccagtgcggaagaatggcanaactgcaggactgagtcagtctcatgatctgggatgcatcgtctaatgacctgatcactgcacaatttccacaagtaggcgtcatcccaaataaaatgcttagcatcact

SEQ ID NO: 9582 - DNA, 327 bp, Glycine max
agagggatgcttcatggagaaaagaaagagagagagaaagatagacgggagagcatgtaatcgaaggagtaaaagagggaaagaagttgaactctgagttgtgtctcacaagactcttattcatcaaagttacaacaagtgttacacatgcttctatttatagcctaggtagcttccttgagaagcttctttgagaagcttccttgagaagcttctttgagaagcttccttgagaagctaaagcttagctacacacacccttcaaataactaagctcacctccttgagacacttctttgagaaacttccttgagaagaatcctagag

SEQ ID NO: 9583 - DNA, 461 bp, Glycine max
agcttcttgaggaagctacatgaagctaccttggtaaaaatgttgcctagccttcgttaaccgttggatcttctcgaaattatgtctgtagcttcacaagacacttgtccacgatctaaccgttgggatcgttgagaagatgtctggagtgtgctcgaagcttccgttctcgagagcatttcttatttaagcatttcagcctttgctttcgtgtagcttaagaaaaacgccatttcttctcctttctttcttgcaaagtcatgtctaacgtcccaagcactttctccatcacccacagccaccattagccaccacaaaccatcgttgtctccattgaaaccccacaccgagaggaacccttcaaccgaagcggaatcttccaactgggctcgcggtttcggtagagaacgaaaccctagtctgacctttcatttttcttcgaggaaaccaatgttctacac

SEQ ID NO: 9584 - DNA, 455 bp, Glycine max
  unsure at all n locations
tcatgaagttatgtcagctaatggtcacactaaataggtatatntatctactttatctcatttaccaccctatgggaaatgatttttagtaggaagtttatttgcaataatagtatttattcctaatcatctctggtattttctcttatctgatgattggttgcaatttgcaaatttattcatactgcttttgtatcaaattaatttggcaggaaatagcacaactcagatagttctcatgaaatttctccaaaagattaaattgtaacttgttttcaccattntgattaataattatgctactggagttgatgtttgttatttcatttctttatggggaagtttctctatctaaatcttaaattaatctttcacctctttgtgttgttgagtggatgtcaaaagcttgagttttttttttntttaaatgaatcacagtcccactactactgttc

SEQ ID NO: 9585 - DNA, 337 bp, Glycine max
  unsure at all n locations
gtcacctgccgcatgcaagctatggaagctcctgtcttagctttacccgattttactcaaccatnttatgttgaatgtgatgctagtggagttggcatcgtggctgttttgatacaaaacaaaaggcctatagcttatttctcggagaaattgggaggagccagattgaactattgcacctatgacaatgagttctatgccattgtgagagctcttgatcattggaatcattatttgcgttctaatcactctatatggcattcagatcaatagtcatagaagataataatgggcaccaaagttattccaagcttgctaatgggtgaattcttcaatc

SEQ ID NO: 9586 - DNA, 131 bp, Glycine max
  unsure at all n locations
cttacaacaacaagccccaagagactcggcatagcggtgcacaaaccaaagttgcgtatgtaaaanaattggctgatcaactgacggtgcaaattgcaaacaacaatgaaagctatgccgatcgagcccac

SEQ ID NO: 9587 - DNA, 466 bp, Glycine max
  unsure at all n locations
agcttcttttctgganaattccttccctagttnggtgtttggtttgtgttaagggtggtgtttggtattggatatgcagcaaacaggctttgtggctgatttaggggtggcctttgtggatgattaggtgttcttggctgataaggtggtgggtaacgaacagggatgatattggctaagtatttatattgttgagctggtgggaaatttggccatgtaggaacgacagtcacaacatgggttcctcattcccttttattctctccatttgccctaggcttcctattcatcaaagcaggataatcaaatttgtctcttctcagacccacttcaatcctttcactggcaaaaactaaatctgcaaaagcttgaagccatgtaacccatcatcttctcatagtagaacattggtaacgtgtctactatcatatgtatcatctccctcttcatcatttggggtactact

SEQ ID NO: 9588 - DNA, 282 bp, Glycine max
  unsure at all n locations
tctggtgatgaagctncttcttccatggcttatttcctagtggatgacgcctcctctcacctcttctcctttgtcttccgctgcatctccatggtggaaaatcaccattaaaggacctcattgaagctcaaagatccagcctccatagaagccccacaaccaagcttccatcaacgtgattgtcccggaccatggtataatttttcacacaagttgaatgaataaattaagattttcttattaattaatataatatggttatatatattaaaagtttgcaaa

SEQ ID NO: 9589 - DNA, 215 bp, Glycine max
  unsure at all n locations
tgtgagtccctcatgcttgatccttacacaagaagggggatccctcctcctcttgttagcacctctaaatcactctacaactcactattctctctctaattgaagaatcctaggnttctctgcaaagctgctcctcttgccgtcttcagagctgctatctccaaattagcactatggcgtacttgctctggaattctgtactggttgctaaaatt

SEQ ID NO: 9590 - DNA, 454 bp, Glycine max
  unsure at all n locations
agcttntacacccgcattacaccctcattttctccctctgtggcaacatcaaatagccaaagtacatgggaatcaaaacagatataataatgaagtggacaaagatcaattataaattataagtcataaccaaccaacaacataaacaagacataaccaaaataaaatccaatcagttcaaaaatttaaaaacacatagtatcaaaacatcaaagtctaaaatccaaatactaaaagaaaaattaagtactgaaaactataatctaaatatcatagccaaaatacacggcttatatgaaacatagaattataaactaaagtctacgaatgtggaggtggtggtggaagatctaaactctgacgaatgtaacccacatcttcttcatgctgtgtgagacggatatccattcgggcaaagcgagtatccaacgagtctaaacgttcaccaacataa

SEQ ID NO: 9591 - DNA, 336 bp, Glycine max
atcagtgttttgagagatgctcttttatccagtccatgcaaaaatatctgaggtcattcggtatttgcgaaagtccttcatatctttcattctcaatgtttccaacaaaaatcctctagttgtgttctaatccgactataagtttcacaaaatactggttgtcgattcttttcatagcctcttatgttcaacaaatattttctgacttagtaccaacaagaggtgtaaactataagtatactaagctaatatcacagcacatgcttattactccaaatacactcgtgtaagtaaataaggtaatgacgcactgaattttaatacaaagcgatcaac

SEQ ID NO: 9592 - DNA, 421 bp, Glycine max
  unsure at all n locations
agcttagaaagtccttcggattcattntgtgtgtttatttctgaatggtatgagatgaaatgcaaaggttaggacttgtgttagttgtttataatggaatgagcctaaacacttgagcttgagtgaaacaatgactataaggctttggtcaatgatccttccttgatatctatcactctcactagcttatttcaattgtgactctaatgcatatgttcctatcttttgaaaagttgcatgtttgtgaaaagcaattgatcgaagcattctatgctactcatttcatatgattgaatttttctatgaaacaaacacgttttggattgaccactcgtattggtcacttgaggacaagtgaactgtgcttgaggacatgcaaaactttaaatntgggggagtttgttagtcgtcttataccact

SEQ ID NO: 9593 - DNA, 345 bp, Glycine max
  unsure at all n locations
tataagaacannaatgcctaaatcatttccaaatatgcatgtgaattatgaagtatcaacaagaatcaagccaaggctattgtgcaagcaatcaatggggcaaaacacaccaaaagattatgatgatggatgactcaaattctcacaaaggtaaacttatcactttcaaattgagctttcaaaactatcatgacatgtagaggaaaaacaaggatttcaaatcacaaaatgtcaagagacttttattttcagaacaattacccatttcttgaacatatcctataattcaaagaanaatatgcaaagttgtacatgcaaacataattgacctaaaatattaaacta

SEQ ID NO: 9594 - DNA, 434 bp, Glycine max
  unsure at all n locations
agcttgtataanatatcatcaacacgagaacccttgtaggagtttgtgagcatgtctgccaattgatctttggagccgacaaaatcaatggtgatttctcctgagagtaccttctattgaacaaagtgaccatcaatctctatgtgtttaacctgctcatgaaagactgtgtttgaagcaatgtggagagcaacttcattttcacataatagtgtggtattctaaatgtctccaaattttatctattggagaagttgtgtaagccatgtgatctcgcatgcagcagctgccatgacacaatactcgacttcggcattggatcttacaacggttttctgctccttgcttctccatgagatcaagttccctccaataacgacataatatctagaagtagaccttctatctaatggtgatccttgccaatcagcatc

SEQ ID NO: 9595 - DNA, 323 bp, Glycine max
gatgatcaccaaagatgatgaccaaggtgaggacaaaaagctccagggtccatcaagaatgagttcccgatattccagatagaatcagaacacttcacgattcacgaggaaagttgattttcagaaatcagattccagattttcagaatcaagattcaagagatcaagattcaagactccagattccagaatcaagagaagacttaatccagataagtatgaaaaggttttctcaaaaattgagtagcacatgcgatcttcttcaaaacatgtttaccacagagttttactctctggtatcgatactagattgtggaatcgat

SEQ ID NO: 9596 - DNA, 204 bp, Glycine max
agctatttggagtaaaaacatgggaccaactcattttatttcacaaaaaaggttgtatctagtcaaggtctgagagaccatacaagtttcctagcgatttctaaatatgtgggccattaagtctatcatatgttgacaatagccgagaagcccatgaatctcttcgggggcggagtaggtgtccgccatcgccttggccttggc

SEQ ID NO: 9597 - DNA, 345 bp, Glycine max
  unsure at all n locations
tgcctcacagagatctatgaaggataaagcggctgaaggaaccagttccgctcccgaatatgacagccaccgttntaggagtgctgagcaccaacagcgctacgaggccatcaagggatggtcattccttcgggagcgacaagtccagcttatggacgacgagtataccgacttccaggaggagatagttcgccggcggtgggcatcactggttacccccatggccaagttcgacccagacatagtcctccgaatttatgctaatgcttggcctacagaggagggcgtgcgagatatgcgatcttgggtgaggggtcagtggatcccgtcgatgcggatgctctc

SEQ ID NO: 9598 - DNA, 343 bp, Glycine max
  unsure at all n locations
agcttaaacattatactntgagcgtctcgatatattacgggactcaatcagacatccgagtaaaaagttattggcgtntgaattggctcagaggttcaaaattcaatttcgagcgtctcgatatatttcgggactcaatcagacatccgagtaaagagttattgtcgtttgagttggctcagaggttcaacattcaatttcgagcgtcccgatatattacgtcactgaatcagacatccgagtaaaaagttatngctcgttgaattggctctgagctccaacattcaatttcgagcgtctcgatatattactggactcaatcagacatccgagataaaaagta

SEQ ID NO: 9599 - DNA, 346 bp, Glycine max
ttactcggatgtctgattgagtcccgtaatatatcgagacgctcgaagttgaatgttgaatctctgagccaattcatacgacaataactttttactcggatgtctgattgagttccgtaatatatcgagacgctcgaaattgaatgttgaacctctgagccaattctaacgacaataacattttactcggatgtctgattgagtctcgtaatatatcgagacgctcgacattgaatgttgaacctctgagcctattcaaacgacaataactgtttactcggatgtccgattgagtcgcgtaatatatctagacgctcgaaattgaatgttgaacctctgagccaac

SEQ ID NO: 9600 - DNA, 240 bp, Glycine max
  unsure at all n locations
agcttaaacattatactntgagcgtctcgatatattacgggactcaatcagacatccgagtaaaaagttattggcgtatgaattggctcaaaggttcaaaattcaatttcgagcgtctcgatatatttcgggactcaatcagacatccgagtaaagagttattgtcgtttgagttggctcacaggttcaacattcaatttccagcgtcccgatatattacgtcactgaatcggacattcg

SEQ ID NO: 9601 - DNA, 397 bp, Glycine max
  unsure at all n locations
catacgacaataactnnttactcggatgtctgattgagtcccgtaatatatcgagacgctcgaagttgaatgttgaatctttgagccaattcatacgacaataactttttactcggatgtctgattgagtcccgtaatatatcgagacgctcgaaattgaatgttgaagctatgagccaattctaacgataataactttttactcggatgtccgattgagtctcgtaatatatcgagacgctcgaaattgaatgttgaagctctgagcctattcaaacgacaataactttttactcggatgtctgattgagtgccgtaatatattgagacgctcgacattgaatgttgaacctctgagccaattcatacgacaataactctttactcggatgtctga

SEQ ID NO: 9602 - DNA, 403 bp, Glycine max
  unsure at all n locations
agctctagaatntatcttttataacgaatntagaagtaacaattgttgattaaaggtggaagattgaaattataataagttacatctattttttaaaaaaaaaatataattccacttttttcattgactagaagtaacacttattaatagagaaaaaaaagcacccatagtataaaaaaaattcattgtcttttaatgacaaacacatcatttaataaaaagttataattccattttttcatagggcaaccttttatttcgtgatgtggtttggtgaatggaaaggacttatgcaccaaaatatagattaagaaccctaagagaagtaatagtaattatgttctcaaaaagggagtagcaagaatagtgagagtacaagagaagaattgaaaagggatatgaa

SEQ ID NO: 9603 - DNA, 441 bp, Glycine max
ctatgattctctattcttctgaacaagctcctcttttttcttctctttcgttttcacttaaaaacacttcctgagtttgagattctgtgactacgcgctgagcgcaagtaaatggttggacgctaagcgatccatgtgcgctaagcgctccttcacctgactgcaggttctttatgctgcttcttcatgctaagcaaaaaccctctcgctaagtgacaatagcccgctaagcgagcttggcgcgctgagcgcgatccatcatacttcaacttctctctctattatatatttgtaaaataaaaatcatcaaaacagtatgaattagcaatttaggacacctactacacaaaaattcaaaggatgtcaaaattctaatgaattacaccataacaagcaatagaatgaaagaatgttgttaattcttatatgctctaattacat

SEQ ID NO: 9604 - DNA, 479 bp, Glycine max
agctcggaaactaaattaataagttaattatttttatatacatgagaatcatgtaaaagaatttacatcaatgagacatgacatgaaaatgagtcaaataaacatatacattaaaagatgtgttaatctattatacttttatatattcattttttaattcatttttatttaaaatattaatatgtgagtcttacacactttttaaaactaaaatagatatttatctataaataagtggacaaaattaataatgagcgatatctttttgttaaattataatatattgctataatgtagttgtaatgtcagacatgtataaaaagatactccatatgtctttatctattaagtccaattacctaattaacaataaatgacaagaataattaatctaattaataataataaatttgtgttccaataaacaaaaggtatagacttatcctcaacctagatatatatatatctatatatatatc

SEQ ID NO: 9605 - DNA, 320 bp, Glycine max
tgtctatcgaaatctttcgttcttcgcttctaatatctattagaaataatattaaatgcggccgagcatatatatactcttcatcgatcgtccggatatttccatgcagttgaatatgatgaataaccattatcactgcaactaacggtttaattgattctatttagccttttatatattgcaattaacattaacatactaatacacatttatacactctaaagtaatgggttttcttaaactacaagtattgttagatcttgcacaataaccagcatttgaataagatgtatgaatattataaatattttgatatcata

SEQ ID NO: 9606 - DNA, 387 bp, Glycine max
  unsure at all n locations
taatcagacaatcctactatgctaaatatatgcctntaacacactgttaagagattcacaactgaccatgtgctagtgagggactagaaagaacttttggagcatttcttaagtttccatttgattcatgcaggttgataggcaattagccaaataagttagcttacttattactctttttggcttttgataaaggtggacaaacgactgatatgaggtacctgatgaggctttgacttcttgtatgtcatggtcctttgatggattctctttggaacatatatttgttgaagcacttttcatattaaatggggagcatgagatcatagttcaactctgcagatttgatttctcataatcttattctccctttatatatttgttaca

SEQ ID NO: 9607 - DNA, 221 bp, Glycine max
  unsure at all n locations
taccctgatgaggatgtcccatatgttcttaanactggactgattcatttgcttccaaagattcatggccttgcaggtgaagacccgcacaaacatttgaaagaatttcacattgtctgctccaccatgaaacccccagatgtccaagaagatcacatatttctgaacgctttttctcattcattaaagggagtggcataggactggctgtattaccttgc

SEQ ID NO: 9608 - DNA, 393 bp, Glycine max
atctatgaacatcacacaataaaccccaatttgatactctaaggatccctacacatgttcattttaacccaaattgcaataaactcatcccttatctctaagcgggctcacgggtgcagctggcagggatatcaacgtctctagtggttccctaagatttctgaaatttttcctctgtttgctttgttagggtttccaagtgttagagagaaggagaagaaattggagcctccaattcactgtatatgttcaatgagaatttctccctccatagacattactttacaaatcccaacactagacatgtgtagagattagttccaaaggtggtgtccaaatttcactatgattcaacagttaacaaagcccgggatcgtagttttcttgggattg

SEQ ID NO: 9609 - DNA, 460 bp, Glycine max
  unsure at all n locations
agcttctagtcaaatagacttaccttgaattaattcctttgatagcccctttgagcctattttcccctttctttgttttgaagctcattacaagccttaagtgaaaaaccatgatatcaccttacccttaagaaattttggagctttggaattgttttgggaataagctgggaataagtgtgggggggtatgtttcattggaagatatgatttttggccatgcttaatgttctattttggccatgcttgatgtntatatatattgcctagctctttctttaatcttcaattccgtactggtcaataaaaaaaatcaaaaaaaatgaaataataaaaaaaaatcaaaacaaaattcagttgctgcaaattctgcaatttcgtactattcaaaacaaanaagaagaatnaaagaagtgaagttgaataaataagttctcgatatgagaacttgatttgggag

SEQ ID NO: 9610 - DNA, 403 bp, Glycine max
  unsure at all n locations
tgccttggttaacctggttacctaactgactatgaatcaaaaatctgcacctgttgttagactctgtggtttatgctcctttgctgaccactacacagacctttgcccttctgtgcagcaatctgaagcaattgaacaacctgaagcttatgctgcaaacatctataatagacctcctcaacctcagcagcaaaatcagccacaacaaaacaattatgacctctccagcaacaggtacaagcccaggtggaggaatcatcccaaccttaatggtcgaatccttcacaacagcagcaacaacaacaacaaccttattttcaaaatgctgctggcccaagcagaccttacgnttcttcaccaatccagcaacaacaacaacaacaacaacaaccctagaaacaac

SEQ ID NO: 9611 - DNA, 411 bp, Glycine max
  unsure at all n locations
agctattggtactgttatntgaggatgacattcttctttcgaaggttctttatctcttgggtgatcttctgttttaatgcatccatctccctttgcagggcaatgatcaacacatgattgttangcatgtgatgttggaggtccaccatggttgcgggtctcccattttttagggtccctatggtaggcattccaattatgatggatgcctatcaccgcgatggtctttctgggttggctgtgggggtcttatcaccatttgtggccattgacggtggttgaaggagaagtnttccctcaccccatagtgggcgccaaatgttcttaccagaattgtcagaactttctcacagtgatggtcttccatgagctcctgcacaaacaatggtggggtgtacatgcaataacact

SEQ ID NO: 9612 - DNA, 322 bp, Glycine max
cgatgaggacttcagtcagaagagaagaagagacatcatgttgctgtggtggagacgatgtacgctcatcgggaatatgaggcgatatgtcttgattgcgcacccagtgaccgtccatgtcttttctgtaaccaaaagatgtaacagtaccagcaccaatagagaaagaacgtttaactttggcaaaaggttcatcatccaaggggacattgaaatgctggagaaataacgtaacaagatatggatatggcagaggtgcattggcccgtaatgccttatgcatttggtactgaacaagatgagcccagtcgatctgataacc

SEQ ID NO: 9613 - DNA, 433 bp, Glycine max
  unsure at all n locations
agctattaatttaaatgaaataatatgaatattttgacttaaaaaaaaggaagtctaatacagtatgcaatattagtatttgaatgtgaaaaaatgaaatgtggagccatgcatgtttaatggaaaatttaaaatgtactatcaaaatatatttacaactntaatttttattgtaattataatgtttgaaaatatatcttgtccctatattttacctcaattttggttttagtttagactttaaaaaacttgatttatttccttaatattagtgatagacgaagaaattaatcttacattataaatataatactcatatacataaatttgtggagacaatatttatactaattatagattttnttatattacattttagacaatgaaaacatacgtacatgcacacgaagcttgaacaaaatgagatcacttg

SEQ ID NO: 9614 - DNA, 398 bp, Glycine max
  unsure at all n locations
tatactactagcaaatgtgttgaaattggaggacagagtacatttaattcataattatttactagaagagatgaaagtacagttccctagggatcaaaaaatcgtaccggattggtgttccacatttaattcttagtcggggctgttttgagactctaatatgaactattgaacttgtatgtgcgtgtaatttagtcggagccctttttaaagaaattgtagtcatggcaagttttatttgacccattaattatttattaaatcattacttttactggcattaatgatatagtggagtatctatctatttgttttagcttcatattatagattgtaagatgtacgaaatttcgatntcaaagccacgaaccacacctgaatatatggaatgtctactg

SEQ ID NO: 9615 - DNA, 397 bp, Glycine max
  unsure at all n locations
agcttgtcaaggaagttttcttaagaaagtntctcaaggaagctacctagtctataaatagaagcatgtgtaacacttgttgtaactttgatgaatgacagtcttgtgagatatatttcaaaatttcacttctctacctcttttattccttcaatttcgtgctcccccctctctctttctctccctctttcttttcctccattgaagcatcctctccaaacttcttatccaaggctcaacatggtggtgaagctccttcttccatggcttattccctagtggatggtgcctcctctcacctcttctcctttgtcttccgctgcatctccatggtggaaaatcaccattaaaggacctcattgaagctcaaagatctagcctccatagaagcccccac

SEQ ID NO: 9616 - DNA, 392 bp, Glycine max
tttgcatgtttagagatttctagagagagaaaggtccaagttccagagagttttgagagctcttgctagacgaagattggcagagaactgagagtgaagaggaagccatcgtgagagcatgagatgagtctgtgagtgattgtgaggttctacaggtggaggagacatccccactatgtatgtcttcaatccttcatttttctcttctctttgttgtaaaggaagctcccacatatggagagtttaatcctctggtggttcttccttgtacgtacttgatgtaaatacctgcatatctatttaatgatattttatgtattctatttgctatcagtatgtcatttcagtgtgctcttgccttgatcatatagatgcatgctttgttaggatca

SEQ ID NO: 9617 - DNA, 391 bp, Glycine max
ctcgacccgggatccttaagcacctgcggctgcagcttaacattcaatttctagcgtctctatatatttcaagactcaatcagacattcgtgtaaagagttattgtcgtttgaagttgctcaaatcttcagtattcaatttcgagcatctggatatattacatgactcaatccgacatccgagttaaaagttattgtcgtttgactttgctcagaactttaacattcaatttcgagcgtctgtatatattacgggactcaatcacacatccgagtaaaaagttattgtccgtttgaatttgctgagagctctaacattcaattctgagcgtctcgatatgttacatgactcaatctgacatctcgagaaaaagttattgtcgttttaattt

SEQ ID NO: 9618 - DNA, 386 bp, Glycine max
  unsure at all n locations
ctgagcanattcaaacgacaatancctttgactcggatgtcggattgagtcacgtaatatctcgagacactcggaattgaataccgaagctatgagcaaattcaatcgacaataaatctttactcggatgtccgattgagtcacgtaatatatcgagacgctcgaaattgaataccgaagctctgagcaaattcaaacgacaataactttttactcggatgtccgattgagtcccgtaatatatcgagacgctcgaaatggaataccgaagctctgagcaaattgaaacgacaataaatctttactcggatgtcggattgagtcacgtaatatgtcgagacgctcgaaattgaataccggagctctgagcaaattcacacgacaat

SEQ ID NO: 9619 - DNA, 221 bp, Glycine max
  unsure at all n locations
ccttacgcatctgtgcggtatttcacaccgcatatggtgcactctcagtacaatctgctctgatgccgcatatgtaagccagncccgacacccgtcaacacccgctgacgcgaaccccttgcggttgttgtccttataacttggaatcacgcctgcctacgagactttcactctgtgcgcccggctccccttcggtaaccccatgaaccaaaagcccagct

SEQ ID NO: 9620 - DNA, 383 bp, Glycine max
  unsure at all n locations
agcttgcatgtctagtgattctagagagagaaaggtccaagttcaagagagttttgagagatnttgctgtgtgaaggtctgcagagaccatagcttgaagaggaagccgtctgagagcttgagatgagtttgtgagtgtgtgacaacctacccttcggcgggagggcgacgtggggctcacgggtgcatcttccgtgggaggaaaatgcgcggagtcgccaccaacgtttattcaggaaaacgtcggaaaaataggagaggtgtgatctacgaactntaatcgtgaaaggttcgggagttgtttttacgcacggggaaggtattagcaccccacgcgttcgtcaccaaggacgacaacctttaatcaaatgtgcaaatatgac

SEQ ID NO: 9621 - DNA, 372 bp, Glycine max
  unsure at all n locations
tcgattatgatcaacctgtaatcaattaatataaagagctntagctatagaaacttttttctaactttagaacttttcttttaactcctgtatgatgatgcatgatgcatatatgaaatgatatagactaagatgcaacacacaatacaacaatcaatacaaatgccactcaagagagttgggcatgtaaaagaaaaaactttttgtagctcttcttgaagcttcaaggctaagtcttcatgtcgctcccgctatctctaatagtaacctttggaaagaagccaacaactagaatgattgctgtcacgttcattgtagtaaagttctcattggcctataaagccatattggcataccatctttgaacacatt

SEQ ID NO: 9622 - DNA, 475 bp, Glycine max
  unsure at all n locations
agctntngtaaattagatggccatacctcttgtgccatagccaagtttcaatntctgtggtggactacatacacttctgatcactaatctgaatttcaattctaaatgttctgttggccgagagtggagattttaggacactcttcttgtctttatcaaaaactttcagcatgttgtccttcatctccattgtataacccttttcaagcaattgtccaaggctgagtaaattgcttttcatcttgggagcatacaagacatttgagatgcaggctttctttccatcttttctttgaatcatcacgctccctatcccttctgctgtaattgagctgtgatctgcgaatttcactatgcttttggaagtctcatcaagtgttgtgaaccactctcttctccctgacatatggttngagcaaccagtgtctaggtaccagaaaatagcacactgaagaatcatttttgtggaaccatc

SEQ ID NO: 9623 - DNA, 432 bp, Glycine max
  unsure at all n locations
ctgccgatntagttnttcccggcaaaaggatcgtagtgggtctgaaaagaagaaaacttgattatcctgctttaatgaatgggaagcctgnggaaaatggagagaataagaaggagggaggaacccatgttgtgatagtcgttctcacatagccaaatttcccaccagctcaacaatgtcaatacttagccaatatcaacccttctcattatccaccatcctatcaaccaagaacacccaatcatcaataaaggccacccctaaattagccacagaacccgcttgctgcacatctgatactagacaccacccttaacatgaaccaaaacactaaccagggaaggaagtttcaacaaagaagcctgtagaattaccccaattaggtgtcgatgctaacttactccatttactaataatgcatggttgcataat

SEQ ID NO: 9624 - DNA, 476 bp, Glycine max
  unsure at all n locations
agctngcactgcccaaagtggacaaccttccagaatacgttgaagccaccattgatgtcccttatgatgtcgttcagtatctcaaaaaagcctacgatgatttggaagaacccttgacctgttttctcaaatcttccaaagttgattggcatttctatgacccatatatgttacagttaccaaaaaggttcaaagagaaaaccaaatggtgtggaatagtaagccccggttgggcaccatagttgaaggtattgagccacaacgcagttggtggggttttgactcactctggttggacctctgtggtggaggttgtttataatgaaaaacctctagttttgttaatgtttcttgcagaccacggattgaactcgagggtgttggaagtgaagaagatggtgtattcaattcctaaggatgaacaagatggatcattcacgagtgatgcggtcgctaacttaataccgttggtatgg

SEQ ID NO: 9625 - DNA, 369 bp, Glycine max
  unsure at all n locations
tctcggctcatgcggngaacgcctctagttcaacacccgtgcagcctaaggcacccacccagagggaagctccccaagttccaactccgaacacgactcgaccggccggtaattccaacacgacaaggaacttccctccgaggccattgccggaattcaccccgctcccaatgacgtacgaagatcttctaccatccctcatcgccaatcatttggccgtggtaactcccggaagggtcctcgaaccccctttcccgaagtggtatgaccctaatgcaacttgcaagtaccatgggggtgtcccggggcattccgtcgaaaaatacttggcccttaaatacaaggtccaacatttaatggatgccggat

SEQ ID NO: 9626 - DNA, 471 bp, Glycine max
  unsure at all n locations
agctctacaagcncactttatatcctttattgaaatgggaaatgcgagatttcttgaggaagttgagtttgggaaggaagagaacataacacatgttgtctttgatgaagaacctgtttttggcactgctcaagtccaaatacctattactgttcaagaaataactccagttatcgaaaatgatgttctgattattgttgatgacatttttcaagaacaagataacaatgaggtgctgccttgaatatctataccacacacctcgataagtgccatttaggagatctgttatagagaggagaagctcactcctagatgattatattatctctctccaagaacattaggatgccattggtttatcacaggatgatgcaatcaacttctgttcagctatgcataactctaactctcataatcgggtctatgccatgaatgatgagatgaaattctatgttaataatgatgttt

SEQ ID NO: 9627 - DNA, 379 bp, Glycine max
cgcttgtagggcttctatggaggctggatctttgagcttcaatgaggtcctttaattgtgattttccaccatggagatgtagcggaagacaaaggagaagaggtgagaggaggcgccatccactatggaatatgccatggaagaacgagcttcaccaccaatatgagccttggataagaagcttggaaggatgcttcaatggaggaaaagacagacggagagaaagagagatgggggagcacgaaattgatcgaataaaacaggtagagaagtggaactttgaagtatgtctcacaagactctcattcatcaaagttacaataagtgttacacatgctcttatttatagactaagtagcttccttgagaagctctcttg

SEQ ID NO: 9628 - DNA, 509 bp, Glycine max
  unsure at all n locations
cagatatgaaaccttgagttcgagcctcttagacccgcgatcctcatagtcaactgctgcatgtcagcttcaagcattnagaatgttattcttgactcaatattccagaatcatgagaagacttaatcacgatattattaattcttttttcaaaaccgaatagcacatagatattatttcatacattgtgttcacaagagtctttactctctgggaatcgcataccaaattcgtgtgatcgatcaccagtagcaaaatgcttttgaaaacgtctcaccttgaattaccaacttttaattgatttcagatcgctgtgatctattacattgtattgggaatcgataaccagtgtgcttgaacgttgaaaatgaaattcaacgtgaagagcacattcttcacaaaaaagctatgcggatcgatacactgatcggaatccttatctataccagtgatgttctgacaaataaaatatggacccttcaatgttttgatctttacattggttacat

SEQ ID NO: 9629 - DNA, 337 bp, Glycine max
  unsure at all n locations
gacaagactatacgaggtatcttccttgggtatagcaatatcttcaagggctaccgtgtttacaacttgccaactaagaaacttcgcatcagtcgagatgttgaagtttatgagtatgcttcttggaattgggatgaagaataagcggagaagaatgttcttatacctgctcaactacctcaagaagaagctgaggaagaagacccangtgaatcaccttcacctccaccacaacaacaagatcaagaactatcatcaccagagtctactccaagacgagtaagatctttggtggacatatatgaaacctgtaacttggccatacttgaacttggaa

SEQ ID NO: 9630 - DNA, 394 bp, Glycine max
  unsure at all n locations
ggtacccgtcacatgtggtactatgtggcgatcgggtgatggtgcaaatcaactctccacatccacaaatcacacatgaacccaccatccctagttgcccaccttcaactgagctcacgtactcccacgtagcccttatacttgttcctctcagcaccgggtccccatcaatccctccaagcttccacaacatccaagcaattcaatagtcaaacatcatgaactatccaaaaccaagacaacagggcagaggcagaaaactatgcccanaacacattccaataccacaactttccttactcanatactccaataacattctcttcgttccgaatcgttcaccgttggatcgactcanaaattatactggaggtcccttgtacataagtctaca

SEQ ID NO: 9631 - DNA, 266 bp, Glycine max
gtctttttaaaagaatattagtcacacacaactttacaaatgctcttacaaataatatagattgttttagataaacaaaagccacaaaggtagagcttctatacaagccagttaggggaccttatacttttaagaagagaagcccaaaacatagtgagggctaaacattgcctaaaagaatttatttctagccgcattgcagcttcattgtaagctggttagtcttgaatccaagcactctgattgaagctatggaaattgatctc

SEQ ID NO: 9632 - DNA, 459 bp, Glycine max
  unsure at all n locations
agctntattcaagacanagaaattaaagatattcaagatggatgatcaagacagtctccagagtcttaggtagggtatattaaataggaagggaatttctaattgaagtagcaaaaggtttggccaagaaatttaagttaaaaagtcttttcaagagatttactctctggtaatcgattaccagaggatgtaatcgattaccagtggccaaaaatgatttacaacagctattaaaatttgaattcaaaatgtgcactgtgtaatcgattacacatatatggtaatcgattaccagcagttattgaacgttttatttcaaattntaaagcttgtaatcgattacacacatactgtaatcgattaccagaggagatttntagaaaatattctcaacagtcacatcttttcatttggttcttgaatggccatcanacgcctatatatatgtgacttgagaca

SEQ ID NO: 9633 - DNA, 343 bp, Glycine max
gctacgtgggagtacgtgagctcacttggaggtgggcaacacgggatggtgggttcgtacgtgatttgtggatgtggagaacttgttttgcaccatcgcccgaccgccacctagtaccacatgtgatgggtaccccataatcctacaagcttgaaatgaggaagtgtacaacggtgaaacttcctgcttttattcgctgaccacagagtggtacctggagatatgtcgcgggggtcaggagaccctcgggacgtcacgtggcgtgctatcgcccacaaccaaacttgaccaatcccgacccaacccgggcatagtcagtcagtgagaacctgtgatgtaccta

SEQ ID NO: 9634 - DNA, 445 bp, Glycine max
agcttccagctttccacctatatggatggtctgagcgtgaatacactttgtacgcgtccagtctagtctctctaagccctgaaaccgtaactatagctatgttctgagattcgccttttctgctgatcagagagctctccgaatccttttctttcgaagcggcattgcccaaagtctaatcacaggcttgacagggtcttcttagcccatgctaactagaatacttagtagcttatatgatcccacagcgataaccactgattgaggagcattcttcgttttaaccagttttcataaaccaagatatcctgcctatcccgaaaaacggactccctcatataaaacagtagcttcatatcaagagtggttttgactaatcatatgacaaatgctcggccgaagctagagctaagtggctgttcacggtaagtatggaaagcatatg

SEQ ID NO: 9635 - DNA, 417 bp, Glycine max
  unsure at all n locations
gcttctacaataagagatggtcaagagaatcaaggatggactactcatcaaaggcaagaaaggaggaagccacaaagagctgaattgacacacctaggatattttcttaatagctcaattagcgacaccagctcgctaagtgcaattccgtctagaggaaataattcgcttagcgactctagctcactaagcgcaattccaaccagaggataaattgctcttagcgcgaatgtctcgcttagcggtaaccttctgtgagtttaagctgtgtcagctcacccaggcgagaaaattttctctgtgcgagtcttgctgattacaaatacgcccaacagcgagaaaaacatcaatttctacgaggtaatcgtgaattctatgtcttctcccagttagaatgagcctatcatngtatctctt

SEQ ID NO: 9636 - DNA, 436 bp, Glycine max
  unsure at all n locations
tttctntgagcaaagcanaggcttgctcttatttttcatcccaggtaaatgccacattcttcttcaccatctcattgagaggtgatgcaattgtagagaaattaagaatgaaccttctatagaagcttgctaacccatggaagctcctaatatctcccacactttttggggtgggccattcttggatggccttgattttctcaaggtccacttggaccccatttctaccaactacaaaacctaagaagactatattatctactcaaaaggtacacttctctatatttgcatagagtgtgtttttcctaaggactgaaagaacttgcctgagatgtgctaagtgatcatctaggctcctactgtacactaaaatatcatcaaaataaacaactacaaatctacctatgaaactccttagacatgatgcataacctat

SEQ ID NO: 9637 - DNA, 449 bp, Glycine max
  unsure at all n locations
agctcgacacatattaaccatattcaaggtctgtctaatgagtttgtccaaatgtctccatactagtcattggagttaacaaacttaacactaatttctttaaacaacaaattntctcgaacaaaatggcactcaatctctacatgtttggttcttttatgaaatactggattaaaggcaatgtgaatggctacctgattatcacaatacaacttcatttgtcgatcacantaatttaagtcttgaagaaagttgttaatccatgttggccagatcacaagtaattagagccacagctctatattttacttcttcacttgactggacaacaatattatgtttcttgatcttccaagagataatatnttctccaatggatacacaatatacagtggtggatcgtctgttttagggcaacctgcctaatcgcattacaatacctacatatt

SEQ ID NO: 9638 - DNA, 356 bp, Glycine max
  unsure at all n locations
tacgctaaattagtctaaaatctcataagctatntaagctaagtctagtccaacaaatgggatctgaggatgaagcttagtntaagttaatctaaacataagagggctgtctaaattgagcctagtccaacaattgggatctgacgacaaagcttggattgattcagtctaactggagatcgaggtttantaatttaggctacaacatataacacaaaagtatgattaattacagaaatatgtttatatacatcacctggttggtttgaaagaaccaacacttctacctactgctgcagtgttacttcatgcatttttacagtcttagactagacttatttaactctattcaaatc

SEQ ID NO: 9639 - DNA, 436 bp, Glycine max
  unsure at all n locations
agcttgtangattatggngtacccatcacatgtggtactaggtggcggtcgggcgatggtgcacaacacagttttcacatccacaaagcgcgcataaacccaccatcccctgttgcccaccttcaactgagctcacgtactcccacgtagcccatatcctcgtttctctcaacaccgggtccccatcaatcctcccaagcttccacaacatccaagcaaaacaacattcaaacagcacaagctatcacagtcaagcaaaacagagcaaaggcagataactctgctcaacacatcaaccaaaatcacagctnttctcacttaaagaccacagtaacaattccttcgttccaattcgttaaccgttggatcgactcacaaattttactggaagtctctagtacataagcctacattttgaccgttgggatctactagc

SEQ ID NO: 9640 - DNA, 310 bp, Glycine max
  unsure at all n locations
ntcgagaaattcanatggtcataactnttcactcggaggtcctattcatgcgtataatatattgagacgctcgaaattgaacaacggaagctctcgagaaattaaaatggtcataacttttcactcatagatccgattaacgcgtataatatatcgagacactcgaagttgaataatcgaagctactgagcaattcaaacggtcataactgttcactcggaggtccgattcaggcacataatatatcaagacgcccgaaattgaacaacggaagctcttgagaaattcatatggtcatttcttttcactc

SEQ ID NO: 9641 - DNA, 448 bp, Glycine max
  unsure at all n locations
tacacccacatgaacttcaatttttccttctgagccgagaataattcaaaattcgcttaaattacatttcatattggtaggaacccaaagtggaaattgtagaattaccagtgggaggggaaatcccacattcagtaaaaatgaaaaaagtgagccttatataagtgaggagaaaacccaataacctaagccttaaagtttgggttaaagtgtggtgtcagttcccttatgtggtggctcgtggttcattggtgtaaatcttcctgatgtagatgataatgacttncgctcgaggggagactatcatgtgaaagagacttatacttganggagagattgtgggttacangtatgaggtgaagtctacatcagactaaccgtgaaaagtgtaccacatataagtgagaagaccacaaaccctgaccctatgtggtgggtcatggtcatg

SEQ ID NO: 9642 - DNA, 385 bp, Glycine max
  unsure at all n locations
actctaagtatgattagtaacttctttaaagattaaatcggggtatttggaagaatttcaaagggacttgactaagagtggtctaaattacttcgagtaaaagtattccttaaaagataattggtgtaatatatcaaccgtcctaaaatacataattaattgcattaactatctatgtcactgtgtaattccatttttgttcgaagtaagttagacaacnctaaacatgacaaactcatttgtntagttagcacttacaatgcgagttttatatccgttgcatggtccaataattataatataaaagtatagagtgatatgattcttttttatttgcaaatattgaaaatgaatagccgagaatgcttaattactacgggtcaca

SEQ ID NO: 9643 - DNA, 437 bp, Glycine max
  unsure at all n locations
acaagtggcctaatgcaatcctaccccgcaagggcattggatagaagactccaagtagattgggccaaagatgcaagaaaaggccctatggttctcatgagccttgaggtagatntcacgcccatgggctaagtatgagcccacttatctttgtacatattagattaaggtttcattatttttgggccttgtatttacggctccataatgtacgtaaggtaccctaaacatgtatgatttttcacccttctattttcggcacctacactaatttttgattacgggtagttttgaatttacatgcattgtggaatattcatgtgcgtgttgggaaaaaactaattgaatgcgagaagcctatccagttaaatatagagggcgggagcatttgttgctacaccctaatgcacatcataagtacactttgtgatgcttac

SEQ ID NO: 9644 - DNA, 436 bp, Glycine max
  unsure at all n locations
attcgatttcatttatcatgaaactaccctataccaagaaaacagagtagaggcagaaaactctgcccaaaactcattcaaattccacagttttccctactcacctaccccagtaacattctctttgttccgattcgttaaccattggatcgtcttgaaaattttactggaggttcctagtacataaatctatattttgaccattgggatctgctagaaaattcctggaacacgagatgtactaccattcccgtgactagcaatgcacaaccatttttctgcactatggtaaaaatctgctgcacaatttaacagcatttttctgcataatatggcnganctcaaaatacaacttgcccacatccaactttactcatattggatcgtancagtcctanatcatgtataaatcatgattacaacagaaacaaacttc

SEQ ID NO: 9645 - DNA, 473 bp, Glycine max
  unsure at all n locations
ttaagtccacctgccgcatgcaagcttctaagaagcagtggatgaaaaatagtttagaaaantttttgtggtccacacgctaagcgcatcccttgtgctaaacgccatttccttcacacgctaagcaagctgttgttcgcgctaagttccttgacccctgctcattggttggatggtcccactaatcgagtgcttagcgctaagcccaaaaacctctctggagtttaattctttcgaattgggcttagtgcaaatgctcgctaagcgcaattccttctctggaattgcaattattagaattgcactaagcacgaatgacacgctaagtgtgggccactactgcatttaatgagcattaattcgctaagcgtaagccttggtggctaagcgcatgttgcatgaccaattaaagctacagtacccgctaagcgcaaccttgcgtactaagcccaaaagcttctctggaatttaac

SEQ ID NO: 9646 - DNA, 438 bp, Glycine max
  unsure at all n locations
taagctcgctgttgctgccccacagagccnctcggaacttgttccggccatgctcttccctacgagccctcttggtctcttgttccaaggccttggtggtagctatatttatatctcttagtttggcattctcctttcggattttaagagctgttgatttgaacctttctttgactatttgggcttgctcgagttctgccctaagggcctgcacctcttcgtcttcttccggtgcctcaacttcctcccttttagcggttctccaactcgggagccaatccaaaccttgcacgtgggctttcaacgaccttcggtagccactgatgggcccattgttactgcccctgagttctttgtcctctttttgcaccacctcgcatgccttgcggaccttttgaagtgtctccatgttggtcttactgaaacctcgtgaaatga

SEQ ID NO: 9647 - DNA, 150 bp, Glycine max
  unsure at all n locations
ctgcagcttacgggaaccttgtgccgcttcaattcatcaaaaaatgtcggaaaacattgagcagtagggcatcttaccatctgcttccatggtcagtccatcattagagcctgtccccncagctccaatggctggactgcaacctgaatg

SEQ ID NO: 9648 - DNA, 298 bp, Glycine max
  unsure at all n locations
cgacttgttgatgttcaacaacctcacctcattgctccatnttcatcttgtgaactctacttgtcctctaggaaatcatagacgcgcatgttcagcaagctcatcgtcagacattgtgtcttattcttcttctctagcagatcatccgagagatttgtgtgggtgagtagtcgtcgtccaccattagcttgaaagatgggctttggtgtatcattgcatgcatcactctctagtacatcatgtattatttgaaaaacatatatttgtctatcgtctcatggtctattttaaagttaga

SEQ ID NO: 9649 - DNA, 614 bp, Glycine max
  unsure at all n locations
actctcactacgatcanagtctatatctggcttatnttgtgtatcgttcctactatataatctatnacacacacacacagacatttgagtcattgagatgcgcgctctcttgnacccancgatccgtatatcgacctgcacgcatgctaacatatgtgcagatcacgcttgtatacatgcaccattgttcatccaacactgagacactattgtgctgctaataacacaacaccacaaatatggtgagacactgaagcctgagacagccagattgcagtctgatgcgccaatatacatgacttacttcaagaaaagtcgcatatacattgaccgcgagaattaaacatcgacttttaccgtaaaactaatgacataaactcgttcgatcaataatcaatttggccgtttgaacagtcgcttgactataattcacgctgcttatcataatcaacaaataatatacgggacataaaaacgttatcttacagtgcactggtatatagaactttcgtactattgaagagcggattcctctctattatatggacctgaaatgaagaatacattcacgtgatggtcctaatacttaactccgcggtagtgcactcgcaacg

SEQ ID NO: 9650 - DNA, 275 bp, Glycine max
  unsure at all n locations
attcgcctgttttaaagctcttataatttactaaacctatgcttttaaacacatatatcttgttagcagcggttggtatgcatcttatgccttgtaacttgtttnctactttaaattgcacgtctttgtggaactgtctatcatgctctgtggtatggatcagaacgtccttttctctctccggaattactcggtttacgctcatgcattatgaaggatattttctaaccaatttatcataacttaagattattttgatatgcgctcttttcctt

SEQ ID NO: 9651 - DNA, 455 bp, Glycine max
agcttcttatccaaggcacgttcttggtggtgaagcttcttcttccatggcttattccctagtggatggtgcctcccctctcctcttctcctttgccttccgctgcatctccatggtggaaaatcatcattgaagctcaaagatctagcctccatagaagctccacaagcaagcttccatcaacatgacttgaaaattgtgtattttcctattttatattttttatatttttttaaggtcgacaagcaagctccacaagcaagtttccatcacatgtagatgaggttcaacaatatattgatgcaagatggatttttgctctacaagttttgtggaagatatttagatttaccctttacagaatatatatgtgtgttgagagatacaaattcattactgcatcgtcatcaagtgcaatctatagacattaaagaatactaatgtatgaacgatga

SEQ ID NO: 9652 - DNA, 269 bp, Glycine max
  unsure at all n locations
gatctctcaaatttgggccatttctttttggttatgccaattgaaaatatatggtctttcccaccattctggggttcagttcatgactttttcggccactgaagccaaccaatttctttntactaactaccctaataaatgacaggcgagaaaaggcaaaaggaggggatggtggtgaaagccttaacatgttcaagcaactttgtgcttgcagcttcacctaagatttagtctctttggtagtatacaatggctttgcttgatccatg

SEQ ID NO: 9653 - DNA, 101 bp, Glycine max
  unsure at all n locations
agcttatggtatntgttaatgttatcttaccaattatggttatttaatttatgtattaatctctattataataaactcatccttggaagttttgttccgtg

SEQ ID NO: 9654 - DNA, 457 bp, Glycine max
  unsure at all n locations
caagccaaagccacactctcgtgcatgcatatagcttctcaagacataatgccaaactcccgccaaaaatctgatttcaagcttaaataagtgggttggtttgttcacctacgccaatcaccacactctcatttttctaactccttatacctgactcatgtctgactactctgcgtctcgctccacctcttccccccacgctcagtcccttactcacccctccctgcgacatctcctccctccactcttcccttcatccnnntcctccccctcccccccccccttcgcctctcccacactacgtttcccccttcacttaactccnctctcattcccatctctcctttctccctccctacccactttcccaccttcttacactccactctgtatactatattcttcaccctcacccccttactctctcgctctctccagccatctctcactcttcatc

SEQ ID NO: 9655 - DNA, 452 bp, Glycine max
agcttgaaaaatctcagggaatcgctagagatgccgttatcaccgccagactacacacgtgagcccacttataggtaaggggtgagtttattgtaattggggttagaatgaacatgtgcatgaattcttaaaggattaaatggggaatttattttgggttgtttattcaattataattcttcctttgattcttatgtgattatttgaaattgtttgaggggttttactccccatgttgtgggaaacatatttgtataatttgtttgtattttggacaatatttactatactagcgtgatacattattatattggtatcaagaaattgtcattgaaattgtgtgtaatgtataaattgaatatgtgttgattagtgagagacacataaacatgtgatggtggattgtaacattgtgatatgttaaaatagtggacatgggatatggttgtaaa

SEQ ID NO: 9656 - DNA, 165 bp, Glycine max
aattttggctcatagagaagatgaaagatgacaactgaaatacctgaatatgctcctatatcaaatacttctgagaagcagggacttgcttccaagtctcgcatgtcatgttgacctatcaccagcgataatgccacaatatgtactcgatttcttcttgtgggg

SEQ ID NO: 9657 - DNA, 442 bp, Glycine max
  unsure at all n locations
agctataggctgttcaattgcttcagattgctgcacaaaagggcaaaggtctgtgtggtggtcggtagaggagcataaaccacagaatttggtgacaggtgcaaatttttgattcatggccagttgggttaccgggttaactaaggcatctagtttaccttcaagcttcttagtctcagctgatgaagatgaattcatggctacttcatgcattcctctaatgacaatagcatcatttctagcactaaatngctaggagtttgaagccatcttctaaattaaatttcaggcttcagtagggttcatgtctccaagggctccaccactggaaacatctatcatacttcgctccatgttactgagtccttcataaaaatattggagaagaagctgctcataaatctggtggtgagggcaactggcacatagtttcttaaatctc

SEQ ID NO: 9658 - DNA, 426 bp, Glycine max
  unsure at all n locations
tctccttccatggcttattctctagtggatggcgccctctctctcatcttctnctttatcttccgctgcaacttcatgggtgaaaatcaccattaaaggacctcattgaagctcaaagacccagccttcataaaaggttctcaagcaagcttccataaaaaaaaaataaagaagaaatcatgagcaagtataataacaaaaaatgcaatgttgacaatgcatttataaggaaattatacattatgttatacttggtttataaggagttgaggcactcgaaaactaatangattacatcgtttttctttagatttgcaagagccacaacctgtataggcaaggaacatgttaaaatagtagttttctctacatcatnntatatatgtccgcatctatatatacatctttttgtttaaacactatata

SEQ ID NO: 9659 - DNA, 447 bp, Glycine max
  unsure at all n locations
agcttctntgagaanactttcttgagaagctagagtctagctacacacacccctctcataactaagctcacctccttgagaagcttccttaagaagattcctaaagaagctagagcttagctacacacacatctctaatagctaagctcacctccttgagatgagaagctagagcttagctacacaccccctataatagctaagctcacccccatgacaaanaaagatgaaaatacaaaaaaaaaagtccttactacaaagactactcagaatgctccgaaatacaaggctaaaaccctatactactagaatggccaaaatacaaggcccaaacgaaggagaaacctattctaatatntacaaagataagtgggctcatacttagcccatgggctcaaaatatactctaaggctcatgagaacactagggccttcccttggatctct

SEQ ID NO: 9660 - DNA, 538 bp, Glycine max
  unsure at all n locations
cgccgcgcnattgacgcantcccctgccgaccttcgatttagccacctgtcnttacgcgcaccatagaatactcaagcttcagactatagcaactcacaatcttagtgttctaaacccctcaatttaatggattttcaacgtctgagaagtggaactgataatgacggatacttggaggcaactcttaccttacacaagtctatgacatgaatttaaacctggtcaaactggatttaccccggaaattccactgaatcataatttgactcctcaacacccaattttaccctanaaatggctctttggtcactttgatcatttgtttttctctcttgcacagcccaaactttctcattaagtctgaatgacaatttcatgctaggattaactcactttaaccgtcccataccacataaatcagatttgggccttccactcttaaaatctcaattttggttcactcctaaaccatacgtttactgtctagccttagttanctctaccctcattcttaaaacatttccacatcctcttcct

SEQ ID NO: 9661 - DNA, 432 bp, Glycine max
agcttctatagcatataacatagcggtacgttcctgtgtcctcatgcatgttttagtacttaagaaatttagtggtctttgactttacttctatgttgtgtttctccatggtttgagttcttcaccagaaaaaaaatgttaatgttatgatacaagaggtaactttgtgaaattagctgttggaaaaccaccttatttgtggtcaccccaaggtaaaggggtgtgctaaagctccacattgtggtgggtagccgtgggcacaagaggaacatgttgaagccttacattgactaaagatagtactgagatagagtatataagtagagaacaatcctcaccttacaagttagtgttgtatgattgagatatgccaaaatcactttctaacccggtatcagagcctatcctagaccaattgattgcgccctatgt

SEQ ID NO: 9662 - DNA, 352 bp, Glycine max
  unsure at all n locations
gaactactaactgcagtaacagttgcagcccaactatccggtagtgatgacaatagaatcaatgccttcacctcatcctcaaatntaatctgcacagatttcaattgggcaagaatagtattaaactcattaatatgatcagctacagagataccttctctcatcttgaggttgaacaaccggcgcatcaagtatactttgttggctgctgacggcttctcgtacatatctgataatgccttcattaagcctgcagtagtcatctcgttcacgatggtgaacgcgacgttcttggctaatgtcgatctgatcacgcccagagcctatcgatctagcaagttccattcttctt

SEQ ID NO: 9663 - DNA, 443 bp, Glycine max
  unsure at all n locations
tgcgtgctaagcctcatatctcaggctaagcgcatattgcagaantatttgtgttgcagaaagcgctaagcgccacctgctgcactaagccccagatgctcactggaatttgaaacctcaagttgggcttagcgctaggttaagctaagcacagggttactcaaaacctaaacatttcattgacgtgctaagcgcgccatacaaatttcagtttttaaaaccaaaggctgaggcgctngtgtgttacccacaaatcattngcctttacccttttctaaccctgatcttttgtgctttctactatgcgctgaaacttacttgtctgcatnggtcttgcttcatctacattgcaatcataatcgaagtaagtgagtacattctcaatttcattttcatctttcacaccacaggatacatgaatttgtgctttcttagatagtagc

SEQ ID NO: 9664 - DNA, 340 bp, Glycine max
  unsure at all n locations
cttttctgatgatgaccgangaacaattatggatcaacttgaaacttatgtgcttcaagtgagaagaaatgcttctttttccacttgtgaagatgttcaaagtttggctatgaagatggttcaaactgagaaacatctggtatttccattggtttataaacttattgagctagctttgatattgccggtgtcgacagcatccgttgaaagagcttttcagcaatgaagattatcaagtctaaattgcgcaataagatcaacgatgtgtggttcaatgacttgatggtatgctacaccgagcgggagatattcacgtcgcttgatgatattgatattattc

SEQ ID NO: 9665 - DNA, 61 bp, Glycine max
  unsure at all n locations
agcttctagcaaggaagaatgaaagaggcgtctgattctcgcaacaagaanttttcaagga

SEQ ID NO: 9666 - DNA, 413 bp, Glycine max
tcttagtctcaactgatgaaaatgaattcgtggctacttcatgcactcctctaatgacaatagcatcatttctggcactaaattgctgggagtttgaagccatcttctcaattaaatttctggcttcagcaggggtcatgtctccaagggctccaccactggtagcatctatcatacttctctccatgttactgagtccttcataaaaatattggagaagaagctgctcagaaatctggtggtgagggcaactggcacatagtttcttaaatctctcccagtattcatataagctctctccactgagttgtctaatgcctgagatatcctttctgatggtcgtggtcctggaagcagggtaaaaattttctaagaatactctctcgacgtcagcccagctcgtgatggaccat

SEQ ID NO: 9667 - DNA, 385 bp, Glycine max
agatgctgctctatgctaaatttctgaaagatatgctaacttggaagaacaagtacatccatagtgacaccatagttgtggagggaagctgcagtgccgtaattcaacgcatcctttcgccaaaacataaggacccaggcagcgtcactataccttgttctataagtgaagtatttgttggcaaggctcttattgatttgggagccaatattaatttgatgccacttttcatgtgccaaaggcttggagagttggagataatgtctactacgatgactttacagttagcagatcgctccattaccagaccctatggagtaatagaggatgttttggctcgggtcaaacaccttatctttcctgctgacttggtggtaatggacat

SEQ ID NO: 9668 - DNA, 451 bp, Glycine max
  unsure at all n locations
ngccgctggagctgacccattaacagccctaactcctttagactggtgatccctangctcttgaccttgacttggtaaaacctctttttaagcgaaggcgtttgacttgatcccatgttttactaaagtgaaacaaaaatcggtgcgaatcaaaactctaacatctatcatgggtggaatggatgaatgcatgaagaaaggcatatgacacagatgcaatttatgaatacgatagcccgagaaattgtcttcttcttagatacaacgtcttgnggtagcacagtgtccgacgtatgtattntaagatagtgacacgaaccctccgttgatttgctaaagagaggggatcaagacagaacccatgcatgatgcatatgcgaaaggcataacatggtgacgtacataatattcacaaacaaataagcanaagggtacatgacacttatgcatg

SEQ ID NO: 9669 - DNA, 397 bp, Glycine max
  unsure at all n locations
agcttgtagaaatngattacttatcgttttctttgagacaatgattgaattattcatgaatctctgctttaatcgagtaccatgtgatataattgattacttcttccttaaaaagtgtttgcaaagttatcaagaacacattaatcaattacattgaggatctagtcgattacattgttcttaaaagtattctagatattcggaagaacactttaattgattgaaatgataatataatcgattaactgatggaagcttgcatgtggggcttttatggaggctggatctttgagcttcaatgatgtcctttaatggtgatttctacaccatggagatgtagcggaagacaaaggagacgaggtgagaggaggcgccatccactatggaataagccatg

SEQ ID NO: 9670 - DNA, 358 bp, Glycine max
  unsure at all n locations
tcatgatgatgaatcatagtgattgaagcagttacgacaatgactaagatgatgacacaaattccaaagaatgatttcaagaatgagtcaaaagttcaagatcaagtttaatttcaagtttcataacaagaagattcatgaatcccgagaagattgatttcaagattccagagaagattcattcaagattcaagagaagaaatcaagaagacttcaccacggacgtattgaaaagattcttctaaacaacatagcacagttttgtttttcaaaagagtttttctcangaatttctaagttaccagagtttcttactctctggtaatcgattaccaattccctgtaatcgattacccat

SEQ ID NO: 9671 - DNA, 462 bp, Glycine max
  unsure at all n locations
gtcacctgcggcatgccagcttgcacagctgggtaatactccacacctttgatgttgaaacttttgttattttaagtacttaattctaattgccgtatttcatggaaaaccctatatttggtctagaatctacaattatgctaggctaattgtgactntagtgttacattgattagtttatttaatgcgttttggggaaaattactatgtgttatttttttttgactggatatatacgtgttaataaatattaatatgacttcacacgctaaaccaatactaagcaaacgggagatacaaaatttggtagatccaatgcttggaggggcttatgacgtgacaccagttaatagagtagcctttgctgcctccctttgcattagggcatctgcaacttgcagacctatcatgagtgaggtagctcaattatatatgttgcacaactttggtgttactttccta

SEQ ID NO: 9672 - DNA, 373 bp, Glycine max
  unsure at all n locations
ngagtcttagtataatcgttgtataatgcttgctaattgtttattatgaaattgatgagtgttattatgtcttgacttgagtgtgtgattcgtgtgtaatgtgattgataattgaaaaatgaattttaaatgataaaatggtgaagtggcgtggattgtattaagttgagctatgttataatacttccataatttattttgattatatctttgtttatttaaatttttttagaaatgtgataactctctccctgtgtgttatttgtgtttggatcttgtgatgatcccaaaccttgtgttcataggagcagatgaccaggtagatgattttaaagaatntcgtactagaggaccctgtgacacaatgctctga

SEQ ID NO: 9673 - DNA, 548 bp, Glycine max
  unsure at all n locations
agctcggaacattggcgacatnttatttgaaaccattgcgtacccgcgatcctctagagtcacctgcggcatgcaagctnggaatagtcatacctcacacacacacacacacacacacacacacacacacacacacacacacacacacacatatatatatatatatatatatgtttaggtagaaagataccttggatatgcatgtatgtagcaaaaaatacttcacaaaatatatatatgtatgtttaggtagaaagataccttgaatatgcatgtatgtagcaaaaatacttcacaaaatatatatatgtatgtttaggtagcaagataccttggatatgcatgtatatagcaaaaatatctcacaaaacatatatatgtatgtttaggtagcaagataccttggacatgcatgtatatagcanaatacctcacaaaatatacgtatgtttaggtagcaaaatacctcatggaaaaaaagagagcaaanagagagcgagcatgcatagaataagaacgaagaaaaaaaattgactataaacaataat

SEQ ID NO: 9674 - DNA, 337 bp, Glycine max
  unsure at all n locations
tccatgacataatcctatacctgtntattttataggtactatctatgagaaatgccaattacaggcattgaatagtttcactgaattaagatgactccaaaatatatcatgtacaatatcttcatccttcaatttatgcccatgaatatactaatgccattcaagaagctctattagttgttgcattttagtattgccataccctaattcgtccgaggactatcattcactgatgttttgattctcgctagctgaattgtggtgttcgacaccagttaccgcatgaagtagaggatcactcagtgttttgatcaagaatacaaaatgataccaatga

SEQ ID NO: 9675 - DNA, 434 bp, Glycine max
  unsure at all n locations
agcttaggtgtattacttatataatgcatctaatgctctacaattatctgtcacctttagcctcttttatcgatgcctacattttccttatgctcaagttaattaaaacaagattatgtataatataaaaatttgtaaatgaaaggcatgaattaaagaaacaccttcattggcttgcgatgaatatagcatttatagtaaatatgtgaaagatcttagatgatggtttgtaccttcaggtatcattgcttctaaaggagaacttcattgactngtttccatatcatgatcatccttttatgaagggttttttcttcttgagcttgcatcataccttgtactaattatacatgacaagtttagtcaaattttctagtaaaacttcaaaatgattagaattgaattgcaaattatctcttatttctggtaattca

SEQ ID NO: 9676 - DNA, 361 bp, Glycine max
  unsure at all n locations
ctactagtcgacttacggttntgaacaccagttacagtgcgaaatatatgtccattcgatgttntgatcaaatatacgaaaggtaccgcaagggaggggcaaaagggttgttttagggagttntctggaccctagctcgcctgtgcccccaaattgcttatgggtgaaggaaccagctcgcctgggcaagccatcttacttcaagatgaagcatcagctcgcctggctgagctaccatagtcccaaatgccctcatttcctataaatangcgtgagggaggctgacgaagtggtcggaccttcaatgttaagagaaattggagagaaatcagagagaagaacgagaaagaagagataaaca

SEQ ID NO: 9677 - DNA, 447 bp, Glycine max
  unsure at all n locations
agcttatatagcttcatattattgatagagacaaaataaatcatataattctatgaaatatataaatttacgtgatgttatataagttttttttaataatggattgttctgttttagtttttaaaattgaaataaattaatatgtgttgatttcatttgtattattttaaattaaaatgtgttcttagtctacttttttagcacgttgattttaatgtgctgcatacgaattgataatatttagcccatttgtgtgttttgtcactgttcgcaggaatcttactggaatcctcaaagtgggagcctcctgttccctacttcattaaacacttctcattatttatttatttattttcgtgaacaataagaattaaataattaataaaaaaaatgatcgatacaattagtttattactntgagtctatatattaacaatatggagtcat

SEQ ID NO: 9678 - DNA, 263 bp, Glycine max
  unsure at all n locations
tcacaactctctatctagacattggtctntatagatgtttgagacaccttcttgagactagttaaagtttgttctctcatatttagaaaaaaggagcataaaacgcagcttttattgacaacataaaggactttggtgtaatatggtgccatccccattcttcctttgatatattcttgccttcattatatcatatcgttatacagcttgcggatctgtgtgttgtgctccaccaattaaccgcctgataatgacacttaaca

SEQ ID NO: 9679 - DNA, 303 bp, Glycine max
  unsure at all n locations
agctttgagccaatttatacgacattaactttntactcggatgtctcgattagtcccataatatattgagacgctcacaattgaatgttgaagctctgagccaattcaaacgacattaactctttactcggatgattgactgagtaccgtaatataacgagactcttgaaattgaatgttgaagctctcagccaattcaaacgacaataactttttactcggatgtctgattgaggttcgtcatatatcgagacgctctaaatgaatgttgacctctgatcaattaaacgacataacttttta

SEQ ID NO: 9680 - DNA, 347 bp, Glycine max
  unsure at all n locations
cctttcttttctcatgtgcactcaaacccaatctccgggttcgaagacaaccttctttctccctttgatggcttgtttagcatagctcatacttttcctctcaatttgatctttgactctataatgaagcttcttcacatagtccgcctttgcttgaccttctttatgcttaaaaacagaaacattaggcataggcaaaagatcaagaggagttagtggattaaaaccataaacaacttcaaggcttaagaaagaagaatcatcggatgacgccgatcgaacatttcctaatatacatcatncaaatattattcatggattgaatagaacatacaatagccgacatc

SEQ ID NO: 9681 - DNA, 436 bp, Glycine max
  unsure at all n locations
agcttgcagctgaaccaatgacaatatggcaagtgatactgagcaagaggctccataccaagataatgagcttgtagggcttcaacaagtgttagaagttgaccttgtcgtcattaatgaatctcttgtagatattgatggaggtggagaagagatagatgtagatttacttaaacaactagacttggttgaaccagacgaggatgaatgcatattatgtaagaatgagactgagagtcgacttgatgatacaaatacttattaggtaattcatacattaaacgttgcatatcttatgtttattgcgtgtgtgtgtgtatatatatatatatacatctgtatgattgtggtttgaaatatttattacttctacgctcgtagtgaatatgacagagaatatacgtgacctatnttggtgtacaaaacatgtttatgt

SEQ ID NO: 9682 - DNA, 253 bp, Glycine max
acaaaagtagtacaaatttgctggacattctattgcaatcgatctctttattatgttaaaataagagcgcacgcttattttaatgtaataacgagatgttcggtttaggaaaattttggaagttacatggaagttactaaaacttccatcaacggttggaagttacatggaagttactaaaactttgatgaacgacacgctttaaaaagatataacttccatctatcgcccagaaccatctattctttgatca

SEQ ID NO: 9683 - DNA, 407 bp, Glycine max
ggaatccagaaatgatgtgaaatctaaagcttgtgtattatgcaagaaatggaatccatatatgaagcgatatcataagctactcacaatattgcacaatgtttcatagcctccctctgccacaatatctcaacgatgtgaaccaatcatattagactatataattggcatagcctgcaacctaaccgaaccctagtctgcgtctttgaatttgaatatcgaaattttctgacatttggcaaatggaaaagggtggaacgacaaactaccgggaaccttgtgcgtgagctgatggaagagtgacgatactatcacgtgtccggacaaaataaaaaatgaaagaacggatacgctgacaggtggacagtcggtcgttgtttatactaacaatagattatattggatct

SEQ ID NO: 9684 - DNA, 580 bp, Glycine max
  unsure at all n locations
cgcccgcgncntttgatangcaatgcatttttngtgagccctctgtanattgccacccctatctacatacgcgacactatataatacataatttgactagtgactcactttattgtatcgctgttctatcacatacctctatcatctagacgcacattcagtgacacatttcaatatcttcgtatgaaattcctaactcaatgtgtcacctaactgcatatgtatgtgtctactacgacacgacaaacttcgcaatactattgtgggcaccaccttcgttcgttacaacaccaatactttcatggtccacaaggtcgtcacctttacaccattgcttgaacttcttctccacaaattgatcattgacccagaacatcatatccaccatctccattgtccgcgccctatcattgagtcacgacaacgttatatgtacacatctttgattctgccagatgaagctgatgctcgatacatgcccaacatctcttgcacacccaacctctaccatatagcgagctatctgtcctactctgcctcactactaactcacctactatccgcattgatcaccctttcc

SEQ ID NO: 9685 - DNA, 437 bp, Glycine max
  unsure at all n locations
ctacacatgccgacaagagaaaggtcaccttataaaggaaagaaagaagcctagcccatttacaagggtagggatcatagatgaaaagggaccctatctgccacatttgcaaaagctttgtcagcgtgggatggatgcacgagaatcaggttgttgtgctagacgaagaaaccaaccaagagtagccaagtttggtgcagctgtgctccccgggtttcgaattgaagcattggtggatcgtggagtgacccgagatngcggtgtcatatccaatgtaatctagtagttngaaccctattgttgggcctaggctttanggtctgcttcttttngtgggcatacctctttccttaatgctcccgcaattataaatatacaaccctctttatttgatatngtccctctcgcactntcatccattttcattcttctacata

SEQ ID NO: 9686 - DNA, 416 bp, Glycine max
tctagataagataagatctagatgaaataatatctagatgagatcaaatctaaataatatctagataagataaagtctagataagataaaatttgatagaataaaatagtcttccctcttcaagtccaagcccaattctggattcaagcccaatgcttcattaattcctgaaattagattaaaaacatcaaattagctgaatgagcccagataataaaactacctaattaatttgacaattaagactaaacaataattaaaatggcgcaaaaagggttaagaaataggagaaaataatggcacatcatgcagctaagccagtgaggcagccacagcggcgactcaaccccgtcattctagatgtggtgaaaaaggaagtgaccaagctcttacaagctggaatcatctaccccatt

SEQ ID NO: 9687 - DNA, 482 bp, Glycine max
  unsure at all n locations
cctataaatctaagcttacaatgtagttctacatctttgcagataatgcaaacaattggatttctcgggccagctttcttcttaactcaattgagccacgctaattctcctgtgatggctgttttgtgtatgacatgcagtcangtttgcttcttgttttgtatttgagatatttttaattctgagaaggcagtctctttgtaatcctaacataaaatctgcttatatttgtgtctcttcttatatgtatctggagaaagttacttaatacttgtataaagtttctttaatttaagtatctcacttcaataattttattatgattattagttcatactgcataatctgaanatntgactggcaaatataaatattcttggcaatggtgtcttggaacttctcttgatgagcataactacacattctcattttgctaagtcttcatataaagttagaaagtgttggttcatccattcattcca

SEQ ID NO: 9688 - DNA, 424 bp, Glycine max
  unsure at all n locations
agcttttaaaaccgtaaaggtttacattatgctcgtcgcgtaaatgtcggggcgttcctccactcgccaatttcccagttggaaatcaggagggcatggtcgtaccaaatccagcgtattcggaacgtcatcttcgtatatagcgacgacttgaccttcgtcccccaggctcgcgcttataaagctcttacttatgtggcagggtgggtttccttcaccttcttgtctcaaccgcgagccttgacttccgctcttccttccggcaacgctcctctntatatccgcctgagtgggcttatagcgtaacccatgcttcccacgatttcctttggcatttatcaggctagttatgccgtcgttgtctttgcctaaacccattccgggttcgtaaccgctccccaacataactcgagccatcattact

SEQ ID NO: 9689 - DNA, 491 bp, Glycine max
  unsure at all n locations
tgaccaatcccgacccaacccgggcatagtcggtcagtgagaacctgtgatgtacctaagcaggcgagctcctggcagtcaacagataaaaggaacaaagaccacaaagcaaggaggcttgtggtggctggccagctgtgaaacttgactgatatgtgagatatgatctctggtaatcgattaccaagggtgggtaatcgattacaaggcttaaaaatgaagacaggaggctaagatggtctctggtaatcgattaccaaggggtgtaatcgattaccaggcttgaaaacgaagtcaggaaacttacggagcctctggtaatcgattaccagcctgtgtaatcgattacacagagggatgggtcactggtaatcgattaccacgcatgtgtaatcgattacacagcgcattattgcatatttcatgtcctgaggctgtgtaattcacgtntagcctctggtaatcgattaccaacgctgtgtaatcgatac

SEQ ID NO: 9690 - DNA, 354 bp, Glycine max
gcttcaccggatgatgccgatcgaacatttccttatcgacatcatccaattgttattcagggattgaaaagaataaacaatggccggtgtcggtcgttatatggccccgactgatatctttcagcctacattgcgcaatttcttttacaaacgctggccgataatgttttttttttggtagaggaagttctttgttttggtgttgcctaaaaaatttacaacgtaggtcggctaggtttttccgtgcgagctcaaccgggggttcgttccgagttacattggcatgttgttcttctcatttagaaggccaagaagacgttagcccaccccagcataaacaaaaaataacattat

SEQ ID NO: 9691 - DNA, 468 bp, Glycine max
  unsure at all n locations
agtgcgggttcgggagacaaaggtcaagcgttcgcgatatgctaagatgatattccgagtactntggatttggtacgaccatgctctcctgatttccagctgggaaattggcgagtggaggaacgccccggcatttacgcaacaagcataatgtaaacctttacggttttaaaaagctctatagttgggcctaggctttagagttttcattttgttaaggctttgtgtcttttgtttttgaatttataatacaaggatctttcttcatctgttcctggtctctacccattctcattcatttgcatgtttacttctttntctaaaacggcagattcgatgacgagtcccccgaaggtactaatacctgcgacccgtctatcaacttcgagcaagaaatgaatcaaacggaagatgaaggagatgaggatgtgggaacttcttcggaactagaaagaatggtcgcccatg

SEQ ID NO: 9692 - DNA, 438 bp, Glycine max
  unsure at all n locations
agcttgtgctntaacctgcctcagtaatataagacacatgtgttaaggcgcctgcgacaataaactagctgtgtgtgtgcaagtctgaaggtgaatgttctttgtttcaattctttattccttattgttattgtcttaataaggttagaatagaaaagttattggaagaaaattaaggattagctcacctttgctgatttgaatagttcatcaagaacctcggacaaagttggatgtgcatgaactgcaaattntatgtcctgcattgtaccacaaaacggtgaaatttaccaaacaagcaggataaataagagtgaagactttgtgactattattagtaactaaatgccaatacacataaatgtggtagaaaaatttacctgaatacgtgtccctaatgcaattgcattggatgcttcatggatgagatctgctgca

SEQ ID NO: 9693 - DNA, 473 bp, Glycine max
  unsure at all n locations
ttagagaatatcccatgaactctataagatgagaatggagatggactacgatggtgagaaaacagttctaaaataacgaaaatagtgttgtatttatggtctttgtattcaacgtataatctctggaaaaatcttatttgtttatccatgtaaggagtgaatcttggtcaatttctagccaacacgagaggcttctatttttatgaattttcctcacctaaactactcaaatgagttctcacataactttcaaatttgttctattttttttgtaagttgtgattttcactctagtatctcaattatctatgttcacctattatctaagttgacaattacttttagtcattntgataacgttntacaaacgtttgttggaattttagaggatctttataaaacattaataaccacccggatcacattatattagattatcaagaagaatttatgaatacttgaatccataatga

SEQ ID NO: 9694 - DNA, 309 bp, Glycine max
tggcaatgaacaatacttgtaactttgattagtttatgaaaacttggtgggttgccaagaattggacgtattctcgggtttgagatgaaccaacataattctttgtgtgcttctctcttttgttttaactgacaaacggtttgaatttgcttttggatgtaatatcttttttgctatacaaacgacaatatttttatcattgtctaatagagtttgatctctaagtgttttaggtctcttatatcagacaataaacatgttttcaacagtagaaaaagtttagatctctagaacacaattcagcccctt

SEQ ID NO: 9695 - DNA, 492 bp, Glycine max
  unsure at all n locations
ctatgcaagtttctggttttctaaaccttgaanacttgtgctattcatcttttcattctcttctccctttgccaaaaagaattcgccaaggactaaccgcctgaattctttttgtctctcttctctcttttccaaaagaacaaaggactaaccgcctgaattcttttgtgtctcccttctcccttgtcaaagaattcaaaacaacacagtctgagaattcttttgattcttcccattccctaatacaaaagcgttcaaaggtttaaccgcctgtgaattcttttgtatccccattcacaaagtatcaaaggtgtaacagcctgagatctttgtcttaacacattggagggtacatcctttgtggtacaagtagagggttcatctacttgngtttgactgagaacaagcgagggtacatctcttgtggatcagttctagaggagggtacatncactatgttcaaagagaacaagggagggtacatcccttgtg

SEQ ID NO: 9696 - DNA, 467 bp, Glycine max
  unsure at all n locations
agcttctatcanagctgtggatgacaacattattaatgaggtcattattgatctcacgaacactggtgttatgaatgaaactccagaggtgcccaacacaactttggccaatgaggttgtccatcaagacaaagaacctgtgtccaagcagtccaaaacctcaaaatgaagcaacgccaagggagaagggtgcacctgatgttttattgtctactcaactagttcaactcctacctcactcaattatgcttctccctctattgtgaccataaatcaagtacaagagatgataggtcaagcaattgattcctttgtcgaacaatacatgctagaaaatgagccatttatgctttcaatgcanaatgtcatcaccacacagttctctaaccttagtggttgtctacttcaaaatctacaacaagctcanatgactattgtcatacnctaatttcatctggggaccatct

SEQ ID NO: 9697 - DNA, 316 bp, Glycine max
tctctatatcagttgcttcgccaaggatctgtatatgtgtattacatttgttgttctgggagaagtttgtattatgtattgtgcataagatcaaagaataattttaggtgagagtctatttcactgtaagggcaggacggacgacatcagcgtcctatcttcgctatcctatgatcttctatgaaaggttattactcacgtgcacctgtcatacgataattctgatcactgattattacttgatgacatgcaacctatggatgaccgctactatatactcggcgtcctctgttgcacactatatgatgtcccgaca

SEQ ID NO: 9698 - DNA, 478 bp, Glycine max
  unsure at all n locations
gcttgtctcagcgtntatgcgatatggataccaacatgctatctattatctcctagtaccaagaagagtgaggtctagccatggcccaccagcatataatcgccgacgagtatgctcaagtatacgccgacaaagaggctacacgaagggtgatcgactctttacaccaagaggcaaccatgtggatggatcggtctgctcttaccttaaacgggagtcaagaacttccccgcttgttagccatggccaaggcgatggcggacacctactccgcccccgaagagattcatgggcttctcggctattgccagcatatgatagactcaatggctcacataattagaaatcgttaggaaacttgtatggtctctcagaccctgactacatacgactttctttttgaaataaaatgagttggtcccatgtttctacatcaagaagcatgtgcaaatcaaatcactcctacatttcatctcta

SEQ ID NO: 9699 - DNA, 309 bp, Glycine max
aaacatattcttctttcttggttatccttgactccatctcagtgaatcgcatgtccacttggtactcccaggtgttatacctctcagcaactaatgtttgtaaaccctcatagctcgtccaaatcttctgacgaagaaacgaatcttcttcaccatgttagtgtccttcttcatcgatgggttgaacacccttttttaccccagagccatcattctctttacggtaaccaaaggaatgcatcactgccttacctattagaaaggatctcttgattgaaacataatgttcacaatcaagagggatgttga

SEQ ID NO: 9700 - DNA, 482 bp, Glycine max
actgaattacaatgttccaattgatttcaaaatgttattatcgattacaatgatttggtaatcgattaccagtatgtttgaaagttggaattcaaatttaattgtgaagggtcacatcctttcacaaaaaatgatctggtaatcgattaccagtatgtatgaacgttggaattcaaatttaattgtgaagagtcacatcctttcacaaaaaagctttgtgtaatcgattacactgatttggtaatcgattaccagtgatagtttctgaacaaaatcaaaagatgtaactcttccaatagttttcaagtttttctaaaagtcataacttttccaaatggtgtttaacgttttctaaaggttataactcttctaatggtctcttgactagacttgaagagtctataaaatcaacgctttcatttgcatcttattaattcattctctagacaacacactgtttccaattgatatctgaatctctt

SEQ ID NO: 9701 - DNA, 508 bp, Glycine max
  unsure at all n locations
agcgcggangttgacacgatgcgcagcatgatccttaagtcacctgcaggcatgcagcttgntaacacactggatgaagactatattatatatatatgcatatatgtatatatagatatatatatatatatatatatatatgcacatatatctatctctatatatatatttgtatatctgtggtggctaatgagctggcctacccccattaatatgcgtgcgcttcatagcacgctttccatctgggaacctgtaaggccacctgcatctactgaaacgctaatatcgaccgcacgcgagaaacgtggccgtgatataacccatagatgcacttttcttttaatgtcgcctgctacaagattattcttatcttgtgtccaaacaacgcttttggttcacatatgtgcgtaaatatactatgtcctgcccgcactcatctgatacggtcgcacacggaagcattttntattcaaaaccaggttatccgctgtattactcaacatccacg

SEQ ID NO: 9702 - DNA, 395 bp, Glycine max
acacatacatacccacgctccgccgaatatctcatgatctcatcgataactcacaagttctattttacgcgcgcaaaaaaaatatgtgaactcgactcactaaaacttgcatttctcacagtctctattgaataattataccagcgtcatcgcacccaactcatactagcttagtcaacccattggctcgggaaccatacacacaacccgcccaaaccactaattggattgcatatgcctatattccgcaacaactcggcccaataacatactaatacgtgactccgtgatctacttgactcacccgatcatgcactctatgtttttattcttaaaggtgaaccactccacttatatgagacaattccacttctatcttacacttgtgttataca

SEQ ID NO: 9703 - DNA, 598 bp, Glycine max
  unsure at all n locations
gtcctcctcctcttcctctantctttctctctttactcatattattttttttctatatancacncccgcgcgcgcttgntgacttgcatatccctcgccantacgcgacactctanaatactctatctcgagtgtcgactctaatgttacatgatgctnctgttaatattatatgcttatcctctatcctaaaatattctgctgtgtaattctgtataacattgatgtctgatgaaattatttgtctcagtgagcgtctttcccctcttgtgaatgtctttgtctgttgtcgcttgttacctgcaaataatatgtgggctgtaagattctatttgctagttcaacaggggggaactcttatcttgattcgacgttcctgctgagctggattgctgaatcatagtcaccctactcaaaatccaagattatgatgcaaccactgatgtggttgtactggcacaattcgccctataacagttatcgactactgacctccacagactcgccgtccacccttaaatctcaaagactgactctcgccgtgccccatacacctactttctcaaccatattcttctcggcacatcttagattcccg

SEQ ID NO: 9704 - DNA, 433 bp, Glycine max
gcagctcttagtctcaactgatgaagataaattcgtggctacttcatgcactcctctaatgacaatagcatcatttctggcactaaattgctaggagtttgaagccatcttctcaattaaatttctggcttcaacaggggttatgtctccaagggctccaccactggcagcatctatcatacttctctctatgttactgagtccttcataaaaatattggagaagaagttgctcagaaatctggtggtgagggcaactggcacatagttttttaaatctctcccagtattcatataggctatctccactgagttgcctaatgcctgaaatatcctttctgatggccatggtcctggaagcagggaaaattttttctaagaatactctcttgaggtcatcccagctcgtgatggaccttggagcaagctaatat

SEQ ID NO: 9705 - DNA, 497 bp, Glycine max
  unsure at all n locations
tgaagttggattctcanatcttaataagaacaaatatagtgaatgcaagtcttagtttggtatttctaaatttcagtatttttataaagtccagagtgtttgtgaggaagtgtaacttcaacaatcgacaaaaatttaagataattagagaatatggttgttcaaaaaaattagagaagcaacaggaacaagaattaggtttttatcttttggcagaatgtgctaatgagttgacaaaactacagaaaagatgcgtgtccctgtcatataaatttatgcatttgcaaaaacaaaaaagaaatacacttcatctacttttgatattattatcaccatatacagattttaaaagggatcaattgaaggttcaagtgacctcaaagctcaccctaaggctaatgggtgaacgactgatcactgaaaatagatggcatcgtttcaatctagaattgcctcttctttttattatgacactgacagtgtgactggcaagttta

SEQ ID NO: 9706 - DNA, 440 bp, Glycine max
  unsure at all n locations
tgcaatcgattatgataatgttgtaatcgattaagatagagagttttgccttctgaagaaacttttctaacttacaaaattttcttttcacttactcatgatgatgcatgatgcataaaagatatgatatggactaaaatgcaacatacaatataacaaccaatacaaattccatttaagagagttgtgcatgtaaaagacaaagcatcttcaagcttttctccaagcttcaagctttagtcctcatgttngttatgttgctccccctatctctaacanagataacattagccacaacatcattcttagccaaatcaaatcccgaggagaagctggtcatatacctcttggtctccaatgaaattgtgagtgcggccgtcgtttaggagcatggagaagttcaaaaaccaatttatttaataactngagtccaacacgag

SEQ ID NO: 9707 - DNA, 499 bp, Glycine max
  unsure at all n locations
cctatgagactaagcttaagaacaacatagagttgggagttgaaaagcttgttctttttttattattgaaagtgagaacacaaggtgactatttatagagaaaacaattataactgcttgtaattgattaaatcgcctacataatcgatcatctcgaagaagtaattgattagattctcattttaatcgattaaaatgttcttctcaaaacctgtaaagctttcaagaacaatataatcaattagattcttgatttaatcgattaaagtgttcttgtcacttctaggaacactttcaagaatgatgtaatcgattactataccctcgtaaatgattaaagcagagaccctaagaaaacatacatggtctcaaaagaatagagtaatcaattacagatacatgataattgattaanattgagttatgcactgaagatgtntctcttcttagaaacaatcttcctacttctacatgataatgcatgatgtacacatagata

SEQ ID NO: 9708 - DNA, 456 bp, Glycine max
  unsure at all n locations
gctttggagtntccaagtgccaattcgtcttcttctttagtccagtcttcttctggcttcaattcttcagtgggctttccttctgtgtccagcatcttgggatgttcccagcctttgatgacagctttccaggttctgctatccagtgatttgaggaaggccaccattcttgctttccaatattcatagttgcttccatcgagaattggtggtctgttcactggtccgccttctttctccatgttcatcagaatttatctccctagatctcactctgtgatttcgagtgttggctctgataccaattgaaattctgataccaggggacagatgtcgtacaggatgtcacgacatcacgcttcagaacatgcagattatatgtgtccgtatgaacagattanactagtaaataacacaagagaattgtttacccagtgctgtgctacctcacctaca

SEQ ID NO: 9709 - DNA, 451 bp, Glycine max
  unsure at all n locations
gatgatgctctaatggagganaagaaagagagaacgggatatcgttaaattgaacgaataaaagagggagagaagtggaactttgaagtgtatctcataagactttcattcatcataattacaacaggtgttacacatgcttctatttatagactaggtagcttccttgagaagctatcttaagagaacttccttgagaagcttctttaagaaaacttccttgagaagctagagcttagctacacacacccttctcataactaagctcacctccttgagaagctttcttaagaagattcctaaagaagctagagcttagctacccataccttagctaagctcaccttcttcagatgagaagctagagcttagctacacaccctttatatagctaagcagagaaacatatgcacgaaaacatgaataacaaaacaagtcttactacaaagac

SEQ ID NO: 9710 - DNA, 408 bp, Glycine max
gcttggtggagtatggggcacccgtcatatgtggttctatgtggcgatcgggagatggagcaaatcaactctcccacttccacaaatcaaacataaagacaccatccccagttgcccacctttcaactgagctcacgcactcctacgtagcccttatcctcgttcctctcagcatcgggtccccatcaacccctccaagcttccacaatatccaatcaggtcaatttcaaatatcatgaactaccctaaaccaggaaaacagagtagaggcaggaaactctgttcaaaacccactcaaataccacagctttccttactcatataccccagtaacattctcttcgttccgattcgtcaaccggtggatcgccttgaaaatttactggaggttactagtatataaatata

SEQ ID NO: 9711 - DNA, 433 bp, Glycine max
  unsure at all n locations
agaaagagagaacgggggttggggggagcactaaattgaacgaataaaatacggagagaagtggaactttgaagcgtatctcataagacttttataatgttacacatgcttctatttatagactangtagcttccttgagaagcttttttaagaagacttccttgagaagcttctttgagaaaactttcttgagaagctaaagcttatctacacacactcatcgtaaaactaacctcacctccttgagaagcttccttgagaagctagagcttatctacacacacttctctaataactaagctcacctccttaggaagagaagctagagcttagctacacacccctataatagctaagctcacccccatgacataatacatgacaatacanaaaaatcctactacatagactactcacaatgccctgaaatac

SEQ ID NO: 9712 - DNA, 386 bp, Glycine max
agcttcctataatcaaatgcaaaatggtcacttatctatagggacaagaaaatgaaattctccaacacgtctagctaattgagactagctagtcacttttttcgtgcaccaaggtgcaactctaaggtcaattgttattcagttatgtcaaacataattaaaactcagaatcataataaaataagtaaataaaaacatgaagcaaatcacgctcgtgaattacgtttatgttaattgcagtaaataaaggaggcagccacaacaaaaggtgtttgctgctgaaggctacagtttgatcctttgagagacaataactgaataagaagaactaaatgggtgtgtcatgtgtgtaatacattgtgtggacagatacaaattgaagtaca

SEQ ID NO: 9713 - DNA, 436 bp, Glycine max
  unsure at all n locations
aacctatagtgagtcgtattacaattcactggccgtaggttacaacgtcctgactgtgacaaccatggcgtgacccatcttattcttcttgcagcgcataccactttcaccagctgacgtaatcacgaataggcccgcaccggtcgcccttccctacaattgcgcagcctgaatggccaatggcgcctgatgcggtatttactccttacgcatctgtgcggatgatacaccgcatatggtgcactgtcagtacaatcttgtctgatgctcgatagttaagccagacccgacgcccgtcaacacccagtgacgcgaaccccgagacgtgagaattaaaggagagatgatcgatgatgaaccacaacccttaatttgcagaacttgacattactaatgtatatctcgtcaggaccatcaaagtgtgacactgagtgcn

SEQ ID NO: 9714 - DNA, 415 bp, Glycine max
  unsure at all n locations
gaagaaattgtagctnttccctctgttgtcttggactcagganaatatttcttcaaaaacttttccacaactttatcccaagtccttaagctattacctttgaatgaatgcagccacctcttggcttctctagataatgaaaatgaaaataagctgagccgaatagcatcttctggcacaccgacaatcttgacaatgttgcatatctcaatatatgttgccaagtgtgcatatgggtcttcattgngtagaccatggaacaaattgcctcgtattaactgaatcaaagaatgtggatatgtgatattgtgggcctgcacctctggccttgcaatgcttgtaaagaactgtggcacagcgatgctagaataatcttcaagggtcaccctgcttggttgctcttcaaccataatgt

SEQ ID NO: 9715 - DNA, 431 bp, Glycine max
  unsure at all n locations
tcgtcccttatttgctataaatagggggagaagtgaagattattatggttcanccccttaggcacttctctctctttcgaatttgcttaggaaaattgtttccgtgaagaaaatccaagtcgaggcgcttccgtaatgtttccgtaacgtttccatgagtaattacgcgaagattctcgaccgttcttcaagattcatcgttcgttcttcgttttcttcagtcttcaacgggtaagtaccttataccaagcttttcaattcactatatgtacccgtggtggtccacattttgtttcatgtatttttattctcattttcatttactttctatacccccttttgatgtgcttaagccatttatctaagtcatttctcgcttaatttacaaataaaataaatttccaccgatcgtttgaattgtatcatccgtt

SEQ ID NO: 9716 - DNA, 517 bp, Glycine max
  unsure at all n locations
agagctcgctcactaaccatggcatatacacaacgcgagatgttctcttcaacctcacaccacaaggattcgcatcaatgtatactctcaacctctaacactctaccantcgatacaaactatggatacggataagcgagactccacccaacaaccccggcctgctgcgatgacctatccacaacaatactagcacactcgtgcataaaccactatatcgcaaccgcacttattagacatactgatcgcagaagacaacacccaatctaccggctatttcatcttctcgacaaaaaggagtagcacacactggggtggcgacgagcctactcaccatccatatactccactgagcgaccacacacagttcgctacctcaaactaacgtgtcatcctccaatctttctctgaaccaccaaccaaacctcctaaccactcttttatttcttcactcccctccaccatgatgcgacaacacacaggaacatgctatacacttccagtgcgaagcaatacg

SEQ ID NO: 9717 - DNA, 407 bp, Glycine max
  unsure at all n locations
agcttcacctattggtcctcctcatagttgttgcatgataaaacatgctctatnttcatcgcccactccaagtaggcctccggatcattctttcctttcaatggaggaatgttgagtgtaataccttcaattcggctatgtctacgaacaccatcattccctcttctcctcctttcttattcattaagatctgtattctccatttgattcaacctctcatggagcgcatcatctcgttgtttcattaacctctccgaatgttgcctctgagcttgcatttggaattgcgaaagccccactccatcattgagattagtgcccgacatctcaaacatacgactctgacgctgcaagacaattatagttgttgattgactacctcacccactcaagagtatcacacaaac

SEQ ID NO: 9718 - DNA, 197 bp, Glycine max
tccttctttcttggcttattctctaatggatggcgcgctcccttatcctattctcctttgccttccgctgcatctccatggtgaaaaattaccattgtaggacctcattgcagctcaaatatccagcctccatagaagctccacaagcaccctttcatctattcagatgacattgtatgtaatattcatgccgctta

SEQ ID NO: 9719 - DNA, 576 bp, Glycine max
  unsure at all n locations
tcatcaatacantnctntccnactgctcacaatntttatatatttattttctccctccctnncccccgcggcttgatgcatgcnantcctgcactnanccgacacaancaagactcaacctgcgaactgnctctttatcagcaagtagctcattgttttactattgtagagaagtcactgaagaacctctgatagaagcccgcgtatcctaagacactacccatacactaggcgttataggaggaggtaaatcctgcatgacatcacacttggcgtggtacaccttaatgcctcacgctgagatcttgtggcccaatgatatccctactcggaccatgagatgacacttcaccttattcatgaccagaattgctccaactcatcttcacaatacgagctccagatcaactctaggacacaaaggatagccgcaaatcgagaaatcgcacatgaaacttgatgactataaaccatgatgcaaaaagctagcacgtactctaaaagtggtgtgcttacataccagatgaatctttcgatgcaagacacaaacggtatgcgaagagcttctctgtcctc

SEQ ID NO: 9720 - DNA, 448 bp, Glycine max
  unsure at all n locations
agcttgaagatgtgtaacctgccatcttctcatattagaactgatgtagctccattgaagcttgtaggccttggatcttcttcatcaatggagtcttttgcttcttaaagtttgatagcagcgtaatggagaaggagaagggtgattggagatgccacttcaaggagaagatgagtctataagaagctcaccaccataggaagccatggataatagcttgaaagtaagagaagatgaatggacggagagggagaaagggagcatganatttagtgcctctaaagaagtttgaactttgaagtttaattctcagatgatcaaagttgaaaaaatgcacacacatagcctctatatatagcctaagagtcacacagaattggagggaaatctgaatgtctattcacattttactagaatttgacattgaatggtggagccaaatttcact

SEQ ID NO: 9721 - DNA, 480 bp, Glycine max
tgcaagaagctctatgtaaaaagttgaagcttagttcatcttatcaccctcaaacagatggtcaaactgagagaaccattcagtctttataagaccttatgagagcttgtgtaatatgacaaaagggtatttgggatgagtatttacctctagtggagtttacccacaacaatacttttcatgctagtatacatatggctccatttgaagccttatatgggaggaagtgtagaacaccattatgttggtatgagactggtgagtctcttttgatagtgttgagtctggttgcatccaagtcacattggactgtaccaaacaagttaaattcctgaggttttgatgttaacaaagtataaattttaagtactaacctttcatgcttaagttacaagctatcttatctctgagatacaagcagaaaagcatgaacataaaggttctggacaataggcaaagtatcagtcattggatgatact

SEQ ID NO: 9722 - DNA, 435 bp, Glycine max
taaacatccaaatatcatgaactatccaaaaacaagaaaacagggcagaggtagaaaactctgcccaaaacacaaccaataccacaactttccttactcaaatacctcagtaacattatcttcgttccaatttattcaccgttggatcgactcgaaacttttactggaggtccctagtacataaatctacattttgaccgttgggatctgctagaaaacgtccagaaccgaatatgtacaaccctttccacaaccagccatgcataagcattttctgcacaaacacaatagcaaaattctgcataatagtgcagattttcgaaatcactctagccttcatccaattttgcccaaattggatcctacaagtcctaaatcaagtataaatcatacctaaaccaaagacaagcttcagaccaaagcaattcaaaatct

SEQ ID NO: 9723 - DNA, 481 bp, Glycine max
  unsure at all n locations
tgaaggatataaaatgtcttcntatttttccttccttaaatttcaaatgttagtgattcaaataaagaaagatataatttaaatttgaaaagtgagatcatgcacttccctttgtggctaacagagactttagtacctatgttggacgtcatttgtgaggatataaaatgagtgtgtaagtaatgttatgtctagtgaatgtaagcaagaacaactcagtgtgtaatgttcgaactcggcaagtgcaccggatcgcgcaagtagtataaaatggtaagaattgagtatcgaaatcttggggaacttgtgttacttggtaaagctatattcagtgaataggtgtcttgtatgaaaagatatgtgtggactatgaacatgtatgtaaactaactattaaaaaggaaaatcacgtgagtaatgatgtgtaaagacaagtagacaacatgttggtcttcctattaggtgcctgatatgttctatg

SEQ ID NO: 9724 - DNA, 401 bp, Glycine max
  unsure at all n locations
agcttctctatttaggtctcttatcttctttgcgatccgtttcttctctctctctctctcccctacttccnccactttttaagcttcactttcactgtctctgtttgttagggttgctgttcaaacttcacttcatcttttcatgttttatttataaaaaaaatatattttaagaagctgatgtgaggggagctgcgtctgtgtgtgcctgtggctctttggacattgaaactttgttcaatgtttgggaacaacaaagagattgtgtatcagtgcgcttcanggagataaaagctagtacctttgtagggttntgtntatgtgacgaggaattagctataatagttgaatataataataatctaatgatattgttggtgttcgatggtatcttatctctc

SEQ ID NO: 9725 - DNA, 491 bp, Glycine max
  unsure at all n locations
cgtacttcattcaatgaagaaatgttcttgtttacgtgtgggtgatagatgtaagagtgagtaatattaagagaagaggaggagatatgagatactacctgcgtactttccaacaaaggcagacatggttaaagcttattggatatatggcgggaaacagataacagacaacagcacgaaaaaggagttcagccagaccaaagctatatagataaaaatctcaaaggaatataccaagtggtatctacccaacccatgcaaaggaaccacgtgtccagtgattagcctaacgaacgttatcactcttggataaagcaacgagtgatccttcccttgcccaagtggcacctcatcctccgtttcaataatatatattccactcacctcatgatatataacaaggaaattttgtggaaagctctcacccgtcaccctcttggacttggctntacatattaagatatcaacctacaggctattatgaaaattgt

SEQ ID NO: 9726 - DNA, 462 bp, Glycine max
acctgcggcatgcaagcttacaatgatatcgttaataagaggaattttctctacttgcagcgatttgctagcttacagaatttggttctcataatggtgcgttagaagagctatgtaatcttcctctaatatctcttggtaatttggagttgtctaatctacaactattgtgtcaacatgactgattcgtattgctctgtcttgtctgcatgaaaactagtttgaacaggatacaattgtaataccacaggaaacagcttggtttggctattatccaaatggagccctccatcccgttgtaccagttcaacaggtaatttaagcattccgtatctgtagttaattgttgcaaatgtcgcatactcaacttcttagctgctttgctgctgcctgtgactccataatactctcacctccctcctacatgagatatgagtgtatgacaactgactgtggatcacc

SEQ ID NO: 9727 - DNA, 489 bp, Glycine max
  unsure at all n locations
cgagcatgtntggatgaagatggacacacaagaataatggaacacttctctctgtaataaaggtaacccgacattcgcaacttgtcatgcactcattatctagccacttaacccaaccatatattttgtgatcttgatatcaatcaaaatcgatccattaaatccacacctttcctttctttttcttccaacttcttttcttctgtcgtttatatatagaaagaagtcttgagaaattaagttcacgttaaataaacttttcttcttaaaatgcatactctgtnnttttgctactcgataataaacatttgttttttttagcaattatacgctcttaatttgctgtttcattgccgcattaagccaaattaagtatttgtttttaacattgagcacaactatgttcattatcaatctgtgtaaaacaaatatcttatgcttattagcatctaatctattgaatcaataaactatatataacggaatcac

SEQ ID NO: 9728 - DNA, 391 bp, Glycine max
  unsure at all n locations
gcttgagatgaggaagtgtagaagggtgaaactttctgcttntattcgttgaccacagagtggtacctggagatatgtcgcgggggtcaagagaccttggggacgccaagtggggtgctattgcccaaaaccaagcttgaccaatcccgacccaacccgggcatattcgatcaatgagaacctgtgatatacctaaacaggcgagctcctggctgtcaacagataaaaggaacaaagaccacaaagcaaggaggcttatggtggctggccagttgtgaatcttgtgtgatatatgggttatggcctctggtaatcgattaccaagggtgggtaatcgattacaaggcttaaaaatgaagacaggaggctaatatggtctctggtaatcgat

SEQ ID NO: 9729 - DNA, 482 bp, Glycine max
  unsure at all n locations
tatataacttatatcctaatgtcacatcctatcagagcgttgtgttcccgtgtcctctagcatgaggttcttcatagtcatccacctattcatctggctccctgaacacaagttcaagatcatcacaggatccaaacacaacaacacacagggagtgagttatcatattcctagctaatagaaaaacaagacaattaaatatacatattatataaatgagataccacttgcttaaacatagctcacgtaacttcaccacttcgtcattcaaaattcacttttcaatcatcaatcacattacacaagaatcccacacttcgatcaagatataataacacatcaattagcaagcatatgcaacagttatgccaagactcaatcctatatgcaatgtggtaccatgtcagtcgaaaaccaccctgnggcgcttangagtacataacaagacacaccacaccatgggtttgtcaggtcactctcac

SEQ ID NO: 9730 - DNA, 368 bp, Glycine max
  unsure at all n locations
acatctacacaacatggggttttcattctattccttatttttctcatcttagtttatgatcttggttaagtctatcaagaaaggtgttatgttgtaagttcaaatcatggattttctcttgtagggttcaagggattaagggtagttctagagatttgtttgtgcatagtgtttgtttagtgattgttcttaaggttcttatatcacattgagtgtattttctcttaagaattgaatcagtataaaccctcgtctcgattctctctatcctttatcttgtnattgagttgttcttgatatagtattgtgttggcatctgaacctgtaattggacgtgccattaaaattcttgttttgaataaaactga

SEQ ID NO: 9731 - DNA, 487 bp, Glycine max
aagcttgttattaggactgcactgctgaacttgttgagaataggtgttgaatatgaagagttagcttcctgtctactctatgaaggaatggcacgctacatgcatgatcacaaaactgaatgtaagtatgctccagaaatgcaatcaagagctcaggcttattacaaatcagaatgaatcaaaactgcaacagctcttgaaccaaatacattgaaaacaaaaagccaactatagattaagtccaaacaacttgaagatgtacaaaggcacacggatcaagcttacctcgaacccaaacaatgacaatggcagtgagatctaaaataatggcgcggagacttgaagctttcctcctatctcgatcaagtcaccacgaaatgtacctacggttaaccgaaacaacgcagacctagtacgttagatgaaatgaagcttagacatcaaatagtttacctcactcaaaatgacaccttgcgagcaaaaacct

SEQ ID NO: 9732 - DNA, 253 bp, Glycine max
  unsure at all n locations
tacttacttgttggtgtttatataaaagcgccgaacggaatcaaaaaatgcgaatagtgatgacccttagactgccaactcgtaaatcccgtgggtatggcttttgaaagggggaaaagaattttttgaatgaaaaaaaacgtcccccctttcgtcacttttatattttggtgcagaggtggctcgcccacgcgagctaacctgcactttntnttttttttattttttttttgaggggaacatttaaacatgc

SEQ ID NO: 9733 - DNA, 476 bp, Glycine max
  unsure at all n locations
cggagaggatgcttcaatggagganaaganagagggagataaatagagaggcgggagcacgacattgaaggaagaaaaagggagagaagttgaactttgagttgtgtctcacaagactctcattcatcaaagttacaacaagtgttactcatgcttgtatttataaactaggtagcttccttgagaagttttctagagaaaactttcttgagaagcttctttgagaaaacttccttgagatgctagagcttagctacacacacctctctcataactaagctcacctccttgagaagcttccttaagaagattcctaaagaagctagagcttagctacacatacctctctaatagctaagctcacctccttgagatgagacgctagagcttagctacacaccccctataatagttaggctcacccncatgacaaaatacatgagaatacacaanagatccctactacaaagactacc

SEQ ID NO: 9734 - DNA, 441 bp, Glycine max
  unsure at all n locations
agctnntaatttaattgtcataataattagtaattacactatattacaacaaagtaaatatggtatcctaaagtatntttactttntctaatcattatagtcaatctcgatgtctaattgtcccaaaataatctttgaaagcatatactattaattatctaggggttcgggatacatagacggtagtgttggaaatcttaatctttaatgtttattgattaaaatatattttttccttataaatataaaaatgtttgaattttttttttttgtaaaattttagtacatattttgtcctgataaaattgaaatgtatcacttttttgcttgaacataagtttggataaatctaaatctacgatgatgacctnnttacattgtatacatataaatgatgtaaaatgtgacattntttatatcggttgtgcatataaccgatgt

SEQ ID NO: 9735 - DNA, 174 bp, Glycine max
aaggacaacgccttataactgaccagtatgcttatattggactatatggacgattcgcagcatacaatcatcatatcaatatatcgcttttgcatgaactacatatgcatgatttactcatcgcatttgacgatacgtaagagctaaagcctgccttttgtctagcaccccaac

SEQ ID NO: 9736 - DNA, 348 bp, Glycine max
gatcttaagtcaccgcggctgcagctataagaagataacttaacttttttttgtagaaaattcaaataacaacatgtgtgtgaatcatatgatatagaacataagtaagacttccacttaactaagaatctatagggaattacacctatatgtgcaatatgctcatgaaaaaactctaagtgtttgatagttagcatggaatgagtccctatatgttctataaaatatgtattttttgaattgtttatttaacaatcaaatactttatgtcaacaaactattacttggttgaatcctttataagacctgctacatattgtcccaatatacatccgatgactacttaat

SEQ ID NO: 9737 - DNA, 469 bp, Glycine max
tattacagagaatcgtaactcagaaggtcgttctggtatatatgttttctaattaatttgagtgcataaattctctggtcatttaaagggacggaatatatctgctcgcaccaaattaaaacaaagaactgactaagaattgagtcttgcccggcgcttcagatatgtcagtgcaaagattgcactgtgttttgaagtctgctgccaattatgcttattaactcagctcatacaaatgattctatatatagactaatatctaattaatatgttatattttatcgcttgcaagtgcagcttattaactatctggtaatctatctaataatagttggtttggtcgagatttgataagttgagaatgtcaaaaagaaacttagtaaaacgtccgagttgcgatactactctgaccgatatctattaatctatatatccttaattgagccatacgtgtacatgtatatacttc

SEQ ID NO: 9738 - DNA, 430 bp, Glycine max
  unsure at all n locations
agcttcatggtgaatcaaaggtgattcanatgtgttttgatgatcacaatgatgataacaaaagatgatggcaaaggtgatgacaaaaagctcaaaggtcaatcaaagaacaactcaagtgaatcaaagatcaatcaaagaacaactcaagtgaatcaagaacaatttaagagttcaagataagaatcaagaagaattcaagactcaagaagaaagtttagaatcaagaatcaagattcaaggttcaagatctcaagaatcaagatcaagattcaagactcaagattcaagaatcaagagaaggcttaatcaagataagtatgaaaagttgttttaaaaaattgagtagcacatgatttttctcaaaacatgtttaccacagagtttntactctctggtaatcgattaccagattttggtaatcgattac

SEQ ID NO: 9739 - DNA, 442 bp, Glycine max
tgtatagttccctaatttatggctcatttcggagtaaatttataaataaatcttgttttatggttaacgttgtctctataacatttccattggatttaatgacgaaatgtgtgcatttttatgtaaaaaaaaggctaagttttgaattgcaaaaagtagcagttgggctaagctcaacagttgggctaagcgcataaccactgctaagcgcagcttcagcgcacttagcgcaaaggagaatctggtagagcatcagcatcaaagtcacgcgctaagcgcaagatcagtgtgttaagcgcagaggtgccttcagccaggctaagctcgagactggcgctaagcccaatttcacttactcgtgctaagcgcgagggtggcgctaagcgcaatgtcacaatttcagagcctatttaaagcactatttgtgcagaattatggtaca

SEQ ID NO: 9740 - DNA, 333 bp, Glycine max
tctgtatggtggtcagcagaggagcacaaaccacaaacccttgcgacaggtacatatttatgattcaaggccagctgggttaccaagttgaccaacgcatacagtttgccttcaagcttcttagtttcagatgatgcagatgggtttgtagctacctcatgcactcctataatgactatggcatcatttctggcactaaactgctgggagttggaggccatcttctcaattaaatttctggcttcagcaggagtcatgtctccaacggctccaccactagcagcatctatcatacttctctccatattactgagtccttcataaaaatattgg

SEQ ID NO: 9741 - DNA, 331 bp, Glycine max
  unsure at all n locations
tctagccaaatggacttaccttgaattaattcctttgatagccctgttaagccttgtttccccttccttgttttgaagctcactacaagccttaaatganaaaccatgatatcaccatatctttaaggaattttggagctttggaattgttttgggaataagtgtgggggggttttttttgtttcattggataacttgatttgttggctatgcttcgtgatgaattttgggccatacttgatgtacattgtatattggttaaatgttggacatgctgaatgaaatgttgtttctcacaggttatattctaaaaaaaatttaaaaaaaattc

SEQ ID NO: 9742 - DNA, 455 bp, Glycine max
  unsure at all n locations
agcttgtgcaaatcanatcactcctacgtctcatctctagcatgcattttctttctttacccactcctcacgtttggttttttagggaaaaaacaccataactaaacgcgccgcaagggatccctatcgcaccagatccaaatctagaacgatgggtgatcaagaggagacacaggaacagatgaaggccgacatgtcggctctgaaagaacaaatggcctccatgatggaggccatgttangtatgaagcagatcatggagaagaacgcggccaccgccgccgctgtcagttcggctgccgaagcagacccgactctcttagcaactacgcaccaacctccctcaaacatagtaggacggngaagggacacactgtggcacgatggcagccctcacctgngatacaaccgagcggcttacccttatggattgccgcccaactattcaccaccca

SEQ ID NO: 9743 - DNA, 482 bp, Glycine max
  unsure at all n locations
ctagctgaatnnggttggtcctctgatggttcgtgtatattgaccaactgccctaagatgttgaacatggttagtatagatacatttccatttgatatgaccctacctacttcaaattaaagggattaccatccaatcttctcactgcctattaaaccttaacttgtaaattaacatagagaaatatgataataataactgctacacatgttgttttcttcatacctaactaactgtgtgacctaagagtaagtagtacccaaacgaaaacataagtttaatgtaaatttctttttatgcctacactttattaaacaatatatatatatatatatatatatatatatatatatatatatatatatatatatatatatatatatatatatatatatatattcaatctctattagagagacacaaaacanaagcatgctatacacncacataaccaagaattcaatggattctctaaaaaaccg

SEQ ID NO: 9744 - DNA, 425 bp, Glycine max
gatgataacaaaagatgatgacaaaggtgatgacaaaaagctcaaagatcaatcaaagaacaactcaagtgaatcaagaacaattcaagagttcaagataagaatcaagaagaattcaagactcaagaagaaagtttagagtcaagaatcaagattcaaggttcaagatctcaagaatcaagatcaagattcaagactcaagattcaagaatcaagagaaggcttaatcaagataagtataaaaaggttttctcaaaaattgaatagcacatggtttttctcaaaacatgtttaccaaagagtttttactctctggtaatcgattacccgattgttgtaattgattaccagtagcaaaatggatttgaaaaagttttcaaattgaatttacaacgttctaattatttcaaagagtggtatcgata

SEQ ID NO: 9745 - DNA, 495 bp, Glycine max
tcagcttgcttgctagaatttcagtcctttttgataactgcgaaatttatgttaatttgatagtcatttttggctaataatgagtgcaatttcttcactttactattgtttttaatgaaataacgaagaaattaacatctttgcaatttttgattagcagaagtcaaaagaagaatatttcaagtgctttagagaaaaattgatgcaagaattgaagaaaaagccttgaagaagaattggcagacttagacaactcgctcaacgtgcaatccaggcttagtgtgcactcttgcttagaggacaagttcaggcttagcgcacagctcgctcagcgtgcaacccaggcttagtaggaagaagacccacaaggaagcccaaaggcgcgcttagcacgaaagctcgcgctaagtgtgaagtcaacatgaaaagtaagctaccttacgcctataaaaggagtaagaagcataagggaaaggcacatcgagtcttatagct

SEQ ID NO: 9746 - DNA, 478 bp, Glycine max
  unsure at all n locations
agcttcngaaagaggacctctcactaattcacatattttctttatttggttgtagagaaattatatctcttcatcacttttatatctttctaaatacgtgttcgcttaattatactgaggctttaacttattatttatgtaatcaagtctgctttcattttcatttgtatccttttttatcttaaaattcatttttcaagtatccatatattgtgaactttcttaattggtactacactattcgaccaatgcctttaggtttctatcaaaggatttaaattacttattatgttatatctctctctataagtcctatggtattattaataatatatataatntatacattatcattactaaatataaaatttttatacattatatatgtttatcttttaaggttgcaattttttactaattatntctacaattgaatctcataactaatttagggttccattttaatggttctatcttc

SEQ ID NO: 9747 - DNA, 480 bp, Glycine max
  unsure at all n locations
gcgccacgaacacataactctcccgttgattattntaatttatcttttgttattcacatatatatgggatatgtaaacactatctacacaaaataaattgcactaattagataactaagtataccatagtttcttctgttgctttggaacttagcacgcacttgtagcctagcaattntttatcagacacctcatcactttctgcttctgaggcttcactaccaccgaagtactgaaccacacaacctgaaatacatattcatacaattatatatatttatatatatatagcgtacctagtggtagtgcatgaggctgaaaaatcaagaatctctatattctctcacagtggaagaaattaaaataatatgataacaattctaatatgcaagcaaatgcaaataatcaacatagaaaactcacatcgcaaggagttggccagtttgtcgagggttcctgtgactaatacaaagagttcga

SEQ ID NO: 9748 - DNA, 491 bp, Glycine max
  unsure at all n locations
tccggatcttaagtcacctgcggcatgcaagcttgatgtcattcanaagagactatgtcgacctaaatgatgactgaacatgcattgtttatctaatttattcattatgcgatataatttgttgaagccattaaaggataattattaagtactcgttgcgttaagaaaaaaattagctggtgcaaccaaaatcaattatgcatgtacgatacatcgttgtcataattgacaacacataatgatatgcatgcgtattaaagtttgagcgtgacacgacattgactgacttgacaacacattctgatgcacgacattggtttagtaggaaacataaacacgaaacatgttcacgcgtgtctatttttttataaaaaaaaagtgaagcaatctgtcggtgagaaccatgttatatatgagacacgaaaaatggctataaatcacacattatcttgctttcacatactctnccacatgatacataaagtatgaca

SEQ ID NO: 9749 - DNA, 465 bp, Glycine max
  unsure at all n locations
gcttcatcatgaatacccatgtcatcctggagttatcattgatgatggaaatgaagtaccttgcactctcccagtgatggaactctcaaaggcccctagcagtcataatggacatagtccaatatggcctttgtagtgtgcacaacctttgggaatttcgttagataccgtgctcacaaaacagaagaggttccaccttatgatttccgtgtaagccttgcttgctcaaaatttccagttttttttacactcatgtgacccagacacagataccacaaagaattattattggacgagccattgggtgcatggctcccaacttgtgaaactgttaaaatagagcctatcacattggacccttgaaggatgtancaaattcctctcttggtttgctgcattagcacaaactttcctttccctctgatttgataactccacttanaccacaataaaacctttcaatca

SEQ ID NO: 9750 - DNA, 360 bp, Glycine max
  unsure at all n locations
tcagtattcaagactcataactcaagattcaagaatcaagagaagacttaatcaaatagtataaaaggtttttcaaaactgagtagcacatggattnttctcacaacatgtttaccaaagagtttttaatctcagacaatcgattaccagattgttgtaatcgattaccaatagcaaaatagatttgaataaagtttcaaatgaatntacaacgttccaattgatttcaaaaagttgtaatcgattacaatgttttggtaatcgattaccagtgcctttgaacgttgaaattcaaattcanatgtgaagagtcacattcatttctcataanaactntgtgtaatccattacactgatttg

SEQ ID NO: 9751 - DNA, 472 bp, Glycine max
  unsure at all n locations
tacgtgaaagtagtataaagaaatactttagaagttaagttattcgatagtagaatctttatgacataaatagaatgcatggtcgaacattaaaataatggcatgtggtaggtcatacatacataatctttgtataacctgatagaatcaaatgaaaagtaagggatatattacaacataaacaagtatatgaattcatgtcatcagaatagaaatcaaaatattctttacaacataagataaatagctaaactaagctatgaactcgtttgagtagtctacgttggggaaattcttaanaatgagagtcttgtttgtcgaatctatanatnggcaggggtcctcctaatacatggatagacaagtgaaaattttcccaagatttacatcaacacacaagcttcnatccaatctatctcttcacaattanaatataatataacatatattcatattcatattaatatcatct

SEQ ID NO: 9752 - DNA, 429 bp, Glycine max
  unsure at all n locations
acatgtggttctatgtggcggttgggcgatggtgcaagtcaactatccacatccacaaatcacacataaattcaccatccccatatgcccaccttcaactgagctcacgtactcccacgtagcccttattctcattcttctcaacaccgggtccncatcaatccctccaagattccataacatcccaagagattacatccaaacatcatgaactatcaaaaacaagataacagggcagaggcaaaaaactctgcccataacacataccaataccacagcttttcttactcacatacccagtaacattctcttcgtttcgcttcgttcaccgttggatcgactcgaaaaatttactggaggtccctagtacataagtctacattntgaccatcgngatctgctagaaaatagtccaaacccaatatgtac

SEQ ID NO: 9753 - DNA, 372 bp, Glycine max
  unsure at all n locations
agaactatgattattgaagaatatatctatgttgcttntgatgagactggccctataaggccaagaaaagaaacacttgatgatattacaaattcattataatatatacacattgatgagaaaaggcataaacgcaaaggaaatggtaatgaagaagactttcaacttgatgaaaataaaacaaatatatatcttccaagaaagtggagaacttcaagatattatcttcttgataatatcatcagtgacatctcanaaggggtaacaacttgacactctctcaaagatgcatgcaataatatggcttctgtttctttaattgaaccctaaagtctaaatgaagccatcattgatgaactctggatattgcta

SEQ ID NO: 9754 - DNA, 426 bp, Glycine max
agctagcttccttttgatctctgacacgtctcttgtacttatttattgtgcaacaaaggatgccaagtatctcaaagcggctaaccaaaagttgcatgtcatcaagtaataatccccggacgaaattatggtatgacagatggctatcaaactcatgggcggcactggacccttccgccgaggcgtccctcctagatctcttcgtggaaagttttttcggagccattttctgcgaggacaaacgtttggagagtgaatttacaaggaaatgtcattttagagcaaaaatggcatactaatcttttcgacttataacaaacttacgcacatatttccctgaagaacaacgattatgaatgtgcatacacgcaaaatatcttactatctatatcgatatacaaagatattcaaaacatttcaactact

SEQ ID NO: 9755 - DNA, 539 bp, Glycine max
  unsure at all n locations
ttttttttngggcgtaatgatgcatgatacacncacgcgagagatagaatactaagcttctagccaatggacttaccttgaattaattcctttgcttgctctcttgagcctatattcccctttctttgttgtgaagctcattacaagccttaagtgaaaaaccatgatatcaccttacccttaaggaattctggagctttggaattgttttgggaataagttgggaataagtgtggggggtatgtctcattggaagatataatttttggccatgcttaatgttttattttggccatgcttgatgtatatatatatatatatatatatatatatatatatatatatatatatatatatatatatatatatatatatatatatatatatattgtctagttcatgctcgtaatatcacatacgcactgttaaaaaacatgaaaaacaacattcgctngctgtgtattctcacatttgtactgtgcataaaaaacaaaagtgagtgttatatgtgatgttctgtatgacgatctacttcgacg

SEQ ID NO: 9756 - DNA, 258 bp, Glycine max
  unsure at all n locations
gcttgtaactaatactntacccgtaacagttgttatataacaaatgacaacaaacacatatttagcttcagttgttggtaaagcgattgagttttgtttcttgctttcccgagatattatataaggtccaatgtaatggcatccaccacttgtgcttttttcttcaactgtgtctcctgcataagcaacatcatagtattctattaccctagaatcttgatctatcttataacataaactctggttaatggtgcctac

SEQ ID NO: 9757 - DNA, 392 bp, Glycine max
tgactattcactacattatcttccttctaaattgtgtgtgtgcctacatgaggcaaaggaggctattcgacgcttgaagcatatacttgatgctctacttgattgtacatgttcgtttgaagacatacaccttgatgacaaaacgcatatctgcgcacgaaatggtcatgaacaacactctcaacttgatgaatataaaacaaatatggatccttcaacagagcgcagaacttcaagatattatcttcttgataatatcatcagtgacatctcaaaaggggtaacaacttgacactctctcgaagatgcatgcaataatatggcttttgtttctctaattgaacctacaagtttacatgaggccataattgatgaactcttggatattgcta

SEQ ID NO: 9758 - DNA, 312 bp, Glycine max
ggaaccacatgtctaagtgaaagaataatgattggcgaactcctcttaccaccaaacacctcattaatgtctattatatttatctgcctctctcttgccattatagatcacatgactgatcgtacttacacctttctttatgtctctcactagttgaccatagtcaaagttggggttattgtccaccataatcttttgctgagtgaaattacttgaatggctaacctccatttcagcatcatcaagatatccaacagtcaactttgcaatgtcaaccaggaatggatcatccatagagctatgttttgatga

SEQ ID NO: 9759 - DNA, 591 bp, Glycine max
  unsure at all n locations
tttctaccttcacatttgccncaccatctctacacttttgttcattannncnnntccccgggtttgtgcatcatctcgtccggatcttanaacgactgcagctgcaactaacttgttaagagaaaaataaatcttacttatcaacctaacaatattggccaagctggatctatactatattccatataggaacgttctcatatcaccacaatactctaaatattagtaaatcacatactcgtagccgctacatctagttctatatcaaaatgaacaatcctctttcgaaacagctctgattcaaacgagttgcacccaanatgttgaaccatacccctccctagacctattaaacgctagtatcactatcataatcacttccgctgatacatttaccctccggcccaataattcttacacggaaacttaaaactattttcgtcaacgcacgaagccccactgtcctgggttcattccaacaggtctggaatacccttcacaatcagggtctagacggccacattcaactataaagagtcgccggaaacacaataaacttcccagacttactaaccccgccttccgacttcc

SEQ ID NO: 9760 - DNA, 81 bp, Glycine max
  unsure at all n locations
actaagcttgacaatatggtaattgaggaatcaattgttgagggattcacatccangcatgtatgagtgggaagtttccat

SEQ ID NO: 9761 - DNA, 453 bp, Glycine max
acttaattcaccctccttcttaagttattgaggtcacttatccaacaaaagatgctagtatatggctcctgtgctttttaggcccaatgatatgacctaatagtgatagttggccgactctattataaaagttcctttcacagcacgtatttgactataatacccttgtacctattcttcttaatgttaaaccttgtcattaactcaatggatcctcttgtaggcattctttctccagcaaatttgaagagcggatcatcgtggggctaaagtattgattcaggtatgtctatctgcttaaatgtactccaaaataagatatccaccgagcttccttaatgaatgagggttttccataccaagtagttgtttgataaatctggatttgagtgtattttggtgtgaagtttcatgtcatattcatgcattttaatatattttatttaataaatc

SEQ ID NO: 9762 - DNA, 448 bp, Glycine max
  unsure at all n locations
tatcacagactcatctatgaaggagaactctagttttcaggaccaattactttatttcaagggtcgtctattcaatacctgatcatagcttcaagtctagaaacattaacaagggtttatgtgaaatctatgtcttcttgtgggttaaagccttgagctactaacatagctttgttccttactaccttatcttgttcatccaatttatttctaaatgcccatcttgttcccaagatgcttttgttctcaggcttgngaacaagcatcttgacatcatttccagtgaactagtggagttcttcttccattgcaataatccaattattatatgtgattatttcatttatcatcttacgttctatttcaaacatganagcataagacataagatctttaaaatgatgatctggttttgactccttcagtctgatcttcaataatctgatct

SEQ ID NO: 9763 - DNA, 391 bp, Glycine max
  unsure at all n locations
agcttgtgtaggatcaccgatcttggttcgtttggactcctaacaagtctgagcaagcggaaatggttnttgttgattatgaggtatattttgtgctctctatttgattgttggattgttgttcatgtcatttattgattatatagttcgcatatttcagggtgatcaaattcatgctatttgtaaatcggaccacctcaagtcttggaaagctgatttgaaagagaattgcacttatgttatgcataatttcaaagttgttaagaatgatggccaatttagagtgtgcgaacatgagtacaagttatttttattggagtgacagttgttagagaagctgatttcatgaactgcttttaagaattagatttgtgaattgcaatgttgtgct

SEQ ID NO: 9764 - DNA, 484 bp, Glycine max
  unsure at all n locations
ngcatacaagattctncttgcttgacacttcataaccttctggttgggttatatagatgtcttnctctaaatccccatgcaagaatgcagttttaacatctaactgctccaagtgaagattctctgcagctattatgctcagaataactctgatggtagtcatctttacaactggagagaagatctctgtgaaatcaattccttgtttctgctgaaacccttttaccacaagtctcgccttgtatcttcttctaccgttagattcttcctttagcctatagacccacctattctgtaacgctttctttccttctggcaatntagttaaagaccacgtcttattcttctgaagggatgtcatctcatctttcatcgctagctcccactcaataatgtcattcccttgtgtagcctcactgaaacattttggctcaccagcatcagttaacaacaaataatgcaatgaacgtgaatacctatctgg

SEQ ID NO: 9765 - DNA, 410 bp, Glycine max
  unsure at all n locations
caagctatacaaatngaacntatactttgctnatccaataagattagatttatatacttgctagatgcatagtctattaaaaagtaatattacacgaagttttggattattgaatntagtctcgtagcagtttattatttattataaattgaaaatcctttttgaacactttgtttaatcgggttgtactagttattgaactaaccattacttgacctatntaatgtagtatacatctcatatcatctcactgataatatttctctctgcaccataatttcaacatggaatcaaagaagtatatcagtcaacgcatgatgcctcattttgctgtgttttctctccagcagtgtttggaatagctcttacattcagtggtttatgaagccaatactaaagtaagaaaagtg

SEQ ID NO: 9766 - DNA, 480 bp, Glycine max
  unsure at all n locations
tatgttgctaacttgaattcaggggtcaggatgataaaaggctttcttaatcgcatttgagaacaaatttcaagattnttatgaatttattgagcattttgcactcagcatattgatgtttattgaacactgaaatcacacttgttgttccagacacaaaagtcccctttagagagtatcctcttttggggataaatgtatgttcatgatctaatctattatgttatcaattttggtaaaaaattattctttattttatttattattttgttaaattgttaatttgattagtccttgattaaaattagaaacttgttatcatggtatagattatgataatgagaaataagttttataattctaatctaaattattcttgagataactctatgatataattaagacttgagaattaaatgaaagaagaaaaaaaatttcttaagtcattcattgattaagtataatggtgttaattattat

SEQ ID NO: 9767 - DNA, 484 bp, Glycine max
  unsure at all n locations
taagccaacccctnttctcatacaaaacatgttgatgttttactctatcaatcaccaacaagttgaaacctaactatatgcaatgattaagaaaaacaaagaaaaagagcagggttgcctcccagtaagcgcttctttaacgtcactagtttgacgcatattacctcaaaggtcttgtaactacagaatggtggttaatctctcaatgttcccaccttgatacaacttcaacctctgaccatttactatccatgttctgcttggagtttctgattgcggattaaataattccactgctccatatggcttgacttccttgatggtgaatggtccagaccatttagactctatcttgcttggaaacaacttcaatcttgagttgaacaacaacacttgttatcttggcctagagtccttctttagcagcttcttgtcatgataagccttcactttttctctgtacaatcttaaagactcgtatgca

SEQ ID NO: 9768 - DNA, 467 bp, Glycine max
  unsure at all n locations
actctattaaaattagtttggtgatgtttttgtgtggtgatgatgaccgttaggatgacaatggtggtgatgacgttgatggttgtagtggtgtcgatcgcggcggtgctaatggtgatgatgatagtgacattggtggaagtggtgattgtgacaggaatgttttctttttaaaaattaaaaaccaaattcttacatttataattgattntgaaattgaatataaaagtttttgaaattgagttaaagattgtttcatcaacattttagttaaacacgttttattttaaaaactacattaaaaaaaaaacatacaatcactcaaaatgtacccttaaacattaaattttactcaggatataaaacctctactttttcttttcaaacttcaacctcactttatataagaatattcagatattgtcatatttccactgaacttgtagattctaaaatgtaaatatata

SEQ ID NO: 9769 - DNA, 493 bp, Glycine max
  unsure at all n locations
ntgaagagagaagatatgaacaacttatgtgaatcattctttctatttaaagctctntgtaaaactttgtatagatactaagctcttagaataccttgcaaaccttgagagaaaagactaaagtgatgagtgatatatttgtttctaagacaattacatattagtcattgtgcagagttccaacaaatatttttttgatttgtttagaaccaacagtggtttggtaggaaaaagaatattaggttaattaaagcttgcgatagagcttatctttgtaagatccagaagtggcaatgaagaatacttgtaacttttgttaagttagtgaaaacttggtgggttgttaatgtgacatcctagaatttctacccggcaatttgtaagcgttacattntaaataatcatatatatatatatatatatatatatatatatatatatatatatatatatatatatattcttggtagaagtatgtacattgcgggagaag

SEQ ID NO: 9770 - DNA, 431 bp, Glycine max
  unsure at all n locations
cactctntgtaccaccaagttcctaacttgatcacttttaaagtcctgctgagtgagtataaagtgacttgcaacaatttggtgagtaattaaacactcatctgtatgtncaaatttaaaatcatatacatatctaagatgaatttaatgttaattntagaatgtgtcgagtaccatgtactcatttatgaaagccgtatgtttcacctatctgaatttggatgggattacagagtgcaagattgtttataataattggaggaagactacaaaaattggaaatagatgaagcacttttgcacaatcataaaatctgcaagctggtatttgagttctcagatacaacttctaacatttttattntggaattgtttgtaattaaattacattatattatactattatctgtaaatncttgttatatgtactct

SEQ ID NO: 9771 - DNA, 487 bp, Glycine max
  unsure at all n locations
ntaaccttgagctagcgtatactagtgccaaagaatggtatggtaggatagctgcatatagctgatgctgcatagcgtggatcttaggctgcattgcttgggaaaacattggtgagattatttggcttgatgtgcttgagggaaataaactgaagctctcatagttattggtactccagtttagattgcttttattaaaactctctaatgtctttccctattttaaaagacaaaataattcctgatttttaatattactttattagtttatttgtgacatagcctcatagctcgaataattaatggaatttataaatgctcatcttattaaaatacagcctanatattcagatattattaattgttagtaactcttacatgaaccctattggctattattaaatttgacgcattcatttttattcttataaagtgatatcatactcccttgcttcatgacatgtgtatcttctatatatatacatgc

SEQ ID NO: 9772 - DNA, 167 bp, Glycine max
  unsure at all n locations
ttatgtgtgaacttttacgcacttggatcatattgaaaatcattgtcaaaacttaataaatgaagttggctttagccatgttataactatcgaacaaattgacattaatcagcatttaatcagtgctttggtggaaaagtggagacccganactcacacgtttattt

SEQ ID NO: 9773 - DNA, 463 bp, Glycine max
  unsure at all n locations
cttatccanggctcatctnnggtggtgaagctcttctttcatggcttattcccgagtggatggcaccttctctcaacttttcttctttgtctttccctgcatcttcattgtggaaaaataacattaaaaggacttatttgagctcaagatcagccttcataaaagccccacaagcaagcttccatcaagtggtatcggagcacaagagcttcaagtaggtgctccttanaccctcattaattnntttttggcttaccttctcttccatggggtgttcttcattntatccatgtatctcttcacatgtcttgtgctanatgttgtaacatgattctttataattcactgatgatcttgtataaaagctgattattnttatggtcannattctgtcatgtcttgaccatgagtgtgttagttaggtccttgagtttgcttgtatttttgtgctgaacttaaccan

SEQ ID NO: 9774 - DNA, 400 bp, Glycine max
acacatatactgcaatcgagtaccatatctatatttcagaaaatattctcaaccgtcacatctttatatgtggatcttgactggctatcaaaggcctatatatatgtgacttgagacacgaatgtgctaacagttctttggatcacatacgtcttatcctcttaaacagcaaaatcgttttatcctcttacaaataccttggccgaaatacttgtgattcaataaagaattatttgagtgctcaaattgttcaatctatctctttcaagagagatctcttcttttcttcttcttcattctgaaaagggattaagagaccgacggtctctcgttgtgaaagaattctaaacacaaacgaagggtcgtccttgtgtgtctagaacttgtaaaaggaatttac

SEQ ID NO: 9775 - DNA, 297 bp, Glycine max
  unsure at all n locations
aatggttatggttagcttattaagcacttattaaacttttcacactggtttatnttgatatgtttcatgtaccaacttaataaaaataagttctctttttaaactaaaaagggtcgtaagtcattttgtaaacttaaccaaacagttactctattgcctatatgataaaatatacccaataagtgtgaattaatttgggtcagcgttctttaaattgactttatagtagagtgatttgtatataaatgtttttattctaaaagtaaattaacatcaaattttaatataaactcttta

SEQ ID NO: 9776 - DNA, 120 bp, Glycine max
aactcgcattcagctggcgtgtccaaataccaacgagaagttataatgagtatttgctcatgacgacagtcatactacttaaatatctctcgcaagcgtagacattactacatagccact

SEQ ID NO: 9777 - DNA, 166 bp, Glycine max
  unsure at all n locations
acctcctagactattcatatgcattcggcatataattctcacatgctctctaccatagagtggctttggaacacctgagcctcacatcagtgctcctgacctacacattaactttcttntcgctcaccttctgtctcatcgatgacattaatgcgaatacatgaac

SEQ ID NO: 9778 - DNA, 470 bp, Glycine max
  unsure at all n locations
agctnntataattgaattaaaacgttcagaatcttctggtaatcgattaccatatatgtgtaatcgattacacagggcaaattttgaattgaaattttaatagctgtttgtaaatcagttctggccactggtaatcgattacatcctctggtgatcgattaccagagagtaaatttcttgtgaaagactttttaacttaaaattcttggccaaaccttttgctacttcaattggaattcccttcctatttaatataccctttctaagactctatagacagtcttgatcatccatctcgaatatctctcaattctttgtcttgaatgaagctttgagacgcatgtgatcttttggcatcatcaaaacatcggcttgatcctttagctacaatcccccccttgtgatgatgacaatccttgaatcaagacaaactatgtactagatgattatgcgttcacacaatccttact

SEQ ID NO: 9779 - DNA, 266 bp, Glycine max
gcttataatgtatcgctacgctcgaaattaaacatccgaaactctttatatattcaaatggtcataacgctcctcacggatgtccgatgccggcgcataatatgtcgagaggctcaaatattaacaacggaagctcttgagaatttaaaatggccctaaccttgtaaccccgatgtccaactcacgctaatagtatatcgagccacttaacattaaacatgtgcaactttcacgaacattaaatggttataacttttcacaccgat

SEQ ID NO: 9780 - DNA, 455 bp, Glycine max
tcaacatcagaccacttcacaggtgctggaactattttatatggatctgatggggcctatgcacgttgaaagccttggaggaaagaggtatgcctatgttgttgcggatgatttctccacatttacctgagtcaactttatcacagagaaatcagagacctttgaagtattccaagagttgagtctaagactacaaagagaaaacgactgtgtcatcaagagaatcatgagtgaccatggcagagagtctgaaaacagcacgttcactgaattctgcacatctgaaggcatcactcatgagttctctgcagccattacaccacaacagaatggcatagttgaaaggaaaaacacgactttgcaagacgctgctatggtcatgcttcatgccaaagaacttctctattatctcttggctgaagccatgaacacagcatgctacatccacaacagag

SEQ ID NO: 9781 - DNA, 421 bp, Glycine max
  unsure at all n locations
tgattaatacttgtaactngntgaagttagtggaatttggtgggttaccaagaattggacgtggtcttagtggttgagacgaaccagtataacttcatgtgtcttatcttacttgtttttctttttcgtgctttaaactgactcagagtttgaatttgatttttgcttttgaaaatttgtatctgttctacaaaatctaaggctatcatctgaatcgttttgtgaaaatntgatctctattcttttacgtttttattattagacgataatgttgttgttttagaaaaaggctttaaaatttctaaaaatcacnaatccgacccccttcttatgatattttcctttatagtttggtattagagctcaccctctaaggattgagcacctaacaatgtctagaggaaaagaatctgatgacaga

SEQ ID NO: 9782 - DNA, 395 bp, Glycine max
  unsure at all n locations
tcttgcgtagccgctcttggtgctcacgaaatcccaaaaacaaatccctcttattactagctantttgaattctttagttcctgaatgtacaaccttcaaattgttgctcgttcccctatttcttttttgcaaaaaagaaaatcaaatgctgtcaaaacatggatgaagtcctaagaaaatcaatatcaaagaaaacatggatgaaatcacaattaaaaagcacaactacctatctttcagagtcctttggttaatttgtcttgtctccttatgtggtggggttttgtttaataatcttatacttttgccttccaaaaaaaacttatcactaatcctcttttcattaatcctctcttcaaaaaaaacttatcacctgcctccattactcctcttc

SEQ ID NO: 9783 - DNA, 475 bp, Glycine max
  unsure at all n locations
gcttgaagtatggactgaatgcatganatngatgatgatgacggccatgnttgattgtgatagccacttatccaaaaagctaaccatgtgcttgaatgatttatcccttgcacccatatttgagctgaatgaatgtttgattgatggaaccttaagcctatacgaatttatcttcttctacattttcttaggttgtaggagagcatcatccatagaaaagcttggtttaaggcaaaatcattccaaatttggtggagttatatgtcaaagcaaatttgtcccaaatttgggggagacaataggtaagaaataaaatgcttaaaacagagcatcatatacacactgttttctatatatataaaanaataggagaaaaaactggaagtacaataaaagtgttcaagtgtgtgtgctgcaaatcaatgaanagaaactaagtgcctaaaaagaggcaagtattggtgtgggaatgatt

SEQ ID NO: 9784 - DNA, 482 bp, Glycine max
  unsure at all n locations
ggtcttcgccagtgaaaggatcgatgtggatcttatntttaaaggcaaatctgatcatcctactaggacgactgagaaaactggggcaaataaagagggtgaggataatggagaaacccatgttgtgactgccattcctgtacgaccaagtttcccaccaacccaacaatatctttactcagccaataacgaaccttctccttacccaccacccaggtatccacaaaggccatccctaaatctaccacaaagtctgtctaccgcacttccaatgactaacaccacctttagcacaaaccaaaaacaccaaccaagaagtgaattttgcagcgagaaagcctgtagaattcaccccaattccagtgtcctatgctgacttgctcccatatctacttgataattcaatggtagccataaccctagccaacgttcatcaacctccacttttctgacgatacgactcgaacgcaacgtgtgcttat

SEQ ID NO: 9785 - DNA, 466 bp, Glycine max
  unsure at all n locations
cttctattttgtgcttgtagacacaaactctgctcatcgagggagaacagatcctataacctcctgccgcggctacatcacccgtgagctgacgctttctagatccacggaccaacttctacatattgacttgctacctcccaatgaagggaattaccttttatcgaacgagtgagacagttgcactattacatagaccaaaattcagactcgacgctagacataaccatggccaacagagagcgaattcttgaggacctatcacatagtttcgataggggctgctcctgaacgtaccgtgcaacctacatctgataagctactatatggctatgtgcagaacgatcctgacgtgcgagaaacaggactttgtttgcttagcgaatattgctaactagaaaagcgaccagcattatgttctctctcgagctcatgattacccctcgtgaacagaaaccacatcctn

SEQ ID NO: 9786 - DNA, 66 bp, Glycine max
aaaccttcatttttctttcttcttatccgaatcacctctcgctgaggccaatctgcctgtttatcc

SEQ ID NO: 9787 - DNA, 378 bp, Glycine max
  unsure at all n locations
agcttaaacattatactntgagcgtctcgatatattactggactcaatcagacatctgagtaaaaagttattgccgcttgaattggctcaaaggttcaaaattcaatttcgagcgtctcgatatatttcgggactcaatcagacatccgagtaaagagttattgtcctttgagttggctcagaggttgaacattcaatttcgagcgtcccgatatattacgtcactgaatcggacatccgagtaaaaagttattgttcgttgaatttgctctgagcttcaacattcaatttcgagcgtctcgatatattacgggactcaatcagatatccgagaaaaaagttattgtcgtttgaattagatcatatgttcaacattca

SEQ ID NO: 9788 - DNA, 438 bp, Glycine max
  unsure at all n locations
tactaagcttaagccaattatacgacaataactntttactcggatgtctgattgatgtccgtaatataacgaaacgctcgaaattgaatgtttaagctttgagcccattctaacgataataactntttactcggatgtccgattgagtctcgtaatatatcgacacgctcgaaatngaatgttgaagctcttagcctatttaaacgacaataacgttttactcggatgtccgattgagtgacgtaatatatcgagacgctcgacaatgaatgttgaacctctgagccaactcaaacgacaataactntntactcggatgtcctgatgagtcccgtaatatatcgagacgctcgaaattgaatgttgaacctctgagccaattcaaacgacaataactttttactcggatgtctgattgagtcccgtaatatatcgaga

SEQ ID NO: 9789 - DNA, 387 bp, Glycine max
tcgacctctatatttcttatccaagtccttattactactaatagacaaaccttcaggtggttgcacgtatattatctcactcaaatcaccattcagaaaagctatcttcacattcatttggtgcaactgcaaatcaatatgagctactagggccataatgattctaaaggaatcattcgttgatacaagagacaaagtctctttaaagtcaacactctccttctgcataaaacccttttacaccagtctagccttgaatatctcaatgttaccatataagcacttctcttcttgaagacccatctccaattgattgccttcaaattctaggtaattcaactagcttccatatgccattaactgacatacattgcatctcttcattca

SEQ ID NO: 9790 - DNA, 469 bp, Glycine max
  unsure at all n locations
tatgcctaagctaattataacttgtgaagaagttcatttcatttcttcttattttcttcttatacttcactgttacgtatcagtgaagtattcaagagtattggtattggataggcatggatatggatacatgaagcaaatgtgcttcatagtatggtatagactaaaacgctattgttaacattcatcaattcataattctttaaacttggatgttttataatttgcggtccttgattctctatatcattnttttttgggtggaactcgggtgattctaatatactatagtttctctgttttaatagtccacaacatgtaagtttttgaaagcatccgtaactcatgatattggtagtggtgtttctaatctgtgctcatgggcacatgttaagaacacanaaataaagttaattagaagcattaataggatacatttaattnttcttaacatgtgccatcgaaacac

SEQ ID NO: 9791 - DNA, 469 bp, Glycine max
gtcacctgcggcatgcaagcttcataaattcaatatataacatattatctgaatcgatatgatggtgacagggcgagtaacccatataaacaaatattgtggttcaaaattctagcttgtgagattgatatggtctaagaaaaggataacaagcacaagaaaatacttttatgaatgtgtaatcaggcgttatctaaagcaaaaaatgatatggagtatcaaatttgattgtcagactcagtagatatctaaacctaaatatgacataagaaacagtcagcacagagataaattccaacaaaagtaacatacgagcatggatcaatatgattatgatttgtgaacaaatagggaaagttttgaattctaatatacattgcgacaaaaatgattctagtggccacaaaatacatgataatcaacttttattggatcaagacagaatataacattcaaaaccacatatcct

SEQ ID NO: 9792 - DNA, 473 bp, Glycine max
  unsure at all n locations
tcatgatgaatcaagaatgatttaatgatcacaaagatgtatgactttaagctcanaagtcaagaacacttcatgataacaaagataatgatctcaagaatcaaagaatgagttcaagattgaatcaagaacacttcaaggttcaaaaggaaatttgatttctagaatcaagaatcaagtttcaagattcaagttccaagaatcaaaatcaagattcaagaatcaagagaaggctcaatcaagataagtattaaaaagttcttttaaaaactgagtagcacatgaatttttctcataaccttttatcaaagagttcttactctctggtaatcgattaccagattattgtaatcaattaccagtagcaaaatggttctcaaaaagctttcaactgaatttacaacgttccaattgatctcaaaatgctgtaatcgattacaatgatttggtaatcgattaccagtgtgtttgaa

SEQ ID NO: 9793 - DNA, 410 bp, Glycine max
  unsure at all n locations
agctntacagatttggtcttcgccagagaaatgatcgaagtgggtctgaaaagaggcaaatttaatcatcctgcttgggcgaatgagaaaactggggcaaatgaagaaggtgaggatgagggagaaacccatgctgtgactgccattcctatacggccaagtttccaaccaacccaacaatgtcattacttagccaataacaaaacctctccttacccaccacccagttatccacaaaggccatccctaaatcaaccacaaagcctgtctaccgcacttccaatgacgaataccacttttagcacagaccaaaacaccaaccaagaaatgaattttgcagcgaanaatcctgtaggttcaccccanattccgatgtcatatgctaaacttactcccatatctacttaata

SEQ ID NO: 9794 - DNA, 391 bp, Glycine max
tctagacaaacttaaacgaaacttcgtacttagatccctcttagtggactaggctcatctgaatcaacttacgaacgtgtagactaagtgcacctaagcttgatcttcacatccctcctgttggactagacttacactaaacaacattatcatcacagcatattaagaaaactaagacttagtcctcatatccctcttgttggactgaggaacaatcctgcttctatcaagctctaaggcaacagtacatataccactgctaaagtcacctaaccatgcacaccaatgggtgatcagaccaggagcgtacaaaatttaatcactgcatgaggccttgatcacaatacacacaatcaattagatattaacggaattacatcagttgttcctt

SEQ ID NO: 9795 - DNA, 417 bp, Glycine max
  unsure at all n locations
agcttntgtatgcntttcattctttatttcatgcttcaggtgcaaacaggagtaaacaaagaagcaattaatatattaaacaatagagtcagctactatgaaaaattatatattaattagttcagctaagcggacacaaagtaagagaaaaaatctttcactattaactaatgacctcggttgtgcacgaccggggacaatgtacaattactcaaatttcaaattctcttttgtatataaagtatcacatcaaaagtcaaaaccatcagccattatcaactcttgtgggatttcgtgacttggcaacgtaggaggaacacaaacacaacacagccatgaatgcaaaccttctcagaaacttgtccttccacgcgcgccgtcttcgcttctctcccactcctacagttacagcaccca

SEQ ID NO: 9796 - DNA, 421 bp, Glycine max
cggcatataggggaagcagttgttccaagagcactcatgtattcttgtaaggatattgtgaagtttaataaggaggtttttggtagcgtattggggaggaagaaggagattgaatggcgccttaagggtacactgccttttttcatgcccacacagtcattcatcgaaagcggaatcgtattcatggaatgcttgtgttatgtggaagctggtgcactgatgcccaaatccttaagcaagaagcattgaagtacttttagtcgttgttttgcacaacggaagcgataagtggagagctactgggtgcgaatgtgaacaaattgccacatgaagcacgattgaggctcattgaacctgtgacgaatagcgaactatatgcgacactcatgtccatgagatcatactgtgggagatgatgtgt

SEQ ID NO: 9797 - DNA, 414 bp, Glycine max
  unsure at all n locations
agcaagctttgttntcaatttcgaccatctcgattattaccagactcatccggacttccgtatataaacttattgtcaattaaattttctcagagctttggatcaaaattttgagcgtctcgatatatcacgggattcattcagacatccgagtaaaaaattattgtcgttagaatttgatacgagcttccgttttcaatatggagcatctctcgctaaattgccataggctatctggcatacgagaaaaaagatattgtcggttcatatttctaagagtgtcccttttcaatttggagcgtctgaatatatgactggactcaaccggacatctcgtgtatgaagctattgtcatcttaatttgctcacagcttctactctcaattgtgagcgctcattatattacccgattca

SEQ ID NO: 9798 - DNA, 266 bp, Glycine max
atacacggatgtcctgttgagtcccgtaagatatcgagacgctcaaaatttatatccgaagctctgagaaaattgaattgacaataactatatacacggatgtccggttgagtcctgctatatatccagacgctgcacaatgaaaacgaaagctcgtaggaaatacaaacgacaatgactatttactccgatgttccattgaactcggtcatatatgaagacgatcaatactgagactacgaagcgttcctcaaattgaaatgaca

SEQ ID NO: 9799 - DNA, 465 bp, Glycine max
  unsure at all n locations
agcttcaccttctggtcctcctcatagctgttgcatgagataacatgctctattntcatcgcccactccaagtaggcctccggatcattctttcctttaaatggaggaatgttgagtttaataccatcaattcggttttgtctaggaacaccatcattccctcttctcctcctttcttcttcattatgatctctattctccattngattcaacctctcatggagcgcatcatctcgttgtttcattaacctctccaaatgttacatcaaagcttgcatttggaattgctaaagccccactccatcattaagattagtacctgacatctcacacaaacaaatcaaacgcaacaagacaattatagtttgtgtttgaatacctcacccactcaagtgtatcacacaattatggcttttctctaatgaaacactcttaccttctaccactcgtagtccccttgagttc

SEQ ID NO: 9800 - DNA, 415 bp, Glycine max
  unsure at all n locations
tcttatccaaggctcatcttggtggtgaagctccttcttccatggcttattccctagtggatggcgcctcccttctcctcttctcctttgccttccgctgcatctccatggtgaataatcaccattgaaggacctcattgaagctcanagatccagcctccatagaagctccacaagcaagcttccatcaattaagatcacattgtatgtaatttccatgccgcttatccatanttgatctatgtcatcgagtatgagtaacagtgatgatcattgtggcttagtcaagctaaattatgatgaanactgccgtggtttcctgttgctatatgagatggaccacaatgtataaaaggagtctaaaagtaaataacgtacggttgcgcgcctaaagaattatgtgatataaatgtct

SEQ ID NO: 9801 - DNA, 343 bp, Glycine max
tgagaataaataaacatcaatggtgatgaagaataaataatattagttgatttaactattttacagttaataatctcaattgttgataagaaaatcaatgacgtgcatgcataacaaatcatgtctaagatgaaataccaacgctaattttggttttatatatatattagcaactgaaattacttattctattctttgaacagaagaatcataatattggtataagatttacaggtttttttttaaagatatgttctacagtttacaacaggaggggaaatcacaattaccaaatgaagaaaaaaggtcaaactgattgatctctgtgtactgaattcaactc

SEQ ID NO: 9802 - DNA, 412 bp, Glycine max
tatgctctgcatatgcaatttgtatacttatatgcggggtacataaaagcagattgctggttgctgtatatgttgggttcgtttgaagttatttttaatgtattgactgacgatgaaagattaacttatattcatgcagatcgatcacgtgcctctctatggaatttaagttacttgaataaaaatatcttgtaagcattattccaaatttactaatgcaaaaagagacgtgtatgggacgtgcgcatgaatgtgtcaagacgaagataccagtctttcagttgcacttagtcaatctcacataatttattacgacatctgatgaaacacacaaaagatcttatacttctcagtgtaatctccctctactttcttccattcatagtctaatgtagaaatatttttctattgt

SEQ ID NO: 9803 - DNA, 447 bp, Glycine max
  unsure at all n locations
agcttctccatgcctctgggaaccacanagaatagtggtagtcctgtctgcttaaaacaaaacaagttatatcacagattatttcaatacctattcctttatcaaacattttagtaaacaccataacataatgaaagactagttggaagacataaagacaccgtatcaccaattcaaatgccagctagagaaccaaaaaataaaaaataaaaaaccactatgaatttactcttggaactgaaaaccacactgaaactgttccgcgaaaccctctggttcacaatcccattgacactattgttgctttgcatggtgccccgaatctgcaaaaaaatggtgccgtatccaccangcccaaaaggcctacgtacctctaataggcaacatgaacatcatggagcaactcacacatagaggcttagcaaacttagcgaagcaatacgacag

SEQ ID NO: 9804 - DNA, 453 bp, Glycine max
  unsure at all n locations
cgctagaatgctntccaaaatctaagatacctatctaacactatataggtaggtatgccatgaagcttaagtatctccttattgtaaatgtctgctaatttgtccaatttgtatgtctccttaattggtaagaagtgagcagacttggttagcctgtccacaaccacccatatgacctctagacccaaacgagtttttggaaaacttgttacaaaatccctagaaattcattcccatttgcactcaagaactcctagaggttttaaagttcttggttttgaagttgttccttcttaatcaactctntaatgtcactaccgatctccaatctattcaacttcatgatcaatgcattcaaattcaagtccctaaactcctctatcaagttcatcttttacaccatcaagctagacatgtgcaaagacttcctactgagaggatcagccactacat

SEQ ID NO: 9805 - DNA, 413 bp, Glycine max
  unsure at all n locations
gttagtatcatatacgacaagttagaatatatttccattgagctggcatatatgtactaaataaattcattaaggcaacaaaatggaacggcccaccaaaccacacacatgagctggtggaccaaaccctaagtaaggagtggggcctgttatagctacagatgcttgagtcattatgtgggtatgcttcctaagaaactntgttttctttatatgaatatattaatataccttccttccaaccaatgaaatcatgtataaaatcaaactctgttntgtaacatagctacttaaaagttaaataactattaattntactttgttgacaagcctcttgtgtggcaattttatttcacaggggtaacaccnttttagagaaagtngataattaacttcaacagatggacaacata

SEQ ID NO: 9806 - DNA, 466 bp, Glycine max
  unsure at all n locations
tgtagaacaccaaagatgtaagaacaaaatttgaaagaagtgttatatttgaaacaataagagctaatatacaatcagatacctgaaagtgataatttatgttgctatgatccctaacaatgtataattagtccctgttagattacatttatctttacatgatcttgtatatattattacacaaaaacttatgattctgattgatatgtaattacctaataatcagtaattgattgatatgtaatcaatattgattctgatttctccattataaataaagatgagatgtggtcatctaagacacaaaattacagtaaaactaaaacactgctatatggtatcaaagcttaggttattcttgacagaggaataacaaaattcgtcctccacaacctactgtcccagatggacctctctgctagtcatcctatccagcaacctattntcacatccagaggacctttct

SEQ ID NO: 9807 - DNA, 385 bp, Glycine max
  unsure at all n locations
tgcataacccncacacctactctattacaaatcaccacaacccccaacgccagcgccaccttcaaccgaatcctcatcctccctttcttcacatcaattatataagacttcccatccttctcacccctccttcccttcactgccgtcaacatatgattctcctgcaaatcaagcacatagctaaccatcccactcaacaatatgtctataaatccaaaccccaccaacacaaacaatatagagaaaagcttagtggctgtactattgggagtgatatcaccgtaccctattgtgcacattgtcactatacaaaaatacaatgcatcaactataggatgagtctcagtagctgtaaaattatgacgattgaaccaataaatgacaa

SEQ ID NO: 9808 - DNA, 486 bp, Glycine max
  unsure at all n locations
aagcttaatattatgctatctttttttgttacatcatcattttgtttctaatatgcaatcttattattttaagagaaataattataatataaatcatcaaccaacacgatccgtgcacacacggttcaccgactagttaatcatcaatggcaataacaatgacacctcccgctctgattttcttctccgagcgacatgctaaattagaatttaaataataatgggaatcggatgcattcttgtttgattcaatgccgaccaaacataatcaacatatcgacagaaaaagggtaaatggaatataaatacgagaactgccatcgtcgatgtatatattcatctacctgtagaacattcgacgacttaaaaataagcattatcaacagaacccacgttaaacaatgaccctcatcaattcatacagcanacacatgaacaagtcaatggtttttgactgctccacantttacactcgctgaaagccat

SEQ ID NO: 9809 - DNA, 386 bp, Glycine max
  unsure at all n locations
agcttatataanaatcataaaattaatttcatgactcacaccatacaaggtttataattgtaatgatatgctctaaatttcctcaataatgttgacgaaacatttggatgaaggccacagatattacattgagttggaagtacacgttgttctcctttgttaaaggagaagaagtttcacctttcttatccttgaattgatcttcacaggtatggtctangcagttccaaagtatgcacacattttatccatatatatgctctttctactttgcaattaattgaataaagcccaagatctaaactacaaatatgaggctgactgaaaaattacaattaacccagtgctgtccagtcaccatttgaaattccttaattttgccccct

SEQ ID NO: 9810 - DNA, 437 bp, Glycine max
  unsure at all n locations
cgtaatgtatatgttacaatgttcttaaatttctaanaagtctttaagatcaacctgtttacgtaagatttctcagaaagacttctaacaaaataagaaaagaaaagtttctcataattactcttataaaccagctaatgatagaagctctttcatattagtttttttcataagatatttttagattatgtataaactagcattaacttatagaaaagtttatttaatttttctctttttgttttctttgtttagtagtacttctaaatacatttatccagatagacccttaatattaatatatatcaacaatacttagaatcttatgagactgagcacgattattgtacgcaagtagtatttgactcctacggttctctatttgatctcttgcaatctgagctaacatgaccgtggagtaaatattccgaaatgac

SEQ ID NO: 9811 - DNA, 345 bp, Glycine max
  unsure at all n locations
agcttaaccgcgagagaatgatcgtacatcccaatgacttcgtgcagcgcgagcttcctgagctcctgttcggggccatttcccgtgagccagcctcggaagacccctttgtcgaggagataggcgatgcgcttcatggtggcctggcgctggtgctccatgggctggttgtagtcggggcagacgaagaatcttccggcgcggtggcggcgattgaagagggggctctggacgataatggagaagagccagtcgcggtcctcaaggttgtggcagtccatcagttntcgcatctcgcgagtgtcgaaagagatggtgttggagagctccggcggggagtagctc

SEQ ID NO: 9812 - DNA, 496 bp, Glycine max
  unsure at all n locations
tcatcactaaacatggacatgaatngttcatcatcgaacctctctaactcgttgttgccgccgccaccaccaacaacactgccacctttgcaatgatggtggtccagcaatggtgcctatattatagtgacggagtcgctcaccgaccgccggggggccccgcgcctcgccactgagaactcaagaatctcatccacccatgaagggttttggtttgatgacgtggtctggagggaaggcatcttttggtgaagagaagaaaagtctggccaattgcgtgtcatgtttggaataattggtggcaattgagccatcttttgagtcacaccaattaatcaacacactctaacaagaagatgacaagatgaagatgaagaagaagaataagaatgaatgagagagaaagagagaactatatatattaaccaaacacacaacttggtatatatnttttcgatatctaagcatatatatacctcgtatgcgtgtgatatat

SEQ ID NO: 9813 - DNA, 255 bp, Glycine max
  unsure at all n locations
ggatccttaagtcacctgcngcatgcaagcttagcacacagagtttgtagcccaggcctgtgtgacggtgttgactgngccaacattaaccgcaccgtttgatcgaatatattggatgtgtttgattaaatgtgtacggatgaattttcttaaacataattttaagtgaaactaatcctgattaaagattaatgactgtcattatatctacatcattttattacagttcagttacgagaatgaatataattcaat

SEQ ID NO: 9814 - DNA, 488 bp, Glycine max
ctaagcttagatttgaaagagttttagaaattacgaaactgttgttaaaggaaaggagaatagagtataagtatgactgcaagtcacatccataggccttatagtttttcccagagaaagtcttatgtccattatgcaaatgttctgtcaaacaagtggtttcgatctgggaacgagggaactagttcactttctaaagaatttgaagttaatagtttagaacttcaaagaggaggaactactaaatgttccaaaaagggattctatgactaccagaatcctccataggtgaataagaacatgttgaaaacccaataaaggaggcatcatatgttgaagagggatgcaatattggcaatgcaacaaaagagtggagttagaccaataaccgaacgtccacccctacgtttcataaagaaaatatcatacaaggaagaggagaaggacattataactaactcttttgagttcggttctgattattcttt

SEQ ID NO: 9815 - DNA, 353 bp, Glycine max
  unsure at all n locations
agctntcaaataannaattggtgttaaaaaggtggtagaaagtgttataagaatgctcaataaactgttatggagagaagtagaaacacttaatttatactagtttagtcaacctaagctacatctagttctcctttactcacttgtaaagggttccactaatcaaaacttgattacaaaacaagtattctaaccttccactcttggctttacaagtattcttcataccacttttggtaccttcttatactccccatgaatataagaatcaaagtattgtttaacactaaacactccttgatgcaatcctacccaccaagggcattggatagaagactctaagaagtttgggc

SEQ ID NO: 9816 - DNA, 482 bp, Glycine max
cgagacttcaagatatgaactccttgttcctttgagcatttcatgcaagcttcacttaaggtaagggggagttttccacttcttgaaccttaacctttttgtctagcaaaatttatgtataaaacaagtttaaggtcttttgtaggattaaagttactttggatatgttggatcaagtggcctctgaataattaagaaggggggttgaattaattattactgaacctttactaattaaaaatgtacccttcttaggcttttactataatgttaagaaagtaaataacagaaatggaaacttaaccaaaagtaaaagcaataattaaagtgcacaacggaaaataaagagtgtatggaagaagaagacaaacacaagagttttatactggttcggcaacaacccgtgcctacattcagtccccaagcgacttgcggtccttgagatttcttttaaccttgtaaaatcctttacaagcaagatc

SEQ ID NO: 9817 - DNA, 235 bp, Glycine max
  unsure at all n locations
tccttacgcatctgtgcggtatttcacaccgcatatggtgcactctcagtacaatctgctctgatgccgcatagttaagccagccncgacacccgccaacacccgctgacgcgaacctcttgcggccgcatagaatataacttcgcatatcgctcgccttcgaagttcttatcgattaaccccgactctcatcgttctctgttacgtctataaccgagaaatcgaattccctccg

SEQ ID NO: 9818 - DNA, 391 bp, Glycine max
agcttatccttatggctggcctccggacttcactccccgtgccactccgaaagatttaagccaagcccctacttttgaggggcaactcccgccttgtgacgactattccgggcaagacgatgaggaaggagatacccatctcggccccctgctccaccttaatgatccgtccccacatgaactaccccaaccgaacatagtccgccatattccggcctcacccacacccgtaaaagaatctgttcccttcgcggaagataagggaaagatagacgcgcttgaagagaggttaagagcagtcgagggccttggcaattacccgttctcggatttagcggatttatgtctcgtgcccaatatcgtcattcctgccaagttcaaagtaccggac

SEQ ID NO: 9819 - DNA, 473 bp, Glycine max
  unsure at all n locations
ntacagcatattttagtaatgacccactaacctataattaatataacttaatgccattaacctacggaattaaaaaaaacttaatggctgagtgtaactgaaatcgtggcaactaaaagtcacccccaacagccaacaagtcagccaccatttggtctcccaaaaggctgatgcctaggttgccaattgggcccttattacaacttgaactaaacctaactaaagcccttttagttgattaacccaaaacatatttttggtcagccaactttacaaggattgggccattatttagacaaactaaacactctaaaattgagacaaggtggtgtcatttagaccttctacatttgggccatgatacaactcacaaccttggacttttctccttgaaacttgngcttgtattcaaatagtatggacagcacttgatgaagagcttccttggctttccttgctctaacccttgtcat

SEQ ID NO: 9820 - DNA, 495 bp, Glycine max
cggcattgtgctgctatcgtctcgacccggatccctaagtgacctgcagcttgcagccttgtgtgatcgaatacacttattttgttatttattaccaatgatagtttcctgaataaatcaaaagatgtaactcttcatatgggttttgacctctttcaattggttttaaatttgtctaaaagtcataacctttctaatgggtctcttgaccagacatgaagagtctataaaaaccaagctttggtttgcatttcaatcattcattcaatcaagtccatcagtcttatacaatccgttacaagccttgaatctctttaacttcttcttttctttgtgccacaacttttcaaagtttctagtttctaaccttgaaacttggctattattctttcatctttctcccttgccaaaagaattcgcgaggactaacacctgaatcttttgagctctctctcctttccaaggacaaagataccgctgaatctttggtctcct

SEQ ID NO: 9821 - DNA, 481 bp, Glycine max
cgcttctcctgaatatcaaatgcattctgagaataagaaatggacaaataaggattggttagaagagcactaactaaaattaaattgaatttgaatttacgaatgtaggcaacattatgcaagagtgaggtattggttaagcaaatcgaaccaatggcaatgataggtataacatcattgttaggaagagtgacggttttatcataaacaagttggtaagatcgaaaatgatgaacggaacaagaaatatgaatgttggcaccagaatctaaaagccaacaatcatgaagaaaattagaagtggatgtaaaaaggatcataccactggcagaagacacaccttgagggatgacaacattggaagcatgactctctaaaagattcatcaatcggctatatcgttgggcagtaagtcgaaactgggaacccgagtcaccagaggaagatggtgagtaagacatatcaacagatacttgagcaa

SEQ ID NO: 9822 - DNA, 399 bp, Glycine max
  unsure at all n locations
agctntgcagcatagtggttgtgatttgtgagctctgggcatctggtcctgctgatgcaaacggaggcgctggagtagatggtgaagggatgtcatctgttctggccctggttttcctttttcttgatgccatctataatgaaaagaattcaaaattcaccttagattacatttattcaagttgctgaaattgacgatgggcgcttagcaggatacaacatgcttagcgcgccttcagaaatataacacttccacttagcgcaacagggtgcactttagccaaatcaaggccctaaaaggtatgcgctaagctcagcagggttgcgcttagcgccaccatgaatttcagaaaattcactaagtacgtgagcttagtgagccaggctcgcttagccccat

SEQ ID NO: 9823 - DNA, 315 bp, Glycine max
ttaaggacgctatgacactccaaaggaagaatactaatgaatgaacttgctatcggaactgtagtaattgaagtgactcaataatcatgactctcaccaattaggttgtgattggagtcttactggattatatgaatggaagttaccaataacgaatgtgaaagtcaaggttggctgtataaaaaaatattaattagtaccatatggtctgtacaaggcgaagacaacatatatattggtaccacacaaataatattagtatatatacatatatgtaggcgcgcccatcatgcttatgaaactactaataaacct

SEQ ID NO: 9824 - DNA, 431 bp, Glycine max
  unsure at all n locations
gcttttactcctgattctntggaacttacttatctcctaattctttggcatcatcaaaataatcttggaagacattgcttccatagggagtgctacttgagctgccagatccctccacctttgggcgtattctttgaaagattcatgctcctttttacacatgttatgcagctgcattctatccagagccatatcaaaattgtactgatactgcctaatgaaggcaaccattatgtccttccaggaatggacccgggaagattctagattggtgtaccaggtgacggctgccccaataagactttcttggaagaaatgcatcaagagtttttcatccttcatgtatgcccccattttcctgcagtacatcttcaagtgattcttggggcaagtagtccccttgtacttgacgaaatcttgcaccttgaact

SEQ ID NO: 9825 - DNA, 474 bp, Glycine max
  unsure at all n locations
ntgtgaatggcatccagagatgcaccttctaatattcgctctttggaggtttcacttcaggcgaagggtctcttttgagcttctcaaaaagatctttagggatactattttgtgtgctcttcttatccttgcacttttgaagattttgccaagcttctcttggtttaacctccattgatggacgaacccgttgttgggtgccaggtgcaagccaatgcagtttcatcttgataacttatggttgcacttgacgtgtctattgtggtagtggtaaatgagctatggcatctgttggaagagtcttgaaggccttagatggtgtgtgctcatagttatacttctttcatgttgaggcttggacaatgatggtttccttctgaagagactcaatggatatggactcatggaaggaagattcagatattggattaccaataacgaatgctaaaggaaatctttgagcatttgtcaatg

SEQ ID NO: 9826 - DNA, 438 bp, Glycine max
  unsure at all n locations
gctgcagctatgacaaaaataatgcccccagatctttttacataccagatccattgcaagcatggcagaacccatatattgncgttgcaaaaggtacacaacaaggattcatcttcttatatgagactctgaaaggcttcgatggcatcattgaacacctgtgtaatacacaaaagtacaacaaagcagtaaacaaatcaaggcaataagaaaacaaaatataatacgattcctgctcctttctgattgcattttacagcaagtttgatacacacaaccaacaggggagacaacttcttaaagaggtcatgacgcttctgcatataaaaccaaactactgaatgtcggcaaaggcatctttctaagtattgaatctcacctaaaagagagtcaaataagtaccttatgccacattgtgaccaacagacgcaactttct

SEQ ID NO: 9827 - DNA, 458 bp, Glycine max
  unsure at all n locations
agctntaagttggttggtgccaagtaggtaaccttttcaccatttttacctgtaaatcgtntgtaaaaaatttgatttgtaacatgcaatacttacatataggagcaaaaggggcagagttcattgcatatgctttgaaatacaataccaccaaatcaatttgtgcaggtgatgtattttgtgctattgtttttgcccaattttatttttctttccttttatatttattttcatggatctgtatatacttcacatacagagtgctttggctgatacaacaagagaccatgtctttaagatgatcgaaaaggaaatcaacatcttccaatagaaaccgctacaacagttgcatattcttctattgaactattggatgatacagttgacccacaagagttaacctattaagtttattgttatcattgctggtatagtttcctaaactaaaggcatcatgt

SEQ ID NO: 9828 - DNA, 432 bp, Glycine max
  unsure at all n locations
gctttgtctcccaggaatctaaagaataaanatgagaaatattgtgttagtggtgattattcagtaataaggacactaatacatttttatgaatttaccacacgcagtaacaatcacgatgcctgaaaaaacgtcgttgaaggatcgcggtggtaattttgtaatttttaggacttcatacaacgacggtggttgaataaccgatttggaaagcaggtttatatgatgacaatgacagctttattcagaccgttgtagttgtaacaatttacaaagatgagtttaccatactcaccgtctttgaataataaacttttattaaattaaattttttccccaaatcagacaataattaacaaggtgtcctcagttgaaggttgtcgcgcgcgcattatctggctggttgtttgaaagctatcgttcatcgttgtc

SEQ ID NO: 9829 - DNA, 472 bp, Glycine max
  unsure at all n locations
gcttctcatggaagctacctagtctataaatagtagcatgtgtaacacttgttgtaactttgatgaatgaaagtcttatgagatacacttcaaagttccacttctttccttcttttattccttcaatttcgtgctccccccttctctctttcttttccttcattaaagcatcctcttcaagcttcttatccaaagcaattcttggtggtgaagctccttcttccttggcttattccctagtggatggtgcctcccctatcctcttctcctttgcctttcgctgcatctccatggtgaaaaatcaccattgaaggacctcattgaagctcaaagatccagcctccatagaagctccacaagcaagcttccatcatcctatggtgacgatcttnctctagactcatcttctccttgaagtggcgtctcctctctctcttccgtctgcattccgctgcattcatcttcaagaagc

SEQ ID NO: 9830 - DNA, 455 bp, Glycine max
agcttgttagaactatcatcacatgactctttattggcacagaataatttgctttctaagcaacttgagatcttaacagaaacacttggtaagtttccaactaaactgtctattggtcaacctacacattcttctgttttgcaggttgcaggttgcaagttgtaccatctatggtgaggctcatgaaacaggccaatgtattcccagtgaagaacacactcaagaagttcactatatgggaaatcaacagagacaaggatatactcaaggaggattttcaggcttccagcacggtccttataaccaacaaggacagtggagatcacaccctggcaatcaattcaacacagaccacggtggaccttctaatatgccaatccaataagggcctaatatctcttagaggactactaagttggaagagactttgactcatttatggaggtaacaatgtc

SEQ ID NO: 9831 - DNA, 302 bp, Glycine max
gattcgacccacgcgcgtgtagaatagactgcatgggcattctccttctatctttctgccccctgtgccccgatgctcttggcattcacgattgtggaggaaacttaatcaaactttcctcttttcatatcctacctaagactctttccccggcaacaccagatccgcatagctggaccgcatgtaacctactagctttctatagtagaacactggcagagtgtgtaccatcatggggatcatctctctctcatccatgggatgagctacttgagccgcccaatcctccatcgctgcgcata

SEQ ID NO: 9832 - DNA, 461 bp, Glycine max
  unsure at all n locations
ctgtggaccttacagttgtgccacagagcatgagtcatttatcttactataaaacaagctttgcaattgttgcacgagggcttctaagcttggtgttactcacaaaggcaaatgaaataggctgcctangccaacgacaaggatggtgacaagggtgacaagatgggtggcataggcggatgattccattattattcttacatgtagtatggaaaattttctgttgttttgacatatttttttagttgatggtatgtttgatttacttattctttgtgttcgtcaactatttaaacaacacatgcttactacttagtattaacaacaatgttttcttcaattgattcatataacaaacatatatgtaaactacaactaaagatacacttataatacatactctttctagaaatataatacataaacacactactatcttgatacagtanaaacatgactac

SEQ ID NO: 9833 - DNA, 344 bp, Glycine max
agtctcacgattgtcacgtgctcatgcaacaattgttagccgtggctatacgagacatcttgccaaacaaagtcaggttaacgataactcgcctgtgctttttcttccatgctatatgtagcaaagtcattgatccagtcatgtttgatgagttggaaaatgaggccgcaattaaactgtgccagttggagatgtattttccctctgctttctttgacatcatgattcacttgattgtgcatctggtcagagaaatcaaatgttgtggtcctgtttatctacggtggatgtacccggttgagcgatacatgaagatcttaaaagggtatacaaagaatctatat

SEQ ID NO: 9834 - DNA, 415 bp, Glycine max
  unsure at all n locations
ngagtactatgaaactctctaactcgacgacactaagattcacttcctctgctcgaggatgcctcgtccaatatgtcgacatcagctacaacactagatgagtgtgcctcaaaacattctttattttctcaactgcctgaacgcgagcatattcatgctttacgtatacctcatagctgagatccatctcgaaatacgagctattacgtgtctaatacctttggcgcttgatacgaggactgctctttgcagacagagagtggcgaccaccaacgctatctgtagcatatctctatacaagtcatatcctatcctgtagcatagtcgatcaatgctgacttcctcattcatagtgcaagatacctatatctcgtgcgacaaaaggacttatcaactgcgatacaccacagtctaa

SEQ ID NO: 9835 - DNA, 322 bp, Glycine max
  unsure at all n locations
taattcactccccacaagtaagtgcaatttcccttggtcatttggctctccattgatgtgttttggtgctttagttgctcactctttgcaaaattcgtgaagcaatttgcatctgaatccatgcttgttttgtggagttgaggacttgaatgaggaggccttaagcctatattgtattctgaaacaatggggcatggcacattgccctcattctcttgcaatatatgtncaaacatgcgcccatcaagtgctcggtgaaatgccccaatgatatatgaatatgaatttgcaaaattgtgatgcgtgggctgttttatgtatg

SEQ ID NO: 9836 - DNA, 270 bp, Glycine max
  unsure at all n locations
actcaagcttgcagattctcacgaaacttaccgaaacgtnttgattccctcgcttagatttcttcacggaaacaattttcaagcaattgaaagagaagaatgcctaagggctggaccctttcttcttcacttctcccctatttatagcaaaataggggaggggtgccgccagctcgcccngcgactcactccccggcgagcaggtgcttctccaaacaccgctttggagaatattcagaggccaccggcctggtgcttttcacccctttt

SEQ ID NO: 9837 - DNA, 421 bp, Glycine max
  unsure at all n locations
tcgtccggatcttaagcacctgcggctgcagcttgtatagttcccaattggggtattttgtagtgatttttgtaaataaatcttgtttntggttaatgctgtctctagaacatttccattggatttaatgatgaaatntgtacattctcaggtgaaaaagaggctaagttttgaattgcaaatgtagcagttgggctaagctcaacaatgggctaagcacatacctaccgctaagcgcagcttcagcgcgcttatcgcanaggaggatctggcagagcatcagcatcaaagctgcatgctaagcgcgagatcaatgtgctaagcaaagtaggtgtgattgaggccgtacccgaatcaaataaacattaaaaatacagtatctaggaagtgatcctaggtcgtctcccaacgagcaatggtc

SEQ ID NO: 9838 - DNA, 406 bp, Glycine max
tgctaacccatggaagctcctaatatctcccacactatttgtggtgggccattcttggatggcctagatattcttagggcccacttggaccccatttctaccaactacaaaccctaataaaactatattatctacacaaaaggtacacttctctatatttgcatatacggtgtgtctcctaaggactgaaagaactttcctgagatgtcctaagtgatcatactacgctccaactgtacactaaaatatcatcacaataaaaaactgcatatctacctattaaataccttaagacattatccataagcctcataaaggagctcggtgcattactgatcccaaaaggcatcactaaccattcatacaaaccaaacttggtcttgaaagcgaatttccactcatcacc

SEQ ID NO: 9839 - DNA, 423 bp, Glycine max
  unsure at all n locations
agctttaactnttcgagtataatgaataagtcaaccttgtcaccaaaatttctcgccgactaatgaaatattgctctcttaagtatcacatcaaatgaacaaatagaagatagaagctaatccaaatgacaatttgtcgttggaattattaaaattgtccagattccagaccaactgttcggtcagattaattaattatttacgtctggaacaagataaaaagaaaaacaaaaaanaatgcaaagggccacatcaatgcaaccacccatttgttttctaatacactaaagaaactgcctcctttgagataatgttttaggtaggggatntgatgcaatgagaagtaattaatcaaggacacgacataagtaatcctcccttcaaaagctttttttctagaacaatcgtgactttatacagtct

SEQ ID NO: 9840 - DNA, 403 bp, Glycine max
  unsure at all n locations
ntcacttaaagtgtatattcatgtttttatcaatagttttgatttatttatttaaaatgtataagattgatttgaaaataaacgataaaacgtggaaaataaatgatgaatttaaatcccttcattaataaaaagtgaaaatgaacatttattaataaaaataattaagaatcaacatacttgttactgcgtattgtttatacaatttttgaaaaaaatcatctatactcttgagctggatgaatgacgcttctcgtaaaggagattcactgtacatacgtcatatatcaaaggattcctgtcgtgtctgacaattatttatctattttccacaaactttctggatttaaaagagaaaacggactgtacattcgcaatctgtgtgcgtatgtatgtctgtcgc

SEQ ID NO: 9841 - DNA, 291 bp, Glycine max
agcttaaggtccgtttactatgacataatgttttttgtttttactttcaattatgccttgttatcaatctattccctgatttccaagatttcaatacaaactcgtgaaaacaacttttagattgaaaacaagattgttatttaaactgaacactgaaaataatacagacccttaattgtcatcatattcagatcaaaaacagaatggaaaacaccaagtgcctttagattgaaaaacgacgaggtttcccttgttccatgttgtcatgacaccgacaccgaggaagtgtgt

SEQ ID NO: 9842 - DNA, 433 bp, Glycine max
cgagcatatatgtcatatgaattgagctagtacaaatgtggttaccagatagaaactaaacgcggttcgctggagacgcgtaatgcgtctcgtgtgaacttacgctctatgtcctgtgtggggccacgtgcagtggtgctatgagttatctacgcacgtggactacatgactgtattcagcgatggcaaccgctattgttcacccctgaaaaaagcacaaagatccactgtggatgccttgatgcataagaagagaacatcactgccacactggccatagatgcatcatgtgtcgagtgtgtgaacatcatgcactacggccctgcatggtgctgcatgcaacggcgatttgacttggtgcacacgtggatcgtgctcggcaatggctacaaaagactaatgtgagctcctatgaaaaggtgtctggaagtct

SEQ ID NO: 9843 - DNA, 432 bp, Glycine max
  unsure at all n locations
caagctttgaatgttcatcgttgcaacaaacacttactggttcgaaatttgcagaaagtaaaattgtttaacagaaatcgaaaggctggaaataactatgcaaggaaaggaaanatgcagaatgtaaaggctcagcgagttcattcgatcgaatgaaccatttaaaatgcaggaattataaaacgaaacgtaaattgcattcgaaatgtaaagtttacaaaaacttataatggttcacaaacaaacatacattctccttgtgtactcgtttctctctgcgctggatactntgagtgtataaggattctgtagaaatgatttgcgaccctcaaaaactaactaaaactgctatatatagacattcganaataaactgccctaacggtcgaacattatccgaatgccaagtgtcctgccacgtacatcttacat

SEQ ID NO: 9844 - DNA, 467 bp, Glycine max
  unsure at all n locations
tcactgcgtgaagcttattgatacgagcttatggaaaatgcgtatattntaaagagctgatgtgaactttctgaagtggtttatgactttccttnaagcccttttaatcgtgaaaggagaacggaagggagggagaggtcatgggttcgaattccccacctacatctaacaaactaacattttcggataatttttttttccagaaagagttataagaaaaggtaaaattaagctttttccgtaagttaaaattaacttatgcataatttaaaaccagcttttggagaacctaaagtgagcgattttctatagaagtatataagttgatctaagacttagttcatcttactttcatattttcttcttctataagtgcttactgagaaatttatcctaacactgcctaaattaaattgtttaccccaacgtttccccgcctatgccactttcacgagtcaaaataaact

SEQ ID NO: 9845 - DNA, 433 bp, Glycine max
  unsure at all n locations
tgcttaactatgtatggcaaaatntcattactgttgttcaagacatacaagtgaacttgtaacanatcttctacacttggagtgatcacatgtagtcctcttgaacccttaccacccactctgtcatcatgccgagactcangaaggccaacaggtttagccttctctaagtattctgaacaaaattcaatggcttcttctgcaatgtacctctcaacaatagaagcttctggatgatatagattctttgtataccctcttaaaatctttatgtatcgctcaaccgggtacatccaccgtagataaacaggaccacaacatttgatttctctgaccagatgcacaatcaagtgaatcatgatgtcaaagaaagcacggggaagatacatatccaactggcacagtataattgcgggctcatttccaactcatc

SEQ ID NO: 9846 - DNA, 528 bp, Glycine max
cggtgaccattgaacggtgtgtctcaggaacctgagctgcagctttaaaaaccacggagctctgaaaagcctttattatcttttgagaagttcatgaagctgcctccgaaaaacgctgcccaacctttcttaaccggaggagcttcttcaaacttggtctgcagcttcacaagacacttgtgcatgatctgaccgttgggatccttgataaaatgtctagagtatgctcgaagcttccgttcccgagagcatttcttatttaaggcatttagcctttgctttcatgtagcatatgaaaaacgtcatttcgtcttctttctttcttccaaagcctttctaaagtcccaagaaatgtctccatcacccccaccaccattaaccaccacaaaccatcgttgttctccattgaaccccacaccgagaggaacccttcaaccgaagcggaatctttcaacttggcttgcggattcgatagagaacgagaccctagtctaacctttcgttttctgtcgagtaaccatggttcag

SEQ ID NO: 9847 - DNA, 259 bp, Glycine max
  unsure at all n locations
tattaacagaaacctagcagcccataattgaaatatttgcataattatgatcatatttgataaataaataacttatcaatgaatataataattataattagacgtgtttttttcttcttctttnttataaactatggtcatacgattttcggttcatgaactataaattccaaaagtgaaggaataattaacactgggcacgacagggatatttgatagcattctagtttggaagattttagtttgaaatgcatgtata

SEQ ID NO: 9848 - DNA, 359 bp, Glycine max
  unsure at all n locations
aatagtgtctagcgtgtaaatagaatataatagaatattttcatgtctagttctacttttctttattatatattntttgtgaaattaaaagatgctctcttttattttatgccctgttttgtttatacacaaaatataaaatatattttttgcgttatactctgtcttattttaacacgttaatcaaatgcaatcttaaaaccactaaccaaagattatctaagagcaaatgaaatgggagagaaaatggaataaaaaatcgaaggaatctacatatatattgttaagtcattgaagttcacatgatggaatgttgaaaaaagagcggtaatatctatctatctctctctctctctctc

SEQ ID NO: 9849 - DNA, 432 bp, Glycine max
  unsure at all n locations
ttcgtgttaatggacgtgaataatacttccgattaccatnttctctctctctctctctctttctctcttctgtgggaggacccttgggcctcgaataccaagcataacactgttctacaactgtggttggtgatcaggtacgagatatgaagtatgaagtggcgtgggagcggcgagcgcaaagtaattgttgatgatggcgagaaagattatacacataaaacataaagactggatttagaattatgaagataggaattaaatacggatcataatattctcttatagaacatttaatcaaaattgaataatatcagattatgaaaaaccattgaactttaattaataagataagaattaaattatattatctgatgcgataatataagtcacgtgatatctcataattacataatataaatcatatcaata

SEQ ID NO: 9850 - DNA, 452 bp, Glycine max
  unsure at all n locations
agcttctcggggccatttcctgcgaaggcaaacatttgtaatattagttntaccaagaaatgctacccttaanacaaaaatggcatacaacctcctccaataaatacaaacatcaatgtaaatttagagcaagcttatgcgcatacttctttacgagcgttcacttgcacaagacattcttataactaagaaaaatgcacccatatacaatcaaggcaccttggttacctagattatttatatgtacttccaaggtgtatttgttacctacatcacacgcatttncttttgctaaattacatacatgcatactcannagcaccttgctatcanaaattcatacgtgcacattctggatttctaatacctatcatacacaaacttatgatgaaatttgctatctcacaataaggggctcattcatgcttttttaagtgtttttttactaccta

SEQ ID NO: 9851 - DNA, 475 bp, Glycine max
  unsure at all n locations
cacagatncacaattncttaaaagtaagcctnactcacaaaacatactcctcagaggagttctctactgtcgcaacgtgcccttcacaggcgagcgaaggcagggctcacggttgcgctttccacaagacgaaaagtgtgccgatgcgccaccaatgtctatttgtgtaaaacgtcccgaaaacccaatgacaccggcaaaatgaacatactaagtttgggagtcatacttacgctctacgaaagtcttaacacctcttaccattgtctcgaaggacaaccgccctattttagaactgtggagtggggtatcctaaccttatttctccttattttgttgaacgcgacacacaacggggtcttgctcctacgtccctccatcctacagaaatcagacctacgtagctcttcctattcgtgaatcaatacgccgtttatcctgacgggatctctctaagcctgaccttacaatgacg

SEQ ID NO: 9852 - DNA, 435 bp, Glycine max
atctctaagtcacctgctgcatgcaagctcgtcagagatcatttcttacagtgttggtttattaatctgattcacctaccttctcagtatgcaatgtcaatatgggcagcctagaactatgaaaattaaattgtctttattttacgtttggctagttgtgaaattggataaggtttggttgatgaatatgggggttaccacgggagggcttgattgtggttggtgtcattttgcacataacaatttttagtaatgtgttgtgcaacaaacattaaatgatgatttgagttggcaatatatgttaaaaaaagtatattacatgtaatcagcagtcaatggatgcgtgattgaatataaatactatatcttgaaaaataaaaatagtattaaagtctctatatgtaatcttacagaggagatttattaaaaaaaaag

SEQ ID NO: 9853 - DNA, 154 bp, Glycine max
gttctcagtatgaaaattattagtcgaatgctccaaatcaaaatattccaaatcacccgccacataatactcagaatgctcaaaatgctcaaaatgcacagaatgaccaggatgcacactatgcctaacttatctattaaagggtctatctatt

SEQ ID NO: 9854 - DNA, 481 bp, Glycine max
  unsure at all n locations
agctngatataaaggtggtttgtggtggatgatntttatcattgtaagttcttagtaccttttggagagcaacaattaacacgacggacttgccgatacccanaagggggattaattctattgaattattatgtcttangtggaaacctaagtacaatgctgttatagttttatccacaagagggtctaagtattgttatgttgagaaaattttatgaattgtatacggtaagattggatcatgcattcatgcataaactcacaattattgttgttgtgagcatgcgcgtaagtctatttactagtgtgggaaggtcagctgagcgatntcacgtgtgatcaaggtcatcgcacacattatgccatagtagctactaccttgatatgcttatcctaacaatgtcactaattactccataatcagtattgatgttaatttccctaaatggtttatggcatgtctcgcatgtatagggtttct

SEQ ID NO: 9855 - DNA, 221 bp, Glycine max
  unsure at all n locations
gaaattgaattatttaaaaatttaaggatcaaatatatcccaccttatgatatatctattttaaaataaatatctatattttgattgaatcatttatattaatttgtgacatgtcgcattntatgattatatgagtcattttcattaattatactaatctgcgatcatattcaattatttataataatttttaattccacattatttggaattatatctat

SEQ ID NO: 9856 - DNA, 480 bp, Glycine max
  unsure at all n locations
agctngttganatagctatgtntggatgagttagacatacccattctgttttaagggttttgtgatgatgtttgtgatgtttatatgctgaaattgcctatggaaaactgttagagatgaatggtagagttaacctatggttagaaagtgagaatgtgatgttatgagtggaaaaagagtgaggctttgagagttggaaggttaagtctgaattctgtggtaaatggaggttaaaatgagttaatcctagcttgaaatgtcatttaggacatgtgagaaaggttatgttgtgctatagggaaaaacaaatgaccaaagtgaacaaagagccatttctagggcaaaattgggtgttgaagagtcaaattttgattcggtgagattntaggtgtaaatccagttcgaacaagtctaaatagatgttatggactggtgtgaggtgagaagttgcttcaaatttacctcattctaaatttcact

SEQ ID NO: 9857 - DNA, 272 bp, Glycine max
  unsure at all n locations
atactaagctctggtctctgcagatcttcacacaacaaaatctctcaaaacactcttggtacttggacctttctctctctataatctctagacatgcaaagctctgaatcccaatccaaactctctctctaaaatatgatttcaagcttaaataagtggccttgttcgtgcttgtgcgcttatcgcaattatggatcgcttaacacacattattgaatntcagcttatcgcgtgcctttctcgcttagaagatgaactgaagcggtacgctt

SEQ ID NO: 9858 - DNA, 428 bp, Glycine max
  unsure at all n locations
agctngcctcaaggaggtccaggaaggacaaggcggccgaaggaactatttccgctcctgagtatgacagtcaccgctntaagagcgctgtacaccagcagcgcttcgaggccatcatgggatggtcatttctccgggagcgacgcgtccagctcaaggatgacgagtatactgatttccacgaggagataggtcgccggcggtaggcatcactggttacccccatggccaagttcgatccagaagtagtccttgagttttatgccaatgcttggccaacagaggagggcgtgcgtgacatgaagtcctgngtgaggggtcagtggatcccgtttgatgcagatgctatcggccagctcctgggatatccattggtgctggaagagggccaggagtgcgagtatggccagaggaggaaccggtctgat

SEQ ID NO: 9859 - DNA, 272 bp, Glycine max
  unsure at all n locations
cggtttgagggacttacccgttgaagactgatgaacgatgaagaacgaatgaagaacgtcgaagaacggtcgaaaaccttcgcaaaatcactcacggaaacgttacggaagcgcctcggcttggattttcttcacggaaacaattttcctaagcaaattcgaaagagagagaagtgcctaatggactgaacccttttctactacacttctccccctatttatataaaattgngggagaagcttgccacccagctcgcccaggcgagctcagc

SEQ ID NO: 9860 - DNA, 535 bp, Glycine max
  unsure at all n locations
aggcacgagtganncttttgtatncatctcgtacncgagatcctctagagtcacctgcggcatgcaagcttatatanatacatttctcttatatgatatgtcatatatatatatatatatatatatatatatatatatatatatatatatatatatatatatatatatatataagggtatgattggcacatggaaaaaatatagagagagaattgtaaaatttgaatagaaagaagatnattttgtgaatttntatctttccgcaatcaaattttgtcaatttttatctaaccaaatagaagaaggtatgtccttattgtgtnctcttcctccaaattaatgtgatggtggacacccaaagaaccatattaactttaatgatatccggtacatatgccagcttaattcttgttcaatttatagagaatttctcctattgggaaacaactgaaaagaatggcaccatggctcaagccaaccttatattacgaaaaaaagtagtttagttacttacgaacaaacacatatattttag

SEQ ID NO: 9861 - DNA, 520 bp, Glycine max
  unsure at all n locations
cggtggccatgannctgtancatctgacncgggagcttaagtcagcgctgctgcagcttggttcnatacaaggtaaagggttctttctgttatgtgttgctagagaagttaccctccaagtgctgcccacgaacttctgactagctcatttacgaatttcagcatgcaaaatgtttgaacatagcttgtaagcaaatgctagacaaaggaaagaggcattgatccttactgtttcatcaagaatctctataaccgcattacaatcttcaatacaactcattgtcacaaatgcaaagcctctactttttccagagttcctggcgtaaagcaactccatatagatatataataataaatgcgtgaatttcctggcaattaacgagatggtcattgtcccccgataatctactcttngacgagaattggattcatttattgcatgttaaggatgttgcctgcaaaattgtttttattgagagatctgccaaatgcagaacataatgttggtgaccgttctttn

SEQ ID NO: 9862 - DNA, 184 bp, Glycine max
  unsure at all n locations
tttctttgagcaaagcanaggctntcacttgtctttcacccaaagtataatgccacattcttcttcaccagctcattgagaggtgagacaattatagagaaattangaacggaccttctatagaagcttgttaacccatggaagctcctaatatctcccatacttttttgggggaggggggggg

SEQ ID NO: 9863 - DNA, 148 bp, Glycine max
  unsure at all n locations
gctgacaacagcacttagactccgcataanactcgcttattatgagctacaaaagtgtggagaatatctgacatagatgtgctgtctctttcagttgactctaagcccatgtgtgattatatttctctcctcatttgtcattacatca

SEQ ID NO: 9864 - DNA, 477 bp, Glycine max
  unsure at all n locations
acactctcagctgcacttcaccagaaaaataagatttaatatctgaaccaagatattcctgcattatgaatagcaaaactttggcatcaaagtaaattcttctagcaagaaaaatatgtttgcccagaaaaatgacaattgtcgtaccttttcagaaacaaagtaatttaccattggaactacttcaccatatagataaactatgcagcagtaatcattacagcatctctatttggtaacatcttagtcctctgcctcatctgaaaatggataggcaagtaagacatctagtnttataacaaagatgattacacagaagatgcttccctttccagaacgcatcggatatgtgcactactcgtaattctcattttgacgttgaccttcatccaagcgttaaacattagaacagaataggccactagttaaaataaatcattagctaagaagggcctctgcctaatctaacttttcata

SEQ ID NO: 9865 - DNA, 277 bp, Glycine max
tgactggatttcaagtcaaccggacaccttaagttttatctaatgtcaacagtgagctatggttttgaaatgacagcaacatatacatttcataccaatttccttcttgtgttaacaaaggaacacaggatatatcaaaatctatgattaagattctctccaatcaacattctcttcaccttcctccagcctctggctctctctctctatatatattacttggtatttttccatcattttcttttttctttccattattttttagcttctgatctta

SEQ ID NO: 9866 - DNA, 408 bp, Glycine max
  unsure at all n locations
agctntctgtttcaattggagcgtctcgatatattactgtactcaatttgacatccgaatataaagttttcttcgtttgaatntgctcagagcttctgttctcaattccgtgcgtctcgatatattacgggactcaatcggacatccgagtaaaaagttattgtcgtttgaatttgttcagagcttctgttttcaattgggagcgtcttcatatattacgggactcaatcgcaaatgcgaatataaagttattgtggtttgaatatggtcagagctttctgtctcaatttcgagcttctcaatatattacgggactcattcggacatccgagtaaaaagttatcgtcgtttgaatttgctcagaacttctgttttcaatttcgagcgtctcgatctattatgggactc

SEQ ID NO: 9867 - DNA, 512 bp, Glycine max
ggggccggggtttgacgcctctttattggccctctgatatactccgctcgtatcaatcctcaccagattaacttctgactccgctatccgaatgagtgccgagatagattttgatgctccatcatagaaaacggaagcgcgcacctggttctatatacaaaccactccacctgggatgtcctatagagacccggaacatatcgcgacgctccttatcgaaaccggcagctcgcatcaaattcaaacgacacttacttttaactcggatgtccgattgagtgccgtaatatatctacaccgctccaattgaatacagaagctctaagcaaatgcacacgacaataactgtttactcggatgtccgattgagtctcggaatatatcgagacgctcacacttgaaatggaagctcgttcaattgcccacgacaatactttttgctggagtcaactgagtccggaatatcgcacgctcaattgaaatggagctctttaaattagccacatacctcg

SEQ ID NO: 9868 - DNA, 516 bp, Glycine max
  unsure at all n locations
agctntctagctnttcattggtgtattctgatctccttttggtgctctaaattgtgggaatgtactcaaatatgtgggggcaatttgatttgttttcttgcttgattaggttgaattaagggtttgtatgagatggccctatgcctataatgcattttgaagtaatggggcatgccacattgtccccgttctcttgctattgacgcctaaacgcgcgcccaccaagtgttcggtgaaatgcctcaatggcattagcgcgtgattnttgtagggaaacaacccatggggcgatttggtttgcacatatnnttgggacatgcattcattntcgaaagagctagagtaattgccccacatatgtcctangcctaggaaccaaagtttttatgcaaaagtacacaaaaggaggtgcatattgngtaaagttaccctcttttgggccagcaatcagctatgggccacactataatattntccctacgcctagatgtctatgaattgtgctcgtcatgaatg

SEQ ID NO: 9869 - DNA, 364 bp, Glycine max
  unsure at all n locations
agctngatagcacgcagagactaacgacgtcttctgcgctcttcgtcaatctcgtccgacaagcccgttgacatgcggagatatacgtcatcttctgcgctcacaagatctgtcatactgactnttgagtcacgctgacgggcggaaatacccgagtgggtatccgtataaactttntgctgtctgtaagacgaaaagcttgatagcacgcagagactaacgtcgtcttctgcgaccttcgtcaatcgcggccgacaagcccatttacaagcggagatttacgtcatcttccgtgctcacaagatctgtcatactgactnttgagtcacgctgacnggcgcaaatacccgagtggttatctaat

SEQ ID NO: 9870 - DNA, 510 bp, Glycine max
  unsure at all n locations
ccttgccccatgatatatttgagggacttatgatcactatgaatgacaaattccttgtgataaaggtagtgttgccatgttttcaaagcccgtactaaggcatacaactcctaatcataagttgaatagttaagggtaggaccacttagctcttcactaaaataagcaattggatggccttcttgcatcaacacagccccaatcccaacatttgaagcatcacactcaatttcaaaagatttttgaaagtttggcaacgcgagtatggnggcattaattagcttttgctacaaacattgannagctcttctcgtttctctccccatttgaaacgcaacattttcttgagcacttcattgagaggtgctgccaatgtgctaaaatccttcacaaatcgtctataaaaacttgctaagccatgtgtcgcaacctacccttcagcgggagggcgatgcgtgactcgtcggatgcgtgttccacgaaaggaatacgcgcggagtcgccactaat

SEQ ID NO: 9871 - DNA, 254 bp, Glycine max
attagagtttatctcttttatcttagagagagtgagtctcctaaattcttgagtgattcaagaacaccttggctggatcaaaggactctcacaacctttgtgtgttgccctcgctggaaagagagattctttccttcccttcatcatcacccttgttctttcaaaccacaattccagaaaatccacctctgcccataattatctcgttggcataactcccattttacgcacctcaataagcgattcttgagcct

SEQ ID NO: 9872 - DNA, 441 bp, Glycine max
tacatataatacttcgaagtcccaagtgctagctcgtttattataccactgacccctcaatctttcataatatagaataatattcaataatctacagaacattaaatttaaatgtaaatttaatatattgttcttttaactaaaccaaatatttttttattcaaataataagccaaatttagagcacaaggtgtgtccaatccagccaaaaaaacagtacatgtaaaaggccccgcctttgtaacccataaaaaaactagatctcgtattctgtatctgctacccatttatacatagagataatgacctatcaagcttaaaaaagctatacaatttctcaaaccgacaaaggagccacccaacgacaacgacattccatatgtaatttcaattacaccattcccaaccccttatttcgtggtttctgacaacgtacaatac

SEQ ID NO: 9873 - DNA, 349 bp, Glycine max
  unsure at all n locations
tctcaaacacctgataacactattaaaatgcattgcaaggaatgtttctgtttagttatcaaatcaatgaataaagcccacatggatatatataaaaaccactcaacttgtttctacttaggtatcatatgaagcttctagtgttgatctttaacaaaccaaacagcatccatagaagttacaagtgcctcaantttggcattttttgcagtgaaataaaaaatcattcctacacaaacttataatagtaaaaagggtaaaagaagaggaataatagctaataggaataatagtagattctaaatcttctaggtgagttagtatcattaacacatgnttttgtaatcac

SEQ ID NO: 9874 - DNA, 427 bp, Glycine max
  unsure at all n locations
taatatattattgctcacactcttatgctctttgataagagccatatctagttatttttgggattaaaatattagcacttatcttctgattgtaatagttnttcttataaactacccttaaatctagttgttttatagatattgtacatttactaaagcttatgtttaaatatgaaagattcaaccaggatattgtacgctttgatggttgtttgttagatccacaaacaaagtcaaaaggaaaggcacaatggtcattcttcaagatttcagacattcactcgcctacgctagctttcagctcgcatgggctaataagaattcttcagccataagcaaccaacttgcttgggtgagctacaactttcctgcgcgaattggtgccttcagcactgagtcactaatatccctgggtgagctacatatg

SEQ ID NO: 9875 - DNA, 259 bp, Glycine max
  unsure at all n locations
ntacacacacaacatgaatcttttaagcatgagtcanagaacatcttgttcaaatatgacttttgagaaatatatattagaaggattagagttaatcacaaatgataaaaggttaacaattatttatgatatactcttttcatcaagtcatacaaacatccgagtccactttggcattccggaaaatctttcattngtttcaccctctatgtgcacattttttntccaaaaaacctttcgtgttttgatccatgaattt

SEQ ID NO: 9876 - DNA, 491 bp, Glycine max
  unsure at all n locations
agcttaactaaagacatcatcatgaatctgaggtactcaataaagtggtcgacaccccgtgccacatttgggtaccatttgcctactccacactctagctcaagcactagctctaactgcatttgatcctaaaaaaacgtaacggtgattcttttcacctcatcaaccaagcacaaaaagccctatcgcaagttaaaccacacaacactatcaaccactttgtagtggttatatactagatttcacacgcaacctaaggcttcccatctcattatctcaacatacatagcacatngactagctaccattagaactctcagaactcactggctttacaacattntgtagaagcaagcttcatgatgatgaaccaagcaattttgatgatgccaaaagcccaagtaattgattcaagacttcaagatcaagcatcaagaatccaatccaagattcaagagaagaaatcaagaagcaacaagtcaagacttcat

SEQ ID NO: 9877 - DNA, 254 bp, Glycine max
tattctcaacagtcacatctttttatttgggtcttgaatggctatcaaagacctatatatatgtgacttgagacacaaatttgagaagagtttttcagaacaaaaaggtcttatcctcttaaaaagcataatcagttcatcctcttaaaaaattcttggccaaaacactcgtgattcaataaggaattatttgagtgctcaaattgttcaatctatctctttcaagagagaatacttcttctcttcttctttat

SEQ ID NO: 9878 - DNA, 487 bp, Glycine max
  unsure at all n locations
agctngcttgtggagcttctatggaggctggatctntgagctntaatgaggtccttcaatggtgattntccaccatggagattcagtggaagacaaaggagaagaggtgagaggaggcaccatccactatggaataagccatggaagaaggagcttcaccaccaagatgagccttggataagaagcttagagaggatgcttcaatggaggaaaagaaagagagagagagagaaagagagaggggggagcacgaaattgaaggaggaaaagggggagagaagttgaactttgagttgtgtctcacaagactctcattcatcanagntacaaaaagtgttacacatgcttctatntatagactangtagcttccttgagaagctttcttgagaagcttctttgagaaaacttccttgagaaactctcttgagaagattcctagagaagctagatcttagctacacacacctctctaataactaagctca

SEQ ID NO: 9879 - DNA, 309 bp, Glycine max
acactatagaaactcagcttttatccaagcaattcttggtggtgaagctccttcttccttggcttattccctagtggatggagcctcccctatcctcttctacttttccttccgctgcatctccatggtgaaaaatcaccactgaaggacctcattgaagctgaaagatccagcctccatagaatctccacaagcaagcttccatcaagtggttatcacaacacaagagcttcaagtaagtgcctcttaaacctccattaatttgtttgccttaccttctcttccattgttgtgtcttcattttttttc

SEQ ID NO: 9880 - DNA, 441 bp, Glycine max
  unsure at all n locations
agctnggaaagcatagattngatattgcttccctcatcatgtggctcatgatgtnntacaatgaatgatcctttgctaccctgcaatgagacacacacagatacacaaacacacacacatagagacaaacacacgcagacacaaacacaaacacacacacacacacataaagatacacacacacacacacacagagtcacgcgcacatgaagacacagactaagacacaaacacactgagccacagacacgcacagagacccacacacanagacacacacactgagtcataacacacacatacgcaaacacactcacacacatggacagacacacacacacataaagagacaaacacacacactcacacgctctcagagtaagagacaaccacatacacacacacgcacacacacactgataatgagacggacgcacacac

SEQ ID NO: 9881 - DNA, 468 bp, Glycine max
  unsure at all n locations
tgattgtgatntatctcagcctgtgtgtagagataagtgcagaccttgcgctcagtgtcatctcttcatgcgctaagctgagcttactcacgcttagcgcaaagacccctgattgattggctgaatggttcaactaaaatcacatcgctgcactaagcccaacatcttcactgtatagtgcaccttaagcaatgcgcttatcgtggatgaagcgctaagcgccactctctctctgtgaaaatttattatagctgcgctaagcgtgccatcctgcgctaagccacagattcattctgttagttgagctttgaagctacgcttantgggaaaggacacgctaagcgccacatcactttgttctgaatcattggaagtgcgcttagcgcatggagtggcgctaaacttgaatcactcactgtacagtgaagctgatgtacggctaacctcgatctaggctatcgctattgg

SEQ ID NO: 9882 - DNA, 459 bp, Glycine max
  unsure at all n locations
agctatgggaataatatntatcaactggagtattgaacttaacccacaacaagtttctagttatatgaactaatatatgtgtcacttctaatgtttctatggctgttacttttaagtaaagactgggaagaccagcttggagcaaatatcaagagtttattggaatcaggtaagctaaaagctaatagtcttgtccattcttttttcttatccatgcacctttatgtacttgagaatccctaaacatacatgntaacaataattttccccatatgtaaaataacttgacaccctcgaacttctcaaagtcattccaatttctattcgattcgccattgttactgttattttctacagattatgctcctgtcagtggtttgtacaatcaattgtctggagttccctctattatttcatattccccaatatcggaatatttaaaatgtaaattcactggat

SEQ ID NO: 9883 - DNA, 312 bp, Glycine max
  unsure at all n locations
cgttaatccatggaagctcctaatatctcccacactnnttgnggtgggtcattcttggatggccttgattntctcaagttccacttggaacccatttctaccaactacaaaacctaagaaaactatattatctacacaaaaggtacacttctctatatttgcatagagggtgtttttcctaacgattgaaagaacttgcctgagatgtcctaagtgatcatctangctcctactgtacactaaaatatcatcaaaataaacaactacaaatctacctatgaaatcccttaagacataatgcataagcctcat

SEQ ID NO: 9884 - DNA, 388 bp, Glycine max
  unsure at all n locations
caagactactacagtcatttctagattaacacaattaatcaagcagtcaaaacgatatagacaagattaaaaaatgtgactttataaaccataacatcctagacatgtccactgtagcaaagattaaaatatgaaatacaaataaccaagcatttaacagcaaggcttcactgatatgtaaacctttaaaacaagctccttggttgtgtgtgttgctatggaaacactacgctgcacaatactagacactatctctttgatagctctgtccattgcaatgggtaccgctctgtaaaaaaataacaatacgaaatagtaactcagacatatagattcgaaaaacaagcagaacattaaagtgagcaccatacctctganaatgcatttg

SEQ ID NO: 9885 - DNA, 194 bp, Glycine max
gatgccccacattatttccatgacacaaatgccaaaatgatgatttggaaattttatgcaaaactggtcatgcatgcacctatgcagacactcaagtgtcaaatttttatggtcatgtgatgctagggcttaagatttatttcctctattttaaatcaacccaatgtttccaaaatatgttcttttatcaattt

SEQ ID NO: 9886 - DNA, 183 bp, Glycine max
  unsure at all n locations
acctggagatatgtcgcgggggtcaagagacctttgggacgtcangtggggtgctattgcccaaaaccaagcttgaccaatcccgacccaacccgggcatattcggtcagtgagaacatgtgacgtacctaagcaggcgagctcctggccgtccacagataaaaggaaaacaagaccacacag

SEQ ID NO: 9887 - DNA, 430 bp, Glycine max
  unsure at all n locations
agctntataagcacaggtctggcggacgcgatatacgaatatgatgttcttagtacattggaattggtacaaccatgccctcctgatttccagctgggaaattggcgagtggaggaacgccccgacatttacgcagcgagcataatgtaaacctttacggttttaaaagctctatagttgggcctaggctttagagtttttcttttggttaacgctttgcgtattttgtttttttaatatataatacgaggatctttcttcatctagtcctacgactgtacccatactcatccatttgcatgtttacttcttttctaaaacggcagatccgatgatgagtcccccgaaggtactaatacctgngacccgcctatcaacttcgagcaagaaacgaatcanacggaagatgaacggaacgatgatgtgggac

SEQ ID NO: 9888 - DNA, 173 bp, Glycine max
atatccacgatgtgcgcataaacccaccatcccctgttgcccaccttcatctgagctcacgtattcccacgtagcccatatactcggttctcttaacaccgggtccccatcaatccttccaagcttccacaacatccaatcaaaacaacattcaaacagcacaagctatcaca

SEQ ID NO: 9889 - DNA, 480 bp, Glycine max
  unsure at all n locations
agctnttcgattcattctatgtacccgtggtggtccacattgtgtttcgtggtattttattctcgtttcatctactttttatacccccttttgacgtgcttaagccattttatttaagtcatttctcgcttaacctaaaaataaaataaatttccaccgatcgtttgaattgtattatccgttaacttcggttaaaatgaattccgaccgttcggtcgtgccgtaaccacgttgaaaataaaaaaaaagaggtaaaaggataatataataataataataaaaaaatgtcttttagtaaaataaagcggaaaatcaatcggacattttctctttgggatttctcattcttaattgaattgactaataactaaagtgaaactaaggctaanatcaactcgcctagtcaagctcgtccataaaaatagttntttttggaaattatcatttcaatntcttactaagtaaaaatggagtcatttc

SEQ ID NO: 9890 - DNA, 480 bp, Glycine max
  unsure at all n locations
agcttgtaggcctnggatcttcttcatcaatggagtcctttgcttcccgatgatcaatggaagcggaatggagatggaaaaaagatgattggagacgccacttcaaggagaagatgagtcaagaagaagctcaccatcataggaagccatggataagaacttgaaggtangagaagatgggtggagggagagggagagaaggagcacgaaattttgtgtcttanatgaggtctgaactctgaagtgtaattctcaaatgatcaaagttgaaaaaatgcacacacatggttgttatttatagtctaagtgtcacanaaattggaggaaaatttgaatttctattcaaatttcacttcaatttgaaattgaatnntgtggagtcaaatttgaagccaacaattcactaattatgattagtgaatnttagttgtggttcagcccactaatccaaaatcaagtccaagattctccactaagtgt

SEQ ID NO: 9891 - DNA, 366 bp, Glycine max
  unsure at all n locations
gcttcaatctcctcatacactgaatattcatcttgtgatcttgatcattgttgaagtggtaatgtcacacttggagaaatcatgccaaagtctgataatgaagagctctcgcctaaaagaaatatataccgtgatatagaaggaggttgctatgaaaataagtaaaggctattcaagctctctgtgaacaaaaatgatataaaaaaccaatcatatcattcttgatagtaagaaaataaatgagtagcggttgtcgtctcttattaatattatctacacgttaaaatgaatgaagatnataaaagagaatgaaatagtttgtaggatattaattttagtattcctaacaggaaaaaaagagcgaga

SEQ ID NO: 9892 - DNA, 402 bp, Glycine max
  unsure at all n locations
agctntgagccaaaatcctgactcaccatataccttgtctccanggtgagaatgtcaatccttaccctcggaagcaaaaaagaatagaagggaaatttccaatcaaagaacagagaacgaatatttccagtgaaagagagaaaagataagagaggaaattcccaatcaaagaatgggagaaagaaaaaagaaaagaaagaaaattcccaaccaaagaatgggagaaagtaaaaaaaggaaggaagctcctggtcaaagaaaccagaagatatgtgcagagaggtctttggaccagacaatatctgaacagtacagaattgtcaccaaatgaacaaaaaggaaggaaaggaaaccacgacctanaatggtcttctccctttaattaccaaccaaaatcccgtg

SEQ ID NO: 9893 - DNA, 266 bp, Glycine max
  unsure at all n locations
agaatcaatgacaatgcttacaaagntgagctgcccggtgagtataatgttaattccaccttcaatgtctctgatttatctctttttgatgcagatggagaatctgatttgaggacaaatccttctcaagagggagagaatgatgaggacatgaccaagagcaagggcaaggatccacttgaaagacttggagggcctatgacaagggctagagcaaggaaagccaaggaagctcttcaacaagtgctgtctatactatttgaata

SEQ ID NO: 9894 - DNA, 422 bp, Glycine max
  unsure at all n locations
agctngngatangcattgngcatctatnttgactntcctatgctgtctctaaatacataaaacagccccaccatcccaattttgcaaaatcatgttcatatatcattgnggcatttcaccgagcacttgatgggcgcatgtttggacataaattgcaagagaatgggggcaatgtggcataccccattgcttcagaatacaacataggcctaaggccttctcattcaaatcctcaactccaaaaaatcaagcataaaaacaaaccanaactgccccacaaatataatcacattctcacaatntggagcaccanaagatgaagaaaatataccaatgggaagctaaaaacatcaaggattgaatacttacttgttggagtgaatagaaacaccaaaagcgaaagcaaaaacacgatcaaaagt

SEQ ID NO: 9895 - DNA, 186 bp, Glycine max
ctagtgacgtgaaagaagtgcttactgggtggtaacttgagatttctaaccttttccttcttttttggtaaactatattgctttgacatgtgcatgttgaattttggtggtttgtggacatttcttgattttggtgtgtcttatttttcaatgattgcgtgagcttgctggtactttatgtgatat

SEQ ID NO: 9896 - DNA, 432 bp, Glycine max
  unsure at all n locations
agctntctcataanaggcagccacatttttctgaaatcatgccacttattatcaattcgagcaacagtaatattgtttatacaaacctactttaaataaaatagaaaatacaattcaagcaaatcattaattcaaccttttaatttggcttatctttgctaccagtaaactggtttcccatgaaacaaatatcttaacttgcaaggggaacaaatctggcaaacagtccttttcatatgggatggttccaaaatctttcactgcattattaaaatcattatgcctacaagaagagtgagatgaatgatgaatcaattttctaattctgtaaacaatatgttcttagaatatttggcggaagatcttttatcagtagaaagaagacttaagatatcattcattgctgtaaatcattgtgaataatattaacct

SEQ ID NO: 9897 - DNA, 331 bp, Glycine max
  unsure at all n locations
cgacctgtgtgcttagcgagttcataattttttgtgttttatgggtttntgatgaactctctaagcctgacctatgtgcttagcgagttcatgcctcttttataatatttgctgggttttgatgaactcgctaagcctgacctttgcgctttgcaagtttctgaattttcttcgtaattttttggtgttctagatgaacttgcttagcctaacccgtgtgcatagtgagttcatgatttttcctcatatcttctaaggtttttataaactcactaagcccgaacttgcgcttagcgagttctttcatgtgtccataggctctatggttttt

SEQ ID NO: 9898 - DNA, 505 bp, Glycine max
  unsure at all n locations
agcttcccgacanacacttanaggagaagaagaaaaaaggaagaaaatagttaaaattaacttacgaaccttacaattattagaatctttctcatctaactactccaaaagttgactgcataacgtgattntatcttagtggagaagttttatttattttacctccctatttcttctcctataggtgattgtagaatgtacagaagcttatacaaattgaactattactttgcttatccaataagattagatttatatacttgctagatgcatagtctattaaaaagtaatattacacgaagttctggattattgaatttagtctcgtagcagtttattatttattatanattgaaaatccttttngaacactttgtgtaatcgggttgtactagttattgaactaaccattacttgacctattaatgttagtatacatctcatatcatctcactgataatatttctctctgcaccataatttcaacatggaatcaaagaagtat

SEQ ID NO: 9899 - DNA, 296 bp, Glycine max
  unsure at all n locations
taagcatttcanagatgataacaaagagatgctgtctgggatntctcattagttatgacaatcataaaatgctagacgtgttactgactggaagccagagctatgcattaacttttgtaaagtgaagaaagcgttacattcgtgtttccttgaatcaaaaagtgaaatttgatcccgaaaagtttcaagaagatccgcaagaccataattaattaaaaaagaaaacatatggagattcctgatatgcaaaattgatggaggcaggtcattcacacctgaatgtgctaaaaacaata

SEQ ID NO: 9900 - DNA, 420 bp, Glycine max
  unsure at all n locations
agcttgaaccttgaatcttgattcttgattcttganatctaatntcctcttgaaccttgaaatgttcttgattcaatcttgaacttattctttgattcttgagatcatcatctttgttatcatgaagtgttcttaacttttcagctttttgtcatcatctttgttatcatcaaaactctttgaatcaatcttgattcatcatgaagcttgcttctacaatttgttcacggaaccaatatgaaagttatttcctattaattctgttgaattcatattgagataatcaacgaatttgtctcttgataagatcagtatgggctctatgtaaaaaacgttagaanaagtaagcattagcattgatagaaagatattatacaaaatttcaataactaaatataaacattaaacacatcgtattac

SEQ ID NO: 9901 - DNA, 490 bp, Glycine max
  unsure at all n locations
agctttgagtgaatcaatgtgactnttcacatttaaatttgaattntaacgttcaaggacactggtaatcgattaccaaaacattgtaatcgattactgccttgtgaaaatatttggaacgttgtaaattcagtttgaaaactttttcaaactcattttactactggtaatcgattacaacaatatggtaatcgattaccagagagtaaaaactctttggtaaaggttttgtcaaaaactcatgtgctattcaaagttttgaaaaaactttctaatacttatcttgattgagtcttttcttcattcttgaatcttgagtcttgaatcttgatccttgattgtagactntcttcttgagtcttgaattcttcttgattcttgaactcttgacttgttcttgattcacttgagttgttctttgatctttgagctctntgttcatcacctttgtcatcatcntttgttggcatcattggtatcatcaaaacac

SEQ ID NO: 9902 - DNA, 258 bp, Glycine max
  unsure at all n locations
tgtagaatggctagacatgatacacgtcaaggtttggtttggttcaaagataaaaaggatgccccacattatttccatgacacannatgcaaaatgatgatttggaaattttatgcaaaactggtcatgcatgcacctatgtggacactcacatgtcaaatttttatggtcatgtgatgctanggctcaagattncatttctctattntaatcaacccaatggttccaaaatatgttcttttatcaatttgtacattc

SEQ ID NO: 9903 - DNA, 447 bp, Glycine max
tcttaagtcacctgccgctgcagctttaggtttagagctgtatcactcgtccatatctaaattagttgaatgcctctcatgatggagagaatctcattaaataataatctctaacttcatacaaggaaactttgcctatcactatacaagaaaactttgcccaattactaatttacagctattcacatctgtcaattaatgaaataaatgcagcacataaatcagagaatactgtcgacaaattataggaaaagcaataaatcaaagatttacctaattatgttgacactaataacatgattacagaaagaagtgtccagttgccaaatctttcaaatcattggatcacactactctaatttaaccaaaaacatacaaacacttagaattcttttatttcataagtagtacaattactacgtaacaatactattatatttcacacta

SEQ ID NO: 9904 - DNA, 462 bp, Glycine max
  unsure at all n locations
tcttgcagctctggattctgtttggatntgttgaatttgaagaattgagttccatgcacagtgcacttgaggtacagagcaattttgaactgttgattntgtagttctgcgctgttgtttgtttatttggccatggaagaagtgtctatttgtagatgtccataagattaaaattttttatatcttttagaatacttttagtttattggtagtggtaccgattagcattagctcgtagcaatgttgcctgtatttccaaggttcagcttctgattggagcagttctggtgctggaatgttcanganaagaatatgttctgcatcttttgctcataaaaaattgtgcctgcttctaaactggaacgtctttctagaaatctgattaaagcaatatattaatgcattttgganaggggattattttctttgtgtctagtatatagtcgatcttgttagatgttt

SEQ ID NO: 9905 - DNA, 507 bp, Glycine max
  unsure at all n locations
agctngacatggatatagtaagctattaatagttntgtacacttattacattntatgcataanataaatatgtttgtagaaagtgtctgggtctattntaaatntgtaggttgggttcattgtgaaacaagataaatattaaaaaaatacacttaatttctatatcggttgcagctacaatcgatgtagaaagtgcctttacaacatcagttttgggcaaaatcgatgttataaaaacactntctacattggttgtatctacaacctatgtaaagcaatgctntgaacatcggttnttgaaccatcgtcgaaagttcccactttcaaggatgcttgattcaacatccattctaaaccgatgttaaaagtcctccagaaccgatgttgaaggagttttctataataatggccctctagtctaggggttatgatgtaattatccaaatgtactcctctcattgttcttgatgaaaccccncattgttntatgctaagtagttaccttca

SEQ ID NO: 9906 - DNA, 412 bp, Glycine max
  unsure at all n locations
cacattcactttcttctacatcatattcaaacttgtccaaattaataataaagtcatcttgacacaaagaaggtcatctaagtttcatacaattaatatagaacctatatcctaatgtcacatcctatcagagcgtggtgttctcgcgtcctctagcatgatgttctttatagtcattcacctattcatctgctcccccgaacacaaagttcaagatcatcacaggatccaaacaccaacaacaaaccangagtgagttatcacatttctaactactagagagaaacaacacaacatatagttgcccaataccatttacttagcatatctcacattatttcatcactttgtcattcatcaatcacacttttcatccatcaatcacaccctttcatcatcaatcacaatatac

SEQ ID NO: 9907 - DNA, 524 bp, Glycine max
  unsure at all n locations
agcttccttaagaagattcctaaagaagctagagcttagctacacatacctctctaattgctaagctcacctccttgagatgaanagctagatcttagctacacaccccctataatagctaagctcacccccatgacaaanaaacatgaaaatacaaaaaaaaagtccttactacaaagactactcaaaatgccccgaaatacaaggctaaaaccctatactactagaatggccaaaatacaaggcccaaacgaaggaaaaacctattctaatatttacaaagataagtgggcccatacttagcccatgggctcaaaatataccctaaggctcatgagaaaccctgggccttcccttagatctctagcccaatctacttggagtcttctacccaatgcccttgcgggataggattgcatcattccctccaccttggaaaggatntgacctcanatcccgaggttcttcatactctgggctccttccctcaacacctggtaaaagaacanaaacatatgtattag

SEQ ID NO: 9908 - DNA, 486 bp, Glycine max
  unsure at all n locations
tttctgtccatcttagcgacctttataccatcttgacttttgtaggtcttatgtttgntcgcaatagaaatataatataatgttntgaagcanaactgctgtgaaaaattatgatatgaatttataacttggttgataaagattgaaattggaggagtaatcatcgcttttattggggccttattcaacctgtggtctttacaagatttcgagggtgatgctatgtgcaccccacatttttagtgaatgggcgaaaatgccattcactcaaattgatccgtatgagccataccgatcaagttcgtccgtacaaatcatacgtatcacacctgatttgatttgatttggatgtntaaattatacctacagatcaagttcatttgtccaaccatacgaatcaaccacgacttcgcgtaccttcggcgttggagaagtttgaaactaaccaaatatgtcatgtgcacaaccctcccagaaatttaagaa

SEQ ID NO: 9909 - DNA, 82 bp, Glycine max
aatgatttgaactgatcaattgcatggattgagtgaatcgtgatggatatatcgcttgcttttaattagtatgcatgtatta

SEQ ID NO: 9910 - DNA, 415 bp, Glycine max
  unsure at all n locations
gcttgtgggaatttgtgatagtgaatttgccggagatgttgatgatatgaaaagtactaccagatntgtattttttatgggtgattgtgtttttacatggagttctaagaagcaaggcattgtgacactttctacttgtgaagccgagtatgtagctgcaacttcttgcacatgtcantgccattggctaagaagattgttggaggaacttcagttgttgcaaaaggaaagcacacagatctatgttgataatagatctgcacaagagcttgccaagaatccggtgtttcatgaacgaagtaagcatatagatacaacgtatcatttcattagagagtgcattaccaagaaagacatagaattgactcatgtgaaaactcaagatcaagttgcggatattntcaccaagcctctc

SEQ ID NO: 9911 - DNA, 642 bp, Glycine max
  unsure at all n locations
cagctcgcgcaccactcngcgcgcgctcaattcctcgggcgtacattgtactgaagcagattacattgttgttggnattattnacgcaaaggctcgagggggttggagcccatctatctagcgacactttataatactcatacttgccaatagctctantggctgatgagtaggtccatcctctctaagtcctatcgaatcatgagtcatcacatacataaatctagcttcacatagtgcaaagatccttatggcatctctcatgtagtcagtgaatacataaagcatttagagtttgctgacacaaactttcttgtagcatatgcagggctttctggagtgtatgtctgaaagctgaaatttaattagaagaggggtcaatgatccgcacacaaacgattgaagtcaagtttatatttcttaaaagtttgagcctattctcgcatgaaacacaaagatggatgatgagtgaagatgcaatgtacttaatatgaatctttactggaattcggaaagtacatgttataaccaaccactggaatgaatcaccaccattcagctaaattggatcacacatcttcaactactcacgagatatagctcanaatacatattatcgtgacacactacaccctcgctacg

SEQ ID NO: 9912 - DNA, 469 bp, Glycine max
  unsure at all n locations
cccatctcatgtggtactatgtggcggtcgggcgatggtgcacaacaagttttccacatccacaatgcgcgcataaacccaccatcccctgttgcccacctncatctgagctcacgtactcccacgtagcccatatactacgttctctcaacaccgggtccccatcaatcctcccaagcttccacaacatccaagcgaaacaacattcaaacagcacaagctatcacagccaagcaaaacagagcagaggcagaaaactctgccaaaacaccaaccagattatagcttttctcacttaaagaccacagtaacaattccttcgatccaattcgttaaccgttggattgactccaaaattntactggaagtctatagtacagaagcctacattgtgaccgttgggatctactagcaaacatccataactcattctgcactactctttncacagccaaccacacacaagcat

SEQ ID NO: 9913 - DNA, 128 bp, Glycine max
ggcagtgatattattgaccagccctctgaaaccttctaccgagatgtcttgggccacatgggcctcgttcaaaaccttcactagcagagcccgatgaggctcggagctcatgagttactccaacagcg

SEQ ID NO: 9914 - DNA, 374 bp, Glycine max
  unsure at all n locations
agctngatcaaaacanacatctaatcattccagtccactcaattcatacattntctcattcaagtcattcacaaacacttcattcataagaaatcacaccactgaatatcataatcaataagttcactgttcaaacatgcttttgtacaagctatcaacactcaaacaacaaaaatttaaaagactaaaatttaaagactaataaagcataaacaaataattgacatgaactaaataattgataaaagaaactattcataatttgcaaaattntaaaaactatgtagaatntaaaactcatgatcatcctactgctgatcttctgcatgctcgttcagatccagcattggagcagctggtggatcctgtgaact

SEQ ID NO: 9915 - DNA, 341 bp, Glycine max
ctctcattttcttaatacgaagtactgggtataacaatgagaaagattattttgaaaggggtcgaaatagataaataaaataatatcaagagatcgaagacaattgaattgtttctcgatccaatatgagtttgtgccatatcaggatttgagtttgcttatttttttcccaattagagttcaagggtcgctactcgagaactcgatgaatgatacaaattaaacttctgtctctagttaaaccttccataatgaattgagcataacaggtaattataacatataagcgcattatattatatatactttgatggtttggagatggatacagcagagtcaca

SEQ ID NO: 9916 - DNA, 411 bp, Glycine max
  unsure at all n locations
agctanacattatactntgagcgtctcgatatattactgtactcaatcagacatccgagtaaaaagttattgccgtttgaattggctcagaggttcaaaattcaatttcgagcgtctcgatatattacgggactcaatcagacatccgagtaaaaagttattgtcgtctgaatttgctcatagcttcaacattcaatttcgagcgtctccatatattacgggactcagtcagacatccgagtcaaaagttattgtcgtttgagttggcctagaggttcaacattcaatttcgagcgtcccgatatattacgagaatgaatcggacatccgagtaaaatgttattgtcgtttgacttggctcagagcttcaacattcaatttcgagcgtgtcgatatattacgggactcaat

SEQ ID NO: 9917 - DNA, 193 bp, Glycine max
cgtaatatatcgagacgctcaaagtggaatgtgtaatctttgagccaactcatacgacaataactttctactcggatgtctgattgagtcccgtaatatatccaaacactcgaaattgaatgtttaaactctgatccaattcttacgatattaaccttctactccgatgtccgattgagttccgtaatatatc

SEQ ID NO: 9918 - DNA, 509 bp, Glycine max
  unsure at all n locations
agcttgccgcccagctcgcccaggcgagcaaggttgcttcctccagaagcaacagccttctggaggaatcttctggagggcccaagtgggcctagttgctttntgcaccccccctttttactaaatgcaccccttctatttttttggtaattctttttccgtaacgttacgaaactntatgaatttcgtaacgatacttattttccttccgcaaggttacgaatctttacggattatgtatttactcttttttagctntcgaagaagttacggaaacttacggatggtgcaaaaacacctcttttcgactttcgccatattacggaatttcacggattgcgcaagcctgcttccttttgatttctgacacgtctcgggacttcattcattgtgcaacanaggacgccaagtacctcanaaggttgcatgtcatcaagtaataatccccggatgaaaatanggtatgacaacaancctttaatcaaatgtgcaaaatcatgactttcatc

SEQ ID NO: 9919 - DNA, 153 bp, Glycine max
cgtgtgatcaatatcctgatgagggcgttccatatgctctcaacattggactaatacatctgatgcccacactccatggtcttgcacgtgaagaatctcataagcatcttaaagagttccatattgtttgttccaccatcgaaccccctgatg

SEQ ID NO: 9920 - DNA, 494 bp, Glycine max
  unsure at all n locations
agcntggtatctccttcttcactacatcaagaatcaccatgttgagtcttctctgtggctgtcttactggtttagctccatcctctaaatntattcgatgcatacatgtggatgggctaataccaggaatgtccgccagggtccagcctatagccttcttattcttcttgagaacagacaacaacttctcctcttgctcatcagcaagggaggcagatataatcactggaaaacttttgctatcatccaagtaagcgtatttcatatttgatggcagaggcttcaattctggtgtggtcggctggatagtggtagaaagagatggtttcttcacctgtacctcataaagaaagtcagaggtatgtgtacttcctanaatatggttagtcctatctgactctataaaatcaatctcaagaggtaaaacaccaccaccagacatgcaatcaatatcacttctagattcactctcagcatcagattcagacctatga

SEQ ID NO: 9921 - DNA, 394 bp, Glycine max
  unsure at all n locations
tgaggactatacctttgactgaacaccgncgagtttctatctctgtccaagtttattgtgagttgtagcaccgggttcacttcccttgctgtgttggaagcagtcgccgtggtattatcctctatagttntctaaagctttagcatggccttcgtgatagaagccatttgatcttttaaggccgataggtcggccctcatctattcttgcactccctcttcattatcccattttctagatcgagtgttatangggtgcctctacgctctcttagttattttgagttccctaaagaaacaaacaatggtgagtatgccaccaaaacatgaatatgctaatgaatgatcggagcacttggatccacctcaagattttagaatacatgatgagtttc

SEQ ID NO: 9922 - DNA, 289 bp, Glycine max
  unsure at all n locations
gagaagcttctctgagataacattcttgagaaactagagcttagctacacacacccctctcataactgagctcacctccttgagaagcttctgtaagaagattcctaaagaagctagagcttagctacacatacctctctaatagctaagctcacctccttgagatgagaagctagagctcagctacacaccctctataatagctaagctcacccccatgacaaanaaaacatgagaatacataaaaaaagtccttactacaaagactactcaatatgccccgaaatac

SEQ ID NO: 9923 - DNA, 239 bp, Glycine max
  unsure at all n locations
attcgatgttcatcanatctctgtgcgggcttatctggaacatggacgttagtgtggcaagggcatcgaccatctgattatcctctctacgaatgtgatgaagagatatgtcatcaaagaattctatcaacttcctgatgtaggcccggtaaggcacccattcatggtctatggactcccattcaccctttatctagtgaattaccaaggctgagtccacgtataccttgaacaacttg

SEQ ID NO: 9924 - DNA, 231 bp, Glycine max
  unsure at all n locations
ttctcaaggtccacttggaccccatttctatcaactacaaaacctaagaaaactatattatctacacaaaaggtacacttctctatatttgcataaagggcgcttttcctaaagactgaaagaacttgtctgagatgtcctaagngatcatctatgctcctactatacacttaaatatcctctaaattaacaactacgaatctacctatgaaatcccttaagacatgatgc

SEQ ID NO: 9925 - DNA, 174 bp, Glycine max
aaagtcgatgtttggctcataaggcctacaaatggcagaacataatgtacgttgggacatctatttggtcaatgattcataaagaggggaatgcccacatcatttccatgaaacgcatatcatgataactagaaattcatgccaaacttatcctagccaatattcatgtggaca

SEQ ID NO: 9926 - DNA, 161 bp, Glycine max
ccgtgccaccccggaagatttaagccaagcccctactttcgaagggcaactcccaccttatgaagactatctccggccagacaatgatgaaagagatacccatcttagccccctgctccaccttaaagatccgtccccccatgaactaccccaaccaaaca

SEQ ID NO: 9927 - DNA, 490 bp, Glycine max
  unsure at all n locations
tcttggcaatntctntaaaactagtcacttataaatatgtgactnttgaaaaaatcttcagaaacaagtcacttgaagaattgtgacttttggaaatgtaatttttgaaatcagtcactgngaatcgattaccattaaggtgtaattgattacacatcaacagatgtgacttcattttgaattttgaaaattaaaacgtttagagactctggtaatcgattacaagtgttgtgtaatcgattacacaagtttaaaatgatttaaaactgttaaacacaagttgtaactcttgaaatttgaaatcttaacattntanaacactggtaatcgattactaccttctggtaatcgaattcaagagagtaaaactctttggtaatgaatttgtganaacttcttgtgctactcaatgttntgaanaactnntttagtacttatcnttgatgagtcttctcttgattcttgaatcttgagtcttgaatcttgatct

SEQ ID NO: 9928 - DNA, 264 bp, Glycine max
  unsure at all n locations
gtgatcgactangaaaagaaatgtgtctgtgtttcctgatttcaagggtgtcatcctccaaaagggggagattggagaagccagcctcatgatgatgattcaagtatgaatcacagagttctgatgatgacaaaaagtcccaaataatgaccttcaaattgagtccacaagttcaagatccagattaatttccagaatcatttgaagaaatccagaaaattccagattcaagagaagctgatttccagattccagagaaaaaat

SEQ ID NO: 9929 - DNA, 380 bp, Glycine max
  unsure at all n locations
agcttctgctntaatntccagacttggtctatctaggatcatattgctcttacactcgtttgcatattctcttttgacacagaaacatacattgcttgctgtagcatgaaaacttcacaggataccctatttacacttgacaatgccaacaaagaaggcataaaaatagcatcaatgcaagtcaatatggaagaaaaggatccaggaggggaagagagaaatgcccctgccaataagcttgacaataatgtaccgccaaacagcaaagaactctgtgaccctgcaatggaatntgctgctggttcttcaccattgaaagagaatcacaacccagataagggaagcagtcatgatactgatcttaataaaacaccacaaca

SEQ ID NO: 9930 - DNA, 494 bp, Glycine max
  unsure at all n locations
tttttcgggtgttctcccttctattattttctgagttctcgcactacataatgtttatcttttttttgtgttcttgaaccttctacaccttgtgttgcattttcggtttatatctgtatcattggttaattctttttaattgattntttgcagcccanaagcttaaacccgtcttctgcgttattttaacatctaaagttgtgatttttaacgccaaaactgtgattnttatctctaattcctccctagtgcatttctatatcgagttcttggtggaggaacacactaaagctgcgattttatttcaaaactctatgagtacaagttccttttcttggtgattgctcacaatacataagctcaaatatttaattgtgtttcttttcttgggactcctacaatacaacactattgatgcagaaaggtggaagaaacactaagcttgattttatctcaacaagttgtttcttgatcttatctacaaagcttgattt

SEQ ID NO: 9931 - DNA, 614 bp, Glycine max
  unsure at all n locations
acctcgcctctcgacttgccngtgcagatangtgtctntcgnttanatgtgnatcgtgtacctnattatcgntntggnacttttnangnnncgcancnccgcgggctcgatcgcgatctattatgcgacacttctatatctcaagcttctnagcgcgggtctgggagacaaacgtcaagngctctgcgatatgccaacatgatgcgccgtatactttggatntggcacgaccatgccctcctgctttccagctgggaaactggcgaagtggaggaacgcccccgcattcacgccacgagcataatgtaaacctcttacggttaaaagctctatatttgggcctaagctatagagttccctcttttgtaaggctctgtgccctttgttctgacccataatacaacgacctgtctctatctggtcctggggcctacccatctccttcatttgatgtgtgcttacttttgtgaacacgcagatccgatgaccagttccccgacgggctaatacctggggaccgcctttcgcgtntagcctacatgaatcgaccgtagatactgaatgagatgcggacgttcccacactttaatattggtgccctcagaccaaaacag

SEQ ID NO: 9932 - DNA, 478 bp, Glycine max
  unsure at all n locations
agctnggttcgaggtacttacccgttgatgatcgaagatcgatgaagaacgaatgaagaacgtcgaagaacggttgaaacctttgcgagattcctcacggaaaacgttacggaaacgtttcggaagcgcctcggcttagattttcttcacggaaacaattnttccaagcaaattcgaaagagagagaagtgcctaaggggctggccccttccttcttgctttcctcccctatntatagcaaaataggggaggtggttgccgtccagctcgcccaggcgagctcagctcgcccaggcgagctcagctcgcccaggcgagcagggttgcttcctccagaagcaaccgccttctggaggaatcttctggagggcccaagtgggcctgggtgctatttgcacccnncattttactaagtacaccccctctgctgtttttggtgattctttttttcgtaagtacagaaacttacgaatttcgt

SEQ ID NO: 9933 - DNA, 474 bp, Glycine max
  unsure at all n locations
agctntgtatccctgcttactctgctataggatagccttctgaacttccactntgtctaccanaaaatacgactntgtcatcccacataaaacttacaccactgaggcacctttgtaataaatgcactaagacaattattgcagttgtatctccctatactacatcaaatgtaatcattatcatacatttgtactctaaaataataatatcgggagacgtcagcgctatatacggttgtgactcttcacaagtctttgttgcatccttcaacaacagagagtcaccatttaatttgctaattaaatcggtcattatatcgatataacaccaccgccacttacaacacttctatacacatatatctatctatactgcacgttctattcatcttcttcgcatcctgccaaaacanattacancttctattcatcttctttgcattcttatggccacttccgcatcccgctccacta

SEQ ID NO: 9934 - DNA, 317 bp, Glycine max
  unsure at all n locations
tatattcttgtcaaaaaaactgttttaatttttgccaaattaatgaaatcatcacaacacatcatcactaaatgaaggaaacatgtcatgtcatcacctcaatgatatcatgatgatgtcagcatgcctcatcaacacaattagtggaagatgcacctacactattacaaataattntattntacttaaatatctttaataaaaaaaaagtgtcccttcaaaaaaaatagtgttgtccccacaagaaaaatgttttttaaaatgaagatattaaagagaaaatagattaacttatatgtgcagaagataattgaata

SEQ ID NO: 9935 - DNA, 468 bp, Glycine max
  unsure at all n locations
agctnggtagaattttctaaaagcttactttctaacctacttataccagaaagaaacattgtataaagtgtgtgcatgacattnttgctaaataaactagggtaggccataccttaagtagaataagcattataccttaaatgaacaacctaacaacttaattatatgtgaagccctatctcatacaagcatgattgtgtataaaggaattgaatccaatgtaatgattcgtatcttatgtgtgtgtacgtataaatagatggatagagaatggataatataatatgacaatgcttgtgaggagaaaaaaaaattgagattaaaagactcgctnganaattcacttaagtaatggtggtgatgagattatatcttcattaagtcactggtgtcactactattaacattacataactnttctaaaaataataatatatcttctagctataagtatcatatgattacaca

SEQ ID NO: 9936 - DNA, 269 bp, Glycine max
  unsure at all n locations
agcttgtgccacccacatnagcataagttttcatggttgtgccacccacatagcataggtttttcatgggtcctaccctcaattntcatggttacaaatttgagaatctcttccataaccaaatatgaaccaagtagtaaaaaggtgaccaaagagttaccttttatcatcaaccaaactaactattgttttcttcaacagacctaaatcattttatatgttggcttaaaatattggtcgcaaagctgattatctacatcaaggaaaac

SEQ ID NO: 9937 - DNA, 582 bp, Glycine max
  unsure at all n locations
gactgtcgactgagtatttatcgtgtagagantngaacgtagcaaacatcgccgcggaaccaaccggtnanacactccagctagaagttnnntaagnnnnnggnncctgataccttcgattaccgacctcntaatcatnaagccctccaataaattacaattacatgcgagagatatatacaaggtaatatttgtaaggtattttnctctccttatactggattcatagtatatttccctgcataagataaagctattcataatatatttcctggtatacgataaagctgtactatcatcctggaaacagcaactggatcgagaaagttagaatcataatttaaagaaaattacatcaattgcacataatgagagccctgagcttgnttgctaatataatttgctggcataattgataagcactgttattgcnacatctggatatcttcatgcaaaacagagttggaggctatagtacttctcttaatatgtatttcactcggggactcagcacttcacgtgtgattattttatgaatggatggatgccattaaacaataatgccactatgctttatatgga

SEQ ID NO: 9938 - DNA, 459 bp, Glycine max
  unsure at all n locations
agcttctgctccaggatatactntgagctactatggttattcttgataacaaaatgattaggcagtaaataatgtctctatttttgaactacaaggaccactgccaaaagctctttttcataggtagatagagattgttgcttcttgtttagtgtcctgttgaagtangcaatggaatgagagtcctacattaaaatcgcccttataccaaaacctgaagcatctacttcaaccacaaaatccttggaaaaattangaagagataagacaggagtagaagacagaaactattttatatgttggaaggctaatatcatcaaagaaaactagcaaaaattttctaaagaattgtttgaaaacaacattcataaggccttgataggttgcagtagcattcatgaagccaaatggcatgaacaggtattcataatgaccaccatatgttctgaatgcagtctt

SEQ ID NO: 9939 - DNA, 184 bp, Glycine max
  unsure at all n locations
tnccagaccaatctaactataagagatgtaactcacactcaagctcgaggtcacacatgggccaatcattatgctcagccattccgcgaatatggcgatacttattgatgtaagctccattggagcttgtaggcccaggatcttcttcatcaatggattcgctctcttcttggaagataaatgg

SEQ ID NO: 9940 - DNA, 432 bp, Glycine max
  unsure at all n locations
agcttcaccttctggtcctcctcatagttgtggcatgagataacatgctctantttcatctcccactccaagtaggcctccggatcattctttcctttaaatggaggaatgttgagtttaataccatcaattcggttttgtctaagaacaccatcattccctcttctcctcctttcttcttcattatgatctctattctccatttgatccaacctctcatggagcgcatcatctcgttgtttcattaacctcttcatatgttgcatcaaagctagcatttggaattgcgaaagccccactccatcattaggattagtacctgacatctcaaacaaacaaatcaaacgtaacaagacaattatagttgctgtttgaatacctcacccactcaagtgtatcacaacaatatggcttttctctaatgaaacactc

SEQ ID NO: 9941 - DNA, 322 bp, Glycine max
tcaacattcaatctcgtgcgtctcgatatgttacgggactcaatcatacatccgagaaaaaagtattatcgtttgaattggctcacagcttcaacattcaatttcgagcgtctcgatatgttacgggactcaatcagacatccgagtaaaaaattatggtcgcttgtattggctcagagcttcaactttcaatttccagcgtctcgatatgttacgggactcaatcaaacatccgagaaaaaagttattgtcctttgtattggctcagagcttcaacattcaatttcgagcgtctcgatatgttacgggactcaatcacaca

SEQ ID NO: 9942 - DNA, 481 bp, Glycine max
  unsure at all n locations
tntgagctctatgtgctaagggaggaanaacagaagcaaccaaataattcacaatattggaaaactacggagtggggaaggaatcagatatactatacagaatgtacaaatggtcatccagaaaatcatcccgaataggtgagtccttatacacacgctcaatcctactcaagtggtcaaccacaaggttctgtgcaccgctccgatcacggatctccaaatcaaactcttggagccaaagcatccacctaatcaatctaggctgtgattcagccttcttcaacaggtacttcagagctgcatggtcagtataaacaataacacgagtaccaagtaattatgaatgaaatttctcaagaggaaaaactatcgctaatagcttcttctcagtggtagtgtaattggcttgcgcagcatncaaagttctagaagcgtagtagatcacccgacgcagcttatcaatctttngagcatagacagg

SEQ ID NO: 9943 - DNA, 506 bp, Glycine max
  unsure at all n locations
agcttcaatggcgggtggatattaagtatttctaatntggtcatgtggccactgngttggacatggngtatcatatgccttattgttgtgggattctacactgcctatgcaaactggctcttggcagcatttcatttcatcgatgaccgtagattcattagatacagagatctcatgggatatgtttacggtgaaattttcattctttgcatgatatccaaactntgaattaaattttaactgaagtattccttaatttcacaaggcaagagtatgtaccacctcacctgngtcttccagtttttgacccttcttcttggaaatatgggtttcatcctcctcggaggcaaagcacttaaggtaaagtntatgctataaattaagtttattaagagtggacaaatgatgtaaaagattntcactatcgtccaattccgatagtggattatcgagaaaaaaaaaactgttaagattattgtaataattattttagaagtgatattata

SEQ ID NO: 9944 - DNA, 309 bp, Glycine max
aaacagtgcctggaaatatgattcactttagatataagaaatttgtttattctgaataatcaagtttttttatctatatgaattaaaaataagtacccaaagatttataatattttatgcactctatttaatcaagtgaaccaaactttctttataacaattggttaaaagagaaactctttaataacatattgattaatatgaaaaaatctcgtaaaagtggataaagattagagtcagtaacatgattgatcgaaggtatacgtgatataacattagttattatacttactaatcagtctaagaact

SEQ ID NO: 9945 - DNA, 482 bp, Glycine max
  unsure at all n locations
agctngtaagccttggatcttcttcatcaatggagtcctttgcttcttgaagatgaatggcaatagaatggagaaagaagatgattggagatgccacttcaaggagaagatgagtcaagaagaagctcaccaccataggaatccatggataagagcttgaaggtaggagaagatgagtagagggagagggagagaaggagcacaaaattttgtgcctcaaatgaagtctgaactttgaagtggtaatttaaaatgatcaaagttgaanaaatgcacacacatgacctctatttatagcctaagtgtcacacaatattggagggaaatttgaatttctattcaaatntcactagaattcgtagagccaaaatttcactaattatgattaatgagatttagctatggtttagcccactaatccaagatcaagtccaatattctccactaagtgtgcttaggtgtcatgaggcatgtaaaacatg

SEQ ID NO: 9946 - DNA, 512 bp, Glycine max
  unsure at all n locations
ncgggttttgangcattctttaatcgacacccttaatactcaagcccgcgcttattttatntaaattcataagatcatgagttactaagtgtgtcctactatgacttgtgaaaaaaaggtgatcaaataaaaacaggcactccttataactgaccaatgcccataatcaaaactggaaaccccacgaccctgttggacttcttcaggtccactgggtgtcttgcgggcgccatccctgccaacaatagatgacatcagaaatcagttgagcgatgtgtattattacctatgttacgatggcgtgacctttgtgtggggacaggcacccggtatgactgacagaggcctattaccagagatggaaaccccagagccctgttggacttcttcgggtccactgagtgtcttgtgggcgtgaaccctatcaaccatagatgacatcatanatcaattgagcgatgtgcatactctactatgtcacgatggcgtaacctttcttggaggacgagcan

SEQ ID NO: 9947 - DNA, 312 bp, Glycine max
  unsure at all n locations
tctcttagtcacctgcggcatgcaagctagtgtacgctatatttaanntttttggcgagaaatatataagacatgataaggaataacgtgtgaatgtaagtaaagaactcgaagatatttctataaaagtatctgtattttaaaagtcaactaacaaagatgcacaccatctggttgggtcgttaacgttctttctcttccacatgcatgagttccttttaaaatagaaaaatcaatgacagatatagattgacataatagttctcatgtttcccttctcaatctttggtcgaatagagaaagataatgtct

SEQ ID NO: 9948 - DNA, 478 bp, Glycine max
  unsure at all n locations
agctntcttcanatataaattattctttntcctattattntaaattgcttaatatattattgctcacactcttatgctttntgataagtgccatatctagttatttttgggattaaaatattagcacttatcttttgattgtaatagtttttcttataaactacccttaaatctagttgttttatagatattgtacatttactaaagcttatgtttaaatatgaaagattcaaccaggattttgtaggctctgatggttgtttgttagatccagaaacaaagtcaaaaggaagggcaaaatggtcatttttcaagaattcagacattcactcgcctaggctagcttccagctcgcatgggctaataagaattcttcagccataagcaaccaacttgcttgggtgagctacaactnntctgngcgaattggtgccttcagcactgagtcactaattcgcctgggtgagctacatatgcc

SEQ ID NO: 9949 - DNA, 503 bp, Glycine max
  unsure at all n locations
agcttgaagggtgcgtagcccaccatatttcatagtagaatatcgataatgtgtctaccatcacgattatcgtctccttttccatcattggaagtaccacttgngctgccagatccttctacctttgggtgtattctttgaaggattcatgctcctttntgcacatgttctgtagttgcatcatatccgaagccattatactgacaccgcctaacgaaggcaaccattaggtccttccaagaatggactcgggaaggttccaagctagtgtaccaggtaacagctaccccagtaagactttcttggaaggaatgtatcagcaattcctcatcttttgcgtatgcccncatcttccgacaatacatctttagatggttcttggggaaagtagtccccttgtacttgtcaaagtccagcaccttgaacttgggaggggtgatgatattgngcactangaacaactcttctaggttagtaaaggcataatcttcaccttcttcaat

SEQ ID NO: 9950 - DNA, 466 bp, Glycine max
  unsure at all n locations
agcttctnntgagaaacttccttgagatgctagagcttatctacacacacccctctcataactatgctcacctccttgagaaacttctttaagaagattcctaaagaaactagagcttagctacacatacctctctaatagctaagctcacctccttgagatgagaagctagagcttagctatacacaccctataatagctaagctcacccccatgacaaanaatataaaaatacaaaaaaaagtccttactacaaagactactcaaaatgccccgaaatacaaggctaaaaccctatactactagaatggccaaaatacaaggcccaaaagaaggaanaaccaattctaatatttacaaagaagaatgggtccaaccttgacccatgggctcaaaaatctaccctaaggttcatgagaaccgtagggccttctttagtagctctagcccaagcctcttagagtct

SEQ ID NO: 9951 - DNA, 312 bp, Glycine max
  unsure at all n locations
tcttctagactcatcttctncttgaagtggcgtctnctctctctctttcttctncattccgctgccatttatcttgcaagaagcaaaagaatccattgatgaagaagatcctatgcctacaagctccaatgaagctttcatcaaaagtcatgcttttatagactcttcatgtctggtcgaagaaaccattggaagagttatgacttttgagaaaaccatgttaaaagttataactcttaactctttctttaaaactattcactggtaatcgattaccacaatggtgtaatcgattacacaatgtattttatg

SEQ ID NO: 9952 - DNA, 269 bp, Glycine max
  unsure at all n locations
agctagttctanatntacattgatgtntgtatgggaggatgttacatgccacttttgctntaagagtaatgtcccactaaaactaactttccaaatgtttgccttcgcaagaatggcaccgacgaagcttgcctcanagaggtccaggaaagacaaggcggccgaaggaactagttccgccccggagtacgacagtcaccgctttatgagcgttgtacaccagcagcgtttcgaagccatcaaaggatggtcgtttctccgagagcgac

SEQ ID NO: 9953 - DNA, 311 bp, Glycine max
tgcttgttgttggtctcgtcccttgtcacaggaagccggaaagtccgtatcaccttcttaattgtacacatggggcactgcgcccccaaatgcgcgagttagaagagataattttccgggctctcgtgtcccgtaaatgcattcatatcatgcatcgcataagcatctcttcataacatcataatggacatatcctgcatttgtccgctatcatattccaccctcacattttgcatgagtcatggcatcatcatgcatatgcgttcaacaaactttttgatctgcaaaattgcataccatctgttttcatg

SEQ ID NO: 9954 - DNA, 492 bp, Glycine max
  unsure at all n locations
agcttaataaatcaatctatggctngaagcaagcctcctgccaatggtatttgaagtttcatgatgtcgtcacttcatttggctntgaaaagaacatcatggatcaatgtatataccacaaggtcagtgggagtaagatttttttcttgtgttatacgtggatgacattntgcttgcaactaatgataagggtttgctatatgaggtgaaataatttctctcaaagaactttgatatgaaggatatgggaaatgcattttatgtcattggcattaagatccatanggaaagatctcgaggaattntgggtttgtctcaagagacttatattaacagcattttagagagatttaacatgaaagatngtcaccaagtgtagctcccattgtgaagggtgacanactcactctgagtcagtgcccgaaaatgatttgagcggaacacatganaatactccatatgctcagctgttggaagcctattatgctcata

SEQ ID NO: 9955 - DNA, 500 bp, Glycine max
  unsure at all n locations
agcttcatgatgatgattcaagtatgaatcannatagtttgatgatgacaaanagcccacaagaatgacttcaagattgagtcaacaagttcaagatcaagattaattctaagattcattagaagaaatcaagaagattcaagattcaagagaagttgatttcaagagaagatgaattcaagatttaagagaagaaatcaagaagacttcacaagggaagtattgaaaaggtttntttcaaaaagcaaacttagcacacatttgttctacaaaagagttttctcagatttttctaagttaccagagtanttactctctggtaatcgattgaaaatagtcacatcttttcatataatgcattgtgtaatcgattacatgattatggtaatcgattatcagtaacacgttttgaataaaaggtcaagatatgtaactcttgacatgattntctcaacgttataactcttctaatgggtgtcttgaccagacatgaagagtct

SEQ ID NO: 9956 - DNA, 493 bp, Glycine max
  unsure at all n locations
agctngccaccttgaaatatatctctggattagaaaagatatntatgataatgtctccatgaacatcacctattcttgatggtttattaccaccaagaaatactaaaacacctacatatatttgatacacaaatgtaaagccttagaaataatagaataccatatataatgataaaggctaaaatcaactgccacccaacaaacccgaatccaactgatctgaagatgttcatggttgactacaatcctaaagtgttcgaatttggtcggattgaacatctaaaacctaagggtatgttnggcttacattttcattttctgaagactgtnttcattctcaaaatattagaattatgaaaatatgtttggtttgactttctaatttctactttcaggagataaaaatactgaacatctatgatatattgaattctngctttctttatattttagaattgcttganatacattcattgcatcacatttcatttac

SEQ ID NO: 9957 - DNA, 606 bp, Glycine max
  unsure at all n locations
tccgctcacctaccgtgcacaaggggtgcacattctggatgtactttcggttgagnagtcngagcaaggggnaatagggttgaanccattgtaactgctcnnctttttntntatgtgacactctataatactcaagctagtgtaccttggagatacanaagctcatcgtaataattctccgttatttatgacacagcaggtgcactgtagcttcgtcacaatgactactctgtgcatggtcacgtcatcatcgttctctatatgtactcctgatgtctacatcaacacactcactgcgggacactaccanaatgtgtgacgattgagcatctcatattccactttgtactattccgaatgatcctctccatatgagatgcgaccctatgtcaatccctaattttggtctccttgcttacttcaaataatgactagaatattttcctctgactacacgtgatttcggtaccataatccaacacatgtatacctctcgtgatagtgggattgatgcctaggcttgatgcgcttcaatcgcagttcatttctgtatactaaaagggtgcctatgatgacgactcacttctaacaggcgggcctcctact

SEQ ID NO: 9958 - DNA, 448 bp, Glycine max
  unsure at all n locations
agcttatacgcatatntccctacgaacgttcacttgcacaagacatcctattaactaagaaaaatgcacccatatacaatcaaggtagcttcattacctagattatttacatgtacttccaaggtgtatttgttatttacatcacacacgcctccttggctgaatttacacacatgcctactcaaagcattttggggtaccaaaaaaaattgcacatgcgctcctcttggtatttctaatacctatacatatacaaacttcacgatgaatcttgactacctacacaataaggtgctacatttcatgcctttnttttcaagtttttgctacctaaagccgcatgcaaattcaagcatattttcctttgctgactaaanatgtattcaaattaaaagggatatatnttttgtaatatggtttcttcacataacatgcaacgtatttatac

SEQ ID NO: 9959 - DNA, 438 bp, Glycine max
  unsure at all n locations
aaagagtagttgtgcatgacagagaagaatatgtngattatcattgaccaatatgaaaggaagatggattnttncattattcaaaggcaggcgcctaaagatgaacaagcaaaggtgttggccctacacccgaaagaaagtatggaagaggtgatagagctatttcacaaagaagacatgaaatggatggatagattcactctcacgctaaattaaagtcaagagctctcaaagctgcaagctaaagccaacgagatggctgacgtatactccactcttgatgaagttcatagtcctttttactacgaanaactctatcaaagagaacatctcttgtggatcaggtctagtggaaggtacatctcttatggaaggtacattcactaaggtcaaagagaacaaaggaaggtacatcccttgtggatcttttgcttgaaa

SEQ ID NO: 9960 - DNA, 273 bp, Glycine max
  unsure at all n locations
aaagtctccacagaggccattgcctccctcgcccagtattatgatcagccattgaggtgcttcacctttgtggacttccagctatcacccatggtagaagaattcgaagagatcctacgatgttctctatggggaaggagaccatacctcttctcanggttctacccctcattggccagaatttctaaaatagtccatatctcggcgcaggaattagaccgccaaaagcaagtcgaaaatggggtgtgtatgaatacccagacaatgtttgga

SEQ ID NO: 9961 - DNA, 559 bp, Glycine max
  unsure at all n locations
gacgtgtcccattgaaccctagtatactnttcgtcgacctgcaagcatgcaagactcgtacagtcggggtgttctaaccactatattgtatttctcaacgctctattcttcagctctatcacatgtgttggagctagcacgcgagtgtaaatcaagccaggcttctctatctccattacatgcctccctaagagttataaggaatctcgaaccgtcgctttctgagataaattgtctcacatcctgtgcataatgaactgctgaatcctatgagaccttgaagaacgagtgttaagagtgacaccattaattctgaagccgcctgatcgtatacacaagagaacctgcgacagaccggggccatggtttagcacatatatatatatatcttcttcaactagccagatgtgatattgaatgtctcttgtgtgagcagataggatgatgatgtattcataacagtaataggtgatagagcttatgtctctaatcatacgctgcctcgcgttagtcgtctggatacagaacaggctaattcacttgctttacatgtgacccg

SEQ ID NO: 9962 - DNA, 409 bp, Glycine max
  unsure at all n locations
gaactggggacatgattcttgttcgttatcattcaaattcttttatatattcttataaagtttgaaacactctcaaaacaccttgcatatcttgagaganaagactatgaacttagatttcatattcgtttgtaagatgattaagagttagtcactcaacaaacaaatctcaaaaaaaatttatttgattaaagctagcaatgacttggtaaggcaaagaatcttgggttgtctcaagcttggtgtaaagcttgagttgtagagttggaagtgacataatactagtatntttgtggaaatagtggaactggattagtagccaagaactagatgtaatctcaatgatagagacaagccaataataaatctctatgtcatatacactnttatgtttatcttctcttttaaa

SEQ ID NO: 9963 - DNA, 497 bp, Glycine max
  unsure at all n locations
cggggctganngccttattagtcgcncctctatactacagcccgcntggttgagttgatccacaaagctctatagaaaaggtgccgatcttccaatgaaggtgatgcttcatacatcatatgggtgtgagtcaaaaaaaaaatgggaaacgggtgccaaaagaagcttgattaaataagatgtggtttggtcaaatatatttttggtctgggtggggtaaagtacaagtgtcttgggttccattggataattgtggataatgggactagggattatattatggctgatgaagtactggttcacggtttggggtgggaattgtattgcgcttgatattttcatacacttcacatcattgaagaatcttattttggcgaataattgaaatcaagcatttcatgcctttattgtccacaagttggactggtgtttttttaatattccctgctcattacttgaggggtcaaacgaaatattcattcctggctaatggctgg

SEQ ID NO: 9964 - DNA, 520 bp, Glycine max
  unsure at all n locations
agctngaagtgaganagtgtggaagagtcagtcttcctacttttatttgttgaccacagagtggtacctggagatatgtcngcggggtcaggagaccttgnggacgttaggtggggtgctattgcctaaaaccaagcttgaccaatcccgacccaacccgggcatagtcagtcagtgagaacctgtgatgtacctaaacaggcgagctcctggcagtcaaccaataaaagaacaaagaccacaaagtaaggaggcttgtgtggtggctggccagctatggatcttgagtgatatctggaatatggcttctggtaattgattaccaacggtgtgtaatcgattacaaggcttanaaatgaagacaataagttgagatggcctctggtaatcgattaccaaggagtgtaaccgattatcaggcttagaaatggaaatgggatgttgaggtggcctctggtaatcgattaccagtgctgtgtaatctgatacacagagtaacaggccactggtaatcgattac

SEQ ID NO: 9965 - DNA, 448 bp, Glycine max
  unsure at all n locations
agctngatgtgagaaagcgtggaagagtcagtcttcctgtctttatttgttgaccacagagtggtacctggagatatgtcgcggnggtcaggagaccttgtggacgtcaggtggggtgctattgcccaaaaccaagcttggccaatcccgacccaacccgggcatagtcagtcagtgagaacctgtgatgtacctaaacaggcgagctcctggcagtcaaccaataaaagaacaaagtccacaaagcaaggaggcttgtgtggcggctggccatctatntatcttgngtgttatctganaaataccctctggtaatcgaataccattcgtgggtaattgattacaaggtttaagaatggagacaggatgttaagtagcttatggtaatcgattaccaattgtgtggtaatcgatacacagtatgatagggcactgcgaatcaattacc

SEQ ID NO: 9966 - DNA, 614 bp, Glycine max
  unsure at all n locations
tccgtcatcatctgtgtcggcgnatacttcggggtgatagtggactataagtantgtgggnnacacntnnaanacgaagggttgacgccctcgttatgccgcccatagatactcagctctatctncaggcatanaatgattgttcttctagctctagcaatcatctctgatttctgctcttgacgtacagatggacacatgcttgcctctacctctatagcccctgcncacgcctcgctgcatcaatatagcttccatcgtgatgctgcataacccgcaagcatttctcccgtgaaacgtctctatatcatacctttggtgctcccatctttcttgatcttgatacctgtccacagacagcgccactcggtggctctagctataaattctgctacccttaatctgcctgagatcataaaacaagataaacacagataacagagcgaagctctacacagcagagcaagaacccacacatctacgctggtcgccacgtgcctacattcacgggaaaacatacctcatcattgatcgattgatcatgacatactgcggaagcaaagtttatgatgcatcactatcgactccacgtgtcgtggtgaccaccatgctcc

SEQ ID NO: 9967 - DNA, 482 bp, Glycine max
  unsure at all n locations
agcttgtagaatggctagacatgatacatgtcaaggcttggtttggttcaagggtaaaagggatgccccacattatttccatgacacaaatgcaaaaatgatgatttggaaattttatgcaaaactggtcatgcatgcacctatgcggacgctcaagtgtcaaattnttatggtcatgtgatgctagggctcaagattcatttcctctattttaaatcaacccaatgtttccaaaatatgttcttttatcaatttgtgcattcctccaagtccatttcgggcgtccggngagaatttcacagcattcacccttcaggtgtagacancgtttttcttcaaaaatcggttatgaatcaatgaattttttttcaaagaaaagttggaaatcatctcttttcanaagcatgtcggttnttagctagacaacttattttctcttttccaccttctttntttttttatcattatcatttggttatttc

SEQ ID NO: 9968 - DNA, 477 bp, Glycine max
  unsure at all n locations
agctngattaanatattntatntagttntggttcctctttcttgtatacttcttacacttctaatgtaccttggttatgtctcctttagcattttattctgataaacttattatccatcatgaaaaaagaaacctactcttttttagcagatttttgtttgctttgtatgatattaatgttggaacaggttggtcgaatgacattgggtggattattggctcttgggtacattgttgttgttagttacaagcgtgcctccacaactgtcaataatggcaanggttcaatgtctttagaaactattgatgttcttggtgagacgttcatggtgatgagaggaactaatagaaaggtatgtacttttttcctatcacactaaatttatgtccatntaaaatccaatcttcttgattgcatttactctntactttcaagttactcatcagtcatcatgttcactttatgcaaataatctt

SEQ ID NO: 9969 - DNA, 274 bp, Glycine max
  unsure at all n locations
tcgccgagtggagcggnctcttctncagcttcgactgcaccatggtctacctncgccagaaagatgacccctggaactccatcttcggcggcgccggcaccggcggattnctctccatgcgccagggcctncccgccagcgcccgcttcgctgagttcagcggcgtccttctcgctctcatcgaaggcgccggcatcatgctcaacaagttcctcatcgcgcagcaaccgatgccgatgattgtcgatgagcctcttccgnctaacgggctacc

SEQ ID NO: 9970 - DNA, 456 bp, Glycine max
  unsure at all n locations
agctttcgattcattctatgtacccatagtggtccacattgtgtttcgtgcatttntattctcgttntgtttactttttataccccctgttgacgtgcttaagccattttacttaagtcgtttctcgcttaacttaaaaataaaataaatttccaccgaacgtttgaattgtattatccattaacttcggttaaaataaattccgactgttcggtcgtgccataaccacgttggaaatcaaaaagaggtaaaaaataatataataatcaaaaagacatcttttagtaaaataaagcggaaaatcaatcggacgttttctctttgggatttctcattcttaatcgaattgattaataactaaggtgaaacaaaggctaanatcaactcgcctagtcaagctcgtccacaaaaataggcttntgaagtttgtcatttcaatttctctctaagtaaaat

SEQ ID NO: 9971 - DNA, 56 bp, Glycine max
acatgatttcacgcctctctctctctcataacaccggccaaacaaccctagaaact

SEQ ID NO: 9972 - DNA, 494 bp, Glycine max
  unsure at all n locations
agcttaataaatcaatctatggctngaagcaagcctcctgccaataggtattgaagtttcatgatgtcgtcacttcatttggctttgaaaagaacatcatggatcaatgtatataccaaaaggtcagtgggagtaagatttttttcttgtgttatacgtggatgacattttgcttgcaactaatgataagggtttgctatatgaggtgaaataatttctctcaaagaactttgatatgaaggatatgggaaatgcattntatgtcattggcattaagatccatanggaaagatctcgaggaattttgggtttgtctcaagagacttatattaacanattnttagagagatttaacatgaaagattgttaccaagtgtagctcccattgtgaagggtgacaaactcactttgagtcagtgcccgaaaaatgaatttgagcgggaacacatganaaatactccatatgcttcacgctgtggaagccttatttatgc

SEQ ID NO: 9973 - DNA, 401 bp, Glycine max
tactcaatttatttcacacacttactcacttgactataccaaccctttctgtcaacaatttgtaagatctctcatcataaacataacatgtgctataccatttatatgtttgtgacacacaggactggaaataacactagcaatatgttaatggataactcactttataagaaaagtaaaacttctctgatgaagatcttgcaagctaatttggtcttctttataatacccgcgcccgagaatagtagataagtaacttgtagtcagaaaaatagtggaaagcagcatattctggtcgctgaacattgcaagccatgaatgccgaaataatgagaagtatactgcttatacctcgttaacacctaaatgctgcccataacatgctatctcatttctattta

SEQ ID NO: 9974 - DNA, 261 bp, Glycine max
  unsure at all n locations
aacatcctttagaatgctagctggttgaaatcaagcttaacgaggtggatatagataaataataggaggaaaaaagtcgtaaaatataaaattctattaaaacttttaaattataaaaagatatttaaaagtttaataaaattacaaagaatagcaactatttaatgtattagttgcacatacttgtttaaacaaatgtgtgacttgtcttggcannaaaatgcgtgagttgcaccttatataagtatttcattcatatat

SEQ ID NO: 9975 - DNA, 473 bp, Glycine max
agcacatggacttgagtgttgtccaatttcatccgatcttttgtaatactcaccaaccgctattagaatctaatacatattcactctttttgtctaataagttcttctactttattcaaggtaatttctaaagcatgcattgccccagatttctcatgcagtaagtaaacataaccataacgtgaactagcctcaataaaggtgataaagtatctctcctttcccaaagaactaacatcaataggtccacatatatcagtatgcaccactctaagaagctgagtggttctccgagcctctttctctcgatgattagttggtgtcccttgatacaatccacacagatatctagatcccgtagatctagatcatgaagaatttcattctgtataatcattccatcctcttctcaaaacagcgaccttaacctttatgccgcaagatagccagatcgtccttcactacactacccg

SEQ ID NO: 9976 - DNA, 418 bp, Glycine max
  unsure at all n locations
agcttccttgagaagttagagcttagctacacaccctcctctaataactgagttcacctccttgagaaacttccttgagaagattccaagagaagctagagcttagctacacacacccctataatagctaagatcacccccatgcgcaaatacatgaaaatacaaaaaagtccctactacaaagactactcaaaatgccctgaaatacaaggctaaaaccctatactactagaatgactaanatacaacgcccaaaagaaggaagaacctattctaatatttacaaagaanagtggacccaaccttggcccatgggctcaaaaatctaccctgaggttcatgagaaccctanggccttctttagcagctctagcccaatcctcttggagtcttctatccaatacccttgggggggggg

SEQ ID NO: 9977 - DNA, 363 bp, Glycine max
  unsure at all n locations
gctttctttctaatcaacctgtctactgactaacaattctaattggaagttcacattcttgttctttctttttctaacatacacactagctcagacttatgaaaagaaacacaaattccatcacaatcatgcattcaatccaaaatcagtttataacaccaatttcacaaaaagataaaagtgtttcactgcataatcatcaaagtcaagttaaactgttccatatgcttcaaaaaaagcataccaactattcacaagaagtataaggatataattactaacgaaaaccaaaattactcaaaataatgtactgaaactaatataggtataattattatccaaaaagcanaataatcaagaatt

SEQ ID NO: 9978 - DNA, 257 bp, Glycine max
  unsure at all n locations
attgcatattntgtccactatgtgtttaaaattgaacaatcttaatctattatacaatatatgtattagacactcacattattcatcattntagcatatcaatgtcacatcattactaacatgagacatcaatattttttaaaagaattaatgaataattaacaatgaaccaaaatgactaaatttaaaaaatgtggggagtgaattaatttgcaataaagaactttagaatcaaaattacatcatttacaaaacaa

SEQ ID NO: 9979 - DNA, 422 bp, Glycine max
cactctatccttctgataactcagcgacactaggaagatgtttgaatactttaccatccatcatagacgctagaggatcttgcaagtgaaaagttcttatcagatatgtgacgtgtcttattctattaatattgttaacaacgacaaaactcaggcttcatctcttgaatcttgtcgatcaaaccgtccaaagttgtctgagtttgcttgagaaaagccttggagtaaaagagtatgtgtttctccatgtcttggaagcgagggtggtcattgtgagacgggccacataaaacaacctctggagtgtaggcttcttcgatgtgtattctgttactaaatgacactttgtagatgcaacattctagtagtatgggtgccctgggccgctcaacatcttctcatattgatcttacaacatcacc

SEQ ID NO: 9980 - DNA, 235 bp, Glycine max
atacaatgcagcttggtatcaaatttgccgcacaaaggaatgagttacgtgatcttaccctactacaaagaagctgtggccattaacgtgccatgactccacagtgtcttcagtgttctcaaacacaacctctattaagcctccgaaatcggcttccatgacagaagtttgaatggagccaccactaccaatggggtagtcaaggatactttccaaggagaacaccccttggatc

SEQ ID NO: 9981 - DNA, 411 bp, Glycine max
agtatggcgtacacattgcatgtctgatatgccttttagaggcgtgaaaagtgcgagagaatgagctgtgttttctagaaaacgcgatgaactcgctaagcaagcatgctgcactaagcgagttcatcaatactcattgtatgtaagcattatttgaagaactcgctaagcgtgcttaccgcgctaagcgagttcatcctttgagaatgaacactcatcctcttgctgaactacttgtggctaagcgaggttgaatcgctaagcccacgtaacttaaccaattttttttttggtgataatcgcgcgctaagccgagcattcctgagccaagcacaattggttgtggcatccgctgagctaagcgagcttcactcgctaagctcccaacacttagtgaagattttgaagagt

SEQ ID NO: 9982 - DNA, 192 bp, Glycine max
catgagctttcccttaccaacttcaccaatagcattaccaccattctcttcatcatcttcctccttatcattcaactcattctcaatcttcccacttcccttctttttcttggtctggatataccctattagctaataagccaaaaccacagctcctgtcatctgactaataacaatgccagcaacagcacc

SEQ ID NO: 9983 - DNA, 533 bp, Glycine max
  unsure at all n locations
gatctctaagtcacctgcggcatgcaagctngccgcagctgctaatggcgatatagcctgaaccgtcattgtcattggtgagggagctgcttacgtggacatgtcgtcattgttgttggcgagaccggctgagtctggtgacgtggagagagtcgccaatgcttctggtgatataggttgcaggagtggttctcgtcactggaaatggcgagactggtgtcggcggattctcttttcctttaaataggcagcctttgccttgaaaatntgtagtagtcttgataaaagaaagcacagaggagcgtgtttaatcaagaatttacaagccttactttcattatctctagatagcccagctnttgccttgaagtttctcattccatccttanttatttgaagtaacaatctatattgttgttcagtcaataatatatcagtcttgcattcattcttttcaagttaagttttttgaataattgtatcatntacaaattatttattttcgaagtaataattttgtgggtagaatcaat

SEQ ID NO: 9984 - DNA, 87 bp, Glycine max
aactattgataccatgatgcggctagatatttcatttgatgtgaatagttgcaatcaattccttaattttgtgatagccactgggat

SEQ ID NO: 9985 - DNA, 534 bp, Glycine max
  unsure at all n locations
atcctctgagtcacctgccgcatgcaagcttgtgcattgaagaaaaattaaaaattgtcatagttacagcgccgacacggccaaattccaacaaagaagaaaaaagataaagatagaagacacgtagacataggcatcattgccttgctccgcaacaccctgcccttcatcagcagcctcatcctccactataatgtattcttcatcaatcaggacaccatccttcacatccttgaagggatcgaagagacccaagtcaagttccttcgcaaagaaaccagcctgcgtgaaggccttctgaaatcctttntcaagctgctccaggcctccttcttgtacagaaagagctcttccttaagctccttgttggcctctctttcattggctgcccgtaactcagactcctccaatctggaccncaactccttaagccaagcctctaaattagaaactaccttggctagccagtccctttaaccgccaattnttccaccttctcacccaggcccttcttttcacctgtaagtcttgagc

SEQ ID NO: 9986 - DNA, 451 bp, Glycine max
  unsure at all n locations
agcttcttctctttcncgtgcctagcattggcattcctgttataaagcaaccttctccgctgatcttcatcaaagattctacacatgtttgtcaactgtgcaaagttgtgaataccgtgatagtttaccatcatctttacttctggttgaaggccattgacaaatttcacgcatttggacctctctccagcttccncctttataatgaggaaaataccttacaaggttctcaaacctcaccgcatactctgccaccgtcatactttcctatttcagctcgagaaacgtcatctcctttctattcttacatcttctggaaatacttctcagaaaagtggtctttagtctccattgacaacacacccctgctcctctgactgggcgaggtttccacagtactctgctcattgtacatggagtacaacacactttgtggtctacatcatacccg

SEQ ID NO: 9987 - DNA, 327 bp, Glycine max
  unsure at all n locations
agcttcaacattgaatntagagcgtctcgatatattacctgactcaatcagacatacaagtgaaaagttattatcgtttgaaaatcctcagagcttcggtattcaatttcgagcgtctcgatatattacgggactcaatcacacatccgtgtaaaaagttattgtcggttgaattagctctgaggttcagaattcaatttcgagcgtctcaatagattaccggactcaatcagacatccgagcaaaaagttattgtcggttgaattagctcagagcttcacaatttaattttgatcgtctcaatatattaccggactcaatcagaca

SEQ ID NO: 9988 - DNA, 253 bp, Glycine max
  unsure at all n locations
atgtctgatttagtcccgaaatatatcgaggcgctcgaaattgaatgttgaagctctgagcaaattcaaacgacaatatctttttactcggatgtctgattgagtcccgcaatatattgagacgctcgatattgaatgttgaaactctgagcttattcaaacgacaataactttttactcggatgtctgattgagtcccgtnatatatcgagacactcgaaatggaatgttgaagctctgaggatattcaaac

SEQ ID NO: 9989 - DNA, 394 bp, Glycine max
  unsure at all n locations
agctntctccccaatttctataaatagggggagaagtgtattggataagggttcagccccttaggcacttctctctctttcgaattntcttagaaaaattgtttccgtgaagaagatccaagccgaggcgctttcgtaacgtttccgtgagtgatttcgcgaaggttttcgaccgttcttcggtgttcttcattcgttctacatcgttcttcagtcctcaacgggtaagtacctcaaaccaagcttttcaattcattctatgtacccgtagtggtccacactctggttcatgtatttttattctcgttntcatttactttntatanccccttttgacgtgcttaagccattntatataagtcatttctcgcttaacctaaaaataaactaaatt

SEQ ID NO: 9990 - DNA, 282 bp, Glycine max
tatgaccatttgaatttcatgagagcattcattattcaatttctataatctcgatacatcatgggcctcaatcatactcccatgtcaaaagttatggccgcttgaattggaccagagcttcaatgttcaatttcgaacgtctcgatatattatgtgcctgaatctaacatccgagtgaaaatattctaccatttaaatgtctagagagcattcgctattcaatttcgagggtctctgtatattattttcctaaatctgacattcgagtgaaaagctatgacc

SEQ ID NO: 9991 - DNA, 403 bp, Glycine max
  unsure at all n locations
gcttatacatcgtggctctagaatcatatggaagaaagatggggtgaaactagaatgacagaacatgcatttttctgcttgagactgccatagcatagccatcactcaccgagtcaatccagcaagaaacttgcacgggtttgtttccctcanaaaatctcttacactccaacctcttcccacgtgcttcagcctcattccctccatactccatccattcaatgagcaactttcacgaccaanaaaattctgaacccaaacttgtgcctagcttttgttctgcttcctcaacacaaagcatggccaattccctatgcctcacagttccttgctaaagnttgcatcttcggtagtgattntggctntgagtgcgccttattatatcgggtgggagagactctgt

SEQ ID NO: 9992 - DNA, 486 bp, Glycine max
  unsure at all n locations
tagctntaattntnttggaatcaaataatatatcanaaatagtctcatattgtaaaaattgttcacatcgtgtaagagttagcttatatatgttctagtcaaagtcgtatatatgtttaatttattctcaaataaaaaacaaaaaatagtctcatattgtaaaaatcttaaaaatagtctcatattgtaaaaattgttcaattcgttctcaaaatagttcagaaggatcattggcctatatatgttctagtcagagtcgtatatagagattataagacctaaaataacaattacttccacatttaatttaatacactttgttaattttttttaagaaaaattgtgagttgctatcttaaatattattcacatgtcaaattgactcaattaaagaattaaattaatttatgtatacaaaatatcaacatgaaatacaatnttaactaaatgtgtgatgttataatcaatanttttcgtcaaatatct

SEQ ID NO: 9993 - DNA, 446 bp, Glycine max
  unsure at all n locations
tggaatccaataacacatggactctggttcctctcccaattggtaataaatgcatcggctgcatgtgggtgtacaaagcgaaattccagcctcatggcactatggactcgcacacagctagactggcactaaaggttacacacaacaagctggtattgatatccggatagcttctctccaatgctcaacttaccttacatagaatccctttggctgctgcaactgctcaaaataggccaaccctcatactcgatggggataatgccctccttgatggtgaactatttgacgaacggtatatgggaactccacagaggacacttccattgatataaccttggctgacgtcaacaatccattatggcctagaaaacatntgacaggatttataaccctctacacacttatgaaataggtcttccaacaagaatgacattctttttacn

SEQ ID NO: 9994 - DNA, 275 bp, Glycine max
  unsure at all n locations
ctgtcttccacaatatagctgcacatgcctctggactaaatcatgtgataaataaaggtgaaaccagcagaacaaacaacaagactcttcaattagtaaaattatcaataataatggcagtagtcaaccatatcactcagtcactgtctctctctctctctctctctcacacacacacatacacacacatatataatatatatgagaaagtatcatataagagctcatcgttagaaatgaagaagactacanatatagaccattagatcgtattt

SEQ ID NO: 9995 - DNA, 473 bp, Glycine max
  unsure at all n locations
catgtctctctatctctctctctatataaaagacattaaatttatttatatgttagctttcaaaaatattattaaaagacttggtagggtttatatttatattttaaatattagaaatatatttcttttttgtgtatataatcttagtctatttatcaattaagaaattacataaatgtttccaggctatatatgattgtattgtaaacaatttgtcattaaagtacatgtacaaacatacatatttgactaattataacttataattggattaaagaaacaataattgttggttctattctctcttttggaacatatgatttgttgaaaatattgtagttgttgattctaaacacatgtaaagcgtgtagtatcctctatattcttttaanttcgtntntatatatattatatatatatatatatatatatatatatatatatgtgggcggcggccgtgtgcgcgcgngccg

SEQ ID NO: 9996 - DNA, 458 bp, Glycine max
  unsure at all n locations
ctttttccctgctattagcgcacctttaatactcagccttcacaaatgtcttacaaataatcatcacacagcagaaacctatctagactacgcatcatatctcccccaaccccgtacccacgaaaatccacagagaatagaagtccaccccaacctgaattttcgaagacccactccgagccacgcactttacgaccccgaaaatgccctcctttcgcgatttggggcagaaatgatgagccaaggttgaagctttgcttggagctctcatggagaatgaagataaaaaaaatggccacctgaaggagagaagagctcgctgaaaagtggggggctgaatgaacaagagaaaaaccttttggtntaaataaaaggtttttcttttttattatttattcagctccgcccatgtcctattgagtggagccaaaagcgcagcttccttttactgtacccac

SEQ ID NO: 9997 - DNA, 524 bp, Glycine max
  unsure at all n locations
acggtgaatcatgcaaccctgatctctaagcactgcagctgcagcttacatgaagtacattatgaaacttattttgttggtatcttaatggtatgtcatcttcacactgacaatngccttaagttaaaaccttgtgctgcgcttgatttatttaatttgagaagtcaatccttaataatagaacgttgatgaaggtcatttcttcccccatagaacacccaataattaatttattgggttctaccttaccaattggctcatagagtattaaaaaccttagattttatgtctgcatcacgaaatctgtaaaatggacaaacccataattgacaaagtgatattgtctcgctaattcaaatggcagtgggaaccaacaaacttttatgattaatgaggtgaaatattgtgcagctctcatanatatgttgcattaggaacatggggggtctacaattttttttgatacaggtagacggtacgtctactggaagctccctaatattatggtgactctatgattatan

SEQ ID NO: 9998 - DNA, 294 bp, Glycine max
  unsure at all n locations
ttatcatactaactcatttacaaaaatcaagcagtcacagaanataaacttggtttcaagtcataataatattctaaaccggtaacttcttgatagttctgatttagtttttcatccaatcataaatccttttaatagacatcagtgaagcatatactcaacaatacttcagctgcttacactatacatcaatagaccaaaactatgattcanataaataganaccacagatacacttatacttaagtagtaaaaatacaaacctttgtagttcctgtatgttcattggaaaat

SEQ ID NO: 9999 - DNA, 375 bp, Glycine max
  unsure at all n locations
gcttcattcattataaacatntaataatntaacatttagtagatacatgttagtcacatgactnttaatagaactntatgtctaaaatattctcatattctttatcttaactccacaaaaagatatgacatcatttttaacctgaaaatattttaacattcttcactctntttctttnttctctaattggacataaatccagtttttcattgaacatgaactcacctcgttggtacgcatggtgtaacatctcttcttcttcttcttcttcttcttcttcttcttttcttcttagntcaatttttttgggcgtgttaggtcgtttgggtgctacattntnntgtggacgtgtttccaacaatgcctatgaatatg

SEQ ID NO: 10000 - DNA, 193 bp, Glycine max
ttatgtggaatcctctgtcatgggacatggaagcggctgctatcatggcgatcgcattggccaatggagggcgaactatgccttctaaaacaagaagaatcaaaacagttctatgaacatgctatataaaagatgtttctcttccttatgagtgtacttttaaatgtgtgtgtgcaaatcaaatgagatacag

SEQ ID NO: 10001 - DNA, 455 bp, Glycine max
  unsure at all n locations
agtcacctgcggcatgcaagcnttctccccattntcttataaatagggggagatgtgaagagaaatttcgttcagccctcctggtaattcagaatcacttanaattagtgaaaaaaattggttccgtgaagaanatccgagccgaggcacttccgtaacgtttccgtgggtgatttcgcgaaggttttcgaccgttcttcgacgttcttcattcgttctttgtcgntcttcggtctccaaccggtaagttccctaaatcaaacttttcaattcattctatgtacccttagtggtcctcatttngctttacgtgctttcatttacatttcatttacttcccgtaccccctnttgacgtgctntagtcatttgctttaagtattntctcgcctaatcaaaaaataaaataaatttccaccgttcatttgaattgaacattcgttagtttctggtaaa

SEQ ID NO: 10002 - DNA, 427 bp, Glycine max
  unsure at all n locations
agctataacattcaatttctagcgtctcgatatatttcgggactcaatcagacatccgagtaaaaagtaattgtcgtttgaatttgctaagagctgcggtattcaatttcgagcgtctcgatatattacgggactctatcagacatccgagtaaaaatttattgtcgtttgaatttgctctgagcttcaacattcaatttcgagcatcccgatatattacgggactctatcagacatccgagtaaaaagttagtgtcatttgaatttgctctgagcgtcaacattcaatttcgagcgtcttgatatattacgggactcaatcagacatccgagtaaaaagttatgggtcgcttgaattgttcagagattcaacattcaatntcgagcgtctcgatatattacgggactcaatccgacatccgagtaa

SEQ ID NO: 10003 - DNA, 488 bp, Glycine max
  unsure at all n locations
agcttgatgttcaatatttactcanattttccttgactgtgtctataattaagaagtcaatatgcttactagatgaagagaanaaatcaattntgtatgttgcagacttgaagatccacccaatgaacatgacatgaagaacaatttttctacaaacactcaaaatgaaatttcgtcaacaagatgagttcattctggacattgtatatggagttcaaaaatgcaattgagctattcttgatggatatagaaagcttgaataacgatcttcaactttcataaacaagttgtggtctggtacaacctgtatcatggacaaaattgagcctaaagttatagacgtngattngcctagataactngatatgaatgtagcaatttgaatactttngagctacacaagttcatttaagatgatctcagtgtctatggaaatctanaagaaagatctatatctttaatgaagaagtcatgagctaatatgactt

SEQ ID NO: 10004 - DNA, 286 bp, Glycine max
  unsure at all n locations
agctntcttcganatatattatattctntntcctattattntaaattgcttaatatattattgctcacactcttatgctttntgataagtgccatatctagttatttttgggattaaaatattagcacttatcttttgattgtaatagtttttcttataaactacccttaaatctagttgttttatagatattgtacatttactaaagcttatgtttaaatatgaaagattcaaccaggattctgtaggctctgatggttgtttgttagatccagaaacaaagtca

SEQ ID NO: 10005 - DNA, 455 bp, Glycine max
  unsure at all n locations
natntttttcctctaaataagaaagacgatcttaagccaaattgggcaagccaagtttgggctctaagagctcaactnggcttgactcatttacaccgctacttaaaagtatgctattgccacaaaagcaatcatctacaataaaccagtaatacgctttcctagttttcaaaattcttgacggaagatatcataatcacggggtgtgtgttgatttnaatacaaaaccaaccagttcacagtatgaagaactgaagtagagtctgaggagtcaagaatttatgcttggacggctgangtatccctatagaagagaactngaggcccttcacaggatgactttcctagataaagatgatctggcattacaagatagcaattcgtatgatactctgatatagacccagcatgtctatgataaaaccatgtgtatgtaggacatgcctagattgtcn

SEQ ID NO: 10006 - DNA, 249 bp, Glycine max
  unsure at all n locations
cttaacctgtacctgcttaacaatcattctattgcccctcactagtcactactactatgctttattatcgaagccacttgaggctttcaatgtcatattattctttntggatgtgcttatcccttcagtacttactacgataagttaaagggagagatggatgccattatagaattcacacggctccatgtttgggttattctcttattaatcaatatgcgtaaagaatgagtattactcgtattctat

SEQ ID NO: 10007 - DNA, 420 bp, Glycine max
  unsure at all n locations
atcaatgactatgcttacaaagttgagctgctcggtgagtataatgttagttccaccttcaatgtctctgacttatctcttntttatgcagatggagaatccgatttgaagacaaatccttctcaaaagggagacaatgatgaggacatgaccaagagtaagggcaaggatccacttgaaggacttggaggacctatgacaaggggctagagcaggaaagccangaagctcttcaacaagtgtttntcatactatntgaatacaagcccaagtttcaaggagaaaagtccaaggttgtgagttgtatcatggcccanatggaggaggactaaatggcaccactttgtctcaatttagagtgttagttngctaaataatggccaatcccttgtaagtggtgacaaaatatgtttgggtaat

SEQ ID NO: 10008 - DNA, 340 bp, Glycine max
  unsure at all n locations
catcctgcttggacgaatgagaaaattgcggcaaataaagagggtgacgatgagggagaaacccatgttgtgactgccattcctgtacggccaagtttcccaccaacccaacaatgtcattactcaacccttctccttacctaccacccatttatccacanaggccatccctaaatcaaccacaaagtctgtctaccgcactttcaatgacgaagaccacctttagcacaaaccanaaacaccaacaaaaaggaatttacagcataaagcctgtanggttcaccccaaattccgttgtcatatgctaaacttgatcccatatccactcgataattcaatg

SEQ ID NO: 10009 - DNA, 161 bp, Glycine max
catagccttcttccttaattctctttgagagttctgctaagaattcatgcatatcacttgttattgggtggcatgtatctcctactaagaacacatgcacttgtcttttaatttcaatccatctcttacctggcttcttcactatccccctattgtgcata

SEQ ID NO: 10010 - DNA, 428 bp, Glycine max
  unsure at all n locations
catgcaagctngtgctattccaagttcattaatcatacctttattctcagatgcttccttcactccttcagttagggccatgtattctgcttcagttgttgaaagagcaacaactgattgttgatttgctttccaactgattgttgtaccaaacaaagtaaacacatatcctgttaaggacttccttgtgtctacatttcctgcaaaatctgcatctacatagcctgtgactactgcctcgtgtgcttgcttcttgtaccttanaccagctttcaaagaatccattagataccttaatgtccacttcacagcttcccaatgtgcgctttcaggatctcccatgaatctgcttataatacttacaacatgagctaagtcangtctgctgcaaaccatttcatacattatgcttncaacaccactggcat

SEQ ID NO: 10011 - DNA, 287 bp, Glycine max
  unsure at all n locations
agcttggaagtgtatgattttntgaagaatattgatgcttaangtgaagaagatggtggtccctatggctattatggaatttcctgcattggtaaagaaggcaaaaactgtggaacacctagaaggtggtagcaaagtgatcagaacccatggtggtggatcctctagcactaagaagggaaactttagaagaagccctattctagaccccaacaacctcaggaaagtttagttgtgaccttgctaggaactcaatgacttagtgatggtccacacttaatgaccta

SEQ ID NO: 10012 - DNA, 413 bp, Glycine max
  unsure at all n locations
agctntataagcgcggttctgtgagacaaaggtcttgtgttcgcgatatgcgaagatgatgttccgagtaccttggatatggtacgaccatgccctcctgatttccagctgggaaattggcgagtggaggaacgctccggcatttacgcgacgagcataatttaaacctttacggttttaaaagctctatagttgggcctaggctntagagatttttccttttgttaagggcnctgtgtcttttgtttttgaatatataatacaaggatctttcttcatctgttcctgggctctacccattctcattcattggcatgtttactatcttttctgaaacggcagatccgatgacgagtctcgcgaatgtactaataccagtgacccgcctatcgacttcgatcgagaaatgaatc

SEQ ID NO: 10013 - DNA, 257 bp, Glycine max
  unsure at all n locations
agctnttcttcgaaatataaattattctttttcctattattntaaattgcttaatatattattgctcacactcttatgctttntgataagtgccatatctagttattnttgggattaaaatattagcacttatcttttgattgtaatagtttttcttataaactacccttaaatctagttgttntatagatattgtacatttactaaagcttatgtttaaatatgaaagattcaaccaggattttgtaggctttgat

SEQ ID NO: 10014 - DNA, 264 bp, Glycine max
  unsure at all n locations
cataaaacatgaataatttaatcatacacaaagcataatttgtaaaacaaacataacagattctaaaacatacataaagcaaaacatgaataaaaccaaattgaaatgcaaaccacttagtcatatatcacaaaccataaatatcatgttcagtcatactaagcanatattaaaagaaatactnaagtgtcanatgctataataatatagccaaatacactgctagaaatcaaaatactattaataatagtaatgtctaaactg

SEQ ID NO: 10015 - DNA, 280 bp, Glycine max
  unsure at all n locations
gcagcttaagcaataagcacacctcactcgngacaattgttgagnacgnacaaactattttcacgtgtatcctanatcggatgagcttcatacaatcgtcacgaactaatattcaactaagattaaccacgtaaagagtatttcctagtgtatgctatcacagtgctcctctcaagaaaaggtaacagatgaacactacatctaagtgtcatgctaatttgtaccatccaagtcacaaagcataactactataccgatgtaattcgatactaagtatcac

SEQ ID NO: 10016 - DNA, 237 bp, Glycine max
acctatggatgctaactcaagatcgtgtgtgggataattctctttcatgaatttgagttgtcaagaagcataagccactacctgtccccgctgcataagcactccacccaaacccatcttgaatgcatcacagtaccccacaaagggttcactcgggtcgggtaacactaaaactggtgcagtggtctacctttccttaaaggtacggaaactactctcacactggggcatccacac

SEQ ID NO: 10017 - DNA, 354 bp, Glycine max
  unsure at all n locations
agtcacctgcggcatgcaagcttctctngcanagaatgaaaagagnaaatgatttattaagaagtacaagttgtgaggatatctccttcacctctagaaacctcacaaccactcaaactctcatccaatactgcgcatgataacttcctcttcaatctttgctatctctcaaaatcttcacaccagaagttctccctgccactcaaccacttagatgaatgcttccaagaacagagaaaacaccaaaaattgagaactcccttccatttatgatttcaggctntaaatagtgtagcagatttttggttgttcgctcagccacattatggttcgctttagccaaataagtgacat

SEQ ID NO: 10018 - DNA, 369 bp, Glycine max
  unsure at all n locations
aatctatccataatttatttgataaaatatataattcattcattaacactttgtacggataaatactaagtatattcataaatttattttggagaacttgattcttaaagccatgacactacaaaaaaatacttatgggtacggacttctttttgctacagccatgaattaatatagggtaaattaaaaaatacttctatctaccanacggatgaatataggtgaaactcaatagctggtacttatcattatttgattgtaagtaattcattagacttctacctacaactattntatgtaggtaaaactcaaaaaaaattatgtctatgggtcgatagtataggtaaaactaaaaaaaaattattgtta

SEQ ID NO: 10019 - DNA, 580 bp, Glycine max
  unsure at all n locations
cggcctctgggttganccctgnnnnnctgancccttgtaanccgtgatcttaagtcacctgcggcatgcagcttatntactcatgtttacncatagaactcttgtacaagagtcttgatcattggcatcnttaaagaatgctgaacatgaaaaaaaggaaatatgccaaagaaaaatttgaaatagttcaaatggaagaatgcaagtctgttagcacaccaatgaagtcaaaggagaacgttagcgaggaagaatgtgttgataacattgatgaaggatattatgggagcttgattggatgtctaatgtatctcactacaacaaggccacacatttttattgctcaaaagacaaaactgaaattttatgtgacaatcaagtagtcattggtatcgcaaacaatcccgtgtgtcatgggaagactaaacattttaacatcaagttctattatttgattaagatgcancaaagtggtgaagngaacttaagttatctgtagtctatagatcaactggctgacatgttacanagtcactacctatcaacaaacttgaactcagagaaatgggagttgctgttn

SEQ ID NO: 10020 - DNA, 423 bp, Glycine max
  unsure at all n locations
agctnttcananggatattatgctcacattcactttcttctacatcatattcaaacttgtccaaataaataatacagtcatctcgactcagagaaaatcatataagtctcatacaattaatatacaacctatatcctaatgtcacatcctatcagagcgtggtgtttccatgtcctctagcacgaggttcttcatagacatgcacctattcatctgctcccccgaacacaagttcaagatcatcacacgatccanacacaacaacacacagggagtgagttatcacattcctagctaatagagaaacaagacaattaaatatacatattatataaatgagataccacttgcttaaacatagctcacgtaacttcaccacttcatcattcanaagtcacttttcaattatcaatcacattacac

SEQ ID NO: 10021 - DNA, 280 bp, Glycine max
  unsure at all n locations
ttagtgtatataggaaaacatangatgtaccggntcttaaggattattcgatatgcattccttgtaggtagttttggatgcttattggacccaatgggtgtggaaaatctaccctcttgaaggtattttacacgattctggtcatctttttgctgttgttttttaagtgttttttttatgttcactattagatntattttgtattcaaattgcatcacttttttgctgtngtctttgctggtttttaaatggtcattcgtagaaatgttagtttcattat

SEQ ID NO: 10022 - DNA, 273 bp, Glycine max
  unsure at all n locations
aacctctaaaaagttatcaaaaacattataatgattttttcaagcaaactgccacaaagattattttgaaataactaatattaattgtcacattattatttaatagagaaatataatgatagggatcaaaatcaaattaaaaaataaagtatagaataaaaacaatcaaataaaaatttanaaataaaaacataagttatccataaaataatatatattttcccgcttgatggatgtatctnttaaagtaaataatcatataccaatcgataa

SEQ ID NO: 10023 - DNA, 199 bp, Glycine max
  unsure at all n locations
agcttctatatatntactatactctactagttntatccatgattntatgaagctnttaagtagttggtaataatttaagtttcaaaagggtcattacactnttagggatttcgaccttatatntaaactcaagataaccacataaaaaaaaaaaaaaaaactcaagataaagtccatgtgaatcacacccactaacatg

SEQ ID NO: 10024 - DNA, 385 bp, Glycine max
  unsure at all n locations
tgtcacatcagataatgtcaattaccgtatcaaattatgtatatcgtggtatgggattgtaagagacatccttggccagagtggatttgattgggatggcactaagcacatgatcacagttgagaatgaaaatgcttggaatgaatattgcattgtaagtattctttaatatgttgctattcgttattcaaagtagattggatatgactttttctttgntttccagtcgcataaatcggctaaaccgtttcgatacaaggtgcttcataactgggatgatatagtggatttgtgtgctaaagatagagccaccggtcatggagctgaaactgctatggatgttgatgaagcgatgagtacagaaacacatgaagtggaattcatg

SEQ ID NO: 10025 - DNA, 246 bp, Glycine max
  unsure at all n locations
ctcaattcanagaaggagttaaccattatattaaattcatagagaaggtatatcgttacttggcttctcatgatttgcctaaactatgatatgtcaagtgcattatttcccatccatgttaagctgttacaaaaatacagaaactgtagaaactaatccattcagttaagttacagaacaanaataatccattcagtgtaggtgcttctagtgttattataattagagtttcaccttgatagtcat

SEQ ID NO: 10026 - DNA, 190 bp, Glycine max
tccttctagatatatcagtgttgaggcagatgtttgcactgtcaagtcagaaccagatgaacccatatgagaagtctggaagcgattcaaatcattgctgagaaaatgtcccaatcatggttctgatgatggtacccagctaagcctattatgcaatggtctaaagcctaacactaagatgattctggat

SEQ ID NO: 10027 - DNA, 384 bp, Glycine max
  unsure at all n locations
cagtgagtggttggatcctacattggacctcatatcctgccattaatatcaaattgagttggttcttgagtttccttctttntttattagttactcaaaattcctgaattacatcacatacttaatagcctcttctctacatatttatcttgttgaatgcaattcttcagcatgtcttcagaaaaagtgcaaattgaattttcaaaaaccagttcaagatgctgcagactcaaaaatatcatgtagcttagtgaatgtggaagatgggatagatgatgaagcatgtgaattagtcagtggagtggagctctcacttgaggagggtgatgaaaatatccgtgcttatctgttcaaggcagtaaaaaataacaatggaactggcct

SEQ ID NO: 10028 - DNA, 353 bp, Glycine max
  unsure at all n locations
ctcttttacaanttgataaaaacaaaaattatgcaaaaaaatgaattaggttatataattnttttttaaaaagaataattcagtaaataattataaaattatatggtttaaagaatttgtaacagtaatgaatgatataatgatgatcattactatcgtgtatatgtaataacataaaaatagatataagggttttctagacaactaacanaaaaagataaaagaacttttagattgaataaaaggataaaataaaatttcaaataaaatagtatggataatntaaaaaacaacttataaaataatttattttccataagttacttcaattagttaatggaaaataaactact

SEQ ID NO: 10029 - DNA, 286 bp, Glycine max
  unsure at all n locations
tcacctgtaggttaggagcaacaacaacaagaaaatatcccattgtatatanttttattccccctttggtttgcaatgattgcttatatgagacatgaagatttcataggtttcatatataaaaagttgtctcataaagatttcatatatcttttatctatctctcntcctttggcaacataaaaaacaaatcatgaatagagaggaaaaagatgttaccactttgtgcaatgtatgagaatcaagtgataccaanaggcattanaacaatcattcaatattaatc

SEQ ID NO: 10030 - DNA, 312 bp, Glycine max
  unsure at all n locations
tctcaagttttaaatgaccttgggatagattcttgaaatctcttcgtagggttttataagcttttgagacaatatatgagtaagatagaagctcatgataagcttttctaagagatttaggatcatcaaaatttacctcatctttttggtataactcaaacccttcaaaagttatgtccgccatcatccatatgttggcttcttcatcgtcttcctctgacanagtgtcgtccaggtcttctcatgtactcataagccccttcttttctttagtgctaaagaaattcttcatatcttggattttctctaaat

SEQ ID NO: 10031 - DNA, 351 bp, Glycine max
  unsure at all n locations
agctngctngtggagcttctatggaggctggatctatgagcttcaatgaggtcctttaatggtggttttccaccatggagatgcagcggaagacaaaggagaagaggtgagaggaggcgccatccactanggaataagccatggaagaaggagcttcaccaccaagatgagccttggataagaagcttggagaggaggcttcaatggaggaaaagaanaagggagagaaagagagaggtgggagcacgaaattgaaggaagaanaagggagagaagttgaactttgagttgtgtctcacaagactctcattcatcannagtacaacaagtgttacacatgtttctatttat

SEQ ID NO: 10032 - DNA, 203 bp, Glycine max
  unsure at all n locations
agcttaagaaacagntataggagttgtgggagaagttgtttgtgatatccagtgtgtctccatggggagcaccagtgttgntagcgaagaagaaagatgggaccatgaggttatgtgtagactatcaccaattgaataaggtgacgattaagaataagtaccctttgccttacctggtaggagcttatgtgtttagcaagata

SEQ ID NO: 10033 - DNA, 331 bp, Glycine max
agcttgaagagcccgttagtcaaagagaagtttttgtccatagccatcaaagtctgaagagagtatgatgaactaatggacgtcaatatggccaccgatgaagccttggaatgagaaaccaagaaggcccgaaaggaagaacacgaccaaaacaagttttgaggggctttatatggcagcaatagtgagctcaagctccgaagaggtgaaaggaatcatcacgggtcaaaggcatgatctggaaagatgagctaaaggcttgccttatgtcgaaaagaaatttgtctaacagtaaagtggactgaaggaatatgtggccatcatcgatgag

SEQ ID NO: 10034 - DNA, 328 bp, Glycine max
  unsure at all n locations
caaactgaactacttctaaactaatcacattngtcaacagcagaattaacaaaaggtgctcactggtagaagagtcaagagctgctatgagattataatatctgccggaacatatgagaatgttgatttgcaagtattaatatcaagaattaatgtggcagaatagtgagttatggcgcttcaccattctcacctttaatgtggttctcctttttccaagcaaacaaacactcgtggggtggntngatgttaatggaaaactgcacatggattcccttgctactttgatatgactgacacttgggacatcacattcacgccttaacct

SEQ ID NO: 10035 - DNA, 205 bp, Glycine max
  unsure at all n locations
agctngcttgtggggcttctatggaggctggatctttgagcttcaatgaggtcctttaatggtgatttccaccatggagatgcagcggaagacaaaggagaagaggtgagaggaggcgccatccactatggaataagccatggaagaaggagcttaaccactaagatgagccttggataagaagcttggaaggatgcttcaatgg

SEQ ID NO: 10036 - DNA, 416 bp, Glycine max
  unsure at all n locations
aaataccttcatctgacttagcatcaaattttcctaagttatcttttccattattcaatacanaacatttacaaccaaagatatgaagatgtgagatgtttggttttctgccattgaacaattcatatggagttttctttaaaatgggtcttattaaagccctatttaaaatgtagcatgcagtgttaacggcttcagcccanaagtattttggaagaggagtatcatttaatanagttctagccatctcttccaaagatctattnttcctttcaacaacaccattttgtcgaggggttcttggtnngtgaaaagtatgctcaattccatgcttttcacaaaataattcaaattctttattttcaaactcacccncatgatcactcctaatagatataatcttgagaattttctta

SEQ ID NO: 10037 - DNA, 341 bp, Glycine max
  unsure at all n locations
tctatgtacccgtaggggtccttattgggtgtcgngcatttgtattctctttgtggttactttngataccccctgttgacgtgcttaagccattttacttaagtcatttctcgcttaacttanaaataaaataaattttcaccgaacgtttgaattggattatccattaacttcgggtaaaataaattccgaccgttcggtcgtgccgtaaccacgttggaaatcaaaaagagggtaanaataatatagtaatcaaaagacatcttttagtaaaataaagcggaaaatcaatcggacgttttctctttgggattctcattctaatcgaatngataataact

SEQ ID NO: 10038 - DNA, 261 bp, Glycine max
gtgagcaatctagggtctatttccattattcttgtcaacactcatgaattgatatccttaggaccccactaattataccttttgttatgccttgccaagcaattagaacgccttttccagtttacccgaaggatagaggacttgatgttcactgttgcacctgaagaggtttgtgtgtataatgctgtatatttaatcttccagaggttactgctatacagcatatagtcatgactagaattctacttatcacacaatatg

SEQ ID NO: 10039 - DNA, 437 bp, Glycine max
  unsure at all n locations
agtcacctgcggcatgcaagcttctaatgctctgtgctgcaattgcagcactgtcatagttgctntctcttctgctgatagagaataagtgagagaagatgatttgatgtcatcaaaggaaggccatcctaaagctgtagaagaaaaaccagccttggggctttcactttcccactcagcaccagaaaccagagattcatgagattcctacattcaattntcattagtaacaaccaacaagaagtaaacatatatgggagttgggaattgctagcagccaatattagtattcctttgctattccgattntcacacatttgaagaaagtgtagcctaccacagctagcgatgttagccaataattaggtataacttccatctnnttatattaaaatgctatcccttanaagctagctctttgtatttgatctagtaat

SEQ ID NO: 10040 - DNA, 330 bp, Glycine max
  unsure at all n locations
agcttatgtgtcancgctttgcgaattggagttatttagtctcacgtgcagtgaatataatgaaccaggagccagtgtcttagcaattgagataacaatcataagacgtcttctatcttaaagccttcaaaagctaacattacatgttcgttcatgctcaaacccatcatcgtgcagaattacctcaaaacagggtgaaagcttctcaggactcattattgaagcatgaagctcacctaaagctgacatcttgctaagacagaggatatctcaacgctgactcccatcatcacaacatagataacggccttgagctagagcctacataat

SEQ ID NO: 10041 - DNA, 233 bp, Glycine max
  unsure at all n locations
gaagaaagtcagagaacaacattagttacaatacaatacaactgtgaaaaatataaggggaagggggcacataatcttaattcttgatagcccccattcgggatgtttgaataaattccttctacctttgaatctaatntaagctatttggctacatgaggatngaagttgcttgcatagtcattagtcacatgagacataatattacaactcaattgaataattcgtcagta

SEQ ID NO: 10042 - DNA, 491 bp, Glycine max
  unsure at all n locations
agcttaagacaactngagttatcagttacgataatgttgtaatcgattaaaacaaagacnttttgcctttgaagaaactntctaacttagaaactatcttctcacttactcatgatgatgcatgatgcacaagagatatgatatgaactaagatgaaacattcaatataacaaccaatacaaatgtcactcaaaggagttgggcatgtaaaagacaaaacatcttcaagctttcttccaagcttcaaactttagtcttcatgtagctcatgttgctccccctatctcttacaaaaattgcacttactcctagaaaggaacatgttnttataacaaattaagtaantttcactagatgaatttattaacaaataaatgtttaaagatgagacatagaatccattctcgatggaagttcttttaatctacanataagtcataatttcaactatcagagattgctaaactaatattataaatagaatttcataa

SEQ ID NO: 10043 - DNA, 274 bp, Glycine max
cctctcgatgtagctctgggggtgagttggaaacgaatcaactcatgagggcaaaagaagagagacccacaatcttattggctagtcgctcgaactttgttagatacttgttgacgctaccatgttgctggacatggtcagccacgtggtgaggaaacatgttctggacattcactggtactagcacaatgggtgtcctttcatatagaacgacgccatcgtgagccttgcgtgatctgggagatcttggtaatcgaagaattgggaaccttaa

SEQ ID NO: 10044 - DNA, 312 bp, Glycine max
  unsure at all n locations
agctttatatattgaattanaacgttcataaactactggtaatcgattaccatatatgtgtaatcgattacacagtggaaattnntgaattcaaatttaatagctgttgtaaatcagttttggccactggtaatcgattacatcctctggtaatcgattaccagagagtaaatntgttgaagaagactttntaacttaaatttcttggccaaaccttttgctacttcaattggaattcccttcctatttaatataccctttctaagactctagagattggcttgatcatccatcttgaatatctttaatttc

SEQ ID NO: 10045 - DNA, 292 bp, Glycine max
  unsure at all n locations
atatggacaaaatactaattgggcatcatttgacatatagaacgagcaccataataacaacaaccagaaagtgaaagtggagacagcataagacttgtactttacaaagcttagaacaaacttttaaacaaaaaaataaaaaacaaagatatgtgggaagacacccaccagattcacccaagacagcgattcccaccatactggaagtactttcctgcaatgaaaaaacaggtgacatgcactcnntctcattgttctgcagaaaggacacaaatattcatgtaactcaact

SEQ ID NO: 10046 - DNA, 456 bp, Glycine max
  unsure at all n locations
gctntgagacacatgtganactntggcatcatcaattcattcagctggatcctttgtctactatctcccnctttgtgatgatgacaatccctganatcaagacaagttatatacaagatgatagcacattcacacaacccttactccccctatcttttggcatgtatgcctaactttacttaatgataaatttccaattgataatttatttctaacccaagttctctccccctttggcagcataaaaaagaactaagcaacataatcaatatccaaacagagccaaacaataaaccaaaataaattcatacattgtcataaccaaccaaatcaaagtcaagaaatataatataagtgcaagaatacgataactaagcaataaaaagccaaatacacgacgatgaaccanagtactaataatacttaattactaataatacttagtcataatactta

SEQ ID NO: 10047 - DNA, 335 bp, Glycine max
  unsure at all n locations
ttgtccagcttagcggaccanatcagcctcagatgcaagggtgtggggctaagcgcttgagactctcggcttagtgcatgaccaaagatgcggttggcgaaaggactgattntttagaaaatattttctaagttatttttcagtcccttcatcaacaaattgaaacccttatatctaacattcaaagataggctgatatactcctatgtacaaatcatgcagcatatgaagtgttgtttgggtcttggtgacacttgcgccatatgaagtgttgtttgggtcttattggaatgattggatatttttatagactaacttccaaatgttgcctcgca

SEQ ID NO: 10048 - DNA, 369 bp, Glycine max
  unsure at all n locations
aatgtacaaaatatatttgatgaaaagaatataactntgtcctaatacaatatctgcaataaaaaggatatatcatatattttaaacaaaaaacaaaaattaaaatcagaattttcatttgaaaatacaacatgagcaagtattgtcatccaaaaacgattggggggaaggaaaaaaaatgccaatgatgagaaaacaacttcactaattaaaaaaaattaattagtgaactgttcagcaaatggaaggttgtgtgaaataattgctcttaagaatcgatattttgtgtaattgtgagctaaatggattcgtcgacttgtaactntgaacacanttttttngtttctaagctatttaagtattatttat

SEQ ID NO: 10049 - DNA, 433 bp, Glycine max
  unsure at all n locations
gcaagctntgcatcgctgatgttgaattatacatggatgtacgtgtttctcccatttctcnttaatatgaattttcctgggaaatggaaactacacaatgaatttacactntgcttaggtcatgttcactgatgatcgaacatataacaacctaggaaggcgcatatttgttgtctacctatattttctctctgacaagcaagtatttcatatacttaaaaggccgtggccatgttcaaatttcagatcttcactttntaaaaagaaatttgatggaggtagaaatgttgtctttaaatatacatgtganatactggaaaaacagatatcatatgacagtgnggaaattaccactagattcttattatgaagcaatagacaattataaaaagacttacatgatgctaaaatgaccatataacataagtgaatg

SEQ ID NO: 10050 - DNA, 364 bp, Glycine max
  unsure at all n locations
actcatcacatgtggtttatgtggcggtcgggtgatggtgtacaacaagttntccacatncacaaatcgcgcataaacccaccatcccctgttgcccacctncaaccgagctcacgtactcccacgtagcccatatcctcgtttctctcaacaccgggtccccatcaatccttccaaagcttcccaacatccaggtaattcaacatccaaatcatcacaaactaacanaccaagcaaaatagggcagaggcagaaaactctgccaaaactcanacaaaatcacagctttttctcacttaaagactncagtaacatttccttcgttccaattcgtaaccggtggatcgactcgaaaatttactgg

SEQ ID NO: 10051 - DNA, 396 bp, Glycine max
  unsure at all n locations
agctntngcagaagtgtgttactctntattgagatggttgaagcaataatgacagatttctcccactgagattttagctcaagtttctctctcttggaaggctntaacttgtcttcaagattatccttgatgtcctcttaaagcttcaaagttgaccattgaagtggagcccactcaattgacaaactttataagcagaaataggtgacaactattaagtcatgacaactagtagagtcatcttaagaacctttctgatgagcattccaaagatacatcagaatggtgattctgatgttagctaagaaaggatccataatgaagtagatccttctgatgaagtacaattgatatggctttctgaagtaacataactccatcatacttaacacatct

SEQ ID NO: 10052 - DNA, 291 bp, Glycine max
  unsure at all n locations
agcttatatgaatactgtgagagnnattaaanactatgtgtcagttgccctcaccaccaaatttctgagcagcttcttctccaatatttttatgaaggactcagtaacatggagagaagtatgatagatgctgccagtggtggagcccttagagacatgacccctactgaagccagaaatttaattgagaagatggcttccaactctcaacagtttagcgctagaaatgatgttatagtcattagaggagtgcatgaagtagccacaaactcatctgcatcatctgaaact

SEQ ID NO: 10053 - DNA, 467 bp, Glycine max
  unsure at all n locations
ctttggagaggatcaatcacgatgcctataggttggacttcccagaaccgcatggagtccgcaccacttttcacatttctgatttaattccttgcgcaagtggagctgagactgacgatgaggaactaacacattttgggacgaatcatcttgaaagggaaggggatgatgctgtcctacctaggaagggaacacgcactacaaccatgagcaagaggctgcaagaagattgggctatagctgctgaagaaagccctatggttctcatgaacctcatggtagatttctgagcgcatgggccaagggtgagtccaagtatctttgtacatattagactaggatgtcattatattcggtcctctgatataaggctccatattctaggtacggtaccctagaaatataggaatttccaccctttgatgttacggcacctagactagttcttgtatatgggtagttctgtn

SEQ ID NO: 10054 - DNA, 413 bp, Glycine max
  unsure at all n locations
agctntgaacaatatanttgtccttcatttaactgtctntgggctnggcggccacgctcaacaaagtattttcgacacctactgtacgttgatttgaccaacgctgttatgggaatgttgcgacaatccttcaaaaccttattgatacattctgagaggttggttgtcatgtggccataccgacgtccttctctatcataagccatcgtccatttttcttttgaaatgcgatcaatccatgttgctatggctggactcagttcacgaaattnttctagatnttgatcaaaaatgtgcttgcaaggagtatangctgcatcanatttagtatgaataagaattttaagtatatatcanagttaaataaactcgaccatganatatganatcttacccaatttctttaacatttc

SEQ ID NO: 10055 - DNA, 251 bp, Glycine max
tgtactcatagatagattcaataatggttgcatacttatgatgcacatcaccattccctttaatcacatgaagatcatggagggagtatgaatgttttcttatgctcggccaacacattaaaaatattatatgatatatcttgtgtggaagtaggtcaacatttctattatcaaataaggagtttcaaattacatgcccaagtacttattacttcttgggttgtaattgtatttgaaaggcaaatatcaca

SEQ ID NO: 10056 - DNA, 260 bp, Glycine max
  unsure at all n locations
gttcatggccttgcaggtgaagacccacacaaacacctgaaagaattccatattgtctactccaccatgaaaccaccagatgtccaggaggatcacatatttctgaaggcctttcctcattctttagagggagtggcaaaggactagctatattaccttgctccagggtcatgatggaagcttgctcgtggagcttctatggaggctagatctttgagcttcaatgaaggtctctaatggtgattntacaccatggagat

SEQ ID NO: 10057 - DNA, 373 bp, Glycine max
  unsure at all n locations
gattacatctccctctntctcaagcttattcttcttgatatcatttaaatctttatgatttacacatggnaaggcattgagaagtaatgtgtcctcttccaagacatttaaagcactttatagagctagtcttctcttgcatactagccttaggggcttgattttctattggcttccccttatcatctttaggcttagaaggtgtcaaccctaagatgccttgaccttggtctttctttggataagagtgagagccataagattntgaagtagacttctttataagttggtgctctacccttattcccaatctaagttagcctctacattgtctttcccatggaagtatgggaggttaacattagcctcttga

SEQ ID NO: 10058 - DNA, 257 bp, Glycine max
  unsure at all n locations
aaagatattatcggccagtggttgtaaaanaattgttctttgtcggctggaaaatatccgtcggggctatttaactaccgatgtcggctattgttttttctattccacccctgaattatatttggatgatgcctattaggaaatgttcggtcggggtcatccggtcatgcttctttttgaggcctcgatctgtcgtctttcctagccggccgacgtcggctagcatttttttcgatcaatatctgtgtgaatcatgt

SEQ ID NO: 10059 - DNA, 431 bp, Glycine max
  unsure at all n locations
gcaagcttatgttggagaccacatccatgggcgcattttgaatactaatgagtaattttttatgtttgggaaaccgaaggttaagcaagttgaggaaggtaagaatcatagatatgtgaactaaagccactgtaagaaattataaaacagaagcttataatcacaaaattatccagatagtactgcacaacaagagttctcacatatgtagtttagaacaatgaacatgaactgcaagaatataagttctcactcaatggtttatatggacaactacatganaacgaaataacaaccaaatatgaagcgctttaaggttataataacatgtaggactttctcacctaaaatgtaaagaaataaatatatagaataaggctntgatactcacaattagatttctacttgagtgagagttgaatctaatatag

SEQ ID NO: 10060 - DNA, 493 bp, Glycine max
  unsure at all n locations
tganntagaatgggcttttcgagagtacattcgctaagcacatcatgtgtactcgctaagcacagtgcacttgcgctaagccctattctttgcggccaattcactagtttaattaagctaagcgcgacccattccggctaagcgaaattccttgcagnctggatagcgctaagctagcaacccctcgctaagtgcatgcccccctgtatgcaggatgcagtatattcgctaagctgaccatgagtgtggcttatcaagagttgcaggttgtcttatatgcacaattcgcttagcgcactcctttgcgctaagcgcagttaaaaangaaattgaatgtcanatgggcccatgtctacccgccaagagaggaggcgganagccaaacacctctcttgcttagcaggatatctcgctaagcgagtgattttgaacatggntaagtgaagtgcaacagtagttacactcacacttaccgccaaaatctgagaagctt

SEQ ID NO: 10061 - DNA, 309 bp, Glycine max
  unsure at all n locations
agctngcacttatatatgaagcatcagatactaattattaagaatctatagaacctcgagatatgtacaactgcaaacaacaaggcatatgttattcattcaattattcaagtcttctaactagcaaacagaatcaacaacttaagaacaaaacctgaatcaaaatggaaatctttccatgtttattggaaggaccacccttaatttctaatggacatgatgtgcgtgccaacatctctagctcattctgttcttctttccgaacagcaatattctcanattcagatgaatggtgcaatcatgtaatca

SEQ ID NO: 10062 - DNA, 460 bp, Glycine max
  unsure at all n locations
agcttgatgttgctgccaatggaattctcgngagcttatgtaatggcttntgtgaatttgaagagaatggngtgaaatcatatttcaccccgccttttatttatttatttttttctgcagcgcacactcacccaggtgagctggtcactcgcccaggcgagttaacatattttttttattttttttaaaaatatttattattattattattatttattattattttggtactatatatattntcctctaaactntataatcaagtataaaattctaggcaaattcatcagataattcaagaaaaataaacaaccctaacctgcaacaganaacgtanaacatataattaaagagcaggggtagagatactaggttggcctctangagtgcttctttaacgtctntagctggacgcgtggtctatgggcgacatctcatcctccctannatcttttcttga

SEQ ID NO: 10063 - DNA, 426 bp, Glycine max
  unsure at all n locations
agctngtganatcaatgtaatccaagattccgttttatacaagtcgttcaattctattcttagaaatgtgacctaagcatttgtgccataatgctcctgagtttgtattatcaattctatgcttagtaccatgcaattntacattaaaggattcaccacaggagactgcaatatcaagtaaatatggattatcattaaccaagagtgaatcagttccaacaatatctgaattaaaagacaatctgaacacattgtttccaaatgaacacaaataacccaatttgtccttataagaaactgaaaccaaattccgtctaaatgacggtacaacaaaagtgtctttcanattcaaataaaaaccagtacataatatataattagagtgccctatagcttccacttttcactgattaccatcttcaacat

SEQ ID NO: 10064 - DNA, 285 bp, Glycine max
  unsure at all n locations
agctttttaaganagtgatgaggttcaagccctattgcagagctngaaagagcctgtgtagtcgaagagaagttcaagtccatagccatcaaagtctgaaaagagtatgatgaactaagggatgtcaatatggccaccgatgaagccttggaatgagaaaccacaaaggcccgataggaagaacacgaccaaagcanagttttgaggggctttatagggcagcaatagtgagctcaagctccgaagaggtgaaaggaatcatcacaagtcacaggcatgatcttg

SEQ ID NO: 10065 - DNA, 326 bp, Glycine max
  unsure at all n locations
cataatttctgaaattctttctggtctcacggcacgagaattgttctattatctaaaaggtgggcaagttgattatggtgaggagcacagcaaggcttgtggacactcgcagttcggacgaatatatgaacaacgttcggagatcttaatgttctgtttgttgttacctttattttttccttcacanctgtttacattgtagcttgctaatgctattgggggatacagggcattaccctgaatgggacgaggatcaccctattcattttgttggcactcagcaggagcacacgttattcgtgtcttgcaacaaatgctcgctgata

SEQ ID NO: 10066 - DNA, 440 bp, Glycine max
  unsure at all n locations
tgcacggnnnnttgacccccgtggtcaatgattccttgtagancgaggcttgcagcttngaaaccttctgcactggtatcgatacatatctgaatttttaccgagagaaaactttggaaaagtttgaaaatcattgcactcactttgaaaaaaagttaacttatctgataagtctttgtcttctgagtctaatctgatctgactgatctggagctgattggaactgatctgattttgaatcaaattcatcttgaccttgagtgtctgatcaagctgactcctcttgatcatgaacatattttgtacatgaggtctgacttgactttgcatacttgtacacanacttttgatcattgatatagacttgtttaccaaagataccgctgaattcttgttccctccaagtcaagacacgacgaacttgctaccatgaggtctct

SEQ ID NO: 10067 - DNA, 284 bp, Glycine max
tggaagacaaactcgaagaaaaagttctgggtttaggtgtatgtttctcttcatagagtttggccaacgaaattgttctgaggagtcatgtaggtgattgtgcaatgacatcccttctgatatcaggttttaatccttccacaaagcaatccaatagagcttcttgtgtaattccttgtactcgactagctaaagccgtgaactgcacgtaatatgactgaactgaaccacattgagggagtttaaacaactgagatctatgacattcatacggtgatgggcca

SEQ ID NO: 10068 - DNA, 487 bp, Glycine max
  unsure at all n locations
tacctatcacatgtggtactaggtggcggtcggtttatggtgcacaacaagttttccacatccacaatgcgcgcataaacccaccatcctctgttgcccacctccaactgagctcacgtactcccacgtagcccatatcctcgtttctctcaagaccgggtccccatcaatcctcccaagcttccacaacatccaagcaaaacaacattcaaacagcacaagctatcacagccaagcaaaatagagcanaggcagantactctaccaaaacaccaaccaaatcacagcttttctcacttaaagaccccagtaacaattccttcaatccaattcgttaaccgttggaatcgactccaaaatntactggaagtctatagtacataagcctacantttgacgcgtgggatctactagcanaaatcagaactaattctgactactctttcacagccaacacacacaagcattttctgacaaagcaaaatct

SEQ ID NO: 10069 - DNA, 448 bp, Glycine max
tcagtctttcagctcttcggttgctgaccacagagtggtacctggagatatgtcgcggaggtcatgagaccttggggacgtcatgtggggtgctattgcccaaaaccaagcttgaccacatcccgacccaccccgggcatagtcagtcagtgagaacctgtgacgtacctaaacaggcgagtctctggcagtcaaccaataaaagaacaaagaccacgatgttggacaagtggcctcatatatcataataaggtggggggaggtgatataatatattaccacctatttccccagtgataattatatacaccttctaatacaattataaactcctctaaacatcaattgcttacggatgatccacacaaacaattgtatgtgctatttgcacaatgacaactgagttacggagagatatgcctctcgattatccggttctcccaccctg

SEQ ID NO: 10070 - DNA, 478 bp, Glycine max
  unsure at all n locations
caataaattttagttgagttntattcagaaaattagagtttatctcttttatcttagtgagagtgattctcctaaattcttgagtgattcaagaacaccttgtgtgtatcaaaggactttcacaacctttgtgtgttgcccttgctggaaagagagaatcttttctttctttcatcatcacccttggtctttcaaaccacaattncagaanaatcacctcttgccagaattatctcgtggccatatactccattntacgcactcaaattaagtgattcttgagcctaaaatgaatttcaaaacgagaccttttacctcgttttggaatcacctcatttggagccctgtagcttcagttattgccatttctatatttctgtccagccaccacttaacctacgtttaccatcccattcattctatttatgccaagaaccaccttattatacccacgaaatagccacctattttcatcttn

SEQ ID NO: 10071 - DNA, 309 bp, Glycine max
  unsure at all n locations
gtgattggagaaaaattttactccactcatttccttaaattntctatttgatctctttaatgtaaaaatttataactcattgtgttagatgagtattttatagcataatttagttatggattgtgtgaaaagggttaaaaaactaagtattatggattattgtggcttcctcacaaccttatgtttgctaaatttgagaatcttgctaatctcttgttttttattctaaacgcgagatcctgtgaaaatacagtggtgatcctcccacaacattgaatgtatagatgcgtctttacgtgagactaatct

SEQ ID NO: 10072 - DNA, 405 bp, Glycine max
  unsure at all n locations
agctnggaacaggaagaatccatcagcaaagcacctatagggcttggatctatatgctacattcatattctagacatgaagaggcacaagcttgaagacaagactatacgaggtatcttccttgggtatagcaatatctctaagggctaccgtgtctacaacttgcaaactaagaaactcgtcatcagtcgagatgttgaagttgatgaatatgcttcttggaattgggatgaagaanaagtggagaagaacgttcttatacctgctcaactacctcaagaagaagatgaggaagaagacccaggtgaaccaccttcaccttcaccacaacaacaagatcaagaactatcatcaccagagtctactccaagacgagtaagatctttggtnacatatatgaaacct

SEQ ID NO: 10073 - DNA, 384 bp, Glycine max
  unsure at all n locations
agctngcacgcncaccagtcatcacttctcttcctatagttttnnttttaacatatatctggcgagaattcagaatttagctgaaattatttgagcacaagtttttgtggcagatcaaaaaaatattctggtcaaactttgggcttattgggttcacatacacattattattgggcaaaaatttaagagatacctattggactaaatatccgttattgttcaaggtaaattgagcgacctaagaataaagtaggaaaagtagaagcgccacaattgctgttgctttcatttagccaacacannatggttttgatttttaatattaattataacatttaaataattcctcagaaatatcaataatttggaatttcaacagaatat

SEQ ID NO: 10074 - DNA, 405 bp, Glycine max
  unsure at all n locations
ngctttatgcaacaattatactattatctcaagcctatatgcaatgggctatcatgcgagtgaanaaccatcctagggcgtataatagtacataaccagacacaccacacaatggatatgtcaggtcagtctcgttaagcaaaataataaggtgaccagtcacggtcactctgctttgcaagaatgctgtaaccatatgggatcaacatagacttaacagagcactcaaatctagtgtctctacccctaagccctaaactccgaagaatcccgtagggtctcaccttcctaatttagttcaaccactgaaataattttgcacgccacacaactcatnactattgatatcccaacctccactcgtgttatacacgttaacacatatgcataattaacactcgtcct

SEQ ID NO: 10075 - DNA, 271 bp, Glycine max
  unsure at all n locations
agctataagaaattanatggtttaggtatctttttggngccgattcacgaacatcaactatttacccgatcaaaattaaacgacggaagctctcgagaaattgaaattatcataacttttcacacggaggtccgagtcatgcacatcacatatggagacgcccganattgaaccacggaagatctggagaaattcaaatggtcataactttgcacacggaggtccgattcaggcgcatcatatatggagacgctcgatattgaacaacgga

SEQ ID NO: 10076 - DNA, 408 bp, Glycine max
  unsure at all n locations
ctgcatgcaagcttcagcggatgacgccgatcgaacatttcctaaccgacgtcatgcaaatttcgttcacggattgaattgaaaactcgttaggcgacatctgtcgtgaagtagcgaccgatatttttcagccgacattgcacacttctttttagaaaagctcgctggtcgatgatggtctttttaccgcagagtaagttttcttgatttggtgttgcataaacaagtaacaatgtacttncgctaggtttttcgtgcgagttcaaccgacattntagttcggccaggaaaacattagcccacctctgcaaaaaaaatatttgctaaccgtcttcatgcatatttcattcaacgattgaatagaaaactcaatagccgacgacggtcgtgaaataatcccgactgata

SEQ ID NO: 10077 - DNA, 227 bp, Glycine max
cctcgatcgggcatctttgcaggccgaggtcgagcgtcatgttattcgatacatttcggtgaatgatacttacatgccgagaagggctaatgttttcctggcctaataaatgggaaagatgccacattctgccgaaacgaaaagtctgttgggctcgcacaaaaaaacctagcccacctacattttaaatcttttatgcaacacctaaacaagaaaactttctgtgc

SEQ ID NO: 10078 - DNA, 479 bp, Glycine max
  unsure at all n locations
agctntgagaagataaaatntcctaataatgaggtagttatttaaaaattntaattgagggagaaattgttggagaataattcatatttcaaaataattgagatggtgaaaattcaaggagattnttttttaggaatttgatatgttttaaatctttaaaattttatctagatttttgtttttatttattttagggatttgtttctttctttaaaagactaggatatgtnnaatattaaatnttgtattgctatttagttctatatttaaatataaagccaaaaaaataaaaattatacgatatgttccatctaagatctcttgngatgtatgggtaatttgttgtgtgtagagaagttttcccaaccgtgataaanataggtaaaacaatgatgaattaaattgttggggttcacttcaccaaacaataccctatacaaaggtcacatatttagtttaaggttcaattatgttaaaat

SEQ ID NO: 10079 - DNA, 382 bp, Glycine max
tataaaactaagctcggaaacacatgttgaaaagagctaaacaggttaaagtcagttaatgctatcgaaacgaatgtttgaaagatatttcgctaaagatgcatggtgtcgtaagcattctcaactctcaagtcactcaataaataataaacctcaggttaaagcggatcttggcagcaacgtcgcccaagaatctaagggaggcgtctcgaatcaaatcagcggcatcgacctcaagcatattgacgcgatcaacggcgatgagttgtcgggtgctgtaaggctgttggaagaagtccaaaatggtggcttttcccaatgggatgccgcggtacatgaaagtgaagctggactggccgaacttgatcccaaccttgttggg

SEQ ID NO: 10080 - DNA, 486 bp, Glycine max
  unsure at all n locations
agctnggcttggacctattgatatgatcctacatatgagttataatttttttacgggtcatctttgagttggttatcatattaaaggaattaaagaaagaaataaaagcacatggaagttagctcaaagataaagattttatatagcaatggcacaagaattagaaaatatggaagtaaagaaataagaacaaaaaatgaaaaaaaaatggcagagaccncaaactttaaagagagtgataagtccaatgaagatttggcacaaagctatggaaacctttgataagaaccaagaaagcttcatctaagaacccacaagaggcacaacttttaaacttacaaaaggagtgaaattctaatcttattcaaatatgcccaaatgcaataaagtacaaggctatttataggcaataattagtgcccncacttaataaggctgatggctaaacctaactctaaagaagcanaaacaaagacctaagtaagc

SEQ ID NO: 10081 - DNA, 471 bp, Glycine max
  unsure at all n locations
ntgaatggcaagggatttatacgaagtacagacaactccatgtgctntttgacctttgtgaaagtgaccttccaggggatattccacggaggccttctagtctcttctatattgtacttttcttgaattcaaatgttagttattcaaacgtaatagagacaaatggaatttgaataaaacagtacatgtgcactttccttttctgtgatacccagtccttgagagactagacacatgaatntatcgtatgacagtgtgttatattgttatgaacaagactagatgcttactaaataaagagagctgaacactagattaaaatagagcatactctatctagttgtgggcgatattcctttaacataataatcttgtccacttgtcaaaaacacaatagaatatcaataatttatacttatgttatacatcanaatctacggtggatgagacacatgatcgttcatacctaac

SEQ ID NO: 10082 - DNA, 387 bp, Glycine max
  unsure at all n locations
atgactcgcgtagaacatggctatggcacagtcagtgatgtaagcttgcttgtggggcttctatggaggctggatcatatatcttcaaagaggaccttcaatggtgattcttcaccatggagacgcatcggaaggcaaaggataataggagaggggaggcaccatccactatggaataagccaaggaagaaggagcttcaccaccaagaattccttggataagaagcttgaagaggatgctntaatggaggaaaagaaagagagaaggggggggcacgaaattgaaggaataaaagagggagagaagtggaactttgaagtgtgtctcataagactctcattcatcaaagttacaacaagtgttacacatgcttctatttatagact

SEQ ID NO: 10083 - DNA, 409 bp, Glycine max
tctggatttctggggaagtgtcctgggtgatacttgttagtttacaattgggctggttttgtactcacatttgggtgaataagattctaaaaaaggcatgaaagcagcaattgtggtcacaatctttgtttttttaattatttttttattctgatgaacctgtcagaaatttatgtgagtttgcgcaaataagcaagtcatgaagtggcaaaataacttaataactctcaacgattgtggtattgcgtgctgcttatttgaaacttgaacctacatgttgttcgaagccaattattatgcaattatgcatttccagagttgagggactaaatggttcctttgttataattttggtcacgtgttctcttgagtaagggatagaatggtggccgattacactgttactcat

SEQ ID NO: 10084 - DNA, 459 bp, Glycine max
  unsure at all n locations
agcttatgtgcactggttctaatgcaagcaggtcagcacttgaatctgctacnaattgaactcttctccgaatttccaccgtgatagcatgaccataatccccactgttagaaacaaaatatcaagaaatgtgacactaaaaaatatataatatctatcagtgctgagaacagcagcaaaactttatcaaaccccaacctttcatatcaatattggtcctanaaaagacccaaaatcaatcacttaattctttgcacctcatccttaggcaacttgaatctctcaggtaaaagtcatacatacctgagttatgaattcaatggttntaatgcatcttttttaaacttatttataaattntagctcctgcatgaatccatattatagcaattaaacctgcaggatgacctgtgattattcatgaatggaaatgtcctaagacacagattacaacagaaat

SEQ ID NO: 10085 - DNA, 427 bp, Glycine max
  unsure at all n locations
tgttggttttcgaaactcganttgttgcaaggatatcaccaaattcgtatgcattcctcaaacattgctacaacggcctttcgcactcaccacgaccactgagtttaaggttatgcccttcgggctatgcaatgctcattccacctttcaggcaacgatgaacatgcttttccagccattcctctgacgatttctaattgtcatctttgatgacattttaatttatagcatcacctttaatgatcatgttcttcatctgcaacaagcttttcacgttttgttggacaatcaatgcatcttgaagttgtccaaatgtacttttgctcagccacaggtggaataccttggccatgtggtctcccaacgaggggtggagccagtcacttccaaggtggatgctgtgcgccagtggcccactccgcactct

SEQ ID NO: 10086 - DNA, 492 bp, Glycine max
  unsure at all n locations
agtcacctcgcggcatgcaagctttaataatgaaatcatgtttaaaattaataatatttataaccattgattataattaaaattatattatcattttcacgttcattctcaaattgattgtttcatttttttatataaactgtaccttaaagggttgtaaatatccacccaatttttttttagtgtgctttctatcttctttttcttcttttcattggtataatatgaatnctttcattcttttattttaattttaatgtatgacaaagtatacttgaatgtgttattgatcatcaaaattgacaatttgactcttttagatcggtaaggtataaggtggatctatattcataattgataaaaaaataatatatttaaatttttatttttagtgttatttatatttatatttttattntaggtttaactatttctttgaatgaattttatgagaatgaataaacatttgaatcaacatgatgttcttattat

SEQ ID NO: 10087 - DNA, 449 bp, Glycine max
  unsure at all n locations
atgactntcctagtgactattntattcactctggttggtacattaggattaaattgcatcaacaagtctctatgatatggatcaaatgagtcagcaaaggcatggctattctcattccgaaagtatccatttcagaggcagcaacatctctccgcctaatgtatgcacactcgtgacagcctcagggcacggaactaatctagattcccattatttactagatgcttatgacaatggtatgatgtatggaatgacacaatacaatggagttcaacatcaacataatcttgatatgggtgttccagctgctgccaacatatattattctagcatgaatccttcatctggtacagctgcatctctaaatgctgaagttaggagaggaaattatcaatatntcaatgcctcngctagttctacaagtgctccccctaacgcaagacacactg

SEQ ID NO: 10088 - DNA, 465 bp, Glycine max
  unsure at all n locations
agctatgagccaaaatcttgactcaccatanaccttgacccatggtgagaatgtcaatccttaccctcagaagcaaaaaaagaagagaaggaaaatttccaatcaaaggaaaaaggagaaggaaaatttccaatcaaagaggaagcaaaaaaaggaaagaaggaaaatttccaatcaaaggaaaaagagaggaaaggaaattcccaatcaaagagtgtgagaaagcataaagaagagaaagaaaattcccaatcaaagaatgggagaaagaaaaaaagagaaggagaagaaggaaagaaagctcatgatcaaggatcgaaagaaaacaaaagatatgtgcagagaggtctttggaccacacaatatctgaacaatacggaattgtcaccaaatgaacaaaagaaagaaaaggaaaccataacctaaaagtggtcttcttcctttgattaccaaccaaaatcctgt

SEQ ID NO: 10089 - DNA, 196 bp, Glycine max
cgagatgaggaagtgttgaacggtgaaacttcctgcttttattgttgaccacagagtggtacctggagatatgtcgtgggggtcaggagaccttggggacgtcaggtggggtgctattgcccaaaaccaagcttgaccaatcccgacccaacccgggcatagtcggtcagtgagaaccttgtgatgtacctaaaca

SEQ ID NO: 10090 - DNA, 473 bp, Glycine max
  unsure at all n locations
agctntattatgccctctcctctcggcggggatttcttcttcggcgaaggcgagatagttgttggcagtgatattattgaccagccctctgaaaccttctaccaagatgtcttgggccacgtgggcctcgttcagaacttttactagcagagcccgatgaggctcggagctcatgagtaactccaacagcgagaccctggccggggttttgttgagctattcgataaccttgaattcgctctgctgaattatacggaggaactcgctagcttcctctagcgacacctcctttttaccatcctttttctgcggaagacctttcgccggaatatctttattcgaagcgaggggtgcttcgtcatcttgttcctccaccacttttgctttccccttgacgttcacgggttggactggtaggtgcggaggcgcaaacacacgaccgctacgggtcacaccactcaatcccgtgatat

SEQ ID NO: 10091 - DNA, 455 bp, Glycine max
  unsure at all n locations
ggccgccacggagttttctgactatgctcttgtgtggtggaacaagctacaaaaggagagagcaagaaatgaagagccaatggttgatacatggacggagatgtaaaagatcatgaagaagcggtatgtgccggctagttactcaagggacttgaaattcaagctccaaaaactaacccaaggcaacaagggggttgaggagtatttcaaggaaatggatgtgctcatgattcaagcaaatattgaagaagatgaggaggtaactatggctcaatttcttaatggtttgactaatgatatccgtgatattgttgagctgtacgagtttgttgaaatggatgatttgcttcacaaagcaatccaagtagagcaacaattaaaaaggaaaggagtggctaagaggagttntaccaactttggttcttctagttggaaagacaaacgtaagaaagatg

SEQ ID NO: 10092 - DNA, 457 bp, Glycine max
  unsure at all n locations
gacatctcgatgacatgttatgtccatcttaagtaatcgggagctatcgtcgattatttgctagcctctcaacatattatgctgcccaatgctgactcggngttacaaagcataatcatgcacacttatcgggaggaaactacgacctatactcagcgattcgttcttttagaatcctggagactacatgagggagaggagtgatgaccactctagaaccataagactcgtcgttagactacttgaacacgctgtatttgtgatgcggctaaacttaacctccccatgaataagagttaccaacgcaaagttatgactaatatcaagtgtagaacatgatattggatagatgtgatatgctgcatagacttacacgaagagtgtgataccgtttgatttactagaaggtgctaaatggatctctgagataacgcatngtatgagcctagtcctcccn

SEQ ID NO: 10093 - DNA, 430 bp, Glycine max
  unsure at all n locations
agcttcagccaccataatctgatcatccgcaaagaataagtgtgagacattaacccaccgagaatggatgcgagttaccattctgaactgaatcttggatgagatgtgccaatctctgaatacacaacacaaatatatagggagagaacgggtccccctatcttctcccacacatgggggtgaaagaatcaaagggaataccattccaattaatcgccataaatgtggaagacatatgaacatgaatggcattagccatccaaggcggaataccaaccttgctgagggtatcaagagtaaaatcccattccaccttatcatacgccttttgaaggtccaaattcaacaccatgtaaccctccttaccacgcaaattctcaaaattaatgaagcatgacaaanaggttaatggagtatttttttttcaact

SEQ ID NO: 10094 - DNA, 480 bp, Glycine max
  unsure at all n locations
gtcacctgcggcatgcaagcttgtgcgaatcanatcactcctgcatttcatctctagcatgcantttttctttctttacccactcctcacgtttggttttttagggaaaaacaccataactaaacgcgccacaaggcatccctatcgcaccagatccaaatctaaaacgatgggtgatcaagaggagacacaggaacagatgaaagccgacatgtcggctctgaaagaacagatggctttcatgatggaggccatgttaggaatgaggcagctcattgagaaaaacatggccaccgctgccgctgtcagttcggctgccgaagcagacccaactctcttggctaccgcacgccatcctccctcaaacatagtagggcggggaaggaacacgctagggcatgacggcaaccctcatctgggatacaaccgagcggcttacccttatgggattgccgccaactactcaccacctggtctaca

SEQ ID NO: 10095 - DNA, 269 bp, Glycine max
  unsure at all n locations
ctgaaagatgtggcattgtcttgtgagcaacatgacacttatatttctgatntcaatggcacccatgtagcacatcatgggcgctctcgatattcaaaagatcctatcacaataagacatcatttcccagtgaacacaatttttattgcagttgataagcaattgcccgagttaaatgctacggttaatgagcaaacaatggaagcttaaccttcatctgcgttttagtccctaaatattttatacaaccctcaatgttgatgatatat

SEQ ID NO: 10096 - DNA, 439 bp, Glycine max
  unsure at all n locations
aataatgtaataaggctatttattaagtggtgataattaaggttgattaatggtgatctacatttcatagaatctgaanaggggtaattaagtcataagagttcaaagtggagggcattttcgtaaatgactatacaactagtttaaaatgtctaattatatgatgtagaataattaaaataagttagagttgtaacacccctaaaaaatacaactccaactaatagataaaactctgtgttgtgtcatctatgtgtgtatgaaatttaattcaatagttatatatatcgttttaattataaatttttttggggtgtgtgtgtgaagaattgcattgtacactacgtgtctatgtaatttagctctgtctgcggctcactctggntatatgtattactagggagactagcacaatagtcaagaaagtagcacagtaatc

SEQ ID NO: 10097 - DNA, 402 bp, Glycine max
  unsure at all n locations
agcttctntgagaaaacttncttgagaagctagagcttagctacacatacccctctataactaagctcacctccttgagaagcttccttaagaagattcctaaagaagctgaagcttagctacacacacctctctaatagctaagttcaccttcttgagatgaaatgctagagtttagctacacaccccctataatagctaagctcacccccatgacaaaaaacatgaaaatacataaaaaaaggccttactacaaagactactcaaaatgcgccgaaatacaaggctcacaccctatactactagaatggccaaaatacaaggcccaaacgaaggaaaaacctattctgatatttacaaagaagagtggatcctacctcgacncatgggatcaaaaatcta

SEQ ID NO: 10098 - DNA, 249 bp, Glycine max
  unsure at all n locations
atgttgttgtggatgatttctccaagattacctggcgtaactttatcagagagaaatcagaaacctttgaagtattcaaagagttgagtctaagacttcacaggagagaaagactgtgtcatcaagagattcaggagtgaccatggcagagaatntgaaaacagcagggtcactgaattctgcacatctgaaggcatcactcatgagttctctgcagccattacaccacaacagaatgggatagttgag

SEQ ID NO: 10099 - DNA, 463 bp, Glycine max
actaagcttggtgccggctagtggaccaattaataagtattgatagaggactctgcatgtacaaatacagttactctgtaaaggcattcgagttgtcacttgtcaatcaaatgcatcgctacttaaaaaatcttatctgacttcactttatattgtccatttggcatcaaagacaaattattaagagcaagctagtagttaaattttcttacatggtacgcgctctagcaaatactttcttagctactttacatttatttcttcttgtcttcttctcaattaacatacatatagtttgacactttctatgtgttaatttgtttcctaaacaggaacagaatcagaaaaagcttcgaaaggctgtctcggaggtgtcgaacgaaattgaatgatactacaatgagttgaagttggagaagaaacttggtgctatagaagaggtggagcaagctgaatgccaatc

SEQ ID NO: 10100 - DNA, 429 bp, Glycine max
  unsure at all n locations
agctnggattgatttagtctaattatggatcgaggtttagtaatttaggctacaacatagcacataanagtatgattgattagagaaacttctttatatacatcagctggcttgttagaaagacccaacacctttacctactgttgtcaatcttacttacttgcatttttactttttttagcttagacttattttaattatgttctaaatcatcaatattcaatgtttctttcaacaatgccttattnttgaatttaaccctgtctaatactagttccctgagttcaatactcgaattcatccgttttaattntaaatacttgacaacccggtgcgctttccggcataccggatttcccttgaacatatttgtataaagaanaagtggacctaaaagtaactgcagggaaaatccaacaaagtatttat

SEQ ID NO: 10101 - DNA, 424 bp, Glycine max
  unsure at all n locations
tgtcggtgtacctgaagatgctattatgctcagcctcgtttcattttctttatcangggaggccaagagatggttgcattcattcaagggcaatagtttaaagacctgngatgaggttgttgagaagtttctaaaaaaatatttcccagagtctaaaactgcagaaggaaaagctgcaatttcttcattccatgaagacacctgaagaagccatggacttaattgaaaatatggctgccagtgaccacgcaattttgcatgatagagttcatattcctaccaagaagtttattggagctttcatcacaagatgccttgttggccgaaaataagttgttgtccaagcaacatgaagctttaactaaaacactaagtaagttgccaactcaatttcatgctagtcaacctttaccttcatctgttt

SEQ ID NO: 10102 - DNA, 479 bp, Glycine max
  unsure at all n locations
agctttgcaagctggaatcatttatcctatctccgacagccaatgggtgagtcccgtctaggtagtcccgaagaagaccggccttacagtgatcaaaaatgagaaggaggagttgattcctactcgagtacagaacagttggagagtctgcattgactataggaggctgaaccaagtgaccaaaaaggaccattttcccctgccattcattgactagatgcttgagcgcctggcaggtaaatctcactactgtttccttgatggtttttctggttatatgcaaattactattgctcctgaggatcaggaaaagaccacattcacctgccccttcgccactttntcctataggaggatgcctttcggcctgtgcaatgcccctggtaccttccagcggtgcatgattagtattttcagtgatttaattagaaaatgcatagaggtggttatggatgatttcactgtatatggatcctctt

SEQ ID NO: 10103 - DNA, 288 bp, Glycine max
atgcttaccacctcgaatgactggaaagtgcgttctaatgactcctttgcggcctccacataaggcatagaggatgggcaactcaccaagatgtctttcttgcctgatacgatgaccagatgcccttccactacgaatttcaacttttggtggagtgtatagggaacaactcccactgagtggatccacggacgccccgacagacagctgtaaggggggttaatatccattatttggaaggtaacttggcatgtgtgagggcatatctgtactgggaggttgatctct

SEQ ID NO: 10104 - DNA, 453 bp, Glycine max
  unsure at all n locations
taaccttctttataacaccatgctgtgagctcgagaccgttaccggacttaccttcgcaacccgagttcacgattgctactccatatatgtccgtgaaatttgtagcggcgatactcttccatgcgaggactgttggcctcatggttatcggctattgctagaatgtgatattctttgcgtgacccaggaccccttcgttcgactgtttgttatgggcaaattagacttcattcatggtaagttctagttttccgtacctcgctgttgggagcttggacttattcactctcttacggtgcgacaaaagtcttgttggtgacgacttttaaattggcgagacaatgcaaaccttgtgtgtgaactctcacccattctgcgtgtccaccacacgatgacattacgtatgcctttcagatctagcctttctttaacggtgagtacgaccgcttagn

SEQ ID NO: 10105 - DNA, 475 bp, Glycine max
agcttgtggcctcatagattatacatatataggacccttgacaggactcctataatactgatacatggtgtgagtaacaagcttcacacactctatgtacgagggatttcaatcatggaccatatgtatatatatacgcgacgcgacatacctgtcatgaaaggttcactccaccattccacgacctatatggaagcacattggtatggaaacacattgtgtgtgcgtgtgtttgttttaaggtgacgctgcacattctaatattattgtatgcataattaactatgcatgcacgaggcaggcattaaagaatctgagtttattgaattttaaaactagtaaatctaagaatttaatttttatcccataattttgcttaaaaattaaattggcatttactaatattttgcatagtgtaattaataaacttaaccacatattaaataatacattatatgatattacatgagctata

SEQ ID NO: 10106 - DNA, 456 bp, Glycine max
  unsure at all n locations
tgttggaatatatncgatcatgaaactacctttactttctcttaattcagagatcacagtagaatacgcccagttacctacgagtcaaaagacatctttacttggaagaatgaacatagttaaggtaaaaatgaactcatttcacctgaagcaagcaagtccttccatctattagaaggcgagttccagctgctgcttcctttgcatatatttatagcaagaaagtgaagtataaaaactcacgcagaattcagcatcttataccttctgtcgcgttccgccattgattacttaccattgcaacacatatgcctcgtcaaaattgtaaagcataacattcacgagaataaagtgaagtgcagtaacaacaaccattgatttaatatgcagcacacacatacaaaatctgaagctatgactacatttattgagctaactanacctaaacagaaattc

SEQ ID NO: 10107 - DNA, 478 bp, Glycine max
  unsure at all n locations
agcttgtcatcgattacacacatactataatcgattaccagaggagattntcaganaatattctcaattgtcacatcttttcatttggttcttgaatggctatcaaaggcctatatatatgtgacttgagacacgaatttgctaagagtttttcagaacaaaaaaaggtcttatcctcttaaaaagaaaaatcgttttatcctcttacaaattccttggccaaaacacttgtgattcaataaggaattatttgagtgctcaaattgttcaatctatctctttcaagagagattatttcttttcttcttctttattctgaaaaagaattaagagatcgagggtctcttgttgtaaagaaatctgaacacaaaggaaggattgtccttgtgtggttcagatcttgtaataggctcttacaagatagtggaactctcaagtgggttgcttgtggactgaacgtangcacaagggtgtgacc

SEQ ID NO: 10108 - DNA, 466 bp, Glycine max
tgaactatattgtatagatttatgttctttaaattgaatgaaaagatgggaattagtttcagttcactaagattttacaaattgtttgtattgactcataaagctggataaagttctactatttataattataaaaagaaaaacttttccagcggataaatcctgtttggtgtatagacttttagatttactgaggagtttgatgccactgccttgattttgctgaagaaaaaatggtgatctcttgcagactctctcaaataccgctgaagaaaaggcaaaatggatcttcaacaaattgaaaggtatgtgtgttttgaccctcaaagagatgtttatggttgacatttttaaatctcatgctttccaacgtgatcaccttgcattgttttaataaacggttacatagcaccatggctaactaggataaatatgcaccaaatgaactaatcaggtagctgaatag

SEQ ID NO: 10109 - DNA, 472 bp, Glycine max
  unsure at all n locations
agcttggtctctgcagatcttcacacaacanaatctctcanaactctntggaacttggacctttctctctctagaaactctagacatgcaaaactttgaatcccagtccaaactccctttctaaaatctaatttcaggcttaaataggtggccttgttcgtgctcatgcgcttagcgcacttctggaccgcttagctcacatgagtngaatttggcttagcgcgtgcctttctcgcttagcggatgaactgaattggtgcgcttagcaaacctgtacagctcatcttcttccagagtcatcctcacgtttagcccatgagtgttgcgcttagcagacgctcgctaagccagcagattggcttagcgagaaggtgaaaaataacacttttcaatgctttcctaattaacctgaaattgagagaaaatgattattaaacacacaaaatggaagtactaagtatttattacctat

SEQ ID NO: 10110 - DNA, 321 bp, Glycine max
tcgtgtgtgcatttgttgaactgtgtgtaatgtaaataaatcgttgtctatttcgcattctttacactgcattctaagcacccacgggtttgagcaaaaaggggccctacacccgtgttcatgggaatttaaggagtggaggtgaatctatcatcatgctaagtctccgacttgcttgataatagtgaaacctcgtctagagctttctctctttataatgtgttgtcgctggtattccataccgccacaatattattatcttgagtgatgatacctctagaaaacagccgtgtgagttatgaatggttggggaaatagtta

SEQ ID NO: 10111 - DNA, 461 bp, Glycine max
  unsure at all n locations
agctntactaactntcactcacattnntgtaatcattgattaaatttatcatatttgataaatataatatttaataaaataaaatattaaatatacataatgagtaataatatatacattctactttntttgaactacctaattntagtgtgtttcttgcattaatggttatggaggtttgaaaaatatgaattctcataaaaaaaataccattttccccatttcatataaataatgaaaaaataattaatgatttagattggtccatcaagtctcaactctaaacacatagtaaaaaatgttgttctaacaaaacgaaaatcaatacaaactagaaaattcaaccccttcaaaagcagtgcaatttggctctcacttgcaacttgcctctcacttgcattgattcagaatcttaaaatatctttcctcggtgtgagacaaanatgtcaaattatgaagaa

SEQ ID NO: 10112 - DNA, 385 bp, Glycine max
  unsure at all n locations
gcttcttcgtgggaagaacaggttccagtgaatatccttcaatttgctgatgacactattctttttggggaaggttcaatggataatggtaaagctgtgaaggccattcttggaattcatgcctgtatagtatgcaatcattanggcaagcatgaatcttctgatacttcatacccatccaaggtcacgaatcatgtcctccaaccgatctcccatttctacatcaaacgggttaaaattgtgacctactttgcatgtctgtgacttcaccatgccatattcacgtcgtgtaattcttcttaatgccatcacacaatagatggtccccgatgtcatcgagtagttgtcatcttccatcaaacagntgatgcaaggacaataatat

SEQ ID NO: 10113 - DNA, 506 bp, Glycine max
  unsure at all n locations
cttgcccatgagtaccgtgatctcttactcacctcgcggcatgcaagcttaagagagatatgatggaggcntgtgacagtatttacctagactacacgacctcctgtcttggtacgggcatcacacctggacatccttaaatctctagtcgtcacaagatgtattcccacgacattatatagatgttcaagcttgcagaatgcatccaaatgagcactcgcatgaatcacaacgacaaagtttcgtatgaccatgcgacgaacataatagaaatggcgttttaagacgcctgaccggcgaagatgtatccacatcagttcgacctgatatctaaacggtggatgctttccactggattctaattatgcagcaagatgcatgcatgccacacataggtgatggatatgtcgttgcactatcattatgcataaccctagaatctcagatttatacctgcaatgtgacaaaggcttgcgcgccctctgtgcttcagagtccttacctct

SEQ ID NO: 10114 - DNA, 232 bp, Glycine max
gcaccatgcggcattcacatgatgttgtcactgacattcctatcgccctgataggacacggaagtcaaggtgtgaaggagtagacttgttctcacgttatcactctatgcgaagcgcttatacatttccataagacattccgcggcactctttgtataattggaatcagcgctcctactgacctctcgaatgcgatgctgtatgatcataatactcctgcgagttgagtgac

SEQ ID NO: 10115 - DNA, 448 bp, Glycine max
  unsure at all n locations
cttaatgcggcttctaacattcgagcttctgctgaggctggtgtctcanagttgagtgcctggcagacagcaaggggtggggtgggtcagagccatagcagtggtcaagtggagcaatgccctcagtgtggtgccaagttttcctcagttactactttggtggaccatgtgcaaaaagttcacgagaggagtggcaaccgatctggagcgaaggttacaattgatggttgtccaaaatgtagtaaaggatttcgagatcctgtggccctagtggaacatgttgagaaggatcacggtggaagttctagatcataggtatgagttgatattgattnattgaatgaatataacttgaagaaattacatatttttgcaataattagcctggaagaatatagtttntataaacatgaatacatngagagtgtaaacattgtcattcaatcat

SEQ ID NO: 10116 - DNA, 443 bp, Glycine max
  unsure at all n locations
ctcagcttntaaggcggcgagctcagttacgaaagggtgcgtgtagttaagctctagcttctcaaggaagttntctcaaagaatcttctcaaggaagttttctcaagaaagcttcttaaggaagctacctagtctataaatagaagcatgtgtaacacttgttgtaacttttatgaatgagagtcttgtgagacacaactcaaagttcaacttttttccctttttttccttcaatttcttgctccacccctctctctttctcttcctctttcttttcctgcattgaagcatcctctccaagctttttatccaaggctcatcttggtggtgaaactcctntcttcatggcttattccctagtggatggctcctnctctcacctctnttcctttgtcttccgctgcatcntcagggtggaaaatcaccattaaaagacctcattg

SEQ ID NO: 10117 - DNA, 487 bp, Glycine max
  unsure at all n locations
agcttgaggattatggngtacccatcacatgtggtactaggtggcggtcgggcgatggtgcacaacaagttttccacatccacaatgcgcgcataaacccaccatcccctgttgcccacctccaactgagctcacgtactcccacgtagcccatatcctcgtttctctcaacaccgggtccccatcaatcctcccaagcgttcacaacatccaagcaaaacaacattcacacagcacaagctatcacagccaagcaaaacaaagcaaaggcaganaactctgccaaaacaccaaccaaaaatcacagcttttcccactcaaagaccccagtaacaattccttcgatccaatttgttaaccgttggatcgactccaaaattntactggaagtctatagtacataagcctacattttgaccgttgggatctactagcanacatccagaactcattntacattactctntccacaaccagcaaatacatg

SEQ ID NO: 10118 - DNA, 463 bp, Glycine max
  unsure at all n locations
gttcgattcctttctttntcttatcgttctcctcatgctgattcagtttcattagttccatttcgtgttcctgtaactttccaaataaagttgcaagagacatgttagaaagatctcttgattatgtaatagttgttacctttggttgccattccctgcttaaacatcttagaactttattaataagatcctcattgggaaatatctttcctaatgatgcaagatgatttactatgtgtgtgaatctcttttgcatgtcctgtatagtttcattaggattcattctaaacaattcatattcatgagttaaggtattcattctagacctctttatatttgttgttccttcatgggttacttgtaaggtatcccacatatcttttgcactcttgcaatttgacaccctaaagtattcatccattcctaatgtagatgtaattgtatttntggctttttaaatata

SEQ ID NO: 10119 - DNA, 493 bp, Glycine max
  unsure at all n locations
atgcaagcttcacaatatgatatntacttgttgacgcatatacatcgtatttttctttgattggcaggaagacacttaatgagcttggagctattgtctccacggtgcatccaaagatgaaattccccaccctgagggggagattatgactatcaaggtagatgaaaagcaagcacaatagtgctacgcacaaagcctaaagatggcaccttatcctcccaccaaggagctggctaagcctcaccccacaatggttgaaggtactccaagtcatgagcatgaaggaaagacctctaatctgagccctaaccatataccaagccatcttagatgatgaattcgatatagatccatgcaacaacacttctaacanaggcccaaagcccattgaagagctcgtcaagctgcagttgggactcaaacccgggcaatgtacatagctcaagccatgagcacagatgcatcgctgataccctacatcagaatgtggacc

SEQ ID NO: 10120 - DNA, 444 bp, Glycine max
gcttcggaagaaagtgatgaggtacaagccctaaaggcagagcttgaaagagcccatgtagtcaaagagaagttcaagtccatagccatcaaagtctgaaaagagtaggatgaactaagggacgtcaatatggccacagctgaagccttggaacgagaaaccaagaatgcccgaaaggaagaacatgaccaaagcaaagttttgaggggctttatagggcagcaatagtgagctcaagctccgaagaggtgaaaggaatcatcacgggtcaaaggcatgatcttgaaggacgagctaaaggcttgccttatgtcgaaaagaaatttgtcccaacagctaagcgagactgaagggaatatgtgggccatcatcgatgagtgcaaagagaagctaaatctagcggcgactcacgagcaaaggctagaggatgagtacgccaagata

SEQ ID NO: 10121 - DNA, 460 bp, Glycine max
  unsure at all n locations
agctgcagcttcacaatatccaagcaatttaattcccactatcataaactatcctacaccaagaaaacagggcaaaggcagaaaactctgcccaaaacacattcacatattaccactttccttactcaaatatcccagtaacattctctttgttccgattcgctaaccgttggatcaacttgaaaattttactggagattactagtacataagtctacattttgaccgtcgggatctgctataaaatgtgcagaacacaatacgtactacctttcccataaccagcaatgcacaagcattttctacacatgaacaaaaattctgctgcacaaatttgacaacaagtttctgcataaaagggcatagttcgaaatccatctttcccacatgcaatnttgctcaaataggatcctaaaagtcctaaatcatgtataaagtatatttaaaccaacaacaagct

SEQ ID NO: 10122 - DNA, 452 bp, Glycine max
  unsure at all n locations
tcctaattgatgtttggtggatagtcaccaaataatgataagtggtggcggtagcaacaatgatagtggtgatagcggtagtgacaacaacggtaatggtggtggtaatggtgatagtggtgatgatacggtgagacgaatgaatggagatagagagagtgacaatcctatgttattgctttgttacttaactcctacctcatgataagaaatacactacatacacaggatagacaccacacaattgattacagcaggataacatagttattctggccactaaatgagccctgaatgtataatactagttaagacaatgacaagacaatgactgaatgattaattaaatgaccatagntgtaactagnggcagatatttattcatctccttaaatattataaaaactccacacatctaatgtaccttagncagtgatcagtgcagcgtattt

SEQ ID NO: 10123 - DNA, 500 bp, Glycine max
  unsure at all n locations
cgtgcccatgtgacaccntatcagtaccgggatcctcagaagtgaaccgcaagcatgccagctttaatggagccttgatcatttactcagccctctcacgcctatttataacaaagaaaggcacttggtggacttgcaactcgcccaagtgagttgttgcttcactctaaaataacttggctcgcccaagtgagctggttacttcaaccctaagccatattggggcccaggccaaccagaagctatccaaagcgagcctaagtccaaaaattgcttggaatgaccttttccccttcctttgggtaatttctgcatcttaaccaaaacgcgaacgatctttctcttgcatggaaccgatgcgaacgggtaattccgctaccagaataaaataccacgaatgaatccctggcaaatttggtctgcagtacaaagattatcaagctgacgaaccaaataaagaatgaacaagcaaatctgaaagacaaagtgaataacgatct

SEQ ID NO: 10124 - DNA, 409 bp, Glycine max
  unsure at all n locations
gtttctcaaagaagcttctcaaggaagttttctcaagacagcttctcaaggaagctacctagtctataaatagaagcatgtgtaacacttgtggtaactctgatgaatgagagtcttgtgagacatacttcaaagttccacttctctaccacttttattccttcaatttcgcgctcccccctctctctttctctccctctttcttttcctccattgaagcatcctctccaagcttcttatccaaggctcatcttggcggtgaagctccttcttccatggcttattccctagtggatggcgcatgctctcacctcttctcctttgtcttccgctgcatctccatggtggaaaatcaccattaaaggacctcattgaagctcaaagatccagcctncatagaagccctaca

SEQ ID NO: 10125 - DNA, 271 bp, Glycine max
caccaacaaggaataatggactcacacgggttctctgtatgtataccagcagcacaaatacagtgtaaccatgaaacccaaccatcatttgctgttcacgcttcgtgcgtatatgtctaagtgtgaagcaaataagcgagctatacaaaagagccaacccttaccaacttcattaacattcacgtaagttctgatcatgattataatcgatctcctttcctttacaaagagatcgaaacaatcatgacgttaaacaattcacacaagccct

SEQ ID NO: 10126 - DNA, 405 bp, Glycine max
ctaatcaattgaaatcgacggtgtgggattttccctgtactctactatgggcaatattccttggcacccttaatcatgttcaatttgttggtaagattacgtcttttaatccaaaaaaggaaacttggttaccatgtgagagtaatttggataaatgaaaatagttttggatgttatatgcatgagtatttcaatgcttgcactactacgaaagtgtgttttttatgacaggcgctctacttttgtaattatgtgtctgagaaatccttttatgatgcacattctaagacggttattgaaaaccgccttagaatgtgtgttcctcataaaaaattatgacgggttctattaaaatcccgcggtatctcaattgaattcaaaagcccaattaatacgagtccacgt

SEQ ID NO: 10127 - DNA, 468 bp, Glycine max
  unsure at all n locations
gatccttaagcacctgcaggctgcagcttgtgatcaactnttcttctgtggcgacattctgtcaaaccagttatcaagtcccattgacttcagcaattcgtcacaaatccacagattccgctctgcttcctctctaaagatgattgtgagctggcattgagaatccagcttatgaaagttggagcaacaggatctaaagctcctcacatcgtttcaatcgactctctctacatanattttatagcaagttctaggatgcacccactcctatgaggattggaacgcattcatgattatcttcacaagcaaacaatagccacagcttgtcaacttcgcactcagcttcgtgctacgacacttgcaggcgaatcaatacatgaatttgtcatagattcaagcaatttctcgatttcttgcttccatgggaagctcaattatgcttcacgagcatattgattctattcttga

SEQ ID NO: 10128 - DNA, 448 bp, Glycine max
  unsure at all n locations
tacaatattgcttattacacatgagagatgaatatatatcaaattgcactcgtataactttgataagtcttacatcattnttataacttgatatagaatgtgattcttattaatcaacccgccgaattatatctatgcattattaaaatcatctatgtcaaagtttgtcaaaattgaataacaataataaggtaatcaaatgatttatattctaatatattttaaaatatttatattacgtcgactttaatatataagaacaagataacaagtgattttggattaatatcaaattttacatatgtgacctatgtgaaaaaaaaaaacttttaatccaacgatgagtcttaagaaaacatatccagttgaaagctataatatgatataaaaattatcacagctatatacatcgaattcgatctctcctctctatttctctctctatata

SEQ ID NO: 10129 - DNA, 419 bp, Glycine max
  unsure at all n locations
ngctngagaaatattataatttgtgggatctaattcttggttctggtgtggacgaggtaatttgcatttagaaattcatgtcttggtttcatactcagttaaattctgtcttcgataagtgtattgcctacgaccactgcctactgttagcgctttcttaatcaattgcagaatatgtgatcaaaataccaaacaattaaaatggctaatatttatctatattggaaattcttattgcactaatgagaagcttgatccataagaaatatagatggatttatactttgcgcctagagtgcagcttgtgaactaatgaaatgattcattagcaagatgcaaattacaatccttagcatccttatctccatccctaaatgaccaggtagtactgtttttcaacctcagtttcaccttgctca

SEQ ID NO: 10130 - DNA, 448 bp, Glycine max
  unsure at all n locations
tattcttgtctagctagatatttgtaaatccttaataatccttctaaaggattgagtcttgccctccgtatttatgttatagacacttaaggtgtgtttgatctgttaagaagacagaataaatagaataacattgaaacaagtaattgaatcacaagataatttttttgtattgtacgataatggccgatgaaatatttaaataaattaacaacttatgccaacagccaaggtggtcctctctggcgaccaaaatacaacgtttgaagagggggacacatgcaaaaaagaaaaaaaatgtatggataataaaaagttaaaaaataagaatagtattgtatgcttattnttattagatataaaacagtttatacgggttaataaattacaagtttctgaatatctgtgtaatctattatcttttattatgtacttttcctttattata

SEQ ID NO: 10131 - DNA, 464 bp, Glycine max
  unsure at all n locations
agcttggtagtttcatagggcttgagtcttaacttatccagctcattcaattgttgctacctgttgctacctacaagcctaagatcaaagtttataaactatagagcccacatggctttgtgaacaagttcaacaagcaaatggaaattcttgccataaactagactaaagggagacatcaaagtgggagtcttaaaggtttttttgtatgcccagagtgtggtcatccaattcaatgaccaattctttctagatgctctcacagttttctctaaaaccttctttagttacctattagatacctcaacttaaccaattgcttgagggtgataaaaagtaataaccttatgggtaacaccatatttagccaaaaggctatcaaacaatttaatgcanaagtgtgttcccccatcaccaatgattgctcaaggtataccacagagtgtaaaaatgttctatttcag

SEQ ID NO: 10132 - DNA, 428 bp, Glycine max
  unsure at all n locations
tcttagttntcgatgatgcagatgagtttgtggctacctcatgcactcctctaatgactatagcatcattcctagcgctaaactgttgggagttggaagccatcttcttaattaaattcctggcttcagcaggggtcatgtctccaagggctccaccactggcagcatctatcattcttctctccatgttactgagtccttcataaaaatattggagaagaagctgctcagaaatctggtggtgagggcaactagcgcatagttttttaaatctctcccagtattcatataggctctctccactgagttgtctaatgcctgaaatatcctttctgatggtcgtggtcctggaagtagggacatttttttctaagaatactctcttgaggtcatcccagctcgtgatggaccttggcagcaggtaatat

SEQ ID NO: 10133 - DNA, 216 bp, Glycine max
tattgaacgagccatgctctttctcgggatcatgccttactttctatgcttgaaacacacattgttggtcttgaatgtatgaaaactatgtatgaacaagatgaaacctttagagaatatttgaaaaattgtgacaattcttcagaagaaaggtttctttatacatgaaggccttcttttcaagaaaacaaattgtgtgtgcctaaatgttctact

SEQ ID NO: 10134 - DNA, 443 bp, Glycine max
  unsure at all n locations
tcgtcctcaaatccctcttgttggattgagctcaattagacagtcctnctaggtttagactaacttaaactaagtttcatcctcaaatccctcttgttggacttgacttagtttagcctaatttagcctaagctttgtcctcagatccctcttgttggactagactttgaccaaacagcattattgtaacaacatacttaaaaccaaaacttaatctgcagattcctcttgtgagaccgaagttcaattctgcttcattcaagttctaagtgttggatcaagtggccttggaataattaagaaggcggggttgaattaattattgatgaacctttactaattaaaaaacttatccttcttaattactagattcaattacgcttttactataatgttaagaaagtcaagaacagaaatataacttaaccaaagtaaagcgataa

SEQ ID NO: 10135 - DNA, 471 bp, Glycine max
  unsure at all n locations
agcttgtaggattatggggtacccatcacatgtgtgtactaggtggcggtcgggtgatggtgcaagtcaactctccacatccacaattcacacataaacccaccatccccagttgcccaccttcactgagctcacgtactcccacgtagcccttatcctcgttcctctcaacgccgggtccccatcaatcctctcaagcttgcacaacatccaagtaatacaacatccaaccatcgtgaactatcaaaaccaagaaaacagggcaaaggcagaaaactctgcccaaaaacacaaaccactatcacagcttttctcacttaaataccccagtaacattctcttcgttccaattcgttaaccgttggatcgactcgaatattntactggaagtctctagcacataaatctacattatgaccgttgggatctgctagaaaacgtccagaaccaaatctgtactactctttccac

SEQ ID NO: 10136 - DNA, 461 bp, Glycine max
tccccccatttacgaatggatcctaattctgctgtgattacgactatgggctaccaatagacgctggaataccatcatttccttgaattaaattctgcacggaatatgttaacacatgctccgcatactcagtgatacaatgccatactcagtgccattaatcaataacctagggactacaagtgacaaagggcaacacttgtaagacaataaattgatattcattcttcatgaattgatttatttaatcagagctaaagaagttaagttaaaagaaccagaaacaagaataatttactttgacattctacagtcatcattcatgaagatagtataatgtttcaacattaggaaacagatcaccatgcagcttgcacttgagagagaagaattcaaaataacaataatacgcagtggtgatgacattacattggcaacaacattctaactcaataacccta

SEQ ID NO: 10137 - DNA, 471 bp, Glycine max
  unsure at all n locations
gatctctgagtcacctgcggcatgcaagcttctcctcttcacttaattatttgtatttgttgctattaatccatgcatgcttagtgcttaattaattgtctntgcgcttaatttacgttcatgcttaatgatcgttcatgattaattggtgtatgtgttgcttaatcacataatgaatgccttatgttaaatttcgcttagtaatttaatttaaggctcaattaagtggttgaacttgataaaggataaattctcgtaacctatgataagagacttgcttgtaatcaaggggaagcaacgtgttttaattgatattttctaattcaactttattcgctgtttaatttacaaaaaccaaacaacccccccccccaattcgttattggtttattactatctattacgaacgttntggtgatcattgctcgttgggagacgacctangatcacttcctagatactacattttta

SEQ ID NO: 10138 - DNA, 458 bp, Glycine max
  unsure at all n locations
aacacatcaatagccttgcatcctttctcaccatgttctctccaaaaatcaaaacttggaacctcattcttccccattgagcatgagatcttcaaagaggaagaggccacaattttcatcttcttccaagctccatcatattgttttgactctttctctcaaagccttggtaagaagcccttaaacctttcttttccttctaatctctttctcattnttatgaaaaattcttactcgaggttccaaatatatttgtcatcctttggaagcttgagacttcaacatctaagcgtttttttcttaaccattttgtggaagcttcactcaacgtaaggggagtctttccacttcttaaaccctaaccttgttgcctttggaagctacgcttcattacatgttgtgatgttaaaatttcatatatgccgctggacaacccaatgtgattcttgcagcaactc

SEQ ID NO: 10139 - DNA, 451 bp, Glycine max
  unsure at all n locations
agcgctatccgcagactcaacagaagtcagttggggaagaaatcagaccatgtgcatgaatcttacacccagtgggttattgataggaccaagagctttggcctaccctaccacttacctagatacctatcgtccaccatcccaccatcatccttgcctatcccctttgacactaaggaagagtttcatgaacaattaacccaaggaaaggcangaaaaagaaacttgggagaggagatgccaggagctcgagcgagagaatgagactnttgaggggaagatagcccaacagagccgtgagctttttatccagaaccagagggtgattgagaaggacgacttgcttcgccggaaagacgctttgctccaccaagatgctagaaggaagaggagggttatggatttgttctcccgtgcacattcagattccgaggatccatctactccggga

SEQ ID NO: 10140 - DNA, 388 bp, Glycine max
  unsure at all n locations
tnctcggggccattcctgcgaagggcaaacattggaaagttagtttacaagatatataacaatcattacaaacaaaggccaaacaacacttctcatggcacgagtgtcaacatgcactttataaaataatcatattggggtcgtgctattttatgacacatacgtatttgcacacataaaaattctgtgtgaaacattttacaacacctatccatgtatatatttttttgacaaaccttttcaatgctacatcctatatatatacacacattnttntggaaggcttcttttgttacctactcacaaatacacantatttgaaaaacacttttacgctacccatccaacactttgtaaggcactttatgctatatatattcatattatg

SEQ ID NO: 10141 - DNA, 447 bp, Glycine max
  unsure at all n locations
ctgcagcttactgaattgctggtcttattgaagaacatgtcttctgaacaaaacactttgccgaanaatcactacgaggccaaaaagaatttgtgtccagtgggaatggagtacaagaagatccatgcatgccctaatgattgcatattgtatagaaatgagtatgcagaactacagcaatgccccacgtgtggggtatcacgatacaaagtgcaacatgatgaattaactgatgatgcangaaccaaaaattgtcatcctgccaaggtgtgctggtatcttccaataataccaaggtttaagcaattgtttgctaatgcacatgatgcaaaaaacctttcatggcattcggatgaccgaaaatctgatggattactgcgacatcctgccgattcgccgcagtggaagacaattgatcgtttgtatccagagtttggggatgagcca

SEQ ID NO: 10142 - DNA, 449 bp, Glycine max
  unsure at all n locations
tctntgaganaacttccttgagaagctagagcttagctacacacacccctttcataactaagctcacctccttgagaagcttccttaagaagattcctaaagaagctagagcttagctatacatacctctctaataactaagctcaccttcttgagaagcttccttaagaagattgatgtgccatcattttcttctattttctaaaccctttttgcaccattttaattactggatggtcttaatcgtcaattaatcaggcagttttattatttgggctcatttagctaatttgatgtttttaatctaatttcaggaattaatgaaacattgggcttaatccggattttggttatggacttgaagagggaaaattaagcagcgcttaccttagttaatttctaattaggaagatttcgcaatttattntatgttgttcagtgtttatttc

SEQ ID NO: 10143 - DNA, 522 bp, Glycine max
  unsure at all n locations
cgtgcgcattgtgacaccctatctctagcgtcacctgctgctgcagctttnctattactaatacttggtcnacatttgaacggagatcacttgattataacgactataacgcagccaatctattacactaccaccttgtaagaataacttcaagaatatattgactcttgagaagctgcttcttttcgttacgataaatgtgttcgctgccgcgtaacttttcaaagatcctgatacttgatgctcacagattttgccgttatcgaataatgacgctataaatatatttacttatacacacattatgctcatatgttacaatgtatgtatagcatgaattaaaatattctccctcttctgtctaacatattttcatttattaaagtgtcgattctacgaagaagacatcactactcctgctattgacgtgtggcctttaatcaatatatctctttattctcattgatgaaaacgaccttgactgacatgataaatctcaccactggtggtcgaaagttgtcg

SEQ ID NO: 10144 - DNA, 346 bp, Glycine max
  unsure at all n locations
atgtgctcggatcgctcatgatgagcatggtttgaagcaagacttatagcataattattatcataaaagtacatcacagagggctcatcaaccccaaagtgaagaatctacttggtgaaccgatcgatttcactactaacagaagacaagacaccatatttctccttcgtggatgacttcgaaaccgtggataattccttaaaacncccaaaaagaaagttattttccaaatagacacacaagtcagaagtggatcttatggtatcaacacaacgggcccaatcagcatctgccaatgcagcgatggcgagagagtactgagcagggaacaacactccttgtccat

SEQ ID NO: 10145 - DNA, 467 bp, Glycine max
agcttcaccttctggtcctcctcatagttgtggcatgagaaaacatgctctattttcatctcccactccaagtaggcctccggatcattctttcctttaaatggaggaatgttgagtttaataccatcaattcggttttgtctaggaacaccatcattccctcttctcctcctttcttcttcattatgatctctattctccatttgatccaacctctcatggagcgcatcactctcgtgtttcattaacctctccatatgttgcatcaaagcttgcatttggaattgcgaaagccccactccatcattaggattagtacctgacatctcaaacaaacaaatcaaacgtaacaagacaattatagttgctggttgaatacctcacccactcaagtgtatcacacaattatggcttttctctaatgaaacactcttgccttttaccactctaattccccttgagttctt

SEQ ID NO: 10146 - DNA, 428 bp, Glycine max
  unsure at all n locations
tactcagcttaacattcaatttcgtgcgtctcgatatgttacgggactcaatcacacatccgagtaaaaagttatggacgattgtatcggctcatagcttcaactttcaatgataagcgtctggatatgttacgggactcaatcacacatccgagtataaagttatggtcgtctgaattggcttagagcttcaacattcaatttcgagcgtctcgatatgttacgggactcaatcagacatccgagaaaaaagttatcgtcgtttgaattggctcagagcttcaacattcaatttcaagcgtctcgatatgttacgggactcaatcagacatccgagtaaaaagttatggtcgtttgtatcggctcagagcttcaacattcaatttcnagcgtctnnatatgttacgggactcaatcagacatccgag

SEQ ID NO: 10147 - DNA, 367 bp, Glycine max
acttaattagactgaagggacacttgacacactcaaactaagtaccccgtttgacaacatattcacatattttatacagcacgtcttgaccctcaacatatatggacaatgagaatcactcagccgtgattatcaccaataaactcacttaaggataattacttgattagaagtggctcaacatgattaaaaggtgtattacacaactggtaatcagccattgcagcagcacttcacttctcttttgacgtatgcaactatccaacactattagaaaatatgctttctacatcggttatttatgactttcaacatcggttcttgaccgatgttgaaagaccgaccgtgatagtattatcgataacat

SEQ ID NO: 10148 - DNA, 428 bp, Glycine max
  unsure at all n locations
tataagcctcattatctggcgtggtagatttcccacattcaccatcactctccacccctgcaatagtactcacaagcaccacaaacccaacaaggcatagcaacttcacacaataagtacaaccctccattatttctcaatattatgcttatgtctctctattagcgaaatgtttctctgttgatttcacaatgcaataacccctttggctctcatggcgttttatagcctaacatgctccaaaaaagtgcttggccttgtcaccctctgattaatggagcttgcactangacaaagggtgagttttattattgcaccacttatgaacataaagcacgtggtaacacaattttgctccacttatntgtccaatcaacgtaggtgtgtctttgccaacacaattctttttgttttcttacttccaaatg

SEQ ID NO: 10149 - DNA, 399 bp, Glycine max
  unsure at all n locations
agcttgtagaatggccagacatgatacatgtcaagtgttggtttggttcaagggtaaaagggatgccccacattatttccatgacataaatgcaaaaatgatgatttggaaactttatgcaaaactggtcatgcatgcacctatgcggacactcaagtgtcaaaattttatggtcatgtgatgctagggctcangattcatttcctccattttagtaacccaatatttccaaaatatgttctttatcaatttggcattcatccgagtccattntcgggcgtccgggaaaatttcacagcattcacccttcaggtgtacacattnttttttcaaaaactagttatgatcaacgatctttttcaaaaaaaagttggaagtcatctcttttcacaagcatgt

SEQ ID NO: 10150 - DNA, 418 bp, Glycine max
  unsure at all n locations
gggagagaatgcttcaatggaggaaaagaatgagggagagaaagagaggcggggagcacgaaattgaaggaataaaagagggagagaagtggaactttgaagtatgtctcacaagactctcattcatcaaagttacaacaagtgttacacatgtttctatttatagactatgtagcttccttccttgagaagctctcttgagaaaacttccttgagaagcttctttgagaaaacttccttgagaagctagagcttagcaacacacacccctctcataactaagctcacttccttgagatgagaagctagagcttagctacacacccccttataatagctaagctcacccctatgaaaaaatacatgaaaatacaaaaaaatccctaatacacagactactcanaatgcctcgaaatac

SEQ ID NO: 10151 - DNA, 457 bp, Glycine max
  unsure at all n locations
agcttgccattcaaagcgctntgngcctgngaaaatgcggtgtagttctaggttaaggtggtagagccctgtgtgagacgagtcactgcttcaagttggtcaatggtgggctgacagatattgtgttctggcatggtgaggtagaggaggaggaggctggtcagaccaattgttagtgttgacagttgtatgtctatattaagaattaattagacaactgggatgttatttctgcaattaattttctagaagaatgaataattcagatcaagatcatattattccaatcttgatatgcttttattattattttgggtcagaatcaaatctctcttatttgatctgatccctttttatttacttttctttctgcatttattatgtaattggtagccttgcctatatatgtaaatctcttattcctaaataatatacaagaattattcttcctctccta

SEQ ID NO: 10152 - DNA, 466 bp, Glycine max
  unsure at all n locations
tatgggatnggcatagagaaagatccaaataggcattntatggcttaaatattattattntggttntattatttttaatttaattntcagaaaaatactagttgatatgacatgtatggtcgctattttttgtgaatccctaatgaacatacgatatgcactatgtagtgaatcatcaaatgaaggaagagtattaattttatgtttatctcttgaaattttaattgtagaaattaggagtagtggtagcatagtcttttaagcctgtcaaaagccatgcataaaaaatctacaaatgagctaaatggttgttgtgttaacaaggttgcggactcaatagcaacattaattntaaataatggtgaataaaaacaagtaggaattatttcccgcaaatttaagaanttagctcaactaaataaagcacatgtaatgcattatgcanagcanaacatgagtgaagtgt

SEQ ID NO: 10153 - DNA, 437 bp, Glycine max
  unsure at all n locations
agctngccattaattgtacatctggtgtggaaaatattttctctttgtgtgtcgtccagtggctgcatctgacttcacaagagccttctcaccattagcatatcaccctgcatagctttctcctcaagctcttcttccacctcttcttcttcactgatttcagattcactggtgatttctccatctgccttcatgatcatggttctcctggttggacaggcaaaagcaatatgtcctctgcctaagcatttgaagcattttatgtttctggtaccggtgttggatcatggggtagaattatgcttagttctagctactgacattccatgtgaagactgtgttgatgggctggatgagttgcctccctccttcttggatctgctggtccacgtctagttgaaggtgctggatgagttccttcttggctgcgcttttct

SEQ ID NO: 10154 - DNA, 360 bp, Glycine max
  unsure at all n locations
cgagtgagcgaaagagagagaggcacaggcttgttgctcgtgtgctgaagtgtgtgtaagctctacatgtgagcgaatatgttgaggatttgatggaacctgctatttataggagtggagcgtagctgtgggtccctgtttgtaggggttgctatagtctctgcagataattaccgacttatagataatacccgagagcttgtacataatgttagagaaaaaatgtagcttatacataaaagctaaaagataattgnaccttgtagatagtgtgtggctttatagataattaactacctaccaatagataaagatattcatatattaataggctagagataacctgctagttacggaacc

SEQ ID NO: 10155 - DNA, 472 bp, Glycine max
  unsure at all n locations
agcttcctaatgtgactatgactcataacatattttttgagagccaatcatgtaattgtgtacatatattagtattgtacattcaagaataattgaaacacattatagatagagaaaaagtgcattaagagagtgtgcattaagagagttgcattgtcttatatttttcttatatcataaaagtcttttcaattgtatgcctatttttttatgtctagataaattcgtgatgtaactaactacgaatattatgcaaaatatcatttaaaactttttcaatcaagaagaatcattaaactctgcatacaattataagtttgtaacaataaacagacaatattaaagaagaaaaataagtttatttgttgaacaagtttattttaatgtggtttttgatcttcatcgagaattcatacagtggataaaanacgtgacaattagaagtaatatagtggatttggtccatgtcttc

SEQ ID NO: 10156 - DNA, 437 bp, Glycine max
tcgaccgatcgtttaagccgttatctcgcataataaatgataaaatgaatttcaaccgatcatttgtgttgtaatctcggttaatcactgttaaaataaaattcaaccgatcattcacactgtaacctcgggtaataaaaaaagggtaaataagctccaatcgaacactttactttaaaagttcttataaatgagttgataaataatcaatgtttagttcttaaagaactacgtaggtctgatttcctcaccgcaattgaggatacataggaacaaaagccacgcttttgtcgaccccaaaaagggagagattgttaaaggtccaacgccttaacatttctctccttccataaaatcaatagatcgttaaaggtccgacgccataatgattctctcctttcaaaatcaagtgattattaaaggtctaaggcctgaac

SEQ ID NO: 10157 - DNA, 455 bp, Glycine max
  unsure at all n locations
agcttattattattattattatgtcgttgttgctgtttcctgacagacaaaagagagtactcattctgttgatgaatctgttggtgctaatcaataattgaagacttatatnttgttggtgaatataatttatacggaaaagttcctgcaggtgaagaaacatttcggtgctttatatggtgacaaagtattttttcccgaagtgagatactgagnttctttgtagggcattcttaaattttctaatcatttaaaaatagaacttatggaaaaaacgcactccattagaagtnttatatattcaacacctaccacaacatcttgacttgagctttngcaattaatttgatttacccttatcttgactattagtgctttctcaatttaaagcatattaaactaattgatttacatcgataagctggcatatatgcctacttggttgcttagatata

SEQ ID NO: 10158 - DNA, 349 bp, Glycine max
  unsure at all n locations
tgtccgaaccatggaccgngtcatggtatgccacatcaacggctctcttgttcctttcctcaaagaagccggtgctctctggctctgaaaagtagacccacccaactaacgctatctaagtataaataaacaaaaaaaatatatatgagagaggaaaaaaaacaggtttattaaacagcgcttattattattattattatcagaggaaagggatgaagtggtccttttgtgagtctcttcttctctcattccattctggatacactactactactactacttgcagcagcagcagcagcagcttcttactgacttgttaatcaatcttctttctttaactcccttcttt

SEQ ID NO: 10159 - DNA, 431 bp, Glycine max
  unsure at all n locations
agcttctttgttagacctcgatcggtcatctttctatgccgaggtcgaccgtcatttttttcgatccatttcggtgaataatattcttttgccgagatgggcaaaatgccagtttcggccgaataaatgggaaaatgccagtttcggccgaaacgaaaagtcggttgggctcgcacaaaaaaacctagccgacctacattntaaattntttatgcaacaccaaaacaagaaaacttcctgtgccgtaaaaaaataacattacatgacagcgagcgttttgaaaaacaaaattgcgcaacgtcggctgaaaaatatcagtcggggctgtttcacgaccgatgtcggctattgagttttcaattcaatccgtgaacgaaatttgcatgatgtcggttaggaaatgttcgatcggcatcatcctgtgaagcttc

SEQ ID NO: 10160 - DNA, 391 bp, Glycine max
  unsure at all n locations
tcaccggatgacgccgatcgaacatttcctaaccgacgtcatgcttatttcgttcacggattgaattgaaaactcgttatgcgacatctgtcgtgaagtagcgaccgatatttttcagccgacattgcacaattctttttagaaaagctcgctggtcgataatggtctttctacggcagagtaagtattcttgttttggtgttgcataaaaaagttacaatgtacttcggctaggttttcgtgcgaagtcaaccgacattttgtttcggccaggaaaacattagcccacctctgcaaaaaaatatttgctaaccgtcttcatgcatatttcattcaacgattgaatagaanactcaatagccgacaacggtcgtgaaatagtcccgactga

SEQ ID NO: 10161 - DNA, 455 bp, Glycine max
  unsure at all n locations
tggtatctttatcagtgttaggaaaattattaagaagcagtttctcatacgactnttatttgatcaaagagtttgagaagttattgaaaccataaaaggaaaatatggtgggatgcaagaaatatctgctattatgtttctggtagataatggtttcttacctatatcttttcatctgcatatatttctttctgccttctaatgttaccaaaaataacaaactgattagggccatttcagctatttgtttagaagccaacaaaatgcaatagttaatcaattttctgcaattaagaaggcatcaattaataatttaaaagaaaggacaatctgttatcacatctnctttcttttattgagtattttgttggaatccgcaacagatgatgcataggacaattttctatcttgtcttccactgatatttttgttctttactacattggtaagccaca

SEQ ID NO: 10162 - DNA, 475 bp, Glycine max
  unsure at all n locations
catgcaagcttcccgggacattctccaagatgttcattagagaaggtgttgtgcatgcagtggaccaacttattntatcctcaaattcaaccaatatctctacacaggcatcttctgctgagaaggataatgattctatatctggagcatcatctcgctctangcgttatcggcgacggagtgggaattccaatcccgatggaaatcctttggacgatttgaaaaactccagtttcagtaaatgttggttcacctccaagttctgtggatatgccaacattaaatttcagtattcggctatctggtagtacagctgccaaagcttttaaagataaatactttccttcagatcctgcggctgctgaagtgggtattactgatgatcttttgcatctganaaatctttgcatgaagttaaatgctggtgatgatgaacaaaggactaatggaaaggcggaatctacaacttctggat

SEQ ID NO: 10163 - DNA, 423 bp, Glycine max
  unsure at all n locations
ntagccaactgagtactccattgaacatgggttctgaaagggtaataatgacctgctctgctcgaaaacattttctccattttcagttgcttggggttggaaaatgactcacggaaaatccaaaaaatttaaccaacagagttctgtgagctgcagtggagtatggtttgtaccctttaaggtattgacgaggcctgaatgcctgatggtttgtgcattgcattagacctctactaacaccccnttttctagaattcctatccactgtttgttttttgtttaagattatggtgtaactgtcaagagaatggagaaatgcacaaaagcttttattattgccatttaagattacacgtttgtagatgctataatacagactagttggatatcagtttaagtgctgtagaatgaactgngtcttga

SEQ ID NO: 10164 - DNA, 433 bp, Glycine max
  unsure at all n locations
agcttgtagcatattcaaacgaccataacgtttaactcggatgtctgattgaggcccgtaatatatcgagacactcgaaattgaaaacagaagctctgaggaaattcaaacgactataactttttactcggatgtccgattgtgtcccgtaatatatcgtgacgctcgaaattgacaacataaggtctgagcaaattcaaaccgacaataacttntactcagatgtccgantgaggtccgtaatatatcgagatgcttcaaattgaaaatagtagctcctagcaaattcaaaacataataaatctttactcggatgtccgattgagtcccgtactgtatcgagacgttcgaaattgagaacagacgctctgagcaaattcaaacgacactaactgttntctcggatgtacgattgtgtgctttagtatatcta

SEQ ID NO: 10165 - DNA, 219 bp, Glycine max
  unsure at all n locations
catctgtgcggtatttcacaccgcatatggtgcactctcagtacaatctgctctgatgccgcatagttaagccagccccgacacccgccaacacccgctgacgcgaaccccttgcggncgtatcgaatataaccttcnataatcgtatcctgatccacagtattacgcgatgcagctccgaccttcattcgtcagtccaccgatcaacacacacatacg

SEQ ID NO: 10166 - DNA, 473 bp, Glycine max
  unsure at all n locations
atggatgatagtaagaagaatgactttatgattatatatgttgtgaagaatgtgagaatacccaagtatctagacttggagtggttctctcagcaagggtttaacttccccaatctgctcgaagcacaggctctatccaagcttgtgtagatgaaaggaaccttttatccggagctggtgaaagtcttctacacatgttctcatgtcaatttagaaggtaatctcttttctacagttaatggagtagaaatgattatcgatgttgaagtttggaaggcagtagccaaactggacatgagtagagtccaaaagtttgaagaatctactaataggtacaacaagatgcaaactnttagaggtatgatccttgacccaaaaaggaacccgaggaatcgcctaggtgtagggtggttaactacagaagacagaatgctcgtgtagctcataacctatattctcactccaaggtcaag

SEQ ID NO: 10167 - DNA, 468 bp, Glycine max
  unsure at all n locations
tggctctcggccgacttagctaaaataatgcatcttgattacagaggggtagttgcttatcgaattatggagcgcttagcgatgacattgctgcaacgaattgagcttagctggcatgagtggtgcttagctcgattaaacccagtttaggccgcaaagaattgagcttagttgccatgagtggcgcttagccatagaatgcaatgcgcttatcgggatggtcatcgcttagcccaattcaaaccgaattgagatgggcttagctcagccttgggtagcttagtggaccaagtcagcctgagatgcaagggttgagtgctaagcgccagagactctctgcttagtgcatgaccaaagatgcacttagcgcgagtcttgcgcttagcgaaaggactacttttcagaanaaaatctctgagttattttttagtgccttcctcaagaaatttgacacccttatatgtatca

SEQ ID NO: 10168 - DNA, 466 bp, Glycine max
  unsure at all n locations
agcttgatgtggcatcttatgtctatgcacgacaaatctccgtgagggtcgatgttgcacatggacgattgagtgtcaagagcatctaccacttgattttcctctctaggaatgtggcgaaatgatatatcatcaaagaggcccatcgattccttgatgtacgcctgataaagcatcaacctatggtcatgggtctcccattcacctttcagctgatggatgacaaacgctgggtcttcacacactttgatcaacttgaccctaaagtctattgctgctcatatccctaaggtgcattcttcgaactctgccatattattngtaaaatcaaaacacaatctatccgagaaaggcatacattagttgtgtggagaaacccacactgccccaattccatgatctagtgcagtagacgcaccatcagagcatacagtccactcattcttgcttcatctcaccttttgct

SEQ ID NO: 10169 - DNA, 136 bp, Glycine max
tattctcttctccctttgccaaaaagaattggacaacgactaaccgcctgaattcttttcgtgtctctcttctccctttttcgcaagaacaaatgactaactgcctgaattcttttgtgtctcccttctccctttt

SEQ ID NO: 10170 - DNA, 408 bp, Glycine max
agcttgcaagctgtctctctcctaattgtatatatatatgttatttgaatgaaataaaaaaaagcaactgagggaaaaagtttctctcctcacatattcaaaacttcaagttggtaccagagcgggtcgtatccaccgccgtccgccgccgccgcgccgccgtccgccaccgtccgccgccgtccgccggccgtttcaaccggcgactacagggttttgtgtgcctcgaggagcgcaactcagcgcaactaaccgctgggccaggagcttccccacgcgccgtcacgcaccatcttcgtgcgcgccaaacgccggcgcgtgaccaccacgcgccgccctccccttgccggaaacgcgcgcgtatgcttccggccgtctcgtcgggctctcctgagtccatatcagtca

SEQ ID NO: 10171 - DNA, 443 bp, Glycine max
  unsure at all n locations
tatgagcagttccaaaagagagactctggccggnngtttgttgagctgctcgatgaccttgaactcgctttgctgaataatgcggaggaactcgcctgcctcctctagcaatacttctttcttgccacagccatcctttttctctgaaaaacctttcactgaaatattctcgtttggagcggcgatcactttgtcattntgttcttccgctatctttgccttccctttaacgcttgcgggttgtgtcggcaggtcagggggcgcgaacacacgaccgctgcgggtcacgctgctcagccccctgatattggttatcttggccgacaacgagctgatgtcagnggcttcttcctttcttttgcttggaggcgcatacctncacggaactgcgtggctggtttgtangggaatggaacaggtctaactactgaggngtactggag

SEQ ID NO: 10172 - DNA, 464 bp, Glycine max
  unsure at all n locations
agcttcttatccaaggctcatcttggtggtgaatctccttcttccatggcttattccctagtggatggcgcctcctctcacctcttctcctttgtcttccgcttcatctctatggtggaaaaccaccattaaaggacctcattgaagctcaaagatccagcctccatagaagctccacaagcaagcttccatcaagtggtatcaaagcacaagagcttcaagtaggtgctccttanacctccattaattttttgctttaccttctctttcattggtgtttcttcatttttctccatgtatctcctcacatgtttagtgctaaatgttgttaacatgattctttagaatttccaccgattaaactagctatagaagctagatttgattttctatggttcaacattcttgttcatgttcttgaaccatgagttgtggtgagtttaggttcctttgagttttggctt

SEQ ID NO: 10173 - DNA, 422 bp, Glycine max
  unsure at all n locations
cgcgtactgatgggtaccatgaggtgcttgctggggttgacccacgcgggtgttgaagagacggcatgggcatctnctttcttcctttntgcccctgttgccccgattcttttggcattcacgtttgtggaggaaacgtaatcaaactttcctcttttcaatccaacctcgattctttccccggcaaacaccagatccgcaaagctggacggcatgtacccactagcttctcatagtagaacactggcagagtgtctaccatcatggtgatcatctctctcttaaccatgggaggagctacttgtgccgccagatcccttcatcgctgcgcatattctttaaagggttcaccctctttcttgaacatattctgcagttgagtacggtcaggagccatatcagaatngtactgatactggctt

SEQ ID NO: 10174 - DNA, 571 bp, Glycine max
  unsure at all n locations
cgactccccaaccgacgatactnctttctgntaaaannnnnnnnnnactgtgacattgaactgttccctcgcgacccagagcaacctggcatcagcatggaacgccattgatggttcagctgccgactgccacccggacgaatccatagctctgaccacccgcatgccgaaatacaatgaagatgcttaaacacttatggttgctagtacacaatactacgtcagaacggcgctgaaattcaacgcctacaaccctatactactagaacggacccaatacaagggccaaaaaaaggataagaccatttctaacagttacacagaagagtgagtccaaccacagaccatgggcgcataaatctacactcaggttcatgagaaccctatggccttctgtataactctagcccaatcctattggagtcttctatccaataccctaggtgggtaagattgcatcgattcttatggtgtatgctgagacactaaacccctgatagctgatgacagtgaanactatatctgatcaacgcctctgtcgcagattctctcttgcgataactacacctag

SEQ ID NO: 10175 - DNA, 430 bp, Glycine max
agctatacagataagctagtctcagaaccaaaatgttaaatttcaatacaatttccacacaagctagatgaacctgtacactacccaagcttgaagctcaaaaactgtgctctcacttaacagattaagcttttggaacaagttcatgacaatttatgtctcataacaagaaactgtagattctgttgtagaaaatttaatattagttacttatttaagctttctattaactcttattttttttagcttatcagttccattttatcaaagacgcggtagtttccagttttatcacatttggaattttgataacttgctggaactccatccttggcaaaagataatgttcatatatgaacacgaaatacagagatcataatgaacagaaattgcaaattaatacatagtacactcttaaatccagtacacc

SEQ ID NO: 10176 - DNA, 424 bp, Glycine max
cgctgctccactggcagaagagacaccttgaaggatgacaacattggtagcatgactatctaaaagattcatcaattggctatattgctgggtagtaagctgaaactagcaacccgagtcaccagaggaaggttgtgagtgagacatatcaacagttacttgttgagcaaccttgtgtggtggttcataagaagaagaatgtttctttgcttttgaggaaaaaccattcctcttataattcgcaggataaccatgtaacttgaagcaacgatcctgagtatgacccatcataccacaatgagcacacaaggtgcgattcttggaagatcctttgaagcaattttcaggatgattgcatgcaacagaagaagtcttcaatgcaaaagcatgtgatacttcactagttgaggtggaagcaccaact

SEQ ID NO: 10177 - DNA, 460 bp, Glycine max
  unsure at all n locations
agctntgtgtggagcttcaatggagaatgagggagaagaaaggcaacgtgagggagagggagagagaaggcttctgcaatgttttctgctgagtgaagagagagagagttgctttttggtttttaaaaggctttttcctcttttcttattattttattcaagctctgccacatgtccctatttgattggagcaaaaagggcccactttctcttttgactgtgacccatactcagtcacaaaagtgagaaaaatctgacctttgaaacgctaaaatcctgcctcggtttgcgtgccatttctctggttccagtttctcgtgtttctctgcgtccatcggggccagtnttcgaaagcaagcaatatgtatatcanaacgctcagaataaaaccccgagcgtggttcagaggttggtttcgttaaattctaagtcacacgcaaaacgatgaattttaactaat

SEQ ID NO: 10178 - DNA, 446 bp, Glycine max
taaagtatgcccgagtcattcatccctatgagatgttgttgaagtattggcgatcagaattgccattccttggattatagggttgaaccaagctcatgcttttacaaaaaaggttcatcaagtcaagttgaaatatggaagtaaccgtcttgcaaaattggggcaaaagatgaatcgagtcacatcactgcttcgtctactgccaaacatatttaggattattgatgcccttgttacttccagtttcaccttgacaaagatgtcatggaccatgttgaaaatctaaattgattcaaccccatatcttgtgtaaaaattcgcaatacttcaactgtacatcattcgcatgcatccatgcttttcattggttgcattgctcgtttgcattctttcttgaaaaataaaataaaatgaacttaatcatttgtataaaaaagaaagggaca

SEQ ID NO: 10179 - DNA, 441 bp, Glycine max
  unsure at all n locations
agcttccttgagaagattcctaaagaagctagagcttagctacacacacccnctataatagctaagctcacccccatgccaaaatacatgaaaatatataaaaaaaaaaagtccctattacagagactactcaaaatgccctgaaatacaaggctaaaaccctatactactagaatggccaaaatacaaggcccaaaagaaggaaaagccaattctaacatttacaaagaagagtgaatccaaccttgacccatgggcttaaaaatctaccctaaggttcatgagaaccctagggccttctttagtagctctagcccaatcctcttggagtcttctatccaatacccttggggggtaggattgcatcgattcttatggtgtctcctgagatactaaaccctgattcctcatgatagtttagcctaatcctgatcaagcatc

SEQ ID NO: 10180 - DNA, 479 bp, Glycine max
  unsure at all n locations
aggagcgtgcttgnatgaacctctttaggccttaactagctgctcaataccggagggtaactccggatgtggtggactggaagaggaccattgcctaggtgacatctggtaaataactcaatggagatagtttggtgtggccatgactatagttctaataccacccatgatattaaaagtccctttttgtcaacctaaattcagtttatttaaaaaaaattcagtccccttgtccctaatttttatctcatggtttccaactttttctctccactctctcttcattatctgattttatttcaatgattcaactcctccataacctgtcctgacatgttggaatttccttaacctagttagattgaagacaaggaatatcactattgaggcataatatttttcctacatatagttcattctatacttcaaattaaaatttgaaaactcttgaggctgctagttagaccaccgacaaaatg

SEQ ID NO: 10181 - DNA, 471 bp, Glycine max
  unsure at all n locations
tagtgaaaatgagttgtgtataagtgagactcgttgttgtttgtgaatgatctaatgttgttntatttctttgttttacatgtcttttcaaataaaagaaagaaatntttttgatttaattacacttttagcctctcaacttagcataattgaaatttgaagatcaaaatcacgaaattgtaaatctagatttgaatgtagaattagacctatttttgtttaaaatattcaaatgaacgctaagttctaacaaaaagaaaaatattactcctccctaagatttcatttcatctgtattgcatattaattattttttgactaaaatattttaaactattttctctcttctctaatggagattggaaaaagatgaatagattctcaataaacttaagaatatatttgaaaaaatattaacagtatagtcaaaattaatggtaataaataattaacttttctaataagcataaa

SEQ ID NO: 10182 - DNA, 315 bp, Glycine max
aagcttaagggtaacacccatgatagctttgatcaacctaattcttttggctgtgtgtcacaaagcttcttggtcatggtgcttgagcaacgactgggagttccaaaaatgtttttgccaagggtgtgtgctatttcacatctctatggctgagtggagattctactttgaacgaaagcttgaggatcttgcacatgactggcctaagcatgctagtggggacattgcattggccacattctggcctttactattatgtgtacatgtggagggagaagtatgaatagttagctattgtctcaagtactataaatg

SEQ ID NO: 10183 - DNA, 437 bp, Glycine max
  unsure at all n locations
aaccgccgagccagatggaaaaccaaacaattggagagagattatggtgtcctcaaagccaattatgatgctcttaagcttaactttggcaccctcaatcaggacaacgaagccttacgaaagcaggtagaataataatacaacatagtataatatctagaagagttgattttgagtctaattaatttaaaataaaaagtataggtgaattttgagtgagaaaacaaacttcatgcctgaatttcctattannattttttctgggtcgtgcctttcaatctagaaactatgctcgatggatctaacctcatgcttgaaatgatcagtagttttctaattaagagctntcttctcttaatctaaccttcttttaataataaagaanaactcttgttgagaaaacgattatctaacaagaaatatttatatttgattat

SEQ ID NO: 10184 - DNA, 438 bp, Glycine max
  unsure at all n locations
caatttggtagcattaataatcaatatctatcgacatcccatggtatgtttattaatgctatatatatggatgcaaattgtaacgtacgaggaattggacaatctctttgttcattttgttactctttttaatttctttttgcgtttacccttttgaaagaaaactttatttttgtttatttattcatttaaaagatgaagataacattatctcttttcaattacgtccttatttttatctcatccttaaacactttacatatatttattataaataagagagaaataaaaattaatagagatcatattaagaagttaaatataattcaagaagactattaatatctatctttacgtacctgataaggaactaaaagtaaaaaacatttataagagagtgtngtaaattaatgtacttctataataatctctaatgca

SEQ ID NO: 10185 - DNA, 469 bp, Glycine max
  unsure at all n locations
agctngactagacgagttgattntagccttagtttcaccttagttattagtcaattcggttaagaatgagaaatcccaaagagaaaatgtccagttgattntccgctttattttactaaaaaaggatgtttttttgattattatattattntttacctctttttgatttccaatgtggttacggcacgaacgaacggtcggaattcattttaaccgaagttaacggataatacaattcatacgatcggtggaaacttatttatttttaggttaagcaagaaatggcttaagtaaaatggcttaagcacgtcaaaagggggtataataagtaaatgaaacaagaatagaaatacacaaaacacaatgtggaccaccatgggtacatagaatgaatcgaanagcttggttcgaggtacttacccgttgaagatcgaagaacgaatgaagaacgtcgaagaacggttgaaac

SEQ ID NO: 10186 - DNA, 468 bp, Glycine max
  unsure at all n locations
gcggattggtcttcgccggtgaaagggatcaaaatggattggaaaatggaaaatatgattatcctactttgatgaatgtaaaactggngcaatgaagaggatgagaatgagggagaaacccttgctatgactgccattcctacatggtcaaaattgccatcagcccaacaatgtcattactcagccaataatagtccctctcacccaatcatccacaaaggccattcccaatcatccacaatgcctgcccgctgcacatctggtgccaaaacaccaaccaaaaaggaatttcgtagcaaaaagcctataggattcaccccanattccggtgtcatatgctaacttngctccatatctacttgataatgcaatggtagccatagcccttgccaggggtcctcaaccttcatttatncgangatacgactcgaacgcaacacatgcatatcatggagaagttctgggaca

SEQ ID NO: 10187 - DNA, 353 bp, Glycine max
atttgactctgcagctctcttgagatactgtatttcttattttccttgactttttgacttcttttttgaccacaatgccactgtattttaagtttggccatttatctttagttaaaatatgttgttatccctccccttgccaaccaaaaaggtaaaaaagcataatattaatcctattgccaagtcctgtgctactgcacgtgttatgtgtgagtgataaatgttacctctcctttcagtcatctaccttctttgaaaacataacaatttacgctgttgaggaatgtggctaagtgtttgaaacttgctcttattatgttcagagaagagtccagacttaaagaagatattat

SEQ ID NO: 10188 - DNA, 461 bp, Glycine max
  unsure at all n locations
tagacttcaacatacatcttgcagttaaacattctattttcttagacaaactgaacagcagcacaggccagatacttctcatattgccactaatcacaatcattgttacaattacgcattagcaataagatcaacatttgtttaatctaacccgcccccaaaacaacatttgatataataaaattgcaagggtctccatcccaaaatttatgtagctcaacagcaaataaccaatcaaaaagataccatatgggtagctcaaaggtctattaataagagagcgatgtcaagcaaaacattagagtccatgtgtgactgaactgggaaaaataaaacaatagaagattntagcacgtctaaagaaaactagatttgaagtttctttactacagaaatcgtaaatntaaatgataccatatgggtagctcaacagcaaataaccaatcaaaaagataccatat

SEQ ID NO: 10189 - DNA, 403 bp, Glycine max
agcttatctccttgagaagctttcttaagaagattcctaaagaagctagagcttagctacacatacctctttaatagctaagctcacctccttgagatgagaagctagagcttagctacacaccccctataatagctaagctcacccccatgacaaaatacatgaaaatacaaaaaaaaatccctactacaaagactactcaaaatgcctcgaaatacaagctaaaaccctatactactagaatggcaaaatacaaggcccaaacaaaggaaaaaactattttaatatttacaaagataagcgggctcatacttagcccatgggctcaaaatctatcctaaggctcatgagaaccctagggccttcccttggatctctggtccaatctacttggagtcttata

SEQ ID NO: 10190 - DNA, 374 bp, Glycine max
tcgcatggagctacatcaaataaaacaccaaatagacttagtcccaggaacaagccttcctaataggctaacttataggactaatccacaagagaccaaggagattgaatcccaagttaaggaattgttggagaagggttgtgtccaatagagccttagtccttgtgttgtgcctgtgttgttggtgcccaagaaggatggttagtggagaatgtgtacagattgtacggccatcaacaacataactgtgaagtataggcaccccattcctaggctcgatgatatgcttgacgagttgcatggtgcacacatattttccacaattgatcttaaaagtggttatcaccaaataacgatgagagaaggtgatgagt

SEQ ID NO: 10191 - DNA, 191 bp, Glycine max
  unsure at all n locations
agctnggaaacaagangaagctatccgagtgacttctaactgtgaggatagatatgcatggcattgcaactcgaaatgaatatttttacaacaactacattatttttaacatgacattcacacagattctgatcttatatagccaatccaatgcgcccgatcttttgttgtagtgctccatgtttcataga

SEQ ID NO: 10192 - DNA, 76 bp, Glycine max
  unsure at all n locations
tagagccataatcntgactcaccatatacctctactcaaggtgttaatgccgatgcttaccctcggtagtcacata

SEQ ID NO: 10193 - DNA, 473 bp, Glycine max
  unsure at all n locations
agctntatatttgtacccaacttcccatttagagtggtgtcttgtgagatctattggtgctngtccttggccatttaattgtcagaatatgaatatggctttagtttcatccttcttgtactcaaatgctagaaagagagttgtgaactatttgctgagatgtgaatcattcgggcttctaactttatatttttatgctatgatctctcagtggaagcaatgctaaagctgaagaccaatctctggaagcatggtaaatttgtcaataggaatacaccttttctctctcctgtaagcatattgctgctaggcatttttaaggttgataatgtacgatacaaatgggcaggcttgagcggaaactctctgagcaaaatatgggcgctcctcctagctatgaagaagctgtcagtgaatctcgcagccctcgtcacagtgaaaggtatgaacttttatactacagaaagcactta

SEQ ID NO: 10194 - DNA, 461 bp, Glycine max
ctcattacatggagactgaaaaagagagaataagctttattagtatttggtttcttttcagctcctactactttgatagctacgcctgtgacactgaaaaggattgagaaaacacgcttcttatttttatttatttatatctataagatatgagatagagagagctgcgattactattactattgagacatccaatacttgctcatctcaaagccattcctgccatagggatagtcttcaattgtgttctcaatctcagactgcgtgttcatcacaaaagggccatgctgaacaactggctcattaagtggttggcctccaatcagaacaaatctcaaaggctgtgaagagttattccatacgctgaggccatcaccttgagtcaaaacaaggacatggtgtggcacagttggggatgatgttggagacccgaacacttcttcaccttcaattatataaac

SEQ ID NO: 10195 - DNA, 457 bp, Glycine max
  unsure at all n locations
agcttgtangattatggtgtactcatcacatgtgtgtactaagtggcggccgggcgatggtgcacaacaagttttccacatccacaatgcgcgcataaatccaccatcccctgttgcccacctacaactgagctcacgtactcccacgtagcccatatcctcgtttctctcaacaccgggtccccatcaatccttccaagcttccacaacatccaaacacaacaactattaaacagaacaagctatcacagccaagcaaaacatagcaaaggcagaaaactctgctcaacacaccaaccaaaatcacagcttttctcacttaaagaccccagtaacaattcctttgttgcgttcattaaccgctggataactccaaactttactgcagtctatgtacataagcctcattggaccgtgggattacttcaaacattagaactatttacattctcttttc

SEQ ID NO: 10196 - DNA, 461 bp, Glycine max
  unsure at all n locations
ctgatcctcataaatatgaaaggtaaagagctctcatatccggtgaattttgatatagcgaagaagctttatgcttgagaaaaaagctcgctagattgaaaacccaaaagggctatttaggcaaaaggtagagcttaaaaaattaggttgaaaacccgagagggcgatctatgaaaagttggagtaacctgccaagttgaaaggagcatcttgagaaggaagacgtggaacaagaaattatggcaaatgtgtgttaaaaatcatctttctcttaagtctattgtcgaccaatcaaagctactaacatgtgtactagcattaatattcggaaagcgtcacttcatcaacaaaatcatccacttatgttgtcattctctacatctatcgcacatattattattttctcttttctttggtggattatccctataactatntcaccttatcttgaataaaatcat

SEQ ID NO: 10197 - DNA, 453 bp, Glycine max
  unsure at all n locations
agcttattttctttcttataatttcatggcattgtattattttggaagattgagtggatttattcttgattctattgtcttatatgttttgtgtcaatctatttagcatttcccctctttaatctattntattgtcttccattaatggttttagagtcaaacaaatgacaatagaattgctaatattggtgcaggtgcatccatatacttaccgaaatgagttcccaattttgcacttctacttcaatcaagatttgtatatcaagtatgactactggatcgacaagataggcgttggtggtctcattacagacttcactagtagtcttcagcattattatgaatggacctctaaccataaagatgatgattcctttttaaaagtcttgattcttttctgcatcattattcttctatgctgaagatgggattgaattcattccaacatcaatc

SEQ ID NO: 10198 - DNA, 467 bp, Glycine max
  unsure at all n locations
tcaagaagagtagaatgcanactcaattgtagtagatgcaacctaccaaacccatttggacaagattgatggggttgagatgatatggagagaaaaaaactccattcgtcacacaaccaattcagagagtagcaaacactaacactcagctacatccctttgttgatgggatcacagaggcacacctaaatggaggacgttgactattgattgttatgatagactccgggacccggatgaacatgtggatgcattcgttacacaaatgagtttgtttacaaatagtggcacaatcatgtgttgagaattcccaataatgttgaaagggacaacacatcattaatatactcacctttcgagaaactccattgactcatttgtgactcttagtatgcattttagagtgcagtacacaacaattagatcacatcacctgacagcagtggcactcactaacattcgacaag

SEQ ID NO: 10199 - DNA, 466 bp, Glycine max
  unsure at all n locations
agcttcgttggtgccctgngttntgttatattgatgatttgtgatatcaatcaacatgttcaattntgtggttttatttatttatcttaaatatattttttatagttnttttttcttttccttttttttgctgaatgttcaaatttggtacttttgaatccatggtccatgatgctagctagctacctcgagttttgaaatgcagtttgatattgtgatattattgcccccaaccgggaaaagtagtggttcactttattgagctgagttttcaagtgcttatggaagtggtgttaggttttatatgttctagcagcagtgggactgggaatggagctgctaatcgcttcttgatagtgtgaataagtaataagtagtgttttatgtgttcatatcattttgtatttcatttccttgtagatctgtccttccctcttttaaagaacatcgactatgtgaggaatgc

SEQ ID NO: 10200 - DNA, 445 bp, Glycine max
  unsure at all n locations
ggctcacaaaatttcaaggtcattggatatcatttaatggtagctgtagttcaaacctacattgttacttgcataagaagacaactagttgtgtgcatgctgaatgtagtgtatgactagaggcaatccatctgacttacaatcctttgaacctaatatagataggacatttcatagattagttagacatcattttataccttttgagcatcctgagcattctgttactggagagtatgtgcattctgttattggagattttgaacatcttgattttgagcattataattntgaacattttgattgtgaacattntgagaacatggcacaacctccacctcgtgagaggactctaagggaaatggttgcacctgatttcacctacgaaagcctatgcatncagtaccctgatgaggatgtcccatatgttcttaanactggactg

SEQ ID NO: 10201 - DNA, 470 bp, Glycine max
  unsure at all n locations
agctntaactatattngatattggatttaccatcatattcaaatgcgaggctatgagtgtggctattatgtcatgcaatggatgtggaccacaatcatgtgggtttgaagaatgaatgaaacatggtgtactagtttactttaacaagtttcaattattagacttttgtcgcaaccaacctcacgatgggacaacaaaggaaaatagaagacacatcttctaaaaaagaaaatgagtgggagtcgccaccaatgtttatttgaggaaaatgttagaaagaaaccaaaacaagaggtctacgaattttgaaaataagggttcgggagttgtttacgcatggggaggatattagcacccgatgcgccctcacaagggatgggcagcctttaatcgagtgtgcacaacgtgacttcaaaattatttattttcccaagagttgtgaaatggttttattacattatcttattggt

SEQ ID NO: 10202 - DNA, 458 bp, Glycine max
cgcttctacagaaatatctttagtgctatataactcactggtttaattgactaccgcatttgtgtaatcgattacataagtcttcgagaagttatagatagatctaatgtagctccatgtagagcttgtagtccttggatcttcttcatcaatggagacctttgcttcttgaagatcaatggcagcgaaatggaggaggaggaggaaaggtgattggagacgccacttcaaggagaagatgagttaagaacaagctcaccaccataggaaaccatggataatagcttgaaggtaggagatgatgactagaggaagagggagagagggagaatgaggtctgaactttgaagtctaatttctcaaatgatcaaagttgaaaaatgcacatacaaggcctttatttatagccacacaaaattggagggaagattgaatttctattcaaatttcacttgaat

SEQ ID NO: 10203 - DNA, 390 bp, Glycine max
ttaacaaggccttcatataataatattgcatgccaatgcaggcacaacagcagggtcaagcacagcagcagcaggcatccgcagatgcgccgccaccacctctagggtagctaccatccctggtgttcatcttcgctcacctacggaggatgtaactacagatgcacgcatatatgcaacatgtgaccgaccaacatatagctaatacatagggtcaggtgcagttgcatggcctatagataaggccaatgttcagacaggggcagaacccgcaggactaccggagatggagatggagcacaagatgatgatgacatggccgatgtgatggacttcattctttgaggagatagagtcgcttggatgggatcgcctataactgtgaactag

SEQ ID NO: 10204 - DNA, 437 bp, Glycine max
gcccaatagaatgattcaggagtagacatcaagaagaatcaagattcaagagaagatgaattctagattcacgagaagaaatcgagaagcaacacgtcaagacttaacaagggaagtattgaaaaggatttttctaaaaccaaacatagcacaattttggtttaccaaagagttttctcacatttttctaaggtaccagagtatttactctctggtgatcgaccaccagtttcctgtaattgattaccaatgataaaatttgatttcaaaaagatcttaactaagattgcaacgttccaaatgagtcttaaatggtgtatctgattacaatatattggtaatcgattacgagtgtatctgaacattgaaattcacattcaattgtgaagagtcacatcttttcatataatgcattgtgtaatcgagtacatgattat

SEQ ID NO: 10205 - DNA, 450 bp, Glycine max
  unsure at all n locations
agcttgcatgatttacatctcccctttctcaagctaattcttcttgatatcatcaaagtcttcatgatttacanttctcccctttntgatgatgacaaccacctgtaggttaggagcaacaacaaagaataaatatctatttgcatatagtttactctcccttggttttgcaatgattgcttatatgagacagttgaagacttcatatctttcatatgtgtcgcaacgtgcctttctcgggcgagcgatggcgaggcttacgggtgcgctttccaaaggaggagagatgcgcggagtcgccaccaacgtttatttgtggaaaacgtcgggaaaaccgaatgaaaccggtcaaaatgaaaattctaagttcgagagttgtatttacgcttgaggaaggtattagcacctctcacgtctgtctcacaggacaacagcttattttttagaatt

SEQ ID NO: 10206 - DNA, 108 bp, Glycine max
tctttttttccatacatgaacaagagccttcgatatatctcttggatcaaaaactcattcctatggtattattaatatgacacccttaacatagcactaccatattat

SEQ ID NO: 10207 - DNA, 472 bp, Glycine max
tacccatcacatgtggtactaggtggcggtcgggcgatggtgcacaacaagctttccacatccacaatgcgcgcagaaacccaccatcccctgttgcccacctccaactgagctcacgtactcccacgtagcccatatcctcgtttctctcaacaccgggtccccatcaatcctctcaagcttgcacaacatccaagcgaaacaaccattcaacagcataagctatcacaaccaagaagaacagagcaaaggcagataactctgctcaacacatcaaccaaaatcacagcttttctcacgtaaagaccacagtaacaattccttcgatccaattcgttaaccgggggatcgactccaaaattttactggaagtgtatagtgcataagcctacattctgaccgttgggatctactagcatacatccagaactcattctacattactctgtccacaaccagcagatacatggat

SEQ ID NO: 10208 - DNA, 476 bp, Glycine max
  unsure at all n locations
ngctctanattacattgatgttggtatttattgtaggaggttgtatgccatttttgttttaagggtagcatttcttggtaaaactaactttccaaatgtttgccttcgcaggaaatggccccgaggaagcttgtctcaaagaggtccaggaaggacaaggcggccgaaggaactagttccgctcctgagtatgacagtcaccgctttaggagcgctgtacaccagcagcgcttcgaggccatcaaggggtggtcgtttctccgggagcgacgcgtccagctcagggacgacgagtatactgatttcctggaggaaatagggcgccggcggtggacatcactggttactcccatggccaagttcgatccagaaatagtccttgagttttatgccaatgcttggccaacagaggagggcgtgcgtgacatgagatcctgngtaagggtttagtggatcccgtttgatgccgacactat

SEQ ID NO: 10209 - DNA, 485 bp, Glycine max
  unsure at all n locations
agctntntagcttataatccaacaccataattggtatgcaacanaaagggaactggctcaaaatttctagtagaaaagaatttcccaaggtctttcttagtaattgggtaacaactcacattgatattcccagttaacaatttttttattttttttacaaccccattgattaatacaattctctttgcagaagaataatttcttgattggctaatgtaggagtctcatcacatattggtattgttgacaaaaagaaaattaatcttatccccaacaaaattcaaatgttgctaacgaatgtctatctttattaacaattcatttgtcactagtacaaagtcactgcgaattaataatcttcagccttatagggaactaagcttataagacaccaattacaagtattaaagctactgatcttagttaaattaagtgaaagtctgtgccaaaatgatcaacagatggcaccccaaaatccatattca

SEQ ID NO: 10210 - DNA, 400 bp, Glycine max
  unsure at all n locations
ctaagcttccatccgctaactacaaaagatgtaaactcaaaactaatatttgtttgtattaatcaaaatatttgaagaatctgattcgtcttataactcaaacataatctattcctacccaatttcatctttagaagaatcacaggtgaaattcatgtgtaagagtgattaatttttgtataagcatccaatttttaagataaaattttaatattctcaccaatgttgtaaaaattgacccgatcactaacctaattaaagtactggggtcagagtatcaaagtcagatntaataatatggttctcaattttcatatttcaagagacaaaataacgaatgcctactagaaatcaaataatataggaaattaaacaaaatattgtgacaaattattttttt

SEQ ID NO: 10211 - DNA, 481 bp, Glycine max
  unsure at all n locations
agcttctcaagacagcttacatcatgtgatatcatagcaccagatcttcaagtatgtgctccttaaacctctatttatttttagctttacctttccatccattggtgtttcttcatttttctccgtgtatctcctcacatgtcttgggctgaatgttgttaacatgatttttttgaatttccaccgattgaacttgctatagaagctagatctgattttctactggacaaatttcctgttcttgttcttgaaccatgaattgtgttgagtttaggttcctctgagttttgtattgctatcttttgtggctgaaacctgaaccatataattcttacaaaaacattcaagtagaagaaaatctccaaaatctagagtggcatgttcacctatcatagttntgtcatagaggtcatgtctagtcttgaaacttgtcacataagattccttatgtcgtgctgaatttatcttttctttttctttg

SEQ ID NO: 10212 - DNA, 485 bp, Glycine max
  unsure at all n locations
actcaagcttatccttatggctggcctccggacttcactccccgtgccgctccggaagatgtgagccaagcccctacctttgaggggcaacttcctccttatgccgattaccccctgcaagaagacgacgaaggagatacccatctaggccctttgcttcccctcaaggatccatccccccatgaattacctcaaccaaacatagtccgccatgtcccatcttcacccgcacccgtaaaagaatcttttcccttcacagaagataagggaaagattgatgcgcttgaagagaggctaagagcagtagagggcctcggcaattacccgttctcagatttagtggacctatgtctcgtgcctaacatcgtcatccctcccaagttcaaagtaccggatttcgataagtacaaagggacgacatgtccgaaagggcatcttcggatgtattgccgaaagatggnggcgtattctgcggacgaaaagct

SEQ ID NO: 10213 - DNA, 449 bp, Glycine max
  unsure at all n locations
agctntcctacaagtcctaattgtacatttanactatgatcaactcactntagactccaatttacactaaccccaaatttagcttttcaaaccctcaaaacctcacacttttccactcatatcactaccattttcacatttaaccctaggttaactctcccgatcatctctaccagttttctaccaacaatgtcagcacacaaacatcacaaagcatcatcatataaaccctaaaacagaatgggtagctttactcacatcaaacatgtcaagtttagcatgctttcaacaaattctttcacaaataactaccataaggcataaacctagtagaactacccatcatatctcccagaaacccaatacccacgaatttcatgtgaaaacaagtccacccatacctgaaagtaggcaatatatatatcanaacactcataatgaaaccctga

SEQ ID NO: 10214 - DNA, 416 bp, Glycine max
  unsure at all n locations
cgcttgagccacaatcctgacacaccatanaccttgaccctaggtgagaatgtcaattcttaccctcggaagcaaaaaaaaaggggagagggaaaatttccaatcaaagacgaagcaaaacacgagagaaggaaaatttccaatcacaggaaaaaaagagaggaaagggaattcccaatcaaagagtgggagaaagcaaaaagaaaagaaagaaaattctcaatcaaagaatgggagaaagaaaaagagaagaagaaagggaagacagttcccgatcaaaaaaaaaaataatatgcagaaaggtctttggaccggacaatatctgaacaatacagaattgtcaccaaatgaataaaaagaaggaaagggaaccatgacctaaaatggtcttccccctatagttgccaggcaaaatc

SEQ ID NO: 10215 - DNA, 470 bp, Glycine max
  unsure at all n locations
agctatcttgagaaaacttccttgagaagcttctttgaganaacttccttgagaagctagagcttagctacacacacccctctcataactaagctcacctccttgagaagcttcattaagaagattcctaaagaagctagagcttagctacacatacctctctaatagctaagctcacctccttgagatgagaagctagagcttagctacacaccccctataatagctaagctcacccccatgacaagaaacatgataataaaaaaaaaagtccttattacaaagacaactcanaatgccccgaaatacaaggctaaaaccctatactactagaatggccaaaatacaaggccttgacgaaggataaacctattctaatatttacaaagataagcgggctcatacttagcccatgggctcgaaatctaccctaaggctcatgaagagttatgtccatttgaatttctcga

SEQ ID NO: 10216 - DNA, 462 bp, Glycine max
  unsure at all n locations
ntctatctcttctntaaataaagatttggtggtagagaccccaactagtggttctgtgttaacttctaatgtgtgtttggattgtcctgtggaagtttctggtaaaataattatgattgatctgatttgtttgcctttgagccaaattgatgttattctaggaatggactggttatcttccaaccatgtcttgttaaactattttgataaaactatggtgtttgatggttttggagtgagtaaggatatgatgttcatctctaccaaccaagttgtgtgatgaggacatgaccaagagcaagggcaaggatccacttgaaggacttggaggacctatgacaagggctagagcaaggaaatccaagaaagctcttcaacaagtgttgtccatactatttgaatacaagcccaagtttcaaggagaaaagtccaacgttgtgagttgatgagaatcctgaaact

SEQ ID NO: 10217 - DNA, 475 bp, Glycine max
  unsure at all n locations
agcnttctcagctttgtcttcttcactctntcatgaactcatcatcatcttcatccaatggatccttctccacttcatcatctgcataatctgagtcagactcttcaccaggaattattctgccaatagacttatttgaaactttccttgactgtgcaccacgattntgctcattccctttatccttgggttttacgtcgatggctttaccagaaagtgacgatgtcacagcattgtttagcttttcaacttcaggtagaaccatagaattcatgaaagcatccaatggatctatttcctcatcttcaggagcaccagcaggtccatcctgtaaatcagatgcaattgtcccattaacagtatctaccaccatcacatccttaggctccttatcagcaggtttgtcatcttcatcaacatccatacctgtctgcttcccagtacctggtccttcttcatcatcagaatccccttc

SEQ ID NO: 10218 - DNA, 468 bp, Glycine max
  unsure at all n locations
tanacctgcagcattgcattagtaaatagttggcacatgtaataatgtaagatatgatacacttctggcagtagtattagaactacgaattaatattgctgaaaataatcatgttgttgaagatactcctcagcgtcactttgttggatggagtcgtacaaaaataaatttgattaataaaattcgaacatctaattaataaataaataaacttcgattaaaaaaagggcttttntgtcctttaaatatatatttgacttaactactcattttaccatcatcatccaactatatattatcatttcacaaatactatcactcaaagttttttttttatgaattntacctgtctaattaattnttaaatttaacaattgtatcacctaagttctttaagttnttttatgttttaatttcttttatcatcccgtgggtaataaaatgataattcttttctagtgacacgtc

SEQ ID NO: 10219 - DNA, 431 bp, Glycine max
  unsure at all n locations
agcttcaccttctggtcctcctcatagatgtggtatgagacaacatgctctattntcatctcccactccaagtaggccttcggatcattctttcctttaaatggaggaatgtagagtttaataccatcaattctgttttgtctaggaacaccatcataccctctcctcctcctttcttcttcattatgatctctattctgcatttgatccatcctctcatggaacgcatcatcttgttgttcattaacctctccatatgatgcatcaaagcttgcatttggaattgcgaaagccccactccatcattaggattagtacctgacatctcaaacaaacaaatcaaacgtaacaagacaattatagttgctgtttgaatacctcacccactcaagtgtatcacacaatcatggcttttttataatgaaacactc

SEQ ID NO: 10220 - DNA, 449 bp, Glycine max
  unsure at all n locations
tcaccttctggtcctcctcatagttgctgcatgagataacatggtctattttcatctcccactccaagtaagcctccggatcattctttcctttaaatggaggaatgttgagtttaataccatcaattcggctttgtctaagaacaccatcattccctcttctcctcctttcttcttcattatgatctctattctccatttgatccaacctctcatggagccgcatcatctcgctgcttattaacctctccaaatgttgcatcaacgcttgcatttggaattgcgaaagccccactccatcattaggattagcacctgacatctanacaaacaactcaaacgtaacaagacaattatagttgctgtttgaatacctcacccactcaagtgtatcacacaattatggcttttctctaatgaaacactcttgcctcttaccactctaattc

SEQ ID NO: 10221 - DNA, 449 bp, Glycine max
  unsure at all n locations
agctntgagcanattcaaacgacaatataattttactcggatgtctgattgagtcccgtaatatatcaagacgctcgaaattgaataccgaagctctgagcaaattcaaacgacaataactttttgctcggatgtctgattgagtcctgtaatatatcgagacgctcgaaattgaataccgaagctctgagcaaattcaaacgacaatcactttttactaggatggctgattgagttcactaatatatcgaaacgctcgaaattgaatgttgacgctctgagcaaattcaaacgacgataactttttactcggatgtctgattgagtccatgaatatattgagacgctcgaaattgaataccgaatctctgagcaaattcaaacgacaataactttttactcggatgtccgattgggcctcgtaatatatcgcgacgctccaaattgaa

SEQ ID NO: 10222 - DNA, 415 bp, Glycine max
  unsure at all n locations
tcaacattcaatatcgagcgtttcgatatattacgggactgaatcagacatccgagtaaaaagttattgtcgttttaatttgcttagagcttcggtattgcatttcgagcgtctcgatatattacgggattcaatcagacatcagagtaaatagttattatcgttttaacttgcttagagcttcgataatcaatttcgagcgtctcgatatattacgggactcantcagacaaccgagtaaaaagttattgtcgtttgaatatgctcaaagcttcggtattcaatttcgagcgtctcgacatattacgggactcaatttgacatccgagtaaaacgttattgtcgtttgagttttctcagagcttcggtatgcaatttcgagcgtctcgatatatttcgggactcaatcagacat

SEQ ID NO: 10223 - DNA, 395 bp, Glycine max
agcttccattgttcaatttcgagcgtctcgatatattatgcgcctgaatcggtccttcgagttaagacgtatgaccatttgaatttgtcgagagctctcgttgttcaatttcgagcgtctcgatatattatgcgcctgaatcggacctccgagtgaatagatatgaccatttgaatttgtcgagagcttccgttcgttaattttgagcgtctggatatatcatgcgccagaatccgactccgagggaatagctatgatcaattgaattgtcaagagcttcattggtcatgtcgagcgtctgatatattaagccctgaatctgcctccgaggaatagtaccaccatttgaatttctcagagcttccgttgttaatctcgagatcttgatatttatg

SEQ ID NO: 10224 - DNA, 454 bp, Glycine max
  unsure at all n locations
ctcgagaaattcannatgtcataactnttcactcggaggtccgattcaggcgcataatatatcgacacccccgaaattgaacaatggaagctctcgagaaattcaaattgtcataacttttcactcagaggacccattcaggcgcataatatatcaagacgctcgaaattgaacaacggaagctctcgagaaattcaaatggtcattacttttcactcggaggtccgattcaagcgcatcacatatagagacgctcggaattgaacaacggaagctctcgagaaattcaaatggtcatagcttttcactcggaggtccgattcacgcgcataatatatcgagacgctcgaaattgagcaacggaagctgtcgagaaattcaaatggtcataactnttcactcggagatccgattcaggcgcataatatatncagacgctcgaaattgacaacgg

SEQ ID NO: 10225 - DNA, 587 bp, Glycine max
  unsure at all n locations
cttactactaccttcggtcggatcgtgatggtaacaatttctatangagtaaactacagtgcgcctctgaacttgataccctctnanaaccncgtatatcttcctcatcactcctgcatcgcaactcaggatactcttactcttacttcatcctgcggttggataggaaccaggtctcactggatgccctcaaattacatctcatgatacaaatgccaatatgatgagttggtaactttatgccacgactggcatgcatgtaccgacgcggactctccagtgtcacatcttaagtgccacgcgatgctatggctcagcatttttttcccatatatttgaccaacctaatgtctccagaatatgtccttttatcaattcgtgcgttcatccgaggccatctctggcgttcggtaagatttcacaagcatctctctctacgtcgggacagcgtttccacaacattgctatgaacagcgaattattcacataataagcactacaccatttaattctttaacacgtcatgattgagcaaacagctcattgtcgacctcaccacccgtcttagcagcgtcttgtccgatacg

SEQ ID NO: 10226 - DNA, 321 bp, Glycine max
  unsure at all n locations
tatgcccaagtatacccggaaaaagacgctagaggaagggtgatcgactctttacaccaagaggcaaccatgtggatggatcgcgttgctcttaccttgaacgggagtcaagaaccttcccgattgttagccaaggccaaggcgatggcagacacctactccgcccccgaagagattcatgggcttctctgctattgtcagcatatgatagacttaatggcccacataattagacatcgttaggaaacttgtatggtctctaagaccttgactagatacgacttnctttctgaaataaaatgagttggtcgcatgttctac

SEQ ID NO: 10227 - DNA, 478 bp, Glycine max
  unsure at all n locations
agcttccncaacatcaaagtaaatcaacattcanacagcacaaattaccacagccaagaaaacagggcaaaggcagaaaactctgcccaaaacaccaaccaaaatcacagcttttctcacttaaagaccccagtaacaattccttcgatccaattcgttaaccggtggatcgactccaaaattttactggaagtctatagtacataagcctacattttgaccggtgtgatctactagcaaacatccagaactcattctgcactactctttccacagccaaccacacacaagcatttttctgcacaaagccaaaatcctgctgcacctattttgacagcaaaattctgcataagtgcagatttcgaaaatcacccttnctctcatccaatctttgccaaatcaaatcctacaagtcccaaatcatgtatcaatcatgtctaaaccaaggtcaagcttcanaacanagcaacacagaatc

SEQ ID NO: 10228 - DNA, 286 bp, Glycine max
  unsure at all n locations
tnctcgtggcttctttgagaagctntctcaagaggcttctttgagaagctagatccttatctatccacacccctctattaactaaattaacttccttaaaaataattacggatgaaaataacgcaacaaatattcaaacatcaaacataattactaatagtatatagatatatatatattaagggtgtacaactctcccacccttttagaaatttcgtcctcgaaatttaccttactcaaacaaggatgggtgagcttctcacatctgactttctatattccatgt

SEQ ID NO: 10229 - DNA, 456 bp, Glycine max
  unsure at all n locations
cttctatggaggctggatctttgagcttcaatggggtcctttaatggtgattctccaccatggagatgcagcggaagacaaaggaaaggaggtgagaggaggcgccatccattaaggaataagccatggaagaaggagcttcaccaccaagatgagccttggataagaagcttggagaggatgcttcaatggaggaaaagatagagggagagaaagagggagggggagcacgatattgaaggaagataatgggagagaatttgaactttgagttgtgtctcacaagactctcattcatcanagttacaacaagtgttacacatgcttctatttatagactaggtagcttccttgagaagctttcttgagaaaacttccttgagaagcttctttgagaaaactttcttgagaagctagagcttagctacacacacccctctcataactaagctcacc

SEQ ID NO: 10230 - DNA, 243 bp, Glycine max
tatactgaagattgtcgtcaaaataacgtacacatgctgatttcagagcctgatgaagcctgaaatgtcagaaatagggtacacacagacacaactgaatggctagagtacaatactgggctcagaattcgagagagactctggagcagctatgcagagaagcctagggttctacattctttgagagattagtgagtgttacaacgattgtgatgtgcctcgaagaggaggagggatccccct

SEQ ID NO: 10231 - DNA, 487 bp, Glycine max
  unsure at all n locations
agcttgtcacttttttgagtcactcaggacagccttaagtttacttcaattggtgtctttatagaacttgtcttttcttaatacacttaagcaaactcataaataggcattaattgaaaaggtttatgatttgtgtttagaaggtttgtaataattaaagcatcaagggttttggactcaacaaatttcccataaaataagatgtaaaaacaattatcaaagagacattggagaacattcaccatacaaggatagagagcaaatatgaactaatcaaactgaatggtacacatactgaaataataagggactaaacaataaatatctaaacttcatataaccggttaaaattacctgctacacacaagtcaatttggtgattcatcgtgcactacccatttcaaaacatttctaaaacttatgatggngtgaaggggttacattgttgaattcaagaacccgttacatgcaatgctcttggtctgat

SEQ ID NO: 10232 - DNA, 471 bp, Glycine max
  unsure at all n locations
cttcaagttgtggtcatgtaacactaaggcttangattcattnttcctatntaaaatcaacctagtgtttccaaaagatgctcttttattaatttatgctcacatccgagcccatttaggcatttgaaaaaaatttcacggcattcacccttcaggtgtacacacattnttttttcaaaaacctttgtgttctgatcagtgaaaccttttttcaaagaaaaactggcagacacttctttccanaagcatcttgactnttcagtcaaaatttaactatttttttgttttgcgcttgtttactttaattcctatgattatgagaaaactaggcgtattcaactatgacttaagaaacataggtaaataactaacaagcagaaatttaaaaggtattaggctgcctnctagtagcgcttctttaatgtcttgagccagacgtangacgacaacctgtcgatcacgggcccaata

SEQ ID NO: 10233 - DNA, 469 bp, Glycine max
agcttctaagttagtgtaccagatgaatgctgccctagccaaacaatcttgaaagaaacgcatcaataacttctcgttcctggaatatgcacccatctttcgacaatacatttttaggtgattcttaggacaagtcgtccctttgtacctatcgaagttaggtaccttgaacttcggagggatgacgacgtccggcaccaagcacaggtcggtcatgtctgcgaatggatattccccaaatccttcaacagccctcaatctctcatcgatgagatcgagtttcccctttctttccactgccgggggtggccctcccacggacagaaacattggctgtgttgggtggtttcgaggctctaccgtgatgttgggttgaggtaatgcgttgggtgatggcccctcggcgggaaatgtggagtaggagtcaatgtctccctgagcgtgctcttaaggattctcgaggactgtg

SEQ ID NO: 10234 - DNA, 460 bp, Glycine max
  unsure at all n locations
tgaacgtgtatagctcaccatcctttcatagtagaatactggtcatgtgtctactatcattgtcctcattnttttgtcgtcattgagggtgccacttgggctgccatgtctctacacctttggtctgagcccctttttgctcatgttctgtagttgcatgctatccggaaccatatcaaaattgtactgatattgcctaacgaaggcaaccattatgtccttcctagaatggactccggaaggcttcaagttatcgtaccacgtaacagctaccccagtacgactgtcttggaagaaatgtatcagcagatactcatctcttgcttatgcccccatcttgcgacaatacatctatagatagctcttgcggcaagtagtccccttgtacttgtcaaagtccggcacctcgaacttgggaatgaccatgtttgggtactacgaacaaatcttgtactttaat

SEQ ID NO: 10235 - DNA, 464 bp, Glycine max
  unsure at all n locations
agcttataaaccaactagcttattagttaattttatcaaacataatcttagaatttttaattatcatacttaggacaataatttaggtttttttttttacttttttagctaccctaattatataattaattaagatttattatttcctttttaatttttgacatgtttcttttttaatctatgttctactttgtatataatacgatgtacaatagatatgtacatacaaatagaaaataatcatctattattccgtccatgtttcttgcattggttcactattttcttcctactaccctcttcttaagaatttttaacgaaatcgtaaaattatttatcaatgtgggtgttttagaaaattatttacctttaagagtgatttttgtcaactaggatttgggaagtgccactntaagtagtgacatctagtgttttcatttgtcctacaataggaggtgtcactt

SEQ ID NO: 10236 - DNA, 377 bp, Glycine max
cgagatgaggaagtgtagaagggtgaaacttcctgctcttattcgttgaccacagagtggtacctggagatatgtcacaggggtcaggagaccttgtggacgtcaggtggggtgctattgcccaaaaccaagcttgaccaatcccgacccaacccgggcatagtcggtcagtgagaacctgtgatgtacctaaacaggcgagctcctggcagtcaacagataaaaggaacaaagaccacaaagcaaggaggcttgtggtggctggccagctgtgaattttgtgtgatatattgtttgtggtctctggtaatcgattaccaagggtgggtcatcgattacaagacttaaaaatgaagacaggaggctcagatgatctc

SEQ ID NO: 10237 - DNA, 459 bp, Glycine max
agctttgtggtatagatatattctttggctacagtatgcactataaggtgcattcttttgtcttcaatgttatatatttactaaaacatcaagtccatttacttcgaaaggatttaataagtgataaacggtgaatagcggaattgactatgcattatatctcatatgggaaagacttctaaatgacctcataatgatcctcctagatgagtgagaatttgaagagcgatctcgccatatcgatagcgtgtaacctaaacaaagtccacaataaagtttgaatgatcgaatgctgcttaaagcctttatagatgttgttagacgatcggcatttcatgcatgcgcttttagaaaacatgatgatagttggggatctataactgtggtaactttcttgagatgatactgctctatgcttcttttaattaggacaatgatgattttgtctatgaaaatgcc

SEQ ID NO: 10238 - DNA, 252 bp, Glycine max
  unsure at all n locations
gtaatataatacttctttaaacanaacttagatgttattctctttgtgtagctatggcgctgtattacaattaaaattatagttttgttcatctcgatcatttatgctaacctcttaatacaaacatttatcttattaatcacagaatagcaacacctaagaaactataactaggcttttctaatacttctggcgatatatacatctatttatatgtgtatgaaattagatagatagatgacataaattatg

SEQ ID NO: 10239 - DNA, 480 bp, Glycine max
  unsure at all n locations
agcttgtacctataaagatctcatctcattaattgtaagatacaatagtatcaagcgtgcctgtaggtatatataatatgtagattaggatgtctttgtagaaaatgcccaaaataaaacaaactatgaaaaaaattcagctgcaaattcttaactggacacaaaacaaacttgaaggtgatcatatgccaaaaatatatgctagtaagctacttagcaatgatattccagggtataaaatgaatgtacctccatttaagcattacttccttctggtaatgtaatcaatcttgtttttgaatcatacaccattttagtttcacagctgaggcaaaatataactttggatggttaaactaatgaggaatcataattaataaatcatattagtttaatgatatgaanatgaatagtatggagagacagggtgcggatagtgcaaggctaactagttntatacttacttttcacatttgactt

SEQ ID NO: 10240 - DNA, 467 bp, Glycine max
  unsure at all n locations
ntgacaaggattcacatgatggattctcttcaaaccaaaaatgaattaatgtataaaactcanaacattattaattaattaacaattaatgttggatatttctaaccctgtatttacggcaaagaacaatggccattcctttgtctagttgaaaattttccgcgagtgcatttctacctaacaaactaattcgtacatggagaggtcaatatcatagtactataattaagttggggagaaatatttttctcttgtcaattatcattactacaactctngtaatatagttaacaacacatcacataagacaaaagaattatagtaaactcaaatagatattggttntaatttctagctagagtgccaaaagaatcggaagcagaatagtatataaatctgtggaagtttctctattagctattttttttacatattattntcattgttttattattatcgacagaaat

SEQ ID NO: 10241 - DNA, 423 bp, Glycine max
  unsure at all n locations
agctagtagaatggctagacatgatacatgtcatggcttggtttggttcaagggtaaaagggatgccccacattatttccatgacacaaatgcaaaaatgatgatttggaaactttatgcaaaactggtcatgcatgcatctatgcggacactcaaatgtcaaatttttatggtcatgtgatgctagggctcaggattcatttcctctattntaatcaacccaatgtttccaaaatatgttcttttatcaatntgtgcattcatccgagtccatttcgggcgtccggggaaattncacagcattcacccttcaggtgtagacacattttccaaaaattggttatgatcacatgaattttttcaaagaaaagttggaaatcgtctcttttcaaaagcatgtcattgtttagctagacaacttat

SEQ ID NO: 10242 - DNA, 462 bp, Glycine max
  unsure at all n locations
tcgtaagacgcctgaacataacatcactaaagctccttttcccttcttttattggagggcacaaccggttaaaaagagccttatctgactgtgttgactcatggaaaattcgggtatcaattgcagcagctagaagattgtttgctgcagttattgcatgaatatctcctgttagatgaagattgaattcatccatgggaataacttggctatagccaccaccagctgcacctnctttaattccaaaagtaggtccttgcgatggttgacgaaggcaggtgactacctaacaaaaagagataagatgggattatgtatccagcataactttgacatacgattaaagattgtagtttttcaataatatcttgaacccaaataaccagtgaaggcctaaatgatgaatgagcaattcctacatcctgtcatctcatcatcacataagcaaaaaaaanaaacaca

SEQ ID NO: 10243 - DNA, 470 bp, Glycine max
  unsure at all n locations
agcttatggtggatgataatatgtgaatgaatgacattataaaaaccttngacactcttgaatgataatgtgtagactgttttactctaatcttaatggtttttagtacattatgggcacatgaatttgctttttttttttttttttttactttcttgcttttatgggggatgtaagggcaacttacctctgatgctatgattactgctgcgtcttgttttgaattcgccttaatctttacgcgatgtaacagagctgacgattgttctatcaatgttgctaataaataataacagtttgtagggaggattaaaactgctattttcgttatgattcctactattttacgcttttggtttatttcggattgggctttctgatcaagtctaatttatagatacattttatgctaatcttcagatctggagatgtcgctaaactctccaactaccagtcaaatgatgctcacc

SEQ ID NO: 10244 - DNA, 459 bp, Glycine max
  unsure at all n locations
ntagacaaaggacaacagtggaaatcaaaatcaacactttattgtcgcttctctgtaattctaccattggaggtaaccctaacgactgcgtgtagattttaatcataaaatcattgggccctaccaattaacattgatttgggaaagttgcctatggtgtgaaagaaactttagggccatctaatcaaatcatagaagaaaaaagataatacaattaatgcaatgaagaacttgctcttattaatcaattcaatatattatagttaaactcttggtaggagacaagttcctctcataatggacgaagatgggtatgatttctgctctctgtcaaaagctatacttcaataatgaatacagcttcaaccaaaaaaatccaaaagaagaaccacacaattctatcttggtatccagttaactccacagaacacatacaacctagtcaagttctgatgttga

SEQ ID NO: 10245 - DNA, 472 bp, Glycine max
  unsure at all n locations
agctngtgcgaatcanatcactcctgcattntatctctagcatgcattctctttttctttacccactcctcacgtttagttntttagggaaaaacaccataactaaacgcgccacaaggcatccctatcgcaccagatccaaatctagaacgatgggtgatcaagaggagacacaggaacagatgaaagccgacatgtcggctctgaaagaacagatggcttccatgatggaggccatgttaggaatgaggcagctcatggagaaaaacgtggccaccgctgccgctgtcagttcggctgccgaagcagacccaactctcttggcaaccgcgcgccatcctccctcaaacatagtaggatggggaaggaacacgctggggcacgacggcaaccctcatctgggatacaaccgagcggcttacccttatggattgccgcccaactactcaccacccgtcctgcaagacgatgc

SEQ ID NO: 10246 - DNA, 425 bp, Glycine max
  unsure at all n locations
tcttatccaaggctcatcttggtggtgaagctccttcttccatggcttattccctagtggatggcgcctcctctcacctcttctcctttgtcttccgctgcatctccatggtggaaaatcaccattaaaggacctcattgaagctcaaagatccaacctccatagaagccccacaagcaagcttccatcaagaggtatcagagcacaagagcttcaagtaggtgcttccttaaacctccattaatttttgctntaccttctcttccattgttgtttcttcattnttctccatgtatctcctcacatgtcttgtgctaaatgttgttaacatgattctttagagtttccaccaattaaacttgctatagaagctagaattgattntctatggttcaaatntcttgttcttgttcttgaaccatgaa

SEQ ID NO: 10247 - DNA, 446 bp, Glycine max
agcttgcagcatatgctaacgacaatatcatttcactcggaagtccgattgagtcccgtaatatatcgagacactcaaaatttagaaccgaagctcgtagaaaattcgaacgacaataacatttcactcggaagtccgattgagtcccgtaatatatcgagacgctcgaaatttaaaaccgaagctcgtagcaaattcgaacgacaataacttttcactcggaagccgattgagtcccgtaatatatcgagacgctcgatatttaaaaccaaagctcgcagcaaatgctaacgacaataacatttcactcggaagtccggttgagtcccgtaatatatcgagacgctcgaaatttaaaaccgaagctctctgcaaattataacgacaataacatttcactcggaagtcgagtgagtcccgtaaatatcagacgctcgaaattaaac

SEQ ID NO: 10248 - DNA, 232 bp, Glycine max
  unsure at all n locations
tcggttntaaatttcgagcgtctcgatatattacgggactcaatctgactttccagtgaaaagttattgtcgttagaatttgctgcgagcttccgttctaaatnttgagcgtctcgatatattacgggactcaatcggacatccgagtaaaacgctattgtcgttcgaatttgcaacgagcctctgttttcaattttgagcatctccatatgttattggactcaatcagact

SEQ ID NO: 10249 - DNA, 446 bp, Glycine max
  unsure at all n locations
tgctttaagactgtatattgatatctttagtatgcacaccatgtgttcatttccttcaactgagaaccccattgggtggtccatacaaacattctcctctaaatctccattcagaaaagcggatttcacatctatttgatgtagctccaagtcataatgggctactattgtcatgataatcctgaaagaatcctttcgtgagaccagtaaaatgtctctctataatcaatgtcatctttctgagtaaattccttagcaacaagtctagccttgtaacgttcaaagttgccatgagagtcacgtntagtcttgaagacccacttacaaccaactctcttacaaccccttgttaattctacaaggtcccaaacaccattatgttccctgaaatctatctcttctttcatggcatttaaccacttctcagaattatcacaacttatagc

SEQ ID NO: 10250 - DNA, 374 bp, Glycine max
  unsure at all n locations
attaaattcatatctagataagataagataagatctagattaaataatatctagatgagaaattcaaatctagataagataagataagatctagattaaataatatctagatgagaaattcaaatctagataagataagatctagattaaataatatctagatgagatcaaatctaaataatatctagataagataaagataagataagatctacatttgtagaataaaatagtctgccctcttcaagtccaagctcaattctggattcaaacccaatgcttcattaattcctgaaattagattaaaaacatcaaattagctgaatgggcccaaataatanaactgcctaagtaaattgacaattaagaccaat

SEQ ID NO: 10251 - DNA, 427 bp, Glycine max
agctttgagccggcttgcgggcgaaagaggttattcaatgttgaagtagattgtctcgcgtcgaatgagtctgtttggtgtatggggtagtaatcttgacaagtagagggtgacgagtttgtcaagccccccaagtgtggactagtgttgtccggtgtctggcgtagtagccttgacgaatgtgagagttgcagatcgatgaggcttgtcaagcccccaagcctgaacatgtgttgtctaggctacctttgtcaagatgtccgtgatgaacatatttttggtgtgccaggtaaggtaagtcattaaatttgacaactctaccctctttctgactgttggagagtgcattgaagacaacatgtaacggttatttgttgcagcaggcgcgtgtagcacacgtgcaatactcttgtatgcgtgtcacacg

SEQ ID NO: 10252 - DNA, 275 bp, Glycine max
  unsure at all n locations
agctatcgagaaattcntaatggtcataactttaacattgaggtccgattcaggcgcataatatatcgagacgctcgaacataaacaacgaaagctctcgagaaattcaaatggtcataacttttcactcggatgtccgattcacgcgcataatatatcgggacgctcgaaattgaccaacataagctctcgagatattcaaatggtcataacttttcacatggatgacagattccagtccatgaatgatcgagacgctcgaaattgaacaacga

SEQ ID NO: 10253 - DNA, 393 bp, Glycine max
  unsure at all n locations
tctctatatgtgatgctgctgaatcggtcatccgggataaaaggtatggaccatttaatntctcaagagctttcgttgatccatttcgaacgtcttgatatatcacgcacctgaatctgacctacgagcgaagagatatgaccatcttaatttctctagagctttccgtgttaatgacgagcgtatcgatctcttatgcacctgacgcggacctccgacggagaagtgatgaccatcttaatttgtggagagcttgcgtagatgaatctcgagcgtctgtatatattatgcgcctgactctcgcctccgagtttgaagttctgaatatttgaattgcgcgagagctggcgtttgtcaatcctgagcgtctcgatattcatgcgcatgatccga

SEQ ID NO: 10254 - DNA, 437 bp, Glycine max
agcttcctctgtcttccgctgtaaaacctgatgcatagaaatagagagaaaagtggtcacgctgtgagaaaaacaataggcagatagctacaaccaaaagaaataaaaggacatggaacgcattgaggaaaatacaatgaaccaaccattttaagcctatcatttgaagccagcaaactttgggtcttgacttcattcctccttccctctttcttaagctaatgttacatgaacaaatattccataagataaaaatgctaacaggaaaggagatttatactataaacagcagctagatctgtaaacaacaattgctatgtttaccaaatatatacctcaccggtcttccacttaaaaaacaaacaattattttcatcaatgaaatcataatcattcaaaatcttagacacaagagagtgtaactaagtggatacctg

SEQ ID NO: 10255 - DNA, 441 bp, Glycine max
  unsure at all n locations
gcttgccaagaagttgcgcagacattgccncatctggtgttggaagtcattaatagtgaagaggacaaagctgatggtatagagattctgtacatgtatcggtctctggacgggccacgggatgatgctcaaaagtagtaccatcctttgctgattctttgaaacttaactagttcttagataaacctgccacaagaatgatgatttgtgctgtcaatgtcagaanaagttgaactcanaactcaactgttntttgccaacactgttgtgatggcaggccatagaggactatagattctattatgtggcaaagcatttcaaattctgcattcttgtttatgggacagagcttgtggaatatcaaccggagagggtgtgctgagaatgatgcanatgataaaaattcctgtaggatcggaccatncaatgttgtatcactat

SEQ ID NO: 10256 - DNA, 458 bp, Glycine max
  unsure at all n locations
agcttagccctcagaatctcctccatgtccttcctcgagtcggttcgcaagcttttcctgctcgtgcaaggcaccgatcgccatattttcctgcatgccctcctcattcttgcttctaatttcaattttcaacaatttacatatccactaacacatcacacattaataaaactatgcctattgatgatatataccttgagtgaccttatgaaatctgagttgtcaaatttagttctaactcttctctctctctctctatatatatattactaagaaaagaagagagggtatgtgtatgcaatatgatcaagggaatttccttgagtaatccgattagttggatagctagcagctattgaaagggggcacanaaaattgtgattgcctacaaaagcaataatcgtcattcctttacaactatgttttaatcataatgagcatantaaatatagtttttt

SEQ ID NO: 10257 - DNA, 413 bp, Glycine max
  unsure at all n locations
actctgtctgttacaataagtatgtggtcaagaaacaccacttgagccatgaaaccccgttccagtggagacaataattgaggttccaagggtgttagacatcatggttgcatggtaggcaaacatctcacacatgtggttcttcaacacttgaccaatgttaggtggcattttaccaccaagtatantggcttctgtccgcaatgctactgtgtgcattacttgcacagcttttagtgggaacttttcatgagctcgttctccacacaacattattccatcataaccttctcaaacagcaattgctatatttgatacctctgttctggttggagttgggtgaacaatcatgctgtctatcatatttgttgtcacaataacagacttttccatgctacaacacaagttgatta

SEQ ID NO: 10258 - DNA, 357 bp, Glycine max
gacaatggtagtgcaatcttgttgtagtcctggatgaatcccctatagaaacttgcatgtccaagtaaagaatgcacttcctgcacagaagcagggtgaggcgaagaagccataacatcaatcttggccttattgacctcaatacctctactagagaccaaattccgtaagactattccttcatgtaccataaaatggcatttctcaaagttaagaacaaagttattctcaatgcatcggtcaagaactctagagaagctatccaaacatacataaaaaaaggaaccataaatagtgaagtcatccataaacacctccatgcaactctccaataaaatagaaaagatacttaccatg

SEQ ID NO: 10259 - DNA, 479 bp, Glycine max
  unsure at all n locations
gcatggaccattcaaccaactcaaccctatgaaggaccaactcgtacttacacacttaaggacttacaccttacaggtttaatgcttntgggactatggatcatccgactaactcataccaatgaatggttgactcgtatataccactcaaatgacattgttagtccgttctaacttgcatttctatttcacacgttcttccattntcttcatttcaagctcaaattgcttgcaattntcttcatgggcattgttgaacattctggtaaagttgagcaaagttgtgattattgaagaaaaaacatacattaattagttggcacgaggaaacaattatatagtagtaacaaatattatgactgctagagatgtgaattcatagttttctttntttcataattgaattgtatgacttccatatcagtatgtctgataatgataccagatatcaacatannagtagacaaattgaaagaatg

SEQ ID NO: 10260 - DNA, 444 bp, Glycine max
  unsure at all n locations
agctntgagccanaatcctgactcaccataaaccttgacccagggtgagaatgccaatccttaccctcggaagcaaaaaaaaggagaagagaaggaaaatttccaatcaaagaggaagcataaaaaggagagaaggaaaatttccaatcaaagagaaagaaaagaagaggaaaggaaattcccaatcaaagagtgggagaaagaaaaaagaaaagaaaagaaagaaaactcccaatcaaagaatgggagaaggaaaaaaagaagtaaaaaagaagaaagctcctggtcaaagaaactagaagaaatgtgcagaaaggtcttttgaccggacgatatctgaacaatacagaattgtcaccaaatgaacaaaanaagaaggaaaggaaaccacgacctanaatggtcttctccctttaattaccaaccaaaatcccgtgcgctagc

SEQ ID NO: 10261 - DNA, 428 bp, Glycine max
  unsure at all n locations
tncttcgggccattcctgcgaaggcaaacattnggaaagttagttttaccagtgggacattactcttaaaacaaaaatggcatataacctcctcccacaaatacaaacatcaatgtaaatttagagcaagcttatgcgcatatttccttacaatcgttctcttgcacaagacaaaaaaaaatgcacccatatacaatcaaggcagcttcgttacctagattatttacacgtacttccaaggtgtatttgttacttacatcacacacatctccttggctaaattcacatacatgcatactccaagcattntggggtaccaaaaattgcacctgtgcacatcttggtatttctaatacctatacatacacaaacttcatgatgaatcttgactatctacacaataaggtggctacatctcatgccttttt

SEQ ID NO: 10262 - DNA, 484 bp, Glycine max
  unsure at all n locations
tctcgccgctcacgcgacacacatgccaagatgctatgtatcatgtccatgtagcttaactagtactgtcttggcagagccctatatcatccgactgtcgatgcataggcccaaatgctcgcggaagtagatgctcttggcgaggtgatcgactctacacacctacaggcaaccagtgtgtgaggatcagtgtgctgttaccttgtactgctgtggagaacttaactcagtgtttaacttggccactgctatggcacacacctacttcgtcccctgagagattatatggcttctctgacatagcatgctttgatagatccatatggccacatttcataaatcgttaaggaacttgctggttataagaccttgacataatacgcttacttcttaaatagatgagatggaccatgttgatactcttatgcttgaganataaatctcttcacatatacttatacatgctttttatagtaccactccn

SEQ ID NO: 10263 - DNA, 312 bp, Glycine max
agcttgaaggcctcaagatttatgacttcaagactttgaatgttgatattggcatctcatatatgtgctcttttagctaaagtaaagataatttaaagaatgatataatggctcccttatatatgtgggatatgtgctaacataaaaagtgttaatattaggacaccacttgtgctataggtactactcagctggatgcctttgaaaggtattctcaagatgcctgctgtattataacactacgaaaatgaaattcttattatccatgagggtgatgataaccattccctgtacaatacaatttatttctta

SEQ ID NO: 10264 - DNA, 497 bp, Glycine max
  unsure at all n locations
atatactgaacatatgaagaatacctgtgctacgctatactagccattgcatgagtgagacgaaagtcctaacatcctactagtgtatgggcctcattaaaggttctagacgaacgaatggctgatgaccctcatgatctttgagctttacacatacaatggatactttaagcaatgctgtttctcctggatgcaatgctaacgtgccctattgatttacaccatatctatttcaattcacacctgatcttaatatgactatctacaattcacacctaaatgggcatgcactaatgctccaatgcttgttctatcaatccatatgactcctggatttataatttattacctgccaacacgatgcttctagcanaggaccgcttatgagcagtctaataaccgtgattggattctatctgacacaagcttccttgacacttactgataactcaccttatcgtactagaagatctactatattagctccacttacttan

SEQ ID NO: 10265 - DNA, 168 bp, Glycine max
tatatactagagaattagtgagcattgaagattctaatattaaaaaaaaatcatttttaagtgttatccaaacatgatcatatatcacttagtgggttaagaagaagaaaagaagaaaaagataggagatttaatttctcccgttcacacataataatgaagatattt

SEQ ID NO: 10266 - DNA, 446 bp, Glycine max
gctgactatgattatggcttgattgttgtgaatttatgggtttgagatgtcattaataaaactcagcaaaatcattttctatatgacactggcagtaaggagcattttactttctgcagtatcttagtgcacaaaaggttgagtctttgcactttccatcggaacctgattccattctttgtttccatatatagtcaagtacttaacagtggaaaggaagggaatcatcttattatgcttaaagattcaaaatcccaaagtctttcattcatgctctcgacctttgtatccagaaagtcaaaagtggatgaatgatcagtatgaagaaattattcatagggtactttaagcttccttgttaaaatctagtatttagcttaataattatgttccttatttcttaacagtgtaatgcattgatcttttcctttctttgatgaattatg

SEQ ID NO: 10267 - DNA, 448 bp, Glycine max
agcttcgaaagatacttaatcttcacttacacttttcaaagaggtcacattaaataacttaaatcattgttatgcccaaccctacatgtagtaactcatgcatgtaagcattacaaacagcaataattgatgcaaattgttgaatttgagtatttccatacgatatatatgctagatttaatatggacaagttttaataatcttcattttttggcatgccaattgccaagttttaatatgcccaattgcccataatgttttatgttgtataaaatcaaaatgtactttcattgcctccttcattttctatgtgcaattgttgcccggcatagtagttcaagaaatataagaccaatgctttataagttcataggcaaaagataattagttttcctttctattatcatatctaaatcaagatggctttcttattgaataatacttcaat

SEQ ID NO: 10268 - DNA, 400 bp, Glycine max
ctaagtgagaaaccatgatatcaccatattcttaagggaatttggagctctggaattggtttgggaataagtgtgggggtttttggttcattggataacatgttttgttggtcatgcttcatgatatattttgagccatacttgatgtacattgcatattggttaaatgttggacatgctgaatatgatgttgtttctcaaaggctacagagtaaaaaaaaaaagaatcgaaaaagaaaaagaaaagcagtaaagctgagtgaataagatcttaaatgaccaaagaatgatgagactcttggctctactctatatgtataaaatgtatctttacttctctttatgttcttatgttgtcttaatatgcacttattctgcattgctcctctattcctttggg

SEQ ID NO: 10269 - DNA, 593 bp, Glycine max
  unsure at all n locations
tctctgctctcntcntatatctcattaaatttattatttaggttattttactcatttcctcnttctctcncactctgcccgcggaantttgaatcataccgtctcgngcaccgcatactcacaggcacgctgcgactgcatagcttctatatcctgttgagggagagccctatgttctcccgacaggactaacacggtggctgcactcaattctgattgcgcaagcgaataaactcttataacatgtacagagttctatattgacttatgcactctcatggcccctgatgttcaagaagaccataactttcttaaagaatctccccatcctcgtccaacgagtggtccatgattgggagaacaaccctgctcacaaactgttgttagctgttatgatcctcacatggtgatcttgaaatagtatttccttgcttctaagaccactgccactcataaagacatttcaggcattatgcaccttataggagagagctcggccgagtactgtgcacgactccccccatattgtgaaattgtcctccccccagatttttatcaaccttttttcatctacgtataggtgattactaccg

SEQ ID NO: 10270 - DNA, 393 bp, Glycine max
  unsure at all n locations
ggttctcgagaatgagggactcaaagcacaagagctattgaagganaaaataagatggagaggaatgaaagcatttcaacattgaaagaatgagattatgagaggtggctaatcccttttcctatctaactacccctttcttttatttacagcgttcctctacatgttattgtgaccatatttacggcctgatatagtctcagcccactaacactcttattataccaacagtaancaaaatatattaactaacatatcaattaacataatgtcatatttcatcttacgatgtannataaacactcaaacacaaaactaatataaatcatnacattacaattctttctgacaggaaatattcgtctgcaaaaattcacctacctatgaagagat

SEQ ID NO: 10271 - DNA, 462 bp, Glycine max
  unsure at all n locations
agcttaccatgagtattaaaaaacttcaaaactgcctaatactaaccttatcatgttatatcaaatagtcacgacaacactataatgtgtagagaggcacaatgtcctaacataaatcaatatgaccttctatcactataaaataaatgctcggtcatttatatttaattaaataaataaagagataatcatttcataacatacagtatactacaacacttccaaaatgcttagcaaagcanaatgctctacataaatcagtatagtattctattaacacaaaatatatattcttttatttatatttaaatattntaatcttacaaagatcatttaacaatagcacacagtgtacaccagttttcgatctggttgctactggtctgatttggttgagatggtatatntcagctcaattcatctaaataacagcagaaagtatgctatcagacaatgaaaata

SEQ ID NO: 10272 - DNA, 411 bp, Glycine max
  unsure at all n locations
atactaagcttctatccaggcactctctnggtagtgaagctcctncttncatggcttatttnctcgtggatagcgcctnctcttacctcttctnctttatctttcgctgcatatccatgggtgaaaatcaccattgaaggacctcattgaagctcaaagatccaacctccatagaagcttttcaagcaagcttccatcanatccttcttccatagtttcaagagttttctttcctctactttgttaagagctaaacctaaaggccaactctgataccaactgaagtacctgaaaaacactaaaagaggggttgaataatgtgatggataaaaactctggtgttctaaaactattaaaagcttttcttaaacagatatcagtggatgaagggtttatccaatgggtcaaaat

SEQ ID NO: 10273 - DNA, 461 bp, Glycine max
  unsure at all n locations
agctngctntaagactgtatattgatttctttagtatgcacaccatgtgttcatttccttcaactgagaaccccattggttggtccatacaaacattctcctctaaatctccattcagaaaggcggttttcacatctatttgatgtagctccaagtcataatgggctactattgtcatgataatcctgaaagaatcctttcgtgagaccaagaaaatgtctctttataatcaatgtcatctttctgagtaaattccttagcaacaagtctagccttgtaacgttcaaggttgccatgagagtcacgtttagtcttgaagacccacttacaaccaactctcttacaaccccttgttaattctacaaggtcccaaacaccattantgtccctgaaatctatctcttctttcatggcagttaaccacttctcagaattatcacaacttatagcttgtgaaaatg

SEQ ID NO: 10274 - DNA, 504 bp, Glycine max
  unsure at all n locations
taatagttgaaacacgagtcaaggagaanatagtagtgagacgattgaacagattntttatgataaaagtatgggagagtagtgagggttttaaagagacgaanaatntactggtnaaaattaaacataagataagatgaggataaattaatttcaagaataatttgatttttatatcagagataaatctcctatcaaaaaatttattataaaaagatatactgtttcaaaataccaatcatatatttgatttgacaataatttattttccgatagttctagattctaataattgcttcaacctaattgtgatgcctttcttgaacttaaaaaaaaggaattgatctctctatttgtaatttgtacgtcgtgtagaaagtggcaaaactganacggtgaanaatacgtaaaatccaatctaaacctttttttattagataagctcgaattgatcttataattaatcaataacaattcacatctaatggactatntaattaacac

SEQ ID NO: 10275 - DNA, 382 bp, Glycine max
  unsure at all n locations
agctngatgatataagtgagaagtgcgtgtatgtggttcacgactcaagatccacggggtactagctctatcttccctataggagagggatcgtcataagtcgcgacgtctacttcgacgaagaagattgttgggattggactgctcgcgaagactagtatgactatcttccttattttgaagaagatgctgatatcgtacaactcatcatggaggaacatattgcaccacctgcctcaccgacacctacgctggatgaaacttgttcatgtgagaggactccgcgactaaggagcattgaagagattcttgagggaacccataacctaaacgacattaacctcttttgtctttcctgtggttgtgagcctctaatctctca

SEQ ID NO: 10276 - DNA, 563 bp, Glycine max
  unsure at all n locations
ngcggggtcgcctcgatctcatcatctatgcgacactatagatactcaagcttcctctntaagcttctcatccaagccactctcttggtggtgaagcttattcgttgcatggcttagtgctctagcggatgatcgctactctgaccccgtatccgctcattttcgctgcaattccatggctaaaaatcaccattgaacgaacttatcgaagctgaaagatccagcctacatacaagctttataagcaagcttccaacaagtggtatcagagcacactagcttcaacttagcgctacttaagactgcactaattgatagctctactttctcctccattgctgtaacgataatgctatacatgtatcttctcacctggcttgcgcttaatgatgttgacataatatgatataagtatcaccgattaagcttgctatagaagctataatctattttctatggatcaaattccttcgtcttgaacttgaaacatgaattgggatgagtgtacgatcctctcgagtttatattgccaatatattcgctgcacctacaccatacagtcg

SEQ ID NO: 10277 - DNA, 429 bp, Glycine max
  unsure at all n locations
aatgtaattatgaaattgagatgcccgaagaaacaccattttctaattaaccatgcattaggtaccatgttcaattattttgtttttaaatgaaacgggtttgtgatcccaacatgggtggctcgtggggcctgtcgcacctacccttcggcgggagggcgacgcgagactcgcgggatgcgtgttccacgaaaggaatacgcgcggagtcgccaccaacgtttatttgatgaaaacgtcggaaaagcccgaaaagacgcggtctacgaactttttagtgaaaggttcgggagtngtatttacgcacggggaaggtatttagcacccacacgcccgtccccagggacggcagcctttaatcgaatgtgcaaacatgactctgattttatggtccctcttatgtcttatacctttatacccttttatata

SEQ ID NO: 10278 - DNA, 425 bp, Glycine max
  unsure at all n locations
acatgatacatgtcacggcttggttcggttcaaggataatagggatgccccacattatttccatgacacaaatgcaaaaatgatgatttggaaacttcatgcaaaacttgtcatgcatgcatctatgcggacactcaaatgtcaaatttttatggtcatgtgatgctaaggctcacgattcattttctctatttttaatcaacccaatgtttccaaaatatgttcttttatcaatttgtgcattcatccgagtccatttcgggcgtccgggaaatttcacagcattcacccttcaggcgtagacacattttccaaaaattggttatggtcaatgaagtttttcatagaacagctggaaatcggctcttttcaaaagcatgtcatttntagctagacaactcattttcttttgttctccttcttct

SEQ ID NO: 10279 - DNA, 458 bp, Glycine max
  unsure at all n locations
agcttacatcacttgtgaagataacaatatgaattcttccggagactcagaanatgaggtcatgaatctaagtctcattgccaaaaactatgacagcgaagaagaggtaacatcttctaacaataacttatctatttcctttgatgaacttcaagatgcattcagtgacttacataaagaatcagtcaaacttgccaaactagtctcgttttctaataagactatctcaaatttagaaaaggaagtcttaaaattaaatgaagaattagaaaatcttaaaattgaagttaaaaccttaaaaccaattgatacaaatcaatcttctaccatanaattgatacaagatagtaatgaagcatctaattcatgtaatgttgtaacaagtttaaagaagaaatcaaagatctcgaaaattctcttttcaaatctactattagcaaaagtaatgtagatattat

SEQ ID NO: 10280 - DNA, 493 bp, Glycine max
  unsure at all n locations
tcatacaattaatatagaacctatatccttatgtcacatcctatcagagcgttgtgttccctgtcctcaagcatgaggttcttcatagtcatccacctattcatctgctcccccgaacacaaagttcaagatcatcacaggatccaaacacaaacagcaaaccgagagtgagttatcacattcctaactactagagagaaacaagacaacatatagtagccaaatacaatttacttagcatatctcacagtatttcatcactntgtcattcaaaattcactgttcaatcatcaatcacaatacacaagaatcacacactccgatcaagacataataacacatcaatttcataataaacaattagcaagcgtatgcaacagttatgctaagactcaagcctatatgcaatgtggtaccatgttagtgaanaacctcgtccggcgcctaggagtacatgacaagacaaaccacacacaagcaagtcaagtcactc

SEQ ID NO: 10281 - DNA, 307 bp, Glycine max
  unsure at all n locations
agctttgagcaaatttaaacgacaataactntttactcggatgtccgagtgagtcccgnaatatatcgagacgctcgtaattgaaaacagaagctctgagcaaacttaaacgacaataacttttgactcaaatgtccgcttgtgtcccgtagtacatcgagatgctcgtaatagaaaagggaagctctaagaaaattaaacgaccattacttattactacgatgtcggatatagccccggaaaattttcagacgctctaaattggaaacagaagctcttaggaaattcaaacgacaataagttttga

SEQ ID NO: 10282 - DNA, 452 bp, Glycine max
  unsure at all n locations
aagttcttcctcaacactgtcctaagcaaagttcccaaagtcctattaacaacttccgtttgcccatcggtttgtgggtgacaagtggttgaaaataacaatttagtgcccaacttgctccacaaagtcctncaaaaatggcttatgaacttagagtccctatcactaacaatgctccttggcaaaccatggagtctcacaatctccttgaaaaacaaatcaaccacatgggaagcatcatcaactnntttacatggaataaaatgagccattntagaaaacctatcaacaaccacaaaaatggaatctctaccattgcttggttttggcagccccaaaacaaaatccatggataaatcaatccaaggatactccgggaatggcaatggagtatacaatccatgaggctntaccttagactntgccctcttacatacaatgcaatgntcaca

SEQ ID NO: 10283 - DNA, 458 bp, Glycine max
  unsure at all n locations
agcttgtaggattatggngtacccatcacatgtggtactaggtggcggtcgggcgatggtgcaaaacaattctccacatccacaaatcacatataaacccaccatcccctgttgcccaccttcaactgggctcacgtactcccacgtagcccttatcctcgtttctctcaacaccaggtccccatcaatcctcccatgcttcaacaacatccaagtaattcaacattaaatcatcacaaactaacacagccaagaaaacagggcaaaggcagaaaactctgcccaaaacacaaaccaatatcacagcttttcacattcaaataccccagtaacattctcttcgttccagttctttaaccggtggatcgactcgaaaattttattggatgtctctagtacataagtatacattntgaccggtgggatctgctagaaaatgttcataaccccatatgtac

SEQ ID NO: 10284 - DNA, 358 bp, Glycine max
  unsure at all n locations
tagcgcacaactgcgcttagcgtgccaatgggacgtttgagtntaaaacccaagtgcttagcctagcctcgcgctaagcctaacttgaagttgtaaagtcccataagcaccttgggcttaatgcggcaggttgcacttaacactttctgcaacacaaaaaatctttctgcaatatgcgcttagcctgagatgtgaggcttagcgtaacatcaaacttcaacttacagagattagtttaggcttagcacaacaagtgcgctaagcgaacttccaagaattcaaaacccgtaagagaatggcgcttagcacctnctggcccgctaagcccagcttaaaaactcaagttacataatggatc

SEQ ID NO: 10285 - DNA, 419 bp, Glycine max
agcttcttatccaaggctcatcttagtggtgaagctcattcttccatggcttattccctagtggatggcgcctcctctcacctcttctcctttgtcttccgctgcatctccatggtggaaaatcaccattaaaggacctcattgaagctcaaagatctagcctccatagaagccccacaagcaagtttctatcaagtggtaatcagagcacaagagcttcaagtaagtgctccttaaacctccattaattttttttctttaccctctcttccattgttggttcttcatttctctccatgtatctcctcacatgtcttgttctaaatgttgttaacatgattctttagagtttccaccgattaaacttgctatagaaactagatttgatattctatggttcaaatttcttgttcttgttc

SEQ ID NO: 10286 - DNA, 436 bp, Glycine max
  unsure at all n locations
tcttgattggtattatgggtggtgtttggtcttggacatgcatcgggtggattttgtggccgatttgggggtggcctttgtgggtgattgggcgttcttggctggtagggtggtgggtaatgagaacgactgatattggccgagtattgatattgttgggctaatgggaaatttggccatgtaagaacgaaaaccacaacatgggtttctccctccttcttattctctccatttgcctcaagcttcccattcatcanagcaggataatcaaatttccctcttctcagacccacttcaatccttctaccagcgaacactaaatcgacaaagcttgaaggcatgtaacccgccatcttcttgtagtagaacaccggcaacgcgtctactatcattngtatcatcttcctctccatcattggnggcactacttgagctg

SEQ ID NO: 10287 - DNA, 511 bp, Glycine max
  unsure at all n locations
atgtgtgtgaagtgtatgtggcagaagcggtgtattacacatctgatgaagaggtggatgattgtaatggagatgaggttgatgttattgatgcgctggacgctgaaccacatagtcgccggtgaacataacgctcatgttcatcttgatgatgaaagtctcgtggatgctcaggtgcacgactatcatgacgcttgtgttgaacgtgacatcgatgttaggatcaaaggagtggaataacatgtattgtccctattcatgcactatatgcagcaaataatgtgtttctgatctagcaccttgccatgggcgtaaactatagctatactcacaccatatctaactacgctgaaactttgtgatgaacaccctattatcatttaaatatagcacacagaattttctacatctaatccaagtctatctattgaaactacctcagcttagcgtataagatattcgactatagtcgcttaaaataaaaatacatattatactgctgattctggcn

SEQ ID NO: 10288 - DNA, 411 bp, Glycine max
agcttctagaccagcaattcttgtgcctccgtagtataaatgagttgcatcaacatcaggaaagatgccctctccaaagatatttttgcaaaggtccatatggtatctgcaatgcatgagaaaagaatcaacaaccgcacatattaaagaatagagtcctaatgaaatattaaataagaggaaagaatcctgtcaatagaggagtatataaagtgaacagtgaggatgacgaacttgctttgcatcaatttctgaggagcgtatactatcatttgatggagccacctgaaagaatgcaacttcagtgcaaacttgaaaccaccataatcgagtagaactgtcttcatcgatagcagatttcttcaagtactcctggtcataagtctgcacattaacacccaaggttccaat

SEQ ID NO: 10289 - DNA, 331 bp, Glycine max
  unsure at all n locations
tcattaaaggggggcatgaactatgactgcaccncttatagttgctaatttctcatttcactgaacgggctataaaaacatgtatgttcactttctagagcgcagactctaacatgttactcaatacaatatgattaaaacgaatctttagaccgccttgatgggatttatctgtgcccttttccacactatctgtgggagtgaaattataagcattaatcaccttgtgatctttcattcaatgaggtgatgattgatcattatgtctactcacagtgggcattccctgttcgaatgtctattacagctggatcttaaaagtcggattgat

SEQ ID NO: 10290 - DNA, 436 bp, Glycine max
  unsure at all n locations
agctttagagcttacaaatgaaagataataacatcatgacaatctatgataaaatcacaagctttcaagtctctcagcacaatntacgtaaaataaagcattattttccacagttcatgttaacattaaaaattataagccatatacagaagtaacaacaacacttttcacgccaacttatatgtcacaaggttttaaaaatatgtctgcaactgcgatttcagctgcaacaaatgagctggaattgtctgcaatttcccgcaatataaaggaaagtgacaaaaccgtggccgcaatttaaaaccttgatgtcaaccatccagtcaactaatcaagatacacaccaaanatacctgagaagaaccagaatcatctggtgatgaggctntagcacgacttcttcttccatctagcacagcatggacatttacataac

SEQ ID NO: 10291 - DNA, 340 bp, Glycine max
  unsure at all n locations
tatatctnntctttttcagaatataaatgctcaagttaattntctagaattacatgatatattatgttggcttccttaaatatttgaaatatttctggtaaaaaaaagttaacattttgcaaattaacttgatattttaagagacataatgaattgatattgaatatcagattttatacttaattaatttaaccgtcaaagttcttttaaactagcattgaattgaccaatttaaccgttaaatngatttaattttacatattaaaatagtttggtgtttttatctaacaaagttacaaaagaagaaacatgtcaatactttgttttaatctctttattt

SEQ ID NO: 10292 - DNA, 464 bp, Glycine max
  unsure at all n locations
agcttgactctngaagggctataccagattgtcgggaagtcgactgtggaaagatgagttctttgggagccatagatcgaccattcaagatgttctcgctntaatcactaagttagtccaccaatcatgagttgatctacatgatttttaaaatacaagaactgtaaattaatgtggttcatgcaaaatcaaatggaaattgtcaagattaaaagttatttaatggtcacatgatcatattaaaaagttatcatcatttatatgttaatctctaccattcaaattcaaataagatctaatgatttatattttattctcacttctcacaataaaagtgttctccgcacccttcccaaaagtatgttttgtttattaataatttaattttttttaaaacatatactaatttaacttattcattataaatntcaaatatacttttatattcaaatatattacatcat

SEQ ID NO: 10293 - DNA, 414 bp, Glycine max
  unsure at all n locations
ttatccatcatccaaacacacacttaaacttgtgggttaaaatctgaaaagaaaatgattatttatcataaacctaanacatatctaagctnttataataaaaatattcaaacataaattatatgactttaaaagtaattttaaccaaaattatcgatcatccaaacactcttctgggttaaaatctgtaaaggaattgatnttgaacagacacgggccacacccaaacatacataaaagttattagttgtaactctcgggttttctacaaatctgatgtggttntctgtgttataaacgtgtgtcgaataagcaccaagtaaaatatatttaagggaaggagtaaaccaaattacaaaacacgtaaaccagatttctttgtgctcttgtcacaattgcatgtccaatatacac

SEQ ID NO: 10294 - DNA, 440 bp, Glycine max
  unsure at all n locations
agcttgagatgaggaagtgttgaagggtgaaacttcctgctnttattgttgaccacagagtggtacctggagatatgtcgcggnggtcaggagaccttgnggacgtcaggtggggtgctattgcccaaaaccaagcttgaccaatcccgacccaacccgggcatagtcggtcagtgagaacctgtgatgtacctaagcaggcgagctcctggcagtcaacagataaaaggaaaacaagaccacaaagcaaggaggcttgtggtggctggccagctgtgaaacttgattgatatgtggattgtggcctctggtaatcgattaccaagggtgagtaatcgattacaaggcttaaaattgaggacaggaggctaagatggtctctggtaatcgattaccaaggggtgtaatcgataccaggcttgaaaacgaagtcaggaaac

SEQ ID NO: 10295 - DNA, 210 bp, Glycine max
  unsure at all n locations
catctcttatttaagcatttcagcctttgctttcgtgtagcttaagaaaaacgtcatttcttcttctttctttcttccaaagccatttctaaagttccaagaactttctccatcacccacatccaccattagccaccacaaaccatcattgntctccattgaaaacccacactgagaggaacccttcaaccgaagcggaatctttcaact

SEQ ID NO: 10296 - DNA, 285 bp, Glycine max
  unsure at all n locations
agcttatnntcttttgttcattgatccctattctataatattggtctgcttaactaaccctgtagatattaatttcacaatggaagtaaatgccattagaaatctagttgtctaatttgttataattagccaatggacaattgtactatgatactctagttgataaattcataacccttgccgatggcaacgcgggggtggagccggagagctcgggcttgcgattccactggaggaggacaaaggggggtttgggttttggaggggaagaggggagaatggggc

SEQ ID NO: 10297 - DNA, 330 bp, Glycine max
  unsure at all n locations
atgactgcagctcaaggaaggtagtgatcagtagtgatgtaatctttgatgagtatagaagcctgaattgngaaaacataactgtagaaactaatcatatgcagcaggatctcaattttgatttggatgagcctgcctcagaaccacctgaagggcatgaggatatgaatcatgacatattggatcaggatagtcagaacctataagaggcaatccatatgagggtcaaaagaactanggttcatccgtcaagactccaataatatgaggcatactcagatgatacggtgactgatgaaggagaactcttacccagtgaagaagtgcaca

SEQ ID NO: 10298 - DNA, 463 bp, Glycine max
  unsure at all n locations
ttaagcacgcggctgcagcttcatggaggaaganaatgagagagatggtgggcggtggaattaaaagagattagggagagaagttgaactctgaaatgtgtctcataagggtctcattcatcaaagttgcgacaagtgttacacatgttttatttatagcctaggccaataactcaaattgtgaatttcattttcatttcttgtgaatctaaaaggaatattcttagaatatgccaaatgcatcttagcatattctctttagatgccacaagcatggaaggtgtgactctagcacatgggaagcttccttgagaaacaaggaaggtagctttttccttgggaagcaaggaaggtagcttccttgagaagctagaggttagctactcacacccctccaatagctaagctcactcccatgtcataatacatganattacaacagaaagtcttactacaaagacta

SEQ ID NO: 10299 - DNA, 455 bp, Glycine max
  unsure at all n locations
agaaagagggagagaaagagagagggggagcacgatattgaaggaataaaagagggagagaagtggaactctgaagtatgtctcacaagactctcattcatcaaagttacaacaagtgttacacatgcttctatttatagactaggtagcttccttgagaagctttcttgagaaaactctcttgagaagcttctttgagaaaagcttcttgagaagctagagctntagctacacacacccctctcataactaagctcacctccttgagaagcttccttaagaagattcctaaagaagctagagcttagctacacatacctctctaatagctaagctcacctccttgagatgagaagctagagcttagctacacacccnctataatagctaagctcacccccatgacaaanaacatgagaatacaaanaaaaaagtccttactacaaagactactc

SEQ ID NO: 10300 - DNA, 433 bp, Glycine max
  unsure at all n locations
cgattatatatctatatcggtccgctgccaccgtgagccgtcgttatgtgatctcttagaatcacatcctctggaacaaacacgaaacttttgatcgattgcagtccacgaattacaatttcaatgaaaggcccattctattgagctggaacgacgctgttttccagatgagcatgaaagatcctacatcttttatatactcgcattaacaatcacgattgtgctgtggtgttatgctnggtgtccttactttctctatcattatatggagaatggagactattagatctaacctttcgcatctagaccattgcccggacccctccctcacgaacgagagagnaatttcacttattaacctttccttgctatcctaaacaggatgtttagtatcaagctgtgcacccttaaattggggtcctttgggcagacn

SEQ ID NO: 10301 - DNA, 430 bp, Glycine max
  unsure at all n locations
agcttgaaaggatgcttcaatggaggaaaagaaagagggagagaaagagagaggggggagcacgaaattgaaggaataaaagagggagagaagtggaactttgaagtgtgtctcacaagactctcattcatcaaagttacaacaagtgttacacatgcttctatttatagactaggaagcttccttgagaagctttcttgagaaaacttccttgagaggttctttgagaaaacttccttgagaagctagagcttagctacacacacccctctcataactaagctcacctccttgagaagcttccttaagaagattcctaaagaagctagagcttagctacacatacctctctaatagctaagctcacctncttgagatgagaagctagaacttagctatacaccccctataatagctaagctcaccccca

SEQ ID NO: 10302 - DNA, 476 bp, Glycine max
  unsure at all n locations
ctgcttaattgctccaggttgctgcatggaagggcaaaggtctgtatggtggtcagtagaggagcacacaccacaaacccttgcgacaggtacagatttctgattcaaggccagctgggttaccaagttaaccaatgcatccagtttgccttcaagcttcttagtttcaaatgatgcagatgggtttgtagctacctcatgcactcctctaatgactatggcatcatttctggcgctaaactgctgagagttggaggccatcttctcaattaaatttctggcttcagcaggagtcatgtctccaagggctccaccactggcagcatctatcatacttctctccatattactgagtccttcataaaaatattggagaagaagctattctgaaatctgatggtgagggcaattggcacatagtttcttatatcgcttccagtactcatacangctctcttcactaagctgtctaatac

SEQ ID NO: 10303 - DNA, 428 bp, Glycine max
  unsure at all n locations
atcatgattgtgattaggacctgacggctccctgagtgaaatagtacgacgcctgacaattctcggtgctgtctagatgcctcactcaatggagagacccgagctgtcatggcgattgtctaacgaaacactatttgccttcgaccacactgatcgctcttgagttggtaagccagttttgacgatctcgccactgaatagaacaacccgcacatctttgtgtcgtccagctagagagacaatgaacaggttaaccacgacacatgctatctctgttcttctgcacacctgacggaaatataattgtgaatcgaggaattctagtaacattccctcatgcagccgagatattagcttaaagagaccttttctacgtgcttaaagcatgggcccttcaccccactcttgggtctagactgcgtaaccan

SEQ ID NO: 10304 - DNA, 273 bp, Glycine max
agcttgtatccattagaagagaatgagcatttgattgaaattatgactgaaaatgttagtcagtttgtcagatggattatgaaggaatgcattgatcatatcccgatgagagtgtgatccttaaattttgagagaaactaccataatttagtactaatttttgcgtgaatctttgacgtatggactgaatgcatgaaattgaggatgatgaacgccatgtttgattgtgatagccacttaaccaaaaagctgaccacatgcttgaatgattta

SEQ ID NO: 10305 - DNA, 390 bp, Glycine max
tgtagggttaaagtgtcatgaatgtcacgtgctcatgcaacaattgttagccgtggctatacgagacatcttgccaaacaaagtcaggttagccataactcgcttgtgctttttctttcatgccatatgtagcaaagtcattaatcctgtcaaatttgatgagatggaaaatgaggccgcaattatattgtgtcagttggagatgtattttccccctgctttctttgacatcatgattcacttgattgtgcatctggtcagagaaatcaaatgttgtggtcctgtttatttgcggtggatgtacccggttgagcgatacatgaagatcttcaaagggtatacaaagaatctatatcgtccaaaagcatctattattgagagggacattgc

SEQ ID NO: 10306 - DNA, 452 bp, Glycine max
  unsure at all n locations
agctntattcaagacaaagaaattaaagatattctagatggatgatcaagacaagtctctagtcttagaaatggtatattaaataggagggaattccaattgaagtagcaaaaggtttggccaagaaatttaagttaaaaagtcttttacaagaaatttactctctggtaatcgattaccagaggatgtaatcgattaccaatggccaaaactgatttacaatagctattaaaatttgaattcaaaatttgcactgtgtaatcgattacacatatgtggtaatcgattaccagcaatttctgaacattttaattcaaattttatagtttgtaatcgattacacatatactgtaatcgattaccagagcagattttcagaatatattctcaacagtcacatctttttgtgtggttcttgaatggctatcacagggcctatatatatgtgactt

SEQ ID NO: 10307 - DNA, 395 bp, Glycine max
  unsure at all n locations
ttgtgtggagcttcaatggtgaatgaggaagaagagaatggcaacgtgagggagagagagggctgtctgaaattttctgttttgctgagtgaggagagagaaaagctttttggtcttaaataaaaagggttttccctttttccattattttatttatgcaaaagccacatgtctccatttgagtggagcaagaagggcccacttttccttttgactgtgacccacactcagccacacaaacgaaaaaaatctaacctttgaaatgctaaaatcctgcctcagtttgcgtgccgtttctctggttcaattcctcgcgtttctctgcgtccgtcggggccatgtttctatngcaagcaatatatatatcaaaacgctcagaataaaaccccgagcgt

SEQ ID NO: 10308 - DNA, 116 bp, Glycine max
agcttgtggcgcgacatgttgacttgatcaggcttcttacattcacaaccgactctgtcttgtaggattctcatagagggaccgcctgtacctgcacgtttgtcaacgacatattt

SEQ ID NO: 10309 - DNA, 451 bp, Glycine max
  unsure at all n locations
agcttccatcaattntaaagctgtccncccacatgttcacttgatggaatgggtcatatatacccatccttttcgtgaggactagttgagttgatgaagagttcatatactataaatcatgcaaaaagaaaattcacatctcaaattggagattcaatgcaatgtagacaaggtaaaatgggaaaatttagacttggttctctataaaactggcaattgatttgaaaactggaatatgggtttgctggaaattgaatgaaacctcaacatcagaaacagcaagattgaacttttcacatggtttatgttctgttatctctaggattggccaaaggaaataactgttttctaaacaatactattaaaaaacaaaataacatatgtttgatgccacttataagcaaaatttaacatgataaacgaacttcaatcaaaaggaagaagctgattt

SEQ ID NO: 10310 - DNA, 328 bp, Glycine max
  unsure at all n locations
tatgactctnnggcaatatctttaaaaactagtcacttaanaaattgtgacttttgaaanaatcttcagaaacaagtcacttgaagaattgtgacttttggaaatgtatttttcgaaatcagtcactggtaatcgattaccattaaggtgtaatcgattacacaccaaccaatgtgacttttcattctgaattttgaaaattaaaatgtttaggagctctggtaatcgattacaagtttaaaatacttttaaaactggttaaacataagttataactcttgaaatttgaaatcttaacgtttaaaatactggtaatcgattactacct

SEQ ID NO: 10311 - DNA, 453 bp, Glycine max
  unsure at all n locations
agcttggttntaattatgttgttacaataatgctgtttagtttaggcctagtcttacatgatgcatttgcggacaaagcttaggctaaattaggctaaactttcataagctacttgagctgagtctagtcttacatgagggatctgcagacgaaacttagtttaagttagtctaaacctaagagggttgtctaaatcgggtgtagtcttacatgagggatctacggacgaagcttggatattcagcctgacgagggatcaaaggtttagtaatttagggtacaacatagaacacaagagcaagattgattagagaaatatatttctgtcataccctaatttcgcccggggaccattgtttggtggcatgaaacctttgcttgaccgcctcggngtacttgacacccatcgttaggcaatccgtgaagtttcacaacattctggaagtcaaaaa

SEQ ID NO: 10312 - DNA, 410 bp, Glycine max
  unsure at all n locations
tcttagttntagatgatgcacgatgagttgtagccacctcatgtactcctctaatgactatagcatcatttctggcgctaaactgctgggagttggaagccatcttctcaattaaatttatggcttcagcaggagtcatgtctccaagggctccaccactggcagcatctatcatacttctctccatattactgagtccttcataaaaatattggagaagaagctgctccgaaatctgatggtgagggcaactggcacatagtttttaaatatctcccactattcgtatgggctctctccactaagttgtctaatacttgagatatccttcctgatgcgtgtggtcctggaagcacggaaaattntttctaagaatactctcttaaggtcatcccagctcgtgatggacc

SEQ ID NO: 10313 - DNA, 455 bp, Glycine max
  unsure at all n locations
agctntcaacanatgtcttcacaaataatcatcacacagcagaaccctagcaagattacccatcatatctccccaaaaccccatacccacgaaatttaagagagaaagaagtccacccaaacctgaattttcgaagtcccactcgtagccacgcacttcactaccccgaaaatgctgtcctttcgtgatttggagcagaaatgagcaccaaaggttgaagctttgttgggcaacaatggtggatgggagaaaagaagaagaaggctgcgtgagagagagagagctgtctgaaattttgtggggctgagtgaagagagagagagttgctttttagttntaaaagaaagggttttccctttttccattattttatttgagcaatgccacatgtctccatttgagtggagcaagaagggcccactatcctcttttgactgtgacccatactcagtcac

SEQ ID NO: 10314 - DNA, 440 bp, Glycine max
  unsure at all n locations
cgtcttgtgcagaattaggatacagagggcacaaatttttaacaacaattccaaagcacaccataatgcctatttntcgaggaaagagcttggaggcagcaagaggagcagcttntgcagagagacctaggttttgtaattagagagagattagtgagtcgtagaataattgtgagatgctgagaagaggagtatggatccctcttcttgtttaaggaataattattctatactcttaatctcatttgtgttaggggttttctgtatggctggctaaacactcttgttgggaatttctatggaacagctgatgtaattactctaatatctaattgactgtgtttctatgttcaatgcttctttcaatgcttaatttctacatgctcttggtctgatcacccatttgtatgtctagttaggtcactttagcattgagaaat

SEQ ID NO: 10315 - DNA, 461 bp, Glycine max
agcttgaatgaggctgaagaagctgctgctcatgttcaacaagatccggtggagattaatttatctcagcctcatttgtcacaagatagtgacatggaggtccctgcaactattgttccaccaatagcaaggaataagctagccataacaagagccaaaaaaaggaaggttgctgataaagatgatgcacaaaactgaagaaccattttttgttgcattttgaaggttgctgaagacccattttttgttgcgcattttgaaggttgctgagtttgaaggttgctgatgaagaaaactgaagaagcattctttgttggcatttgatattaggatgtgtagttgtatatattgaaagcttcactggcatgtgaaatgatgtcaaatattaggatgtgtagttgtatagtttgaaggcctactgaacaattgcttctaactaccatgctttgggatgtcaaata

SEQ ID NO: 10316 - DNA, 388 bp, Glycine max
  unsure at all n locations
acacaccattcttggaaaagtcctattaatccatgattgcgcatgttatctttgatttgataggaaatgatttgcaaagtcaagtcatgacatatctatggttcagaattaggatgaaacatttgcctgtgtgagatttatacactttgagcgatttccctctatttcaactggacccaatgtttcttctaagcgctcatttagaaacgaaatgctaatatcctaaatctcatttgtggttatgagaaaattctatcagcatgctttccttcccaatagacacattgttttcttcaaaaatacatgttgtntgatcagttgaaagttgtttcttgctagcgtgttgcatttagtgaaaaacaccgagatacttagtctcgcctttcat

SEQ ID NO: 10317 - DNA, 462 bp, Glycine max
  unsure at all n locations
agcttataatattnttcatttctaanaatattatggactattattntgcccactctaaagaaactntctggatctattattggatgcaatacctatgcaaatgataaccatagagaaaattgatgataacgagacatgacatgaacggaagacaaccaccttggtacatgattaatgtttttatttattgtaatatttttattctaacttccattattatttttttagtacttatgataaataaataacatatttaaaaattaaatatagtggtataatactaataatttataacatcttaaagatttaagcagaaataaaattgtttaaaaagtagattgataaagaaacataaaataaatccatttttcaatactagttacatcaaagttcatttcattctttntcttccggnggtggagaattataataattttttatgtcaacgtaattagtattatt

SEQ ID NO: 10318 - DNA, 443 bp, Glycine max
  unsure at all n locations
cctganatngagaganaatgattattaaacacacataatgaaaatactaagtatttattacctatacttaacagaaaatacttataaaattacaaaataaccataaattgtgagagtttgatacaatttatacaagttttatacacaaaagttagtcgttttcaccgactaacaactcccccaaatttatagttttgctagtgctcaagcaatcaagaacaactcacttgtcctcaagtgataacaacgagcagtgattatgtacaaaggtgtatgcatcacaaattactgattgcataatgagaaagatgaagcaatgtgtacctatcactcgtcttcacaaaatatgcagttattcaaagagaagaataacaatttaactatacagttagatgaagttaatcataagacagatatcaaggagagtagcttaaaccacagtc

SEQ ID NO: 10319 - DNA, 448 bp, Glycine max
  unsure at all n locations
agctngtatttccatgtcacgatattaccagagcccncttccatccaagatgatcctactccttctccccacattcaaactatccttgaccgttaccaccctttgtttcaaacacccaacacccttcctccgcaacgtgagacagaccaccgtatccatcttctaccacaagccacacctgtgaatgtccgcccctaccggtacccccatttccagaagcaggaaattgagaaacaagttgaaattatgctacaaaagggccttatacaacctagtaatagccccttttcatcgccggtcttgcccgtcaagaaacaagatggatcatggagattctgcgtggattatagggcgctcaatgctctcaccattaaagacaggttcccgatacctaccgttgacgaaatgttggacgaaatanggggtgctcattacttctcgaagctcg

SEQ ID NO: 10320 - DNA, 493 bp, Glycine max
atgcgtgtaagtgaacaaatataacacatccaataacatgaggtggtaaataaaccatggaaggaaggatacaatgatcaaacaacacatctagaggccttctcaagttaagcacctctagaaagggttcgattaatcaaataaactgtagagctcacagcctcaccccataaatgagatgggacattaccatctatcaaaagtaatcttgtcacctctaatatatgtctatctttccttttagccacttcattttgttgtggtgaataagggcatgtagttcgatgcaagataccattaaagttcatgaactctattaattcagtcttaaaatatatccctcaattgtctaatctaatgaccttaatatatgtgttaaattgtgagctatcatctgatgaaaggaacacacaatatcacacacatcacttttatgtttaagcagatacacccaggttacccgagtacaatcatcaacaaaactgataaacca

SEQ ID NO: 10321 - DNA, 451 bp, Glycine max
agcttgttgccctcaacgtgttaaagaatacatgagtatgcttttccctgttctggtcaagttaagatgttagccaaaacttaatttgtttccatttgacaaaatatttaaattatccttatttcacttaaaataaacctctttactggttgtactattttataaacctcaaacatgatgcattgttatttgagtatgattgatccagctgtcgttgtcattggcactgagcatctttcgaggtttgtctctatttataaaaagttgtatgattgtaacatgtcgttgttcaaatatcggtattgtttcatgttactagttagttgcattatgagtgaaccttagatgcccgttcgagattcgatacatcgattaatacggatagtttgaattaatcgatgtattgattcttgaattgccttttggacaggtcgggatgacatatttttat

SEQ ID NO: 10322 - DNA, 479 bp, Glycine max
  unsure at all n locations
tgtgccacctacattgtaacatcccaattctcgtaaactagattaatatggatggctatttataaataaatggaatttaaaaaaatgatgagattttataaataaataaataaggagatataattattaattaaaataatgatttgagagaaaacaaaaagggttttttttatttgtttgatagagaataaaataaagtttggttttataaactaataaataaataaataaataaataaataaatagagtaaataatatgtcgtanatgcccctagctataaatagcaacatgctaggttagttttcagactgactcctcagcctcctcttgctcacaatttcgttatttctttcttcttccaaaaccctctattttttcccgaggccatctaacatgtctcagaanaatgacgatctcngactcattcaccgttggatcgtcgtgaaatttgagcaccacattctgcacccaattact

SEQ ID NO: 10323 - DNA, 438 bp, Glycine max
  unsure at all n locations
agcttcttcatcagtgcatcccttgaagaaaggaggctcataatcagctggctgcaggataaaacaattatattgtcaaatcaccctgtatataagtcagccctttgcttgggcataacagaatgctaaaatagtcaccagttgcatagcaaagtatgcatttcaagtctgggcaatgcagaaattcatagaaaggataaaaggagccgagatttgctattcatgttaaagaacataccgtcacatcatcatagtagaggagcttcatcagaatagtgcgctagggaaagaatgcagaaatcagagtttgtaatgattacttaaacttgaagagagaatattatgaaattatcattcagagcatttgaatttctttacctcttctggcattntctccagaagtctcatcaactgaaccagagttcggatcatcttaca

SEQ ID NO: 10324 - DNA, 445 bp, Glycine max
  unsure at all n locations
ntccncaccacctttcttctagatattgttttagatagcggtttggtgtcacgaggaggcatagacaaatcactactttcggattcaggttgatcaatcttaacaggagaatggtctcgttgtcgctgctctctgaagaccatcaagagcttctgagccttctctcttcctctcgaggtcccattcactgatattgacaccaatgcaggtataaccccttcttgcaggaccatctgacaacattcctcactcctgttacacaaaattaggagacaagaagcagcttgttcctgctctatgggctcaccggtatctagtgtggaagccaacgcacttataagtccaggagccaacatcattttctctcttcctgcttgataaaccgccaacattatcaaaacagctatgcagttttctgtccacatgcaatcaccctggtctacaa

SEQ ID NO: 10325 - DNA, 439 bp, Glycine max
agcttatagtctctttaatcctgcctaggttagctgtgctattcttagccggtcccaagcccggataaaaggagagggttgtgttatgctttcgacagccaacgtaaaactttgtcgaatctctacgacatggatcaattacgtaataatgtgaatgctaagtcgttgcccggaagcaacgcgctgtatggctcgagtacagtgtcaaaagagcaagggccactgcatcgccgcccggatgtagtgaaaagtaagcaagggttctcacattttcgtgaacgggtgtgggtaaagaagctagttcatgacaggaggattcgctttggtacatggaatataagcacacttactgaaaaatctatggaaatagtggatgttatggtgaggaggaagatcaattttatgtgcctacaagaaactaagtggacaggtgaaaaaa

SEQ ID NO: 10326 - DNA, 436 bp, Glycine max
agctagactagcactttacataagccaagatgaagatgtacattgtgtgcaagatgtatagggtgaacagcaagtgcagctttgaattccttcactgccatgcgtagtttacccttactagcattatctttagcctttcacatagaaaccaaaagacaacctaccatttcaacacccaaaagaaagaaggaaaatagaatttacatgttatgtgaaaataaatttccacaatagatccaagcttacacttttactctttttgagtagatgtctcaatccaaaatatgcctttttaagacactatgctctggatctacgcggagacctttatgacaatgcctgaatatatatgttcgcatataagctagatgttatatatacatatatagatatatgctatatatatatatatatggatatatgtatatatatatat

SEQ ID NO: 10327 - DNA, 413 bp, Glycine max
  unsure at all n locations
tactaagctggattcctttagtagggaatctatcctacctaagatggagcataacccagtcacnctcattaagaattagctctttccttcctctatagcctttatttgaatacacctttgtttggttcttaaccctctcatgccacttctttaccaactctgacctagattccccttctttatgtataaaagaagtgtctagtggaaggggaatgaggtctaatggtgttaggggattgaacccatagacaacctcaaaaggggatggcttggtggttctatgaacccccatgttgtaggcaaattctacataaggaagatactcattccaaggttgcctttcagaaaaccccttaanaagatggataaagacctattcactacctctcgttgacaatcagtttgtggatgac

SEQ ID NO: 10328 - DNA, 444 bp, Glycine max
  unsure at all n locations
agctagtgtctntacttttttgttntagaaggagattntattttatttttgaatacaaataacataaaattttcacgaattcaaacgttaaatcattccaaacataaaataacattacattaactttaaacattacattaactttaaacattacattaacttaaaacattacattaacttaaacagagtcgaaagaaataaaatttgcatcaaatacgacaattaagtcatgctaattttgcgacaatgacatattatcttccatttcgattacatgcttactaaaaacagctaaaatttctattggcccgaattttttccaatagttagaatgcactaacaccttcaacatgtcatcgttggtttccagttcaataatttcgaaattgataattttatctgaatgctcatagtgacttggtcgtcaaaaaaacaatcgctata

SEQ ID NO: 10329 - DNA, 470 bp, Glycine max
  unsure at all n locations
tatactcattgagaagtacataagaactataataatatgtcgaagagcataataaaatntatacatcaataaagtcatcaccttcaattctatactcagtctaactttatgaacataatataatttatgaattggtgaacacatcaaattgtaagttcacatgattgaaatattataattcaagtttaagaaataaagagtatcatttaacatattattaaattaaaaaaggcaaatcggttgaaaaacataaaaaattaaatgttattcatgtcaccaagtttaacaataagaagtgtcctgatcaaaccaaacgagaagccctcatttcacaaccttgatatcatgcattaaactaaaggccaatcaatgaacgatccttgtctnncatttctgatcattaatcagtcaaaaaaacagtcaaatattttaagatattcanatacacttcaattcatgaacacaaagac

SEQ ID NO: 10330 - DNA, 357 bp, Glycine max
agcttgagccaaaatcctgactcaccataaaccttgacccagggtgagaatgtcaattcttaccctcggaagcaaaaaaaaaggggagagggaaaatttccaatcaaagaggaagcacaaaaggagagaaggaaaatttccaatcaaaggaaaaaaagagaggaaagggaattcccaatcaaagagtgggagaaagcaaaaagaaaagaaagaaaattcccaatcaaagaatgggagaaagaaaaaagagaagaagaaagggaagaaagttcccgatcaataaataataatatgcagaaaggtctttggaccggacaatatctgaacaatacagaattgtcaccaaatgaataaaaa

SEQ ID NO: 10331 - DNA, 362 bp, Glycine max
  unsure at all n locations
tgtttgggtgagttagatatacccattctgttntaaggtttttgcgatgatgtttgtgatgtttatatgctgaaattgctgatggaaatctgttagagacgaagggtagaactaacccaacgttagaaagtgagaatgtgatgttatgagtgaaaaaaaaagagtgagactttgagagttggaaggctaagtctgaattctgtggtaaatggaggttagagtgagttaatactagctcgaaatgtcatttagaacatgtgagaaaggttatgctgagctagagagaaaaacaaatgaccaaagtgaacaaagagccattgctagggcaaatttgggtgttgaagagtcaaattttgatttgg

SEQ ID NO: 10332 - DNA, 447 bp, Glycine max
agcttgcctaattaacctaaaattgagagaaaatgattattaaacactcaaaatggaagtactaagtatttattacctatacttaatagaaaatacttataacactacaaaataaccataaattgggagactttgataaaatttatacaagttttatacacaaaagttagtcgttttcaccgactaacaacttccccaaatttacagttttgcttgtcctcaagtgataatgacatgtagtgactatgtacagaggtgtatgcataaaaaattactgattgcatgatgagaaagacgaagcaatgtgcacctatcacttgtcttcacaaaatatgtagttattcaaagagaagaataaaatgtgaactgaacaaatagatggagttaggcataagataaatatcaaggaaagtagcttaaacaatagtctcacagttattcattaat

SEQ ID NO: 10333 - DNA, 251 bp, Glycine max
  unsure at all n locations
tatccttatggcctgcctncggacttcaccccccgtgccaccccggaagatntaagccaagcccctactttcgaggggcaacatccaccttatgaagactatcccgggcaagatgatggggaaggagatacccatcttggccccctgctccacctcaaagatctgtccccacatgaactaccccaaccgaacatagtgcgccataccccggcctcacccacacctttaaaagaatctgttcccttcgcgga

SEQ ID NO: 10334 - DNA, 453 bp, Glycine max
  unsure at all n locations
agctnttcgtcttcaataaacatggctcanagaaagaaaacaaatttcccaaaaggttatcaatattaaatcttggaatacataaatgaagggagagtactatattttgattgaggtgtgatttttaaatacatgccatatatacacattatttatttctttacatttctatttttttaattaattatatcatattatttatcatatttaacattcaattctctgtgtgtgtatttgtatgaaatacatgattcatgaataattttcattttgattttaatgatcttctttatatattattatataattaaagttagttagtataataaaaaataaagacacacagacgtgataatgtttgtatggtgttttgctaagatttaataaatataaaatgagtgctctcttcctacatnttgagaccttttcgttttcttttctaacacatttttg

SEQ ID NO: 10335 - DNA, 410 bp, Glycine max
  unsure at all n locations
ctagatcaaaatcttatgtagatgtggaaggtgataatgctgaagttcanattaaacaggaacagatcttaggctaatgttcaatgaccaataatttcacgccatgcagagccaacttcatcagttcctaaatgttatctcactcttgacaacaaaatttgttaagcagaaatatgttcttaaactgagccaattcaactcaacatcattacttaaaaatctgaataataaaaccatggtcaagcacggcaaaagaatctcagntcctaatagattcatcaaatatctcaaatacattgttggccatgctatggtctaggtcactcaaattaccagctatgatcaaaatgaaatgccaattcttatttcgattggagtggtcacatgatattacattatgtctaacttca

SEQ ID NO: 10336 - DNA, 442 bp, Glycine max
  unsure at all n locations
agctngtccaattgctgaaaatgagactctgcatttgatgattctacggcgagaactttcatatgtccagctgaactggtagccttcactctttgctgtcattagaaaagaaaaaaaaaacaattcaaaaggatataaagtgcttgctcaaaaccaatagataatatcagtatattataatatgatgtgaaatgtaccaacctttttgacaaaactgtcttcttcttctggagaaaaaggacgctcacagcaagggcaaacatgattagctcttgcaaccctttcaaaaggatcaaacatttgccgcataccatcagcaatattatatttgctgcaagcaatcaccagacaaagtattagtacatgagaccagtacctagtgacaacacaaacaacactntgatatggtcacaaagatgacgtcatgaatgtctggcacaaa

SEQ ID NO: 10337 - DNA, 475 bp, Glycine max
  unsure at all n locations
tttaccacaattgacgacttgagctaatttagaacatctgaagcatagggcaatgacataccaataggctgcttcttctgctacacaacctgaaagtgaaagatgttgcctcaatttcaagagtgacattccaagtgtaaccacggaatggccattagcatttgtcaaggtgtatattatatttcattcacaatattttctttcgtagcaaaatggatttaattaaaaaagttaacattataattttaataacctcatgaatctgattataattaaatcattaagttttaattaatgattataattgtatattttcttttaaaatatactttctaaacaaaaagctaatttcagataagatattcttcaagataattaanaaatgactacaggcttttggttctaaatagggttcttctagtacgttaaagacatactactttagagtatnaaagtggtatttgctctaattatt

SEQ ID NO: 10338 - DNA, 389 bp, Glycine max
  unsure at all n locations
agcttataaggaagtgaacttagttattagagggatgtgtgtagctaagctctagcttctcaaggaattgttctcacagaagcttctcaaggaagttctctcanaaaagcttctcaaggaagctacctagtctataaatagaagcatgtgtaacacttgttgtaactttgatgaatgagagtcttgtgagacacaactcaaagttcaacttctctcccgcttttcctccttcaatttcatgctccccctctctctatctctctctctttctttttctccattgaagcatcctttccaagcttcttatccaaagcacattcttggtggcgaaactccttcttccattgcttattccctagtagatggcgcctgctctcacctcttcttct

SEQ ID NO: 10339 - DNA, 383 bp, Glycine max
  unsure at all n locations
agaaaattattattgaacacacaaaataaaagtactaagtatttattacctatacttaacagaaaatacttataatcttacaaaataaccataaattgggagagtttgatacaatttatacaagttttatacacaaaagttagtcattttcaccgactaagaagtcccccaaatttacagttttgcttgtcctcaagcaaaaagagaacaactcacttgtcctcaagtgacaatgacatgcagtgactatgtacaaaggtgtatgctacaaagtgactgattgcatgataagagaatggagtaaaatgccctcatcacttgtctttcacaaggtatgcagttatncaaagagaagaataaaatgtaacctgaacagatagatg

SEQ ID NO: 10340 - DNA, 416 bp, Glycine max
  unsure at all n locations
acatcagctacatatagtggcgagatacagtctattagtgagggacagccctcacccctatagctagctttttgtgtcgaggtaggcataaactccatctatgaatcttccacggtattagaagtatatctaagcttaatacatacggccagcctcattagttatccacgcaccacgcctaagaagtgctgggcgaganngantgtgttgggattaatctgagcactcacttgactaaaatcaaacgtgtgaagtatagagtatgtgcaccctcggccttagctactatcggagtcagagctgtctgactgcattgtacaatataagacttgccttaggatcacatagaaggcatatcctcatattttcagaatgttactttctttctggccttataggcaaaacggtggcctctg

SEQ ID NO: 10341 - DNA, 78 bp, Glycine max
ctaagcttgtagagatctgctgaccattcacgaacaagcatgaacgcacgtcgatcgcgtgtacgatatactctccac

SEQ ID NO: 10342 - DNA, 383 bp, Glycine max
  unsure at all n locations
agctgggacgaatctgaacctaagtttctgatgtgtgtccactaaaaaccagacactatcctactttntctttccctttctctctctctctctcaaatccaacgatcctagcctctcttccttctctttctctacccttcgcagtctctatttctactccgaacccttcttgcccttgccccctcctctcacctccatgacaacctcgatgacaagtggttcgccttcccctctttctctctccctccaaatctaggactccaacaatgacttcctcctcatcaagtcgggccttccacctcctctggtggctcaaccctgacactgtgcaccactgtctcttcctccgatggatgcctctacatcgataaccagatttgcga

SEQ ID NO: 10343 - DNA, 424 bp, Glycine max
  unsure at all n locations
tgactgacttctactcatagatccattctagtgctcatggtgatcctnctcatcattaccttctgaagagaaagaagtgatcatcaagtcttaaaagtggattgaaagagtatcaaagatatctttgaggatataacagtgacaaggcgtagtctagaagaacaaatcatatagaaaaatcttcagctaatcatgtaaagacattgtgagtgcattaatagaacaataaatggatgaccatttcacttgcagtgtatcatcaaatactatagtgtatctatattagtctaactcacaccaaggtttaaaatactttgtagtatctacaaactcatttcatgccggaagaaaactttccatttgaaaaagcagattttggtgcctcatcatatgaaaccttntgcaaaacattccaggaaacata

SEQ ID NO: 10344 - DNA, 418 bp, Glycine max
agctaggatttcctcttattagggaatctatccttcctacgatggagccaaatccagtcccccacattaagaactagctcctttcttcctctattgtctttagttgcatacacctttgtttggttctctatttggttaaccctctcatccagctcctttacaaactttgacctagattccccttctttatgtataaaagaagtgtcaagtgggaggggaattaggtctaaggatgttagaggattgaacctatagacaacctcaaaaggggattgcttggtagttctatgaacccccttgttgtaggcaaattctacatgaggaagatactcatctcaagacatatggttgcctttcagaagagcccttataatggtggataaagacctattcactacctttgtttgcccatcatttg

SEQ ID NO: 10345 - DNA, 484 bp, Glycine max
  unsure at all n locations
atcaggatatgactcttcacaattgatnttgaatttcaacgtttagatacactggtaatcgattaccaatatcttgtaatcgattacaccattttgaaatcaattggaacattacaaattcagttgaaaacttttgaaatcaaactttgcaactggtaatcgattaccagagagtaaaaactctggtaacttagaaaattgtgaaaaaaactcttttgaaaaacaaaattgtgctatgtttgttttctgaaaaatattntcaatacttcccttgtgaagtcttcttgatttcttctcttgaatcttgaattcatcttctcttgaattntgaaatcaaacttctcttgattcttgaaacatgttgactcaatcttgaaatcattctcttgggccttttgtcatcatctntgttatcaccaaaactacttgaatcaacttgattcatcatcatgaagctngctctctacaactaagtcatcatttt

SEQ ID NO: 10346 - DNA, 437 bp, Glycine max
  unsure at all n locations
agcttcccttggttcttgggcaaaaaactgaatctgatcttatcaagacaacttgtggcaatcaaatctatcacttatcactcaccttctcacctatttcttgagtgtggcatcaatatccttcccctaaaaaaaagctaaaccaatttctaaatctgaattcttcaaggtgattcatcccattttcgtgtttgtatcaagatatctggcatactccctggagggtggaggatcatagccttggacagctagggcttcagggtcaactaccacttgctcatcaaactcaacttcttcaatgataggttgcacttgatatgtcaagatgaatcttgagtaaggaagatgcatgatgaanaagaaggcgtgatcaaataaaataaagaactcttgaatcaatgggcaaaccatgttgaaaggagtgttntgagtgaaac

SEQ ID NO: 10347 - DNA, 528 bp, Glycine max
  unsure at all n locations
tgctattatgtgacactatgaaactcagctataattaagaatttcacatatatttgagttccttacattccacccaaagattatgtttactcattntgaggtcttcataatctttgtatgtttgtgcacattctctccataaattatttctctttttgttttgataatcacttaattcattcagatccttcagatctttttgaagatctttcattttattttccaactcctgaaagttcttaagaagagtaactttttccctagcagttgtctcaattntaagatatagcttggactctctttctttaagagttatacaagctccatatgtttgagtggactcatgtagtgaaatatctacttgatcctgaaggatcttctctagttctaaatgatctttggatatatatttgaaatcttttcacaagttcttgtaagcttttaaaagaatagataagttagacaaaagntcatgataatcctttctaagagacttacggtcatcaaagtttacctcatcttcttgat

SEQ ID NO: 10348 - DNA, 444 bp, Glycine max
agcttggacgaataaggtgatgcatctatgaaacacaacaactaacaagtatgaaaattgtaaatatatattggttttagggtttacacacgaatggataaaaataattgtttgtgttttacaaatgcagggttaagtttgcacattgggccttaaagagactactaccgaatagccttggagacctatgtagtgtttgagaagccatgaacaatatgatcactctacaacatattgaaattaaggcatcgtttgagacaactacacatgtggttgggcatgtttttaaagttaccttatacaagaaactatttggcatggtatcaaggtatgtgttaaaccagattgttgctgagttcgagcatgtaaattatgctagcattgatagttctcattatagatatataatgagaactactcacggtcttccatgtgcacgtgagc

SEQ ID NO: 10349 - DNA, 489 bp, Glycine max
  unsure at all n locations
tccatcaagtggtaatcagagcacaagagcttcaagtaggtgctccttaaacctccattaattnttttgctttaccttctcttccattgttgtttcttcatttttctccatgtatctcctcacatgtctagtgctaaatgttgttaacatgattctttagaatttccaccaattaaaatagctatagaagctagatttaattntctatggttcaaatttcttgttcatgttcttgaaccatgagttgtgttgagtttacgttcctttgagttttgtcttgctatttttctgtggctgaaacctaacacataaaattcttacaaaaatattaaagtagaagaaaacctcacaaatctagagtgacttgttcacctgttgtagctctgtcatagaagtcatgtctagtcatgaaactcgtcacataagaattcttatgctgtgctgaatttattttcttggttctttgctaactcattngtcatgagtgta

SEQ ID NO: 10350 - DNA, 510 bp, Glycine max
  unsure at all n locations
ttttttctgcatattattaaacttctatattacttanttctcgccgggatgttgttctctgcccggactcaatccctgagctgcacttgaaggttttattgctgataaaattgggaataaaaagatggggtacctaattgaaggaataatagacaaacaattgatctttgattggggtataacactactttctttcttctaagatacaacgagggttcctcatgctcttctttttaaacataggatctccttcgttaagcttccttgtaaaaactcccttgtaaagcttctttgaaaaactttccttgaaaggctgattttattttcaaccccccccgttaataacttaactcacctcctgtggaactttgttaagaaatttctaaggaagctgagtttacctcacatactcctttaatacttaacttacctcctgaaaaaaaactaaaacttacttccaccccctttttgtgtaccttccccgtgactaaacatgaaaattataaaatn

SEQ ID NO: 10351 - DNA, 416 bp, Glycine max
accctgcttcttggacaaaatcttcttttaaggtaaacacaaaatgtgatttgcaagtgaataacatgtgtgaggcattcaacaatgtaataatggagtatagagataagccaattattacactattggagggaatccgattttacataagctctataattgtcaagttaaggactatcctcatcacgtatgatggttcaatctatccaaaagctcagcaaatcattgataaatataaaaaagcatgtgaagcatggcgggcacattggcgtggtgatgttgatttgtctttatttgaggtgtcaaagggcatggaaaaatttgttgtcaatcttaaacaatagacatattatagaaagtgggagttaactagaaattcatgcactcattccataccatgcatgtggatcaatagt

SEQ ID NO: 10352 - DNA, 466 bp, Glycine max
  unsure at all n locations
agcttcaaccaaggagagatggaccatttcaagtgcttgaaagaatcaatgacaatgcttacaaagttgagctgcccggtgagtataatgttagttccaccttcaatgtctcagacttatctctttttgatgcagatggagaatccgatttgaggacaaatccttctcaagagggagagaatgatgaggacatgaccaagaacaagggcaaggatccacttgaaggacttggaggacctatgacaagggctagaacaaggaaagccaaggaagctcttcaacaagtgttgtccatactatntgaatacaaacccaagtttcaaggagaaaagtccaaggttgtgagttgtatcatggcccacatggaggaggactaaatggcaccactctgtctcaattttagagtggttaattngtctaaataatggcccaatccttgtaaagttggcagaccaaaaatatgttt

SEQ ID NO: 10353 - DNA, 421 bp, Glycine max
  unsure at all n locations
cttacaacagcaagccccaagagactcagcataaggatgcacagaccaaagttgcgtatgtaaaaaaattgtatgaccaagtgaaggtgcaaattgcaaagaagaatgaaagctatgccaagcaagcccaaaagaaaaggaaggaagtggtacttgaacccggtgatgatcttggacatttgaggacaaatgttttccaagaaggagggaatgatgagaatcatgaaacaggccaaatacagtctaaaggcccaagtggagaaggacgaangcccaagtggagaaggacaaagcccccgagtggagaaggatgaangcccaagtggagaaggatgaangcccanaggcagagacactatcaagactattaattgatgctgaaggccaagaataattngaaggcccataataaatatgttct

SEQ ID NO: 10354 - DNA, 433 bp, Glycine max
  unsure at all n locations
agctngntcttgattntnttgaagttctttaaaaaccttagaacaatatacttgtccttcatttaattgtctttgggcttggcgaccacgatcaacaaagtattttcgacacctactatatgtggattttcccaaagctgttatcggtaggttgcgacaatccttcaataccttatcaacacattctgagaggttggtcgtcatgtgaccatatctacatccttctttatcataagtcatgctccattnttcctttgaaatgcgatcaatccatgtacatatggctggactcaatngactaaacttttctaaattatggtcaaaggtatgtttgcaaggagtgtatgctgcatcaaaagggtttgttagcaacaacaatctgaagtatatgtcaaacataactaacatcatattataaaataaatcttaccca

SEQ ID NO: 10355 - DNA, 450 bp, Glycine max
  unsure at all n locations
taaccaccaagtagaaactatacctcacagtttaaccacttggcagaagtaacaaggcttaaccatcaagagcagaagccaaaacaatgcttaacaactcaagacagaagtaaaacaacaatccaatgcttaaccatccatgacaaaagctcaaacaatgcttaatcaccatggacaaaagatcacatcaacataaagcaagaagaacataaaatatgtctttagtgaggacttttcacaaatactttgtgaagtagcagcaaccaaggcttaaccatccatgatagaaactaaaaacaatacttaaccaccatgaacagaagcaaacaaatgaacaatgcttaacaatcacacatggtagaaactaaaatcatcaaaacaagcctaanaggctgaanacaataagccaacacgggccaaatatcaacanaataatgaaaaagatattca

SEQ ID NO: 10356 - DNA, 554 bp, Glycine max
  unsure at all n locations
tctcccttgtaccgctcgttactctttccntanttcatcattaanntcttntnttttnnnnnnngggcggcgcgcgtggtgtgncttggaaccttttataaggagacctataaaccacacagcgccgctggtacccgcaactgtgagagaagtgattttctacacacacaatcgaaaggctgagcgctcattttctattcttaacacaaaatactcataacgctccacaataaccataaatagcagaagattgatacacttatacaaggtgtatacacaaaagatagtcgtttttactgactaacagtcatatgctcgctttcaacacttcaatggagtcgataagactattaaagcttctttgccttcaagacaatcaatgcgctggaccagatacaaaaatggtcgatgccctttggaaagatcttggtttcatgaaacattatagatatttgcttttagaaacaaggtgggggagcaaacaaaacgcattgcatttgaaactaatgcttggaaaaaaaaattttttcttctaacaaaagatgtgatgcaac

SEQ ID NO: 10357 - DNA, 367 bp, Glycine max
  unsure at all n locations
agcttcgaaatgaatgttgaagctctgagtaaattcaaacgacaatatacttttactcagatgtccgattgagtcctgtaatatatcgaaaagctcgaaattgaatgtagaagctctgagcaaattcaaacaacaataactttttactcggatgtctgattgagtcccgtaatgtatcgaaatgctcgaaatggaataccgaagccctgagcaaattcaaatgacaataactttttactcggatgtctgattgagtcccgtaatatatcgagatgctcgaaatggaataccgaagccctgagcaaattcaaacgacagtaactntttactcggatgtctgattgagtcccgtaatatatcgaaaagc

SEQ ID NO: 10358 - DNA, 137 bp, Glycine max
  unsure at all n locations
tcggtattccatntcgagcgttcggatatattacgggactcaatcgtacatccgagtaaaaagttactgtcgtgtgaatctgcttagagcttcggcattccatttcgagcgttcggatatattactggactcaatca

SEQ ID NO: 10359 - DNA, 406 bp, Glycine max
  unsure at all n locations
agcttacaagatatgcactcatagcccctttatatatgaacagagtgatagggtccaaaagaacattagatcttggcctaccataaggaagtacgtgaatatcttttcttgcaagcactctgatgatgtttgtggtaacaaagcttgccatacctataaaagaggagacgatatcttgaattgtttgatagcaaaacaacaatgcttatctcggcgggtgaggtcggctacatggataacatgatgtcattttgttcggttaaaaattacagtctcaaaaatattatttagtataagatctctttttgacaacttgtttgcaaagtctttcttgatgccaattaggctcgcaatggctcgttattcttttattgctntgtatgggggatcttcttgtatgtatcat

SEQ ID NO: 10360 - DNA, 537 bp, Glycine max
  unsure at all n locations
tgcctccgcgtgtctctacatcgacctcagatactaagctgccctgcaagtgtgcctcaggctgtggacgctgataggcttcaagctactgttggtgattcagagtggctgcaaccctgtgttgaagcaaatgtcttctgagttcttgaaaatgtgcagtctgaattactcaactagcatcttggtttccaagtgtatgctcaccacaacaatacaatgaaagactagagagatattgttatagcttcatcatattcagtcacaatggattcatatgtttatgaattntatattattccctctcttatgtctatttataaatgttgagaaactgcaaagaaattcaacgctcatgatatatatatatatatatatatatatatatatatatctatatatatatatatatatanccacatatatatctatctatattagatagagatatagatatatataccgagnaccgattgcccaacgaattcttgtatgaatcgcgcttgtgagtattancgataaatattctatagtgccccg

SEQ ID NO: 10361 - DNA, 458 bp, Glycine max
  unsure at all n locations
agcttgtagagntaagtatcgtatcggtttaatcgattaccgatatctcataatctattacactattgtttgagacaatgactgatttatttaggagtctttgctttaatcgattaccaagtggattaatcaattacttctatctcgttcaagtgttctggggtgaacaagaacactttaatcaattacttaggttatctaatcgattacattgttcttgagttgttttctagatgttggaagaacattttaatcgattactttgtgaaaataattgattactttatagatctaatcgattacagacggttataactgttttctctataaataaccatcttgtgttcacatctacacatcaagagatcattacagaatactcaatacatctcaaanacaactttctagccttagaataagcaagatttcgtgctttcattagtggataagagaagaga

SEQ ID NO: 10362 - DNA, 392 bp, Glycine max
  unsure at all n locations
cacctttgccaaggccactaacaacttcaccagtcaccagcacggacttcattntttttctctatgtcttcttattcctcgctctcttcgatgacaaacagagcagagcagagcaacctttttcaacaggagaaaatggtttctatgttctagttttagctttttggtttaccttttggcttttgcattcaaagagagagcacaaacaacacagaatcttgggtttgcagcgaacatatgcagagttgcaaagaagcagagtttgaagaaacaggagggaaagtagaatggaatggcaaccaatgctaccattggttggctntatatactaagtattctggctctgattccaaggatgagacatgatacagatgagagagagagaaagaaag

SEQ ID NO: 10363 - DNA, 432 bp, Glycine max
  unsure at all n locations
atcctacagcaatctcaccaaaccaagttggtgcatataattggggatggaagctccacacaagtgcaagatcatgcaatcctacaaggaagatagcgatcttaacaacctttcccaatatagaaactagaaagaaagaaagaaatgaaaacaatcttgtccttttggatacagacttttattcatagcattgcatgggcatcttcactaggcaaacattaaaaactataaaatggatgaccagctcaaaaaattatggcagcagaggaatgtagaacatctagagatgaacacaagttgtctggtcaagtagaacctaatgaaatgatgctttccaatactaaggttaaaactttccaaagtaccttcccacaattaatgctgaanaggtggtaaccgtagatcaatntactcataaaccagcatgaaaga

SEQ ID NO: 10364 - DNA, 444 bp, Glycine max
  unsure at all n locations
agctntagtcaaacagaataatccgaaaatgtcaaagaattgggtgttgaanaagcataacaagactttntgtgattggtttaaagatacaatctttgcagatgagaatgattcagaaacattaagaaagctagcagatgggcctaaaagaaatgttataacctggcaaggatacgacataaacaagtattcattttacacaaaagcacaagatgacaaaagtacaatgcagaacagcggggtcaccctaaggcctgaatctcaacactttgcaagtgtcaatgacgccaatccctgtgtagcttccatcccttactttgggttcattgatgaaatttgngagcttaactatgtgaaatttacggtatgtgttttcaaatgtaaatgggttgacagcaacaccggtgtgcgcaccgatgatatanngattatgttggtagacct

SEQ ID NO: 10365 - DNA, 328 bp, Glycine max
ctgcatgtcaagctttgcacaagacctatgggaagaattgggatctagctatgatagatgtttctattgaagccattgcagccctcactcagtattacgatcagccactaagatgctttatgtttggggactctcagttagtaccaaccgtggaggagtttgaagagatcttgggatgcctgctacgaggaagaaaaccatatcttttttctgggttctatccttccatggcgagaatagccaaggtagtcaaaatctcggtgcaagaattggaccgagtaaagcaaaatagaaatggcgtggtcggaataccgacgaagcacttgga

SEQ ID NO: 10366 - DNA, 453 bp, Glycine max
  unsure at all n locations
agcttcgcgcacactccagacatcttctcaaagatcccaacggttaggtagtggacaagtgtcttgtgaagttgcataccaaatttcgagaagatccaacggttaacgaaggctgggaagcgtttttaccgagacagctcatgtagcttcctcaagaagcttcattaagaggcttcctcaagaagcttcctcaagaagcttcctcgtggcttctttgagaagctntctcaagaggcttctttgagaagctagatccttatctacccacacccctctattaactaaattaacctccttgaaaataattacggataaaataacataacaaatacaatcaaacatcaaacataattattaatatatatatatatatatatatatatatatatatatatatatatcagggtgttacaggaccaatacaaaacaatgtcattgaagatgagctcaaac

SEQ ID NO: 10367 - DNA, 454 bp, Glycine max
  unsure at all n locations
tatgagaattccaagctntataagcaaanagtaaaaatttatcatgacaaanagctatcaaaaaggaattntccacctggtcaataggtattgttatttaattctcgattaagattgtttccaggtaagatgaaatccaagtggtttggaccattcatcatcaaagaatttatgccacatgaagcagtgatactagaggatccaaccaccaaaaggacatggactatgaatggtagtaggatcaaacactacctatgtggagattttgagaggataatcattgttgtccatctacaagagacttgaaccacaacaaagatgttcagctagaaagacgttaaagaagcgctcctaggaggcaacctagtatttctaaaccttactctttaattntctttttgttaaatttcatatntgtgttatttaaatattttttggttaaaatatgtctaaa

SEQ ID NO: 10368 - DNA, 370 bp, Glycine max
  unsure at all n locations
acatttggaaagttagttntaccagagggacattactcttaaagcaaaaatggcatataacctcctcccatcaatgtaaatttagggcaagcttatgcgcatatttccttacaaacgttctcttgcacaagacattctatttaccgaagaaaaatgcacccatatacaatcaaggcagcttcggtacctagattatttacacgtacttccaaggtgtatattgtacttacatcacacacactctcttggctaaattcacatacatgcatactcaaagcattttgtggtaccacaaaatggacatgtgcacatcttgggatttgtaataactatacatacacaaacttgatgatgaatctngactatctac

SEQ ID NO: 10369 - DNA, 497 bp, Glycine max
  unsure at all n locations
tcaagagaagggcaaactcncttccaaaatctgatgtcatgcttaaatatgtnggcttgttcatgctcgtgcgcttagtgcaattctgaactgcttagcgcgcattagtgaatttcggcttagcgcggcttttctcactcagcggatggattgaagcagtgcgcttagcaggatgacccttcgctcaaggaacatgcacaactcatccttcttccagattcttcctcgcgcttagccgacgattattgcgctcagcggttggctcgctaagccaatttgttggcttagcgagagggtgaaaatcaacacttcaaaacttgcctaattaacctgaaattaagagaaaatgattattaaacacacaaaatggaagtactaagtatttcttacctatctntactcanaagaagatataacactacagaataaccatgaattggagggagttgatacnaattacacaacgtntatacacaacaagtagtcgtattcatcga

SEQ ID NO: 10370 - DNA, 421 bp, Glycine max
tgggcttatcaaaagctgattcagctggaagctctaacacctgcattagcgagggccaagttaggggcacccatgggcaagaggcttataactgttttctggagctctgaaagttctaggtaccatcttatcaacatacagtgttccatccaggcgatcacactcatgttgtaaaatccgggcctgccaaccagttgcatttattttgatgggttcaccgtaacgatcaaaacctgcaacctcaacatcgaggtaccgctctaccacagcactatatccaggaacactgcacaatgttattaaagatgagaatgtttcttgacacattattatcacataaacacaaatataaagcgatccagagctggtatgctataaattatgacaacaccgctgaatagctgctaccttaacaataatt

SEQ ID NO: 10371 - DNA, 377 bp, Glycine max
  unsure at all n locations
tgctaagcgcgcnttttcatcaatccagaattactttcttctttgttggtacaccaaaactctacccaaatacaatttaaactaatttaacttcaatgaactaaaaaaaaattaaaaatattaatttataacttattgagaacaaattaagcaataaatgaagaanattaagataattgttgtacaaattcaataaaaaaaaaactaaacatacacaacaattatcttctcccaactttggccattataattcgtaacatgattatttcattatgtaatgtggtaattaatttgttaacaatagattctaggttaattagagacaaagtaaaattataaatgttcctgaaatttcttttctaaccataactctcatg

SEQ ID NO: 10372 - DNA, 388 bp, Glycine max
agctagagctctccctttctctctatattatatatttactatccattctttctttcacccctcagttgtgaagccctcaatggccatgagtggataataccctagtaagggcctggcgggcctaaaaagccaacgatgtatggtgcacttcaagagttatcaatgcagagaggattccttccaggattttattggaacaagtggccttggaataattaagaggggggggggggatgtaatcacaactgaatgagctgagtcagcacattcagatattcagtaaggaaaagcagttaacaatagttgctccttcctctgtataaatacctatgtaataaatgaacgaaaatcattttctctttctcttaatttgtataaacaattctct

SEQ ID NO: 10373 - DNA, 380 bp, Glycine max
  unsure at all n locations
agtgcanataacatctatgaatggaatatagatgcccaaatggagtacaatatcatgaatacactccaacatatgactatggtagccatgacatactagacatcccatgagtgttctaaggaaacaatcatcgatatcctagtggcaggatttttcggccaattaaaaggatggtggaataattatctcactaatgatgaaaaataaaaaatttacagtgcagtcaaaacggatctcaatggaaaagtcattaccaatgacgataataaagagattcttgacactgttaatacacttatttttacaatagcccaacactctattggtgacccatccctttggaaggataggtccgcgaaattattatcaaatcttaattg

SEQ ID NO: 10374 - DNA, 462 bp, Glycine max
  unsure at all n locations
agctntatcttcttcataagggattcaagctcatgctcgagaagccttccaggtcaagttataggatatatggttagaggaacatcttcatctttgtcaagcagtaactccttgcctttgtgtaacatttagccttttggaacaaaacaagcttatctattgctattcagaactaagtgtttggagtggctaagcaagaaaattgtgatcctagcatgaaaggcagacaagtgttgatcctttctattcttgtcaaaaattctgtcttgatatggtttcttatcttctgtgtaggtagataacttcattcttagcttaagttcatagtttgactgctcatagtctttgagactctttctctctttatgtgccttcagattgatgtctgtagtttggaaggtctctccaaacaaagtttgatcccaaggaagaacaaaattgacggaacacaggtgactcatc

SEQ ID NO: 10375 - DNA, 194 bp, Glycine max
  unsure at all n locations
cgttcatgtgtcctccatcttcgagtttgttgccatgcgtagtgattgcttaaggcaattctccattctcaaccctttntcggagccccatgaatagcgttctcgttcatgtgtcttccaccttctagtttggagccatgcgcagagattgcttagtgcaattcttcattctgaacccttttttctgaacccca

SEQ ID NO: 10376 - DNA, 200 bp, Glycine max
gaaactgaaattgttggcaaccaaaagtcacccccaacagccaacaagtcagccaccatttggtctcccaaaaggctgatgcctaggttgccaattgggcccttattacaacttgaactaaagcccttttagttgattaacccaaaacatatttttggtcagccaactttacaaggattgggccattatttagacaaact

SEQ ID NO: 10377 - DNA, 407 bp, Glycine max
  unsure at all n locations
ctcaagcttgagtaaataaaacgacaataactntttactcggatgtccgattgagtcccgtaatatatcgagacgctcgtaattganaacagaaactctgagcatattcgaacgacaataacttttgactcagatgtccgcttgtgtcccttagtatatcgagacgctcgtaatagaaaacggaagctctaagaaaaatcaaacgacaataactnttaactcggatgttggatagagccccgtaatatatcgagacgctcgaaattgaaaacagaagctctgagcaaattcaaacgacaataacttttgattcggatgtctgattgagtcccataatatgtcgagacgctcgaaattgaaaacagaagctctgagcaaaattaaacgacaataactttttactcgga

SEQ ID NO: 10378 - DNA, 451 bp, Glycine max
agcttccatcaagaagatagagattagctacacatacctctctaatagctaagctcacctccttgagatgaaaagctagatcttagctacacaccccctataatagctaagctcacccccatgacaaaaaaacatgaaaatacaaaaaaaaagtctttactacaaagactactcaaaatgccccgaaatacaaggctaaaaccctatactactagaatggccaaaatacatggcccaaacgaaggaaaaacctattctaatatatacaaaggtaagcgggctcatacttagcccatgggctcaaaatataccctaaggctcatgagaaccctagggccttcccttggatctttagcccaatctacttggagtcttctacccaatgcccttgcgggataggattacatcatacttgccccaagaaccatctaaagatgtattgtcggaagat

SEQ ID NO: 10379 - DNA, 276 bp, Glycine max
taactggagggcgacttatgaatatgattaatattttctgtgcattattagatggaaacatcatctgttatagtggtacaataatgacgtgttacatgctattcttattatttgctagtagaagatgctaaaatcgattagaggattgttaaaaataatttgtcaagctattaatagatagaaaatgtgcgtgtaaaaatattgatttggtcaaaattaaaaaggtatttgtaatattaaatcatgaacttccatttaaacatgtattgtcttagg

SEQ ID NO: 10380 - DNA, 464 bp, Glycine max
  unsure at all n locations
agcttgctgcccagctcgcccaggcgagcaaggttgcttcctccagaagcaacagccttctggtggaatcttctggagcgcccaagtgggcctagttgctatttgcacccccatttttactaaatacacccccctgcccctttttttgtaattctttttccgtaacgttacgaaactttacgaatttcgtaaggatacttattttccttctgcaaggttacgaatccttacggattatgtatttactcttttttagctttcgaagaagttacggaaacccacagattgtgcaaaaacacctctttttgacttccgccacattacggaatttcacggatcgcacaagcctgcttccttttgatttctgacacgtctctagacttcatttattgtgcaacanaggacgccaagtatctcanagcggctaaccaaaggttgcatgtcatcaagtaataatccccgga

SEQ ID NO: 10381 - DNA, 486 bp, Glycine max
  unsure at all n locations
taaaccacagcaacacaaaatctatgtgtccaaaacccctcaattcaatacgttntctaggtttgaaaagtgaaatctagaatggggtaaatttgaagcaaactctcacctgacacaagtccataacatcaatctaaactctctcaaactgaatttacacctaacattccaccaaatcaaaatttgactcttcaacacccaattttgccctagaaatggctcttggttcactntggtcatntgcttttctctctagctcagcctaacctttctcacatgttctaaatgacatttcaagctagtattaactcactttaacctccatgtaccacagaattcagacttagtccttcaactctcaagcctcactctntttccactcacaacatcacattctcactttctaaccctaggttaattctacccttcatctctaacagagtctcatcagcaatttcagcatataaacatcacagacatcatcac

SEQ ID NO: 10382 - DNA, 441 bp, Glycine max
agcttgcttctcaatctccctcttgttgatgatgacaactctgaaatcaagaaacacatacacattctttttcctagtcgatcactcacttgattcttcatattctccccctttgttttctagtttaaccttctcttgaaattaagatatttaattatgtgaattcttgatttaatccctattttctctcacccattggcatcaacaaaaagccaaagtgcgtaagacataaaaacatacataaatgattaatcactcataagacattcattgaaaaatttaaaataatcatgaagcaagaaacatgaatagaccaaatatgagaaccacatagtcatataacataattcataattgttcagtcatactatgcaaatataagatatactacatgttcaaatgtcataataatatagccaaatacacgactagaaatcaaag

SEQ ID NO: 10383 - DNA, 482 bp, Glycine max
  unsure at all n locations
agaaattcatgaaggtgctctaatgtctgaaatctatgggattaagatggtcattgaccaatccctattntatgatttaacaaaatttcctagtgaaggtgtaccttttgagggtgcactgattgatgaatggaaattcgatttctctgtgcatgatgcccgccggttggtttgcaccaaccaagcggatatgaccggaaggcttcttgccggttcattggcttttgaaagtcgcatcctccattaccttatagtttgcattntgcttcctagatcttcaaaccttgcctaggtttctaaagaagatctcattgtcatgtgggcctttcataaaggtttacaaatcgattgggcacatcttggtagatattgcatgcataaggcatngcgattgaatgccacattgccttatnctcatctnagtactctntttcttcaacacttcaacatccctcttgattctgaaccctatgttcaaatca

SEQ ID NO: 10384 - DNA, 443 bp, Glycine max
  unsure at all n locations
agcttggttagatatttaaatgaagtagaaaaaagtgagaaaaatataaatattataggtgataagaagaaaaacacagaaagaaatgatcagtattaataaagtattttaaaaaaataaaatatctaaaaatcattactcattaggtattgccctttaactatatattgaaattcaacactttnttggtgcttacggtgcacttgttgtgcttattaaacagaagaattaagaaagtatttctttttctaggctcatacttgctaaaaaaatcaagaaattaaaaaatatttaataagaagtatacatatttaataaattaatttaatttaaaacataaaattagttgttttttattttctatttgaattattgacaagtaaactaacacgtagtagacgatagtcaatgctgtgaggaagaagacgtgtgtggacaacctt

SEQ ID NO: 10385 - DNA, 499 bp, Glycine max
  unsure at all n locations
cgcncacgcgctgtccatcattagcgacctatgatactaagctatacctaagtggtctgataaattagacccattactggtttaattgtacggaaaaaatacggggggaagtgttttcaatcacaaaaattttattaatttggaggacatgggacacaattgccaaataattaccaaaaatcatgtttaaacaaagaggaatggcacttcgtttataaattaggagaaaggagaaaaactgcaatnggatgaataaatggcaaagtgcaactgacccttttggcagcttacaaattctcatcatctgccatcatgtgtcttgctccaatgttgatacatggctcatgatcagcaaccaatgtcatctacccccatgaactctcttttagaagtttccagtacctgacataaatgttcgatgtcagtggctttgcttggtgacatgtgcatcaaatctgagcttgggcttacgattgataatacctgagatgaacattct

SEQ ID NO: 10386 - DNA, 452 bp, Glycine max
  unsure at all n locations
agctntcgcaaggcggngatgttcatgagcagatcagttcgttgccgtgtagtcatgatctacataatgtcagatcatattactttgtatgtatgacaaaaatgaaaccaagatttttggacctctcatttatagttatacaaggttgcatacctccatgcttgttccatccttagctatctgttgtgatggagcaaattcaacaatataatcagttacagatagaagccactcaatttcttttctccacctggcctttctttctgaggacattggctccagctttgattgttctccgaaaacagatgctgcattgaatcaggaaacaaattattgaatggaaatttcattgagacttgagagatcacatctcagttagtcacagttataatatgcatgtgctttgaattgaattgagatgactacactatctattaattntatagaaatca

SEQ ID NO: 10387 - DNA, 456 bp, Glycine max
  unsure at all n locations
ctaagctctactgtatagttctctcttaaaatttcagtctttcggtttgtgtgtagcttaatgcaggtctttccacccaattgctgcttaccttatttaatgtgaatggagttctncattacggaattgcacggaatgcaaatcctaaactccagattggagatgttactattcctcaatattgggcccacacaggactttggcattggcaggtactatgttggataatatattaatctttatttgctttttctgaccatttcatcctctctatatacagtaacttgtgacaacaaaggaagttgaaattaactttttttttctctatacacatgctcttatataatttcgatctagaattatatganaaagaagaaatttatatccattctaatggtacatgactttaaaaccaatcactatatatatgccatacgtgtangaaccattatacta

SEQ ID NO: 10388 - DNA, 464 bp, Glycine max
  unsure at all n locations
agcttcttagtttcagatgatgctgatgagtttgtagctacctcatgtactcctctaatgactatagcatcatttctggcgctaaactgctgggagttggaaaccatcttctcaattaaatttctggctttagcaagagtcatgtctccaagggctccaccactggcagcatctatcatacttctctccatattactgagtccttcataaaaatattggagaagaagctgctccgaaatctgatggtgagggcaactggcacataattttataaatctctcccagtattcatataggctctctccactgagttgtctaatacctgagatatccttcctgatggtcgtggtcctggaagcaggaaattntttttctaagaatactcccttaaggtcatcccaactgatgatggaccttggagcaaggtaatacaaccagtcttttgccactccctctaaagaatg

SEQ ID NO: 10389 - DNA, 307 bp, Glycine max
  unsure at all n locations
gaccacagagtggtacctggagatatgtcgcggnggtcaggagaccttgnggacgtcaggtggggtgctattgcccaaaaccaagcttgaccaatcccgacccaacccgggcatagtcggtcagtgagaacctgtgatgtacctaagcaggcgagctcctggcagtcaacagataaaaggaaaacaagaccacaaancanggaggcttgtggtggctggccagctcgtgaatttgtgtaatatgtggattgtggcctctggtaatcgattaccaacggtgagtaatcgattacaaggcttaaaattg

SEQ ID NO: 10390 - DNA, 456 bp, Glycine max
  unsure at all n locations
agctatanaacctagtcgacattcttttcgttgaanaaagtatttgcatagctgtaatgtattcaatttttccacctaacaatattgcaggttgacaaaaagagtaatttagaaagtactcactcgaaagtgtctagcaagatagattctcaaaattaggataggacaataaatttgtccaaatatttataaaaaaaaaatgaattaaaattttctcctaagttagaattaacttgtacacttatttttttttctcatttaatctttctaaaaactcaactatgcacataagttgatttttgtttccgatagaaattcaattcatttcacttttattatatttccttttcctataaatatatgtggagaaatttatttaaacatcacctcgatattttcagcttttagtttcctccttgttgtattcataacaattacaaaggaaaactatgaact

SEQ ID NO: 10391 - DNA, 468 bp, Glycine max
  unsure at all n locations
tatgctgcanacatctacaacagacctcctcaacctcagcagcanaatcagccacaacagaataattatgacctctccagcaactagtacaatcccgggtggaggaatcatcccaaccttagatggtcgaatccttcataacagcagcaacaacaacaacaaccttattttcagaatgctgctgacccaagcagaccatacgttcctccaccaatccagcaacaacaacagcaacagcccagaaacaacaaacagttgaggctcctccgcgaccttcccttgaagaacttgtgaggcaaatgactatgcaaaacatgcagtttcaacaagagaccaaagctntcattcagagcttaactaattagatgagacaattggctacataattaaatcaacaacagtcctagaattctgatagattaccttctcaatctgtccagaatcccacaaatgtgagtgtcattacat

SEQ ID NO: 10392 - DNA, 457 bp, Glycine max
  unsure at all n locations
agcttaggctaaactntcataagctatttaagctaagtctagtccaacaagaaggatntgaggatgaagcttagtttaagttagtctaaacctaggagggctgtctatattgagcctagtccaacaatagggatctgaggaagaagcttggattgattcattccaattggggatcgaggtttagtaatttaggctacaacatagaacacaaaagcatgattgattagagaaacatccttatatgcatcagctggtctgctagaaagacccaacacttctacctattgctatcaattttacttacttacatttttactggttttatcctagacatagtttaattctactttaaaccatcaattatcaatgtttctttcaacaatgccttatttctgaatttaacccagtcttagactagtttcattgagttcgatactcagattcatcccatttaatt

SEQ ID NO: 10393 - DNA, 482 bp, Glycine max
  unsure at all n locations
ttctccctattttcgtataaataaggggagaggtgaagggaaaaaatgttcagcccttctggtatttcgaggtcacttgaaattagtgaaaaaaattgttttcgtgaagaaaatccaagttgaggcgcttccgtaatgtttccgtgggtgatttcgcaatgattttcaaccgttcttcgacgttctttgtcgttcttcggtcttcaaccggtaagttcccgaaatcgaacttttcaatatattttcgtttcatttactttccgtacccccttttgacgtgctttagtcattttctcgcctaatcaaaaaataaaataaatttccactgatcacttgaattgtaacatccgttaatttctgttaaaatgaaatccgaccgttcggtcatgccataaccacgttggaaaccaataagaggtaaaataataatataataataaaaaatatattcttagtaaataaaacaaanaaatcaatcggac

SEQ ID NO: 10394 - DNA, 387 bp, Glycine max
agcctcgcctcattgatgttctctttcttttttgttaatatcgctctctaatgaatcatgtaactcaaacaaagttcacgagaggctaatgtaaattactccgaaacttatgaaattatcatgtgtgctactccaaatgtcactcaatgcaccttatttccttccctttctcctcctcctcctccacaaatagttcacatttgccaaatacttaaataactttcactaattcaattcatcaaaattgtccactgcaagcattctagttctctctcagaactaattcccgaaatattgaaccacgaaaaaaaaaaaacacctctgaacatattgctaagtgctaacaatcatccacaagatggtttataatattatcatgcattaaat

SEQ ID NO: 10395 - DNA, 486 bp, Glycine max
  unsure at all n locations
cgtattntatttattntaatcccaggaacatactccattgtcagaatctgcattggaaaaatagttaaattgtagataaatatgaaagatatcagaagtaacaatgggaaagatgcataactgctatattattatctatatgaaaactgaaggctaaacctgtggtgtggtataatcccagatgattgtagggactttcacataatccaagttttcaaagttacttgcaaatagttctgcattagcagcttccttggtgtaatcaatctcctgaaaattgcaatacatgttacattaacaggattagataaagttgaggatgtgaagaaaacacatganaacatcattctgaaacatgaacaagatccacaaattaacccctccaaacctgcaaatttgcttaagagntcctttatacattggctaacctataatacttgaaaagcaataatgttgttcaacgcttagacaacgactgatgacata

SEQ ID NO: 10396 - DNA, 392 bp, Glycine max
agcttgaaacgaggtcaggaagctagggaagcctctggtaatcgattaccaaggggtgtaatcgattaccaggcttaaaaagggaactgggagatggtggaagcctctggtaatcgattaccagcctgtgtaatcgattacacagaggaatgggtcactggtaatcgattaccaggcatgtgtaatcgattacacagtgcattattgcatatttcatgttctgagactgtgtaattcaagtttagcctctggtaatcgattaccaaggctgtgtaatcgattaccagagatgaaaagccttaagataccccttttaatgtcatgtagtggttatgagatgcattgtgcggcggcatagttagattcttgtgaaagagtctacccctttcttt

SEQ ID NO: 10397 - DNA, 386 bp, Glycine max
  unsure at all n locations
tccttaagaagattcctaaagaagctagagcttagctacacatacctctctaatagctaagctcacctccttaagatgagaagctagagcttagctacacaccccgtataatagctaagctcactcccatgacaaaaaacatgaaaataacaaaaaaagtccttattacaaagacaactcanaatgccccgaaatacaaggctaaaaccctatactactagaatggccaaaatacaaggcccaaatgaaggaaaaacctattctaatatttacaaagatatgcgggctcatacttagcccatgggctcgaaatctaccctaaggctcatgagaaccctagggccttttcttggatctctagcccaatctacttggagacttctagc

SEQ ID NO: 10398 - DNA, 452 bp, Glycine max
  unsure at all n locations
agctagtcaaaactcagggcaaacacatcctcggtccaaggctcgacaaacctaaagttcacccttggtgagccctttctgtttctaagttccatcttcaaaggaactcgaggtacacaaggtctgtccttgacgatcttctttattcctagtttttatctgtctaggaatacgagtatatataaaacccaaggtctgcccttggtacagattcctccaaaacccaaggtccacccttggtacgtactcctgtaaaacccaaggcatcccctaggtccactcactcgcagcaaccatgacgaccacaatcaaaggtctaagttcaacaacacaaactaccaccaaactatttggcaaggcctttcaatcaggtggaagtcatacttgctcctcanaaccatcagagaagaagcttcgcaagtcaaaacgacccatcaccaaaatgagtgaca

SEQ ID NO: 10399 - DNA, 390 bp, Glycine max
  unsure at all n locations
tgagaaaataacttttactatcaaagttgcttagtctatcantttggtagtatttcacgctgacatatactaactttcttcccaccctaacaacactatcttgttcacatcaatgatatcatcacctgggtctaatctgagaaagcctattcttccatattgcgtgaagaatcatatgaaacaagtcatacttaacaggaactttgtgccacangaagtgctgctgaaccttctttactcccaaatgcagtgccaggtacttctcttctgggatngagagaagtatgtctctgagacttgggacatccctttcacgaacaaacagggaaaatgcctnccacttcaatacctcanataaaggaggcacantaatatctgatatgataactg

SEQ ID NO: 10400 - DNA, 403 bp, Glycine max
agcttgagataaggaagtgttgaagggtgaaacttcctgcttttattgttgaccacagagtggtacctggagatatgtcgcgggggtcaggagaccttggggacgtcaggtggggtgctattgcccaaaaccaagcttgaccaatcccgacccaacccgggcatagtcggtcagtgagaacctgtgatgtacctaagcaggcgagctcctggcagtcaacagataaaaggaacaaagaccacaaagcaaggaggcttgtggtggctggccagctgtgaaacttgattgatatgtgagatatggtctttggtaatcgattaccaacggtgggtaatcgattacaaggcttaaaaatgaagacagggggctaagatggtctctggtaatcgatttaccagggatg

SEQ ID NO: 10401 - DNA, 487 bp, Glycine max
  unsure at all n locations
taagataccacctaaggcaaagattttacctggagactcatcaaagactgcttaccaacgaagctgaacctaagagggagacaagtggagataactgacccaatgtgtccgctttgtaataattccgaggaggatgcagcacacctcttcttcagctgcagcaaggtcctccccttgtggtgggagtcactttcatgggttaagtcagtgagtgctttccccaaagaacccaaataccattttatgcagcatactatatcgaacgctacacgatcaaaggatatgagatggagctgctggtggatagccctcacaaggaccatatggcaacacagaaacaagctgttatttgataatcaaactnttaacgcaaccaagctgatggatgaagcacttcttcttttatggtcttggcttacagcaatggaaaaagaatttgatacacatttcaatcagtggtcctctaatctggcagatgcctttatgt

SEQ ID NO: 10402 - DNA, 434 bp, Glycine max
  unsure at all n locations
agcttcggacaactcanagctatcctagagatataatcatcggtaacacgaggacagcttctgattaacaacacctcaagggttgcgcatctgaaatgcttagacaagtatacacaaagaagcttaatgctccaatgctatgacttattcacaatggaaggcacaaaccccgcattttacagacaaattaaaatattggagtttcagaatcagagttctaatataaaagaaaaatcatagcatactcttgaaatctgaaaagcaatcagaacgaattatggcatgtttggatgcaccttaaatgattcaatattacatgaaaatatcaactaatgtaattataagtataggtaacatttagttcctagttgaagaattgattctcgtccaaaattgattctgagctgaaacaacattttgatactaacatgctt

SEQ ID NO: 10403 - DNA, 420 bp, Glycine max
aagatgatgctttaatggaggataagaatgagagaacgggggagcacgaaattgaaagaataaaagagggagagaagtggaactttgaaatgtgtctcataagactctcattcatcaaaggtacaacaagggttacacatgctgttatttataaactaggtagcttccttgagaagcttatatgagaaaactttcttgagaagcttctttgataaaacttccttgagaagctagagcttagctacacacacccctctcataactaagctcacctccttgagaagcttccttaagaagatgtctaaagaagctagagcttagctacacatacctgtctaatagcttagctcacgtccttgagatgagaagctagaactcagctacacaccccctataatagttaagctcacacccatgaca

SEQ ID NO: 10404 - DNA, 509 bp, Glycine max
  unsure at all n locations
tactaagcttaacaactntaacacgtacctgctagctgntattgcctgtagtgttngaatacaggttttaatacatggtttagacatatacatgtatatataaaaagtagtaacaatgtgctttacctgtacttgatataatgaaacagcttccacaagaacaccaatggacaaaccaacttcaactacaacaaagtaattcaccttcacctggagttcatataatgagtaatggcattagaagaagtcaaagccaaaccaacttcaagtacaacaaactaattcagctttttctcaaccaaactatgtcaaactatttgttgtctattaaaagtgttagttattcatgtgacagacatactattctagtttctattcatcattaagattcacaaagcacatatagtgttctcatagcaataccacacacagacaggggtgcagatagcagccacaggcccacaatcagaccagctntgccttgctattatcttgtcnnggagttgtat

SEQ ID NO: 10405 - DNA, 340 bp, Glycine max
tatacttggccttcatttaactgtctttgcgcttggcggccacgctcaacaaagtattttcgacacctactgtacgttgatttgaccaatgctgctatgggaatgtttcgacaatccttcacaaccttattgatacattctgaaaggttggttgtcatgtggccatatcgacgtacttctctatcataagccatcgtccatttttcctttgaaattcgatcaacccatgtggctatggctggactcaaatcacgaaatttttgtaaattctgatcaaaaatgtgcttgcaaggagtgtatgctgcataaaaatagttatgaataacaactttaagtatat

SEQ ID NO: 10406 - DNA, 364 bp, Glycine max
acctttgaagccactggttctacacccctgtgcgagacgaggtttccaaggtactccacctgagactgagcaaagaagcacttacacaacttcaaaacaaattgattttcgagcaatacctgaaatgtggtctctaaatgacgtagatgttcctcgattgacccactataaatgagaatgtcatcgaagaaaatgatgatgaatcgttggaggtaaggtctgaagagcatgttcatggtggcctggaatgatgatgatgcattacacaacccaaatgacattactttgaacttataatggccatggtgtgttcaaaagtctgttttgggaacatctgctgagtggatgcggatttgatggtatc

SEQ ID NO: 10407 - DNA, 454 bp, Glycine max
  unsure at all n locations
agctagacaccattgcttggtgctttcattgctgattcttatgctggaaagttctggactgttactgttgcttccattntataccagatagtaaagatcctctcccgactctttttcttatgattgacaagtattacttatatatcaaattttaacttcttggtgttccaatcatgtattttgtattcttaccattcgagaaaagtagaatgttatctgcagtgatatggatattattattagggtaatggagctagaggatcaagggaaccctttccctaaccctaattttattgaaaattgtatcggaatattttgttttttattgggtagttattatgattatttttattagtttttattagtgagagaaatttaaatttagtatctcttttttacttctacaatactcaactaccaactcaatcgngtagttttgttatgttttgtcact

SEQ ID NO: 10408 - DNA, 455 bp, Glycine max
  unsure at all n locations
agctagcagcctagttgtagctntcacgctnntttctctaatcagtcaaatgctacacaattcatatactaaaagctaccaaatactcctacgtggcattgctagaaatcgatagccgtcaaccttctacgtgagatgtgcttaccttaccacattaaagctagtactttacagtttctaccatttgttgtctgactcttctctatatcctttatatttacttttaatatgggtaatttagtaattctagttaagataacaaatgatgataaagaaaaaaattaattaataaataattcagaatgggaataaatttacaaaacataaaatatgatgagacaaatattttttaaagcataatttgtctttggaaacttcaatgaatctcanattaattggaatgtaattatatttcgatagtagctgttagaaactctaatttatataatcgaaat

SEQ ID NO: 10409 - DNA, 450 bp, Glycine max
  unsure at all n locations
agctttcataagtganatcaggtgcaaccatctccctaagagtcctctcacgaggtggaggttgagccatgttctcaatatgaaaattagtagttgaatgctcaaaattagaatattcagaatcaccagcaacagaatactcagaatgctcaaaatgctcacaatgttcgaaatgcacagaatgatcaggatgaacactatgcctaactaatgtatgaaaggttctatctatttcaagatcaaatggttgtgaatcccctggattgcccctagtcatgcattatatgcagcaaataatgtgttctcaaacaagcaccaggggagggttaaaactacaactatagtcccatgatatccaaatgagctgaaattttgtgagcaacaccctataatcatgaaaagatagcacanaaattttcagacaaaaattcaaagtctaactatgaaaac

SEQ ID NO: 10410 - DNA, 439 bp, Glycine max
  unsure at all n locations
tatgctgcanacatttataatagacctcctcagcaacaaaaccaacaacaacagaataattatgacctttcaagcaatagatacaatccaggttggaggagtcatccaaatctgagatggacaagtcctccaacacaacaacaacaggctgtccctccttttcagaatgttgctggtctaagcaagccatatgttcctcctccaatacagcagcagtcaccacaaagacaacaagcgactganggcccctctcaaccttccttagaagagttagtgaggcaaatgaccatccagaatatgcaatttcagcaagagacaagagctttcattcatagtctgacaaatcaaatggggcagatggctactcagatgaatcaagctcagtcccaaaattctgacaaatggccttcacaaactgtgcataatccgaaaaatgtaa

SEQ ID NO: 10411 - DNA, 380 bp, Glycine max
  unsure at all n locations
agcttctatataagctgaaccattntatcaataaacacaagttgagttttattcagaaaattagagtttatctcttttatcttagtgagagtgattctcctaaattcttgagtgattcaagaacaccctggctgtatcaaaggactttcacaacctttgtgtgttgccctcgctggaaagagtgattctttccttcctatcatctccacccttgttctttcaaaccacaattccagaaaatccacctctgcccaaaattatctcgtgaccataactcccatttcacacactcaaattaagtgattcttgagcctaaattgaatttcanaacgagacctttcacctcgttttggaaatcacctcattggagccctgtagct

SEQ ID NO: 10412 - DNA, 472 bp, Glycine max
  unsure at all n locations
tagcttgtcgaaaatactaaaactgtttaaggtccaacgcctttaatggtcctctntgcttttatcggntaacatggaccgttcaaaagcataaaatcaacatgtaactctaccacttttgcaagaactacgtaggtctgatttcctcatcgcaattgaggatacgtaggagcaaaagccccgcttttgtcgaccacccctagagatcgttaatggtccagtgccttaacgtttctcttctttcacaaccaagagatcgttaatggtctaacgccttaacgtttctctcctttcaaaaaccaaaagatcgttaatggtccaaaggccttaacgtttctctcctttccaaaaatcaaagatcgtttaatggtccaacgccttatacaactntagttcggtcaaaatatatcttacaaaanaggataaaaataacttaaccaacgtttagttctcaaagaactacgtaagtctg

SEQ ID NO: 10413 - DNA, 452 bp, Glycine max
  unsure at all n locations
agcttcattangcgttgcttcgatcctccggcctactcctagtttatgttctatttccttagttttatttcagccttgtattttggcgtttattactttagtactctgattatggttgtcttggatgtttaccattatgtttttgctttgaggttgggttatttcttgactttgttctgcttaattaagacttgtgtggtttattattctatgaattgaattagtttatggatggattgtgctatggttcttgttgatgcattatttcttttctttagacagtgttggctttttgctattgccaaagggggagagaacaagggtaggtagaatttgtcatcaaccttaggcataaattccaatcttaatggggagtgagtgttgtgagcatgctttatctattgtatattatttatcttgatttcagattatcggcatcatcaaagaggggg

SEQ ID NO: 10414 - DNA, 474 bp, Glycine max
  unsure at all n locations
ntntgactcctgattctntggaacttgcttaactctggattctntagcatcatcaaaataatcttggaagacattgcttccacaatagaaagttggactagctcatctaggtccctatatggaaggagttcaaccttgtccctcacttccatattaagcccactaagaaacctagctatgcttgttctttccccctccctaagtcctgctcttaaaaggagtagttccatttgttgtctatattcttcaacacttatactcccttgtctaagcctttggaacttgtccataagctccctttcatagtaggagggaatgtgcctcttcctaagggcactcttaagatcattccaatactctactggaggatccncatgaatccttcgttccctaacaagggaagtccaccaatagagggcatacccttgaaagctaagggtagctaataggaactttatctcttcactaatatga

SEQ ID NO: 10415 - DNA, 451 bp, Glycine max
agcttgcaccatgttaacttacaagaaatcaatgttaatcaaagcattctaaaataattattcaacttggagaacataaggacaaatgggcagagttaacttacaatttattacaataaaacataggtatccaacatcaatcatcatccaacacaaaattcaattactgatatgcataaaattggatgggcccacaccataatacatataatccaatacattttggttttatgaattcactccaaggaaaagcagataacaggtcattaacatcaataaaatatcttttacttacgaaaaacatataagataacatcaacaaaccatatgtttatggttagaattaatccgctctgtgcaaatcaaattggaatgccactttcggttatatacataggattattattattatataattcaaattgaaatcaaagcattgaaatacgaaaac

SEQ ID NO: 10416 - DNA, 382 bp, Glycine max
tcacatgtttgtcatcatcaaaaatggggagaatgtgaatgtatgtatacatgatgttgatgatgtcaaaagaagaatcaaacaaggctcattctgcttcaagattaatacaagattgtttcaacaaacaaagctttgattcaagatttcttcaagatcaagccttgcctcacaatgaaaggcttcaggtcattcaaggcacatgtaatcgattaccaatacatgtaatcgattaccaatggttggaaagtgtgtaatcgattacacatcatatgtaatcgattaccagagagggatctcaaggaatatcgccaacagtcacatcttatcattcgaatactgaatgggcatcaaaggcctatatatatgtgtgacttgggac

SEQ ID NO: 10417 - DNA, 380 bp, Glycine max
agcttgtgccagaatccgcaatctacgccaagttgctgggactcgagactcaaatagactctgctttggctaggaagaaaatcgatgtgcaggagaatgttatgaaccctcgctgtgttaggaaaacgcttagagtttatgtttacaacactttttcgaatcacgtgaaagtggagcctgtgaagaatggtgtggaggagccttcttgggcgcttatgataaccggaagggtgttggaagatggtaaggattctgtggcggaagggatttcgacgaaggaatatccaaaattctcggctggtttcaagaagattaccatatacttggatcagggcttgtaccaggataaccatgttgttgtgtgggatagtgcccgttct

SEQ ID NO: 10418 - DNA, 195 bp, Glycine max
attggttacattattagatatccacttatatatctagttcacgacttgacgagaatatagctacagtttaggttcgcatgtaagctatactcacagacaactaatgagcaataacttttttttctcatcattctctaatgctaaatttctgtctgaattaactaatcttaagctcaaaagtaatttaaaaaaaat

SEQ ID NO: 10419 - DNA, 413 bp, Glycine max
  unsure at all n locations
agcttcaacattcaatgtcaagcgtctcgatatattacgggactcaatcagacatccgagtaanaaggtattgtcgtttgaattggctcacagcttcaacattcaattccgagggtctcgatatattacgggactcaatccgacatccgagaaaaaaattattgtcgtttgaattggctcagaggttcaacattcaattttgagcgtctcgatatgttacgggactcaatcagacatccgagtaaaaagctattgtcgtttgaatttgctcacagattcaacattcaatttcgaggcgctcgatatattacgggactcaatcagacatccgagtaaaaagttattgtcgtttgaattggctcagaggttcaacattcaatctcgagcgtctcgttatattacgggactcaatc

SEQ ID NO: 10420 - DNA, 404 bp, Glycine max
  unsure at all n locations
ctgagacaattcanacgacaacaactntntactcggatatctgattgattcccgttatataacgagacgctcgaaattgaatgtttaagctctgatccaattcaaatgacaataaattttttctcagatgtctgattgagtccaataatataacgagacgctcgaaattgaatgttgaagctctaagccaattcaaacgacaataactntttactacgatgtctgattgagtcccgtaacatatcgagacgctcgaaattgaatgttgaagctctgagacaattgaaacgacaacaactctttactcggatctctgatngagtcccgtcacatatcaagacgctcgaaattgaatgtggaatctctgagccaatttacacgacaatacacttttacttcgatgt

SEQ ID NO: 10421 - DNA, 448 bp, Glycine max
  unsure at all n locations
agcttaacaaacttagaaatcaagtgatcatgaattccgaaatatatggggagtaaacgaatgcacattntatctatatacaattgtttgttgcttgcttgaatcttgatttcaggtattgtattgtcatcatcaaaaagggggagattgtagatgcaattgcctttgatgttttgatgatgaacatgatgatgtgttgcaattgatgcaaatgagcttttcaagattaaattcaagacaatgcttcaagattacaagtcacaacatcaagatgatcactagaatattaggaaggcaattcctaattgaattagcaaaggtttggccaagtgatttatattaaaaagtgtttctcaaaggttttactctctggtaatcgattaccagaggatgtaatcgattaccagtggccaaatacgttntataacagctataaaaatttgaattc

SEQ ID NO: 10422 - DNA, 324 bp, Glycine max
  unsure at all n locations
tcanattatcatccanaagtatgttgctggatttaatatctcgatgcacgatatgtggttcacactccttgtgcaaataagctaatccatgagctgcaccctgngcaatcttgagtcttacatcccattttagagctgaatttccatcctcactctcatgcagccaatagtcaaggcttccattctccaagtaggagtaaattaacaatctgtcattgaaatgctgacaataacctttaagtgaaacaaggttcttatgttgagctcttgagagtgcctccacttcagcttggaattcacgttccacctgaccacagtaccctg

SEQ ID NO: 10423 - DNA, 421 bp, Glycine max
agcttctcacctcttcctaagagtgtattttgcggggatcgaatccccgtgtgttaactaaactacactcattcatacaaataatttttttttactactttagtattaacaagtgaacatttttatgtaccacggcattgctggtggacacgcccttagcggaatcgtcctcctcggagtcgcgccgctttctgctgttactgggtccgagtccgtggctcggcccggtggtgaaatccccaaactgccctcctggcccgtgaccgaactgcgggcttctgagccccaatccaccgccgccactaatcgccggcgggaactgctgccagatctccgccaagctaaacggcgccgtattaccgctcgcattgttcgcgaagggaaccctcgtcatcatcgcgcccggatccataaacagaaa

SEQ ID NO: 10424 - DNA, 95 bp, Glycine max
cgaacacacatgtttcactaaatttccttgcatagtgaaggaatatcaacattaacaagaaagcaagcacacaaattaatatgttaatgagacag

SEQ ID NO: 10425 - DNA, 452 bp, Glycine max
  unsure at all n locations
tgcaagcttgatgccattntgttagaaaaagagaagaataatgagaaaaaggagattctcttcatttggcacacttggtatatggtttggtggtctatttatagtagagcaacccatatccattacataactcttacattagcacacttaaagagcacaatgagaatagccattctaattcttaatgtttacataagaataatatcccttaatacttattaacccatacccattcatcttctaatagtaactcatgacttttcattntctaattattattatttctaatatatctcactcaaatagctataatagtatgggtggatggatttattctatttttggatcctctttcttcgggtggttatttgtcatatagtagcaattaagggcttgaagtgagtctacacctagcttaagatcaactntataagaaatcannagtttttcat

SEQ ID NO: 10426 - DNA, 456 bp, Glycine max
  unsure at all n locations
agcttggaaagggaggctttggttatggctcctattnntcactgtcaatgatggacagacactaccatagtggaatgtcagttgaagaagcagttgatctcgttgataagtgcattatggagatcagatccaggctcgttgttgcaccaccgaactttgttattaaaattgtggacaaggatggtgcaagagagtacgcatggcgtgaatctgtccaggatgttcctgttccttcagcttgagtaactctgttcctaattttcattggacttatttcttttcgatttgccctgcttttatcttgctacaatttttttactggtcttgtaatgtctctgaaaatcatggtctatagatgctctaaaggaagacagtttatcatttgaattaaatatgcacgatggctagttctattcataaatgaatgtatgacattgtgtgaagtacgcttgactt

SEQ ID NO: 10427 - DNA, 431 bp, Glycine max
  unsure at all n locations
gacattggcaaactgtatgtggtattagtttttttttttcttttctgtaaatttaagtaataattatgtgaatgatttagtttcatgttgcatttctaagtactaatatcctcaactgtaaggtattaatcatttaatatgttactaaaagtagtgaaagtggtatacaaggattagatgtttgtatactggcttcatataattcagaaaacactagttttctagaagcttcttgttattaaagttacaagagtgatcctttttcttatatcactaagcatgcaagctctctttctgtcatttggattcatttcatcaagatgtgaattcttaccacttcataactgttcttttgtcatttctcttatgctgcctcacttggttaatgacttaacgagttaatgttgtttttcaagacaaaaattattgcn

SEQ ID NO: 10428 - DNA, 424 bp, Glycine max
  unsure at all n locations
ggcagcaagcttgaggacctactcttgctgcctgagtcagtacataagagagttgtgttgatcccttatgacagaacccatacacggcagcatcagacaggatattgtatgctgaggacaatcctacctgtgtggttgcccttggaagagtatattaggggtcgaccaccatgctcaacatccttttcagcaatgatcaggtgaaggtgggtgttgatgaagtacaagatattgatgcttgcatccttctacccactgaagagatttagatagtggggaagacccttaacaccctacttgcttgtgtgccacatcttgtacaatacttttcagaaaaggtgtttactatatgtggcgtncattattattaaacaatgaattgtacaaatgaagtattgactttcattggcttatgttcattaac

SEQ ID NO: 10429 - DNA, 466 bp, Glycine max
  unsure at all n locations
ntaaggctaagtcttcatgtatctacactatctctaacaccatctatgacggctcattgaaggtcacaacacgcctggatgacggagcatacagactactagaactggactggtaagcaattgcaagaacatagaacgccacccacctgaagttctctttagatgacctacatgcaaacccaatcatgtactctctcttctactcaagtcttttgatccaaatatacaanaactatggttttgcagacgtttaacacgcacacttgaataacaagggaattgactcatcaatcattgatagaatctcacccttctttacatatttttcaacagagctcatatagagtcaagtctaaaccatggcacctagaagctcttcacatagctatgaccgcacacacattcatgtccgacagcatgatccatctcctccagaggcagtgcaaccacctaacagcgcatctag

SEQ ID NO: 10430 - DNA, 440 bp, Glycine max
  unsure at all n locations
agcttgacaaagaaatagaaactgtctaagctagatttccatctatgcaagaattgcactgcgcattgagtcacaatgtaatttgtttgtgtaagtagactttgtacaaggttcactctgagtacacatatctgaaggagggttagcacactaatctagaagattatgataagatttaccagctttagtgaaagtagtttttaccatttttggcaaaattctactttatccttttatagtttgttttggaaaattgcaagaagccatacaaggcatggctgagctcatggagagcacctcaagggctgtccaaaatgccaattagtcatattaatggccattcaaagtgcttaaattaagaagataaagattangccttgcaatcccattgatccaagcatttcacctacaataagtgttgntnttaaaagataaagtct

SEQ ID NO: 10431 - DNA, 212 bp, Glycine max
  unsure at all n locations
gagtcttctctgtggctatcttactggtttagccccatcctctaaatntatccgatgcatacatgtggatgggctaataccangaatgtctgctagggtccagcctatagccttcttatgcttcttgagaactgataacaacttctcctcttgctcatcagcaagggaggcaaatataattactggaaaacttttgctatcatccaagtaag

SEQ ID NO: 10432 - DNA, 450 bp, Glycine max
  unsure at all n locations
agcttagctgctgcactaagcttaatctgcagaaaaaatactttctgtgtcttcaggctaagcgccagtccgctgcgcttagcgcctgagtaaaatttcacaaggcgtgctaagctcagcctgctgcgctaagcgcccagtcaaattttcaattttatttttatgtttttgttgaaaataacctgtgctaatctcttgtgttttgtcttatattttgcaaatggcatctaagaaaaggaaggctccttctacacctacccaggccagatatgacagatccaggttcatatctcaagaagcttgggagagatatacagatattgtggtgcctaagaaactactatcggagaggaatgtagtagtttacttcactgagtttgacgagttcaaggaggaactcgagagaagacactatgatgagaagttaactgattntgtacacaaaaatat

SEQ ID NO: 10433 - DNA, 550 bp, Glycine max
  unsure at all n locations
cgacggggtntttgtacccatctttngtgacctatgatactcagcttacatctcgtattcgcgtcattctgatcttagtatanagggtaccgatctacaatgtataaatgaggattcatgtcatgagtaatgtttgtaagagttcagtgtaatgatgaacaccacaaagggtaagtgaacaaatcttgtgcaactatgatcaaataatggtccatccgttatactagcatatctagacctatnntgtttgtgatataccagttactgaccatgagattctagttntggacctatggttntcanggtgaagtaagcatgtagctgtgtcaatatatgctgaanagaacttcactggatctttcccgatttccttantnnatattgtngtggaattctttgatgcattatgcaagtatcctgtcccaatatanatcatatttctgtcatatgctggcggcgagggagtcctatcnatgtatgatatataatcttttcanctgcactagatgatcattatgtattactntaagatgcctctgttggttgagtg

SEQ ID NO: 10434 - DNA, 443 bp, Glycine max
agcttagcagcagtcccaaaacccaattttattcgcaaccaagtgtcatgatttctatattaccaattttgctagctgttaatgttgaatcatagttttgctctcttatctggcattcgtctcatattgtaaacctattccacgtggtccagatttaaaacatacttctcttactttatttcaaaatcattcttctctttaccttacaactcactcaattatatcattaccctttttcatatgcagaataccaacatgcaaacatatctaatccagcaaatggcaccatcaataggcaagctatgatccagaaccaacaagatgccttatctcccatttctttcatcttctaaatttattgtaccttctgcagatttaaaacaagcatttggttcttgatttcaacatgaatctactgtttagtttataattcactcaattct

SEQ ID NO: 10435 - DNA, 311 bp, Glycine max
  unsure at all n locations
tctctaccattctgaccgagtgaattgngcttcaacgtagttctttacagaacctatggcaagctgtgtttggaggccttgttggtaacattgacggacaattcttgaaaggattctatggtaatattggttggtctgacaacctgcatacagagatatacgcattaagacaagggttggaaatatgtntggatctgggtataagggagataacgtgcgaaacagactctcttcacacccttcagttggtgaataatgtcatcgacccccacccacaacacgtatatgcttctcttgagttagtactatta

SEQ ID NO: 10436 - DNA, 445 bp, Glycine max
  unsure at all n locations
agcttatgctgcanacatttataatagacctccacagcagcaaaaccaacaacagcaaaatacttatgacctttcaagcaacagatacaatccaggttggaggaatcatccaaatctgagatggacaagccctccacaacaataacagcatgtccctccttttcagaatgttgctggtccaagcaagccatatgttcctcctccaatgcagcaacaacaacaacaacaacaacaacagtcacaacaaagacaacaagcaactgaggctcctcctcaaccttccttagaagagttagtgaggcaaatgaccatccagaatatgcaatttcagcaagagacaagagcctccattcagagtttgacaaatcagatggggctgatggctactcagatgaaccaagctcagtcctaaaattctaacaaatttccttcacaaactgtgcgg

SEQ ID NO: 10437 - DNA, 243 bp, Glycine max
  unsure at all n locations
tctttaatggagaggggtaccactactggagaacccgaatgcaaatttttatcgaggcaatagatctaaatatctgggaagccatagaaatagggccttatatacccaccacagtagaaagagtttcaatagatggtggttcatcaagtgaaagcattaccatagaaaaacctanagatagatggtctgaagaggatagaaaaccagtacaatacaacttataagccaaaaacataataacat

SEQ ID NO: 10438 - DNA, 443 bp, Glycine max
  unsure at all n locations
agcttgatcattntctaactggttaaactatattttgnggtcttcaaatttttcaactcttattatttgggtcttttaaattttcaaagattaattttccttcctaaatatttgttacgtctaatattttcgtcatttatgtctaaaatcaccgttaattatctacgtaacattaattgtattattgtattttatgacggctaaaattctgtcagaaattgcttagtaatagattcttcttcttctctttctcttactcgacaccagccaccgccgacgacaccatccccaaaccagggagagcgagaaaggagacagagggagagtgcgggttgtcgttggtcttctccgtctcgatccagatgccgacagtggcggtgcgggctggtgttggtattgacggcgacagcggtgtcgggcattgcagatctgaaactagatct

SEQ ID NO: 10439 - DNA, 447 bp, Glycine max
  unsure at all n locations
agcttaaatgaaaaaacacgatatagaaatgttcctttgtcacaaatttcaaacaattgatagagaatttgcattgcgttgcaaagacaagccatgcccctttttctcttgtatctccccttccctactattatacaccatgacattgctttagaagctaaactacgcacaaaggaagcaaggttgaaataaattaggttgtcttcaactgcaagcatatatttccttgtacatttccctaacataaaaaaagtaagtctcaaatctttgctcttattttcttcaaaaagaaatnttaagagatagaattttgtcacgaatttaattttaatatattgctaatgcaaaaaaattatattgtcaattaattaacaaccacttatatgtaaacaatcttcaattatatgttagttcatgagttgataataacaattggtaaattctgtg

SEQ ID NO: 10440 - DNA, 274 bp, Glycine max
  unsure at all n locations
tctctcatttcaacttttatttcgaaacttanattgattctcaacaacttttcttttaattaanaatttcaaacttcaccatcattagaaaactttcattnttctcttttgctacataccatcacttgctcgtcttctgaccttcccttctaaggaacaaatattgtcttttttttatgtttgcatgatgaactatntcttcttgcacaccttacaaccttacttggaactaacanactngtaacattctccccaccacagatgttatatttgt

SEQ ID NO: 10441 - DNA, 577 bp, Glycine max
  unsure at all n locations
catattcggtcactcagtgtttactcttctctattctctctttcctttttcctcattgcnannnnacgaccggtgantcgtttcgatatcgtacncggngcacctntacagtntacctgcacgcatgcaagctcgctcaacatgctatgttaggatgagattcacattcccgggccatccaagggtctcaatgatgatgcttgtgacgttcatgtgctgaaatagcttatggactactgatacaaatgaacggcataaataacctatggttatagagtgacaaagcggtgtttagtatgcgaaaataaagaagtttttacggctgtgaggacgaatatataattggcagaatttgcatagttaaaagagaataaattctatcttgatatgcacattaagacttatgacaacgactacaccgtgcttaggcgaaggacaactgaacatggtgcacctggagccttctctttggcaaaagtggttgtcgaatagaacaatattgatacagtggatgtgaggcgtacatcagattgaccacgacaattggtgtgtacacttggcggaggtcagcttctcn

SEQ ID NO: 10442 - DNA, 444 bp, Glycine max
  unsure at all n locations
gccttgttccacttatacatttatcgtctgcctacaaaaatcaatattcattctanaatgacaatagaccctactactcttaagtattcaatattcattctaaaattgaaaattcaatattcagtattcatacctttctgctctaacaaatntgttgttcatttgatagcaatcaccggagaaagaacactatatctgcttgtngatcttaatcatgaatagaaacaagagtatcctcttaaactctcattgctgtacatgaatagtacactttaataccacaacagttcacatacttggtgacataagctgaatagttgtgtattgacttggtngacttgatctttatgcatactatattctcaaggttttgtcaaatggaacatatatgtgtgagatggcatgtaatgctatctntaattagtatatcctctgtatggctgt

SEQ ID NO: 10443 - DNA, 457 bp, Glycine max
  unsure at all n locations
agcttgtcacgtttcctaactctnttggtatgttgccagtgattccattcccttgcaaagatctaatacaagtataatatgcatcaatttactttcccgtcatcaaaatttgagttagttagaatgcaaaaataatttttagtattatggagttgaccaagattgtgtggattttttgtgatagaaatccttacagagctgtaagatattttagaactcctattattgnggtcaagtatcctgtgaatcccatatatgctagtgatctgcaatgaagcaatttatatattacacagcaagcaggaattcaagatttaaaaatgtgaaatataacactttctacaatgagtaatgacagccaacatcttcagcatatcaaatagattagagaacaacaacattgaatattaaaatatcttacacttgcatgacattgttgtttgagtcacagtaaaca

SEQ ID NO: 10444 - DNA, 426 bp, Glycine max
  unsure at all n locations
agctntcatatgtgaaatcatgtgcagccatcttcttattatgttctctcacgaggtagaggttgagccatgttctcagtatgaaaattagtagttgaatgctcaaaatcagaatgttcaaaatcaccaacaacaaaatactcaaaatgcacataatgatcaggattcacactatgcctaactaatctatgaaaggttctatctatttcaggatcaaagggttgtaaatcacctggattgcccttagtcatgcactatatgcagcagatcatgtgtttctcaaacaagcaccaggggagggttaaaactacaactatagtcaaatgatatccaaataagccgaaattttgtgagcaacaccctaaaatcatgaaaagatagcacaaaaattttcagagaaaaattcacagtctaactatgaaaact

SEQ ID NO: 10445 - DNA, 456 bp, Glycine max
  unsure at all n locations
agcttcagttacatggtttgcaagttcttggcgtataactgggaccttctccagggcaagttttgagcaggaaacaaaaattctgcataacattgaatactgaaattttcatatctaagcaggagcaattgaaaatatagaaaaatggggaaaatcataaaggaacgactaaattagaattaatattaatacatgtgtgctaagatgtcctcacgattctcaagggattttgccacagttcttgctaatatnagtttcccagagccctgnggaaaaaaatatttaaatgtcaaatgcatagataattcactcgtcagattggcaagcttttatatggtcagatcaacaatatgaaggtagataagaaaaaatcactaatcttaatatgaagagctagattctgagctcanagactagcacggcagccagtaatttgtattgtgtgatgtgatgact

SEQ ID NO: 10446 - DNA, 515 bp, Glycine max
  unsure at all n locations
cgcgtagccatgtcttcgagccttnanactcaagctaagacttgagtgtntacantantntgaaaaanantacanttcttgatacttgtngtancttttgattntaacaacaagcttcggctactancanntgaaactntggagaanatngaagaacagaanaacaagagaagtcacacccgaattgaaattctctatcccnnatttcctgttcttctcacaaccccaaaaagctattctatggtcggtgaaaactagagaatctctgtgatcgtccaataaacattgacacgtcaatttgaaatcatgtactatttattaacttgcagattntaacgcgttccttttagcctttcttttatcattcacttcccatcagtttaacttatgcgatgtagaactanataaacaggctattacatgaactctatctgtntacaatttatttaccgatccagggtaaccgctttcacctctcatccttatagcaagtacacatgtgatttaattcgagc

SEQ ID NO: 10447 - DNA, 455 bp, Glycine max
agcttgtttgctacatccaagtataaatgatttgatattataagtataaacctattcaaaacttctgttcaaaatattaaaataactttacttgaaattttgaacctctgcacttgtttttaattagctaattccaatcttctggagatatgtattttggtttgtttatatttttctttaagatgagcttcatgtaaatgataaaccttattcttgtattgagattcaatttgctctattacacattgtttgacctaatcagataaactaaaaccatccttatgtcatacgttttcatggaaaagtaaaaatttattactatgaacatacattgtaaaaaaaaattggcaaacataagtaatattcaaatatataaataaatgagatataattcacctaattatatagtaaccttcatatgtcgccacatttgatgtacatcatgctgactaatt

SEQ ID NO: 10448 - DNA, 283 bp, Glycine max
  unsure at all n locations
aagtaccaagaagagttaggtctagccgcggcccacgagcatagaatcgcggatgagtacgctcaaatatatgcggaanaagaggctagaggaagggtgatcgactctttgcaccaaaaggcatccatgttggatggaccggttgctcttaccttgaacgggagtcaagaacttncccgctttgtagccaaggccaaggcgatggctagacacctactcacccccgaagagattcatgggcttctcggctattgcagcatatgatagacttaatggcccacat

SEQ ID NO: 10449 - DNA, 437 bp, Glycine max
agctctgtgaacctgctatggttggattagtttaacatacccattctattttagggtttttatgatgatgcttgtgatgttcatgtgctgaaattgcttatggaaaactgttataaatgaagggtagaactaacctacggtttgagagtgacaatgtggtgttaggagtggaaaaagagtgaattttttaaggctggaaggccaaatctacaattggtagtatttagaggttagagtgaataaatcttatcttgaaatgccatttatgacttatgagaaagcttggactgtgctatggagaaaaacaaatgaccaaagtgaaccaagagccttttctagggcacaattgggtgttgcagagtcaaattttgattccgtggaattctatgcgtaaatccagattgagcaagtttacattgatgttatatacttgtgtg

SEQ ID NO: 10450 - DNA, 438 bp, Glycine max
  unsure at all n locations
agcttgcctcaaagaggtccaggaaggacaatgcggccgaaggaactagttccgccccggagtatgacagtcaccgctttaggagcgttgtacaccagcagcgcttcgaagccatcaagggatggtcgtttctccgggagcgacgcgtccagctcagggacgacgagtatactgattttcaggaggaaatagggcgccggcggtgggcaccactgattactcctatggccaagtttgatccagaaatagtccttgaattntatgccaatgcttggccaacagaggagggcgtgcgtgacatgagatcctgtgttaggggtcagtggatcccgttcgatgccgacgctatcagccagctcctgggatatccgatggtgttggaagagggccaggaatgcgagtatggccagaggaggaaccggtctgatgggttcgatg

SEQ ID NO: 10451 - DNA, 314 bp, Glycine max
  unsure at all n locations
atcgtctccctttccatcattnggggtaccacttgngccgccagatccctccacctcttgggcgtgttctttgaaagatccgtccccctttctgaaaatgttctgtagttgcatcctatccagaaccatatncaaaatgtactaatactggctaacaaaggcaaccattatgtccttccaagaatggactcgggaaggttccaagtagtgtaccaggtaacagctaccccagtaagactntcatggaaggaatgtatcaacaattcctcatcttttgcgtatttcccatcttctgcaatacatcttagatggtc

SEQ ID NO: 10452 - DNA, 152 bp, Glycine max
agcttgctgggtcaaaggatatgaatttgattgttcatatgccacagacgatagacgttggtgtatcatacatcttgccagtcttagttaggggagccatagcccgcctgtggtgaatatcacgtgctataagtaactatggccttgatcat

SEQ ID NO: 10453 - DNA, 432 bp, Glycine max
  unsure at all n locations
agctntaaacattcaatttgagcgtctcgatatattacgggactcaatcagacatccgagtaaaaagttattgtcgtttgaattggctcagagcttcaacattcaatttcgagggtctcgatatatgacgggactcaatcagacatccgagtaaaaagttattgtcgtttgaattggctcagagcttcaacattcaatttcgagggtctcgatatattgcgggactcaatcagacatccgagtaaaaagttattgtcgtttgaattggctcagagcttcaacattcaatttcgagcgtctcggtatatgacgggactcaatcagacatccgagtaaaacgttattgtcgtttgaattggctcagagcttcaacattcatattcgagcgtctcgatatattacgggactcaatcagacatccgagtaaaaagt

SEQ ID NO: 10454 - DNA, 396 bp, Glycine max
  unsure at all n locations
actaagcttttatccaggctcatcttggtgggaagctccttcttccatggcttattccttaatggatggcgcctnctctcacctattntcctttgtcttccgctgcatctccatggtggaaaatcaccattaaaggaccccattgaagctcaaagatccagcctccatcgaagctccacacagcaagcttcatcaagtggtatcagagcacaagagcttcaagtaggtgctccttanacctncattcaatttttttttgccttctcttcattggtgttcttaattttctccagtatcntctacatgtcttgttaaatggtgtaacatgattcttagagttccaccgattaacttgtatagaagtagattgattttatggttcaattctggtctgtc

SEQ ID NO: 10455 - DNA, 243 bp, Glycine max
  unsure at all n locations
ttaatggtgaggcctttccctggagatgcgtcggaggtgcaactgcgaatgagacaggggaggctctgtgcactanggtgcagaccgaggatgaaggagcctgatcaccctcttgaggaccctatatgaatctctgcgaagaatctctgactgtggataagatagacataatgtttgtgcactatttattatgaatagatgatggagagaaccgcaactttgaagtgagtctcattccactct

SEQ ID NO: 10456 - DNA, 266 bp, Glycine max
  unsure at all n locations
ccttcacccgacgaagacactgacaaaaacttatcttctccttcttggacaaagtatggcagggctggggcaagtaaattttcttcccatcagaccttggatgcaactgtgatcgtatacccatatcagctagatcttgaagggtattcaagccatccttcgtcttgccttgaatgttaanggagcgtccaatgacactatcacnagacattttntccacatgcataacatcaatacaatgtctaacgtcaagatcacaccagtac

SEQ ID NO: 10457 - DNA, 434 bp, Glycine max
agcttatgctgcacacatttattatagttcttcacagcaactaaaccaacaacagcgaaatacttatgacctttctagcaacagatacaatccaggttggaggaatcatccaaatctgagatggacaagccctccacaacaataacagcatgtccctccttttcagaatgttgctggtccaagcaagccatatgttcctcctccaatgcagcatcaacaacaacgacaacgacgacagtcacaacaaagacaacaagcaactgaggctcctcctcaaccttccttagaagagttagtgaggcaaatgaccatccagaatatgcaatttcatcaagagacaagagcctccattcagagtttgacaaatcagatggggctgatggctactcagatgaaccaagctcagtcctagaattctaacaaatttccttcac

SEQ ID NO: 10458 - DNA, 179 bp, Glycine max
ctatcaatagacctccaatctttaatggagagggtaccactactggcaaacccgaatgcacatctttatcgaggcaatagatctaaatatctgggaagccatagaaatagggccttatatacccaccacagtagacagagtttcaatagatggtagttcatcaagtgaaagcataacca

SEQ ID NO: 10459 - DNA, 448 bp, Glycine max
agcttccttggtttctttaaaatagtgtgttatgcaagaataactttttgggtgtcattcccaaagaacttggagatttacccaagctagagttattggatttaggggagaataacttgtcaggaaacatcccaatagaaattggcaagatgtcattactaaaacacttgtaagttaactttctattttgtgtgcatgtgttattagatttttagtatttttttcaatggaattttattttaccatacgttactctgtgataataaaatataaggaagtgatcctaaagatggtcaaaagttcaaattttctttgaaatctctaattgaaaatggttcattaactctaacaactatattttcctacatcaataaggaatttggacaatggtaaatatatctttaatttatcctccctaacaaagctatcttagtagtgtcattacatc

SEQ ID NO: 10460 - DNA, 245 bp, Glycine max
  unsure at all n locations
aacttctacagtntctcttgcattaacctaagtaaagtctgaaatatttctaatcttaaaaaagaatgttatttcaatacctattatttatcggtccctcagcacaaatgttgcatacctcattgaacttaattgcattccttccatatgctgctctggtggaataggagtctcattttcagccttaggggcaacattcatctctcttttcttattatcatcttcctgtcagctctctactctat

SEQ ID NO: 10461 - DNA, 273 bp, Glycine max
gtcgcatctcgtcaacgtctgagagaccatacattggacctagcgattttttattatgcgtgccatcttctctgtcgtatactgacccatgcctataagcccatgaatctcttctggggcggagaaagtgcctgccatcgacatggccttggataacactcggagtatctcatgacttccgttcaacgtaatagcatgccgagccatccacatgggtgtctctaggtgtgaagagacgctcagcatgcctgcatcctatgcatgtgggccgtg

SEQ ID NO: 10462 - DNA, 368 bp, Glycine max
  unsure at all n locations
ccctcaatttaatggattntctaggtttgagaagtgaaactgagaatgggaataatttgaagcaaactctcacctcacacaagtctataacctcaatttaaacttgttcaaactggatttacgcctaatatttcaccgaatcaaaatttgactcctcaacacccaaatttaccctagaaatggatctttgntcactttggtcatttgtttntctctctagcacagcctaacctttctcataagtnctaaatgggcattcaagctangagtaactcactctaacctctaaatactaccaattccagaattggccttcagctctcnaaaatcactcttttttcactcataacatcatattctcaccttct

SEQ ID NO: 10463 - DNA, 434 bp, Glycine max
  unsure at all n locations
agcttcaaccttnggtgctcatttctgccccatatcgtgaaaggagagcattttcggngtcgtgaagtgcgtggctacgagtgggacttcgaaaattcaggtttgggcggacttctttctctcttaaatttcgtgggtatggggttttggggagatatgatgggtaatcttgctagggttctgctgtgtgacgattatttgtgaagacatttgttgaaagcttgttgaaattgccatgtttggatgagttaaacatacccattctgttntanaggttttgtgatgatgtctgtgatgtttatatgctgaaattgctgatggaaatctgttagagacgaagggtagaactaacctatggttagaaagtgagaatgtgatgttatgagtggaaaaagagtgagactttgagagttggaaggctaagtctgaattct

SEQ ID NO: 10464 - DNA, 197 bp, Glycine max
  unsure at all n locations
ctaattattacatgtacttcaagtgatttgtattaatacacaccctctggtaattactctgctataacattcggaccaatgcatcctcattggttctatacatctatcaatatataattacactccatanggtcattatgcttttttttttttaggaataaatgcctctttatgatacattgcactactatagtaat

SEQ ID NO: 10465 - DNA, 454 bp, Glycine max
  unsure at all n locations
agcttgtttcccaactcanagctcttctcaagggtcttcacttgttccatgttaagcctccttttcttctctccagcctgtgatccatcatcagacaaatcttcctcagcattagcttcttctccaagctcaatccctgaaaatgacatagatctcttgcctagaaaggatgctcctcctgcatcaacatttgaaacattggtattaggccacataacataatattgcactattggttggtgtttttgtgtctaaaagagagtaccatggtactcttgaggtgcacatgaagttataattgagttgagtgaaggtggaggttgatggtcatcttggtgaggtgtttgtagcatgaaatntgctgggaagaaagccatatcattgctagtctatgcttgcctctgatcttcaattgctgaatgatattctgatcaccatgtgnatgctgatgctc

SEQ ID NO: 10466 - DNA, 263 bp, Glycine max
  unsure at all n locations
cctgaattttgtgggtatagctcacttctatgcctacagaatctacctaccacagagcaacaaagtaatcgtcagcatggatgtcaaatttctggagtcagatagttgggactggaacaatgataagaggtctgagtttcacgaggagaatgaagatgttgatgaagaacccatcagaggaaccagatcactttcagacatctaccaaaggtgtaatggtgatgtaatggagcctganggatatgaagaagctacagctgatc

SEQ ID NO: 10467 - DNA, 449 bp, Glycine max
  unsure at all n locations
agcttgacaganatctgcagccgaaccacctgtttctnttcctgcattccacccaccttgatcattaccttttccctgtttatcatgtgatgaagagactggagcattccaattgttttttgttccccagccagatgacccactcccatccttagttggttggcttttccacccaacatcctgattagcatcaatatctgaagtaccatcagggtttccaacttctttgactccacttttaaaaccattgccaccaccccatccaattgatgacgtttgatttgactttntgacactgttccaaccagaagactcctcttcagaagccttggttgtattccaattgcttttgctgtcccttgctgaggattgatttccattcaaattgttaggtttgtcattccaattgctattctgattgccatcacccatgcttccagttntatgct

SEQ ID NO: 10468 - DNA, 361 bp, Glycine max
  unsure at all n locations
gcatcattgtcttattttgatgttatgttaaagaacacaagtggaagcagaacagaatatggaaatgcagctcgaagcataaagtgttggatgaatgaagctttaagaagagtgtggactgtagtgtggtgttgcatcaccagtacggcttattttattgtattatattttgtaggtttctgacagcgtctaacaatataataaataattacttttctagaacaaaaatcactcctttttattcacttacagttatagtctgcaatcatcctcgttgatttcgacgaatctcngatcngatgtttgagtattatttacttaataatcataaactacgtaattttatctactgcagtatata

SEQ ID NO: 10469 - DNA, 441 bp, Glycine max
agcttcttgaggaagctacatgagcttcctcagtaaaaacgttgtacagccttctttaaccgttagatcttctcgaaatttggtctgcagcttcaaaagatacttgtccatgatctgaccgttgggatctttgagaagatgtctggagtgtgcgcgaagcttccgttcccgagaacatttctcatttaagcatttcagcctttgctttcgtgtagtttaggaaaaatgccatttcttctcctttctttcttccaatgtcatttctaacgtcccaagcactttctccatcacccatagccatcattagccaccgcaaaccgccattgttatctgttgagacccacaccgagaggaacccttcaactgaagcgaaatcttccaacttggcttgcggtttcggtagagaacgaaaccctaatctaacctttcattctctttcga

SEQ ID NO: 10470 - DNA, 553 bp, Glycine max
  unsure at all n locations
nggcgcgtgtttatgacnatgtaactctagatctcagctnggaaggatgcttaantggaggggaaganagagggagagaaatatataantgggagcactatatngaaggaagaaacagggagagaagttgaactttgagttgtgtctcacaagactctcattcatcaaagttacaacaagtgttacacatgcttctatntatagactatgctagcttcttgagaagctatcttgagaannacttcttgagaagcttctttgagaaaagtcctttgagagctagagcttagctacacacacccctctcataactaagctcaccttcgngagaagctgtcttangaangaatctanagaagctagagcttagctacacatacctctcgtatagctanggtcaccctcttgagatgagaactagagctagctcacacccctatatactaactcacccatgacaatcatgatatacaaaaaaatctactcaaactctanatgctcgatcanggtaaccttctctaatggcaatcaggctatgagganactattattn

SEQ ID NO: 10471 - DNA, 388 bp, Glycine max
ataatttctcaccattatctctccaaaaatcaaaactaggacctttttcttctctatcttgcgtgagatctttaaggaggaagagaccaccattgtcatcttctttcaagctacattttaatttgttgagattccttctctcaaagatttggtgagaagatcctaagactctcttatcttctcatttctcatcattgtcatgccaagctcttatgttggggttccaaaatttggttttatcctttggaagcttgagacctcaagatctaagcttttgttccttgaacatgtcgtggaaaccttactcaagataaggggagtctttccacttcttaaacctaaccttgttgtcttcaaaactaggttcattacatgtcggtgtgatgtt

SEQ ID NO: 10472 - DNA, 133 bp, Glycine max
  unsure at all n locations
atgtaaagatccaggtacattcagcataccttgtattatatggaacaataagtttgacaatgccatgctagatntangagcttctgttagtgtgatgcctttgtctattgttaattctctatctctcgggccc

SEQ ID NO: 10473 - DNA, 422 bp, Glycine max
  unsure at all n locations
agcttctcctccaattntctataaaattgggggagaagtgaagtagacaagggttcagccccttaggcacttctctctttctcgaaatagctgaggaaaattagttccgtgaagaaaatccaagccgaggcgcttccataacgtttccgtaacgtcttcatgagtgatttcgcgaaggttttcgaccattcttcgacgttcttcatcgttcttcagtcttcaacgggtaagtacctcaaaccaagctttttaattcattctatgtacccgtggtgagccacatttggcttcatgtagttttattctcagtttcatttactttttatacccccttttgacgtgcttaagccatttatttaagtcatttctcgcttaatctaaaaataaaataaatttccaccgatcgcttgaattgtatcatc

SEQ ID NO: 10474 - DNA, 260 bp, Glycine max
  unsure at all n locations
tgcattgactgtatcccaatgagagtgtgatccttaaattatgagagaaacgactatcatttactactgatgtttgcatgaatctctgaagtatggactgaatgcatgaaattgaggatgatgaatgccatgtttgattgtgatacgcacttatcctaaaagctgaccacatgcttgaatgatttatcccttgcacccagcttgagcttaatgaatcatcgantgatcgaaccttgagcctttacagtggtatcttctga

SEQ ID NO: 10475 - DNA, 526 bp, Glycine max
  unsure at all n locations
accgtganttgtctcctatccgagatccctatactcaccatgcagctgcagcctgcaagctcgtctcgtacataatgcggtgctcaacgatgatctatgaactaggaccgacgagatgtggtgcaactgctgggtgcgacgccatgttctcccgtcactctctgcaatctatcttgcagattactgatcatctggatgaataaaggaaatgaaatggcgatggagagatagtataaccttagaccactctctataccgtagcatgacgtgcatcatatgtatatgcaacaacgatgttgccgcaatacacatgctagatgtggacagagtgatgatcactaagaaaagtacgaatgataaagtgtagactttagtntagagaaacacaaggagagagccactcctggactatattgatagggaccatggcacagagagatgagagcaaagattagatccagagagatagacactacgactatcatgtgaagtgatgacaaccaaagtaatgctcacaactgtgctg

SEQ ID NO: 10476 - DNA, 164 bp, Glycine max
ttatacttgtatatttatatgaacacgctctttctctctctctctgtctttcttctttcctgctgcagaagtgcttctaggtttctacataacactaggatacacttagtaatagcggatgaacgtgagcatatctcactgcaattcgcgaaacttaactatac

SEQ ID NO: 10477 - DNA, 391 bp, Glycine max
  unsure at all n locations
gataaataagaattcaatgtgtacattacatcatgcctgtggaaaaagcttataagaattatttgattcttaactaacgaagtccttgtaagtttattggcgcctagagaaattanacgagagcttacgaaaatgttgaggtgttaagttaatattaacttacaagagaagcttgacttcctcaactcattatagattcttctccctcgagtggttgttgagaaatttattcaaactgactcagtgcaatggtatttctcatacattggatattccaccactgtttgctgagcttctcagagtgtggcttttaattagtcaaaattatcctagaattcaaagaacaggaagaagcattntccatatatttctaagaatatgcttgtacact

SEQ ID NO: 10478 - DNA, 106 bp, Glycine max
  unsure at all n locations
tcttactatccanacttcgtatagcctcttcatagcttcttggatcatcatcatcatgataaacctcatccgatgtgtcatctaggactcatcaatttaatctatc

SEQ ID NO: 10479 - DNA, 316 bp, Glycine max
agcttcagaattcaatttcgagcgtctcaatatattacgggactcaatcagacatccgagcaaaacgttattgtcgtttggattagttcagagcttcagaattcaatttcgatcgtctcgatatattacgggtctcaatcagacatctgaggataaaagttattggcgtttgaatttgctgagagcttcaacattcaattttgagcgtgtcgatgtattacgggacttaatcagacattcgagatataagctattgctgcttgaatttgctgagagcttcaacattcatttcgagtcgtcctttattttacgggac

SEQ ID NO: 10480 - DNA, 139 bp, Glycine max
  unsure at all n locations
gctctcagcaaattcaaacgacaataactttttttctcagatgtctgattgagtcccgtaatctatcgagacgctcgaaattgaattctgaagctctgagctaattcaaacgacaataactntttactcggatgtctga

SEQ ID NO: 10481 - DNA, 453 bp, Glycine max
  unsure at all n locations
agcttatgcgcatatttccttacaaacgttctcttgcacaagacattctattaaccgaaaaaaaaaaaaaatgcacccatatacaatcaaggcagcttcgttacctagattatttacacgtacttccaaggtgtatttgttacttacatcacacacatctccttggctaaattcacatacatgcatacccaaagcattttggggtaccaaaaattgcacatgtgcacatcttggtatctctaatacctatacatacacaaacttcatgatgaatcttgactatctacacaataaggtgctacatttcatgctcttttcaagtttttgctacctaaagccgcatgcaaattcaagtatattttcctttgctgactaaaattgtattcaaattaaaaggtatacattntttggtaatgtatcttctttacataacatgcaacatatttatgtata

SEQ ID NO: 10482 - DNA, 457 bp, Glycine max
  unsure at all n locations
agcttattcacaaatggttgattggtttccatattctagatagaggatcgataaacaaaactatggagattagtgtatcttataattacctcaacagtggccatttggaatgcaaagagggaaagtaataatatgatgaagtatgaactcgaaaggaaagctaagaataaaagagagtggttgtgagttgatcgaagtaagagaggtttaaatatatagttgtagagtcttcaacactaataccttcctagagagtgtgaggaatggccacttccaagaatctttttcaagcagacaactcatgccactatataccaaaaaatttaatataataataacagagatcaccatttccagttgtaaatgatttttgtttcctttcatttatctntcagaaatattactctgacaaataactagaataagagatacacgaatatatatatatatatatata

SEQ ID NO: 10483 - DNA, 455 bp, Glycine max
  unsure at all n locations
agcttctcaattcattctatgtacccgtggtggtccacattntgtttcatgtatttttattctcgttttcatttgctttttatacccccttttgacgtgcttaagccatttatttaagtcatttctcgcttaatctaaaaataaaataaatttccaccgatcgtttgaattgtatcatccgttaattttggttaaatgaattccgaccgttcggtcgtgccgtaaccacgttggaaataaaaaaagaggtaaaataataatatactaatcaaaaaatatcttttagtaaagtaaagcgaanaatcaatcggacgttttctctttgggatttctcattcttaattgaattgactaataactaaagtgaaactaaggctaaaatcaaacttgcctagtgaagctcgtccacaaaaataggttttttttttgaaagttatcctttcagtttcttacta

SEQ ID NO: 10484 - DNA, 273 bp, Glycine max
  unsure at all n locations
tcaccatggagatgcagcggaaggcaaacgagaagaggagaagggaggcgccatccactatggaataagccatggaagaaggagcttcaccaccaagatgagccttggataagaagcttggaaggatgcttcaatggaggaaaagaaagacggagagaaagagagaggcgggagcacgatattcgaggaataaaagaaggggagaagtagaactttgaagtgtgtctcataagactttcattcatcanagttacaacaagtgttacacatgct

SEQ ID NO: 10485 - DNA, 396 bp, Glycine max
agcttgaaattgaacaaccgaagctctccagatattcaaatggttatgacctatcacacgaaagactgattcatgcgcataatatatcgagacgctcgaaattgaacaacggaagctctccagaaattcaaatggtcataacttttcaaatggaagtccgattcatgcgcataatatatcgcgaagcttgaaattgagcaacagaagctctcgagaaattcgaacggtcataacttatcacactgaagtccgattgaagcgcataatatatcgagaggctcgaaattgaacaacggaagctctcgagaaattcaaatggtcataacttgtcaaacggaagtccgattctggcgcatactatatcgagaagcttgaaatggaacaacagaagctctc

SEQ ID NO: 10486 - DNA, 386 bp, Glycine max
aaaaaatgcacccatatacaatcaaggcaccttacatacctagattatttacacgtacttccaaggtgtatttgttacttacatcacacacatcttcttggctaaattcacatacatgcatacccaaagcattttggggtaccaaaaattgcacatgtgcacaatctggtatctctaatacctatacatacacaaacttcatgatgaatcttgactatctacacaataaggtgctacatttcatgctcttttaagtttttgctacctaaagccgcatgcaaattcaagtatattttcctttgctgactaaaaatgtattcaaatttaaaggtatacattttttgggaatgtatctctttacataacatgcaacatatctatgtata

SEQ ID NO: 10487 - DNA, 215 bp, Glycine max
cactaagatttcagttcaataactctttatatcctctctttcttcctacggtaaagattacatcttctttatcataatacaggtgctgtatttcccttgtatatacaagcttttggtatttcaattctattagaaagggtttcatagattaatgtgcacatcattggtcaattcttatggtccatggcaattaaagagttggatctgatctaatg

SEQ ID NO: 10488 - DNA, 447 bp, Glycine max
agcttaatgaaacaaacaacagcatattccttattcatatcaattcaaaatttaatgagaagaaaaagaaattaatgaagaattggctaacctgtgatgctaacaaaggaagaagaagggatgacaaaggatgattggaagagaaataaagaaaatggaagagagattgacgaacggaggaaggcacaaaaacacgtatattatgaggaacaagagagagaaattttgagggttgaaatctttttaagacataattgttcaagctatatatggaacagattcccaaaaagttaaaatttcacaagctggatatctgagcttcaacaaaagatctactgagagcttttacttttataaaagctaaaaaaaatttataaccaaacactcttaagaaataaaaaagatctttttctggttgataagatggtaaaagatcttttgagttgc

SEQ ID NO: 10489 - DNA, 418 bp, Glycine max
  unsure at all n locations
cgccggttgntttgttccatcgattgctgacttaganactcagcttacaaagtttccattggagcatatattngnaatatgtttacttaatgaagtggctatttaacaaccgtacttaattcttcttttattaaaaaacactttaatttaaattaatgtggtaaataacactcctcttcacttacataagtaatttttataaattttaattatgtgcagggggcttaatataataacactcttaacatctactttaaatctatgatatagtctctaagaactattctccaaaattgtcattggaaaatgtccaaaaggtcattaaaaaatatcaatatgtcttgaaaatgcctgaattattcagaatatcattctaactcaaagtatattgaaaatatattctatatatagagtgaac

SEQ ID NO: 10490 - DNA, 442 bp, Glycine max
agcttgttgtatgacctgatgacgacttgtgttctctcgcacaactctgaggtctaacaagctttgcatagctcttgactccatatggaatcgatcttgaaataataacaattataattaataactatttttctagtgataatttacgggaaaaaaatcaacaaaatttaatttgcattacttggcaagagtaaactccacttggtatatagttctcctatgactgcccaagctatggctattgtgggatgagtagtaaacgtacatgactacatagtgcctgtcactccgccaatggaatgacatagtgtggaaacattgcataaccaggacacatagttagaggcgcaagcccaaagaccctgagatggcacaatattatctagaggaataatatgttgttattatcactctgcccatgtttgatcacaaagctggtatg

SEQ ID NO: 10491 - DNA, 281 bp, Glycine max
  unsure at all n locations
atgggtattctagctctctcttcctagcaatattccccagattcaccaagatctttgagttgtcttcaaaatattgcgttgaagcttgcaaataatggctgtaagaaagtcataacttgattctcttaagctggtggatatgtttgttttctttctagccatatttccccgatggcaccaacatatncttcagttgtacttcanacgttctttggtggaactccattattgttatgtcttttaatgtattagtgcgaataaaatttcttgtaataagctga

SEQ ID NO: 10492 - DNA, 165 bp, Glycine max
agcttgtacatgattctaccatggatttctcgtattttgtgcgactatcgatagatgcgtggagctcctaatttgtaggataaccctcgagagataacttcgttctttgagacgtgtgatcgagcactcatcttcttcaatgttacatcacgtggcacacgggct

SEQ ID NO: 10493 - DNA, 449 bp, Glycine max
agcttgtagtggtccttgaagttgttttatcgtcatggtttctaaatctttggtttcctcgattgtcacaacaatgtgttcaaatttgggatctaacaagcgtagtatattctccataatttttacatcttctaacttctcaccatttctttttagttgatttgaaacaacgagaattcttgagaaataattgaaaatggactctaactctttcatatgtaaggattcaaactcacctagtaaagtttggagacacaccttctttactctgtcttctcctttgtgggaggattgaagcttatcccatgcctccttagcagatgttgcattagaaatcttctcgaacacatcatcatctaatgcttgatagataggaagagagctttcttgtctctctttcttgaatcctttaaagactccttttgtgcctcggatagtgaagtctcatc

SEQ ID NO: 10494 - DNA, 175 bp, Glycine max
  unsure at all n locations
actaatcatgtggttatgaagaattctgtgatctcttatcttgctagactcaatgttgttaaagtctctatgtatgacctacaagatcctatgtgatattgtttaagaagtttgagatatgaaaagattgacatattntgtacattctgcggtgcattcacttctatntgtatat

SEQ ID NO: 10495 - DNA, 400 bp, Glycine max
agcttgaataatcaaagtataagtgtttgatatatgagcttattgaactatagtatcataacgttaagtggacttatctcttagattaacttctcacgataccaacctattcagatgtacacttaataatgatgatggaataacattggctgctctccccattatgaaagtctgccctgatatgttcccacactcgaagttatacgctcaccaacccattacaattctctctcagacactcagacatagataaatgatcatggcactggttgggacggattttatcccgcactccattcgccagcgcccattcattattgtttatgacagaaagggcgaatgtattactgtacattgagttacgatgcatcaaaattcgtccactctaaacatctcatta

SEQ ID NO: 10496 - DNA, 319 bp, Glycine max
agcttctacttatgtggcagggcgggtttccttcactttcttgtttccaacgcgagctctgaccactgttcttccttcccgcgatgcttcttttcatgtacgcctgagagggcttatagcctataccatacttcccacgattaccttgggtttttattacactaaatatgccgccattgtctgttcctaaacccatcccgggttcataaccgttccccaacataactcgggccatcattaccgccgcctccgacagacaaagttgcccataaagggagttcacggaggaaatgctgaccacctcacaagactggaaagc

SEQ ID NO: 10497 - DNA, 195 bp, Glycine max
  unsure at all n locations
gctagagcttagcccacatacctctctaatagctaagctcacctccttgagatgagaagctagagcttatctacacacccnctataatagctaagctcacccccatgacaaanaacatgataatacaaaaaaagagtccttactacaaagactactcataatgcgccaaaatacaaggctaanaccctatactac

SEQ ID NO: 10498 - DNA, 315 bp, Glycine max
ggctcgcatcttgctattgaagactataaagttacatatgttatgataaagtaatgaaaacaaattcagcaaaatcatgtttggctgcaaccagtggaaacacctagaagtttaatccacatgtggtgaagcataggaactacatacgatttataaaagatattcgcatattcaagtgtcgattgtgatatttctacacacagatactagggaacaaatactactatttgttatgggccatgctccagtattcgattacatacataatagtatcagtcggtagagcttaagcttgaactaccctgacaatacaat

SEQ ID NO: 10499 - DNA, 215 bp, Glycine max
actagggcaaatgaagatggtgagaataagggagaaacccatgttgtgactgccattcctatacagccaagtttcccaccaacccaacaatgtcattactcagccaataacaaaccttctccttacccaccacccagttatccataaaggccatccctaaatcaaccacaaaagcctgtctaccgcacttcaatgacgaacaccacctttagcac

SEQ ID NO: 10500 - DNA, 456 bp, Glycine max
  unsure at all n locations
agcttgagctcactattgctgccctataaagcccctcaaaactnntgcttggtcgtgttcttcctttcgggccttcttggtttctcattccaaggcttcatcggtggccatattgacatcccttagttcatcatactcttttcagactttgatgggtatggacttgaacttctcttcgactacccaggctctttcaagctctgcctttagggcttgtacctcatcactttcttccaaagctntaacctcatcgtctctcacagtctttagatttgggagccaatccagtccttgtgttcggactctcagccacttatgatagccaccgatgatcccattactgcttcccctaagctctctgtcctttcttcacgccgcatcccatgccttgcgaactccttggagtaccctcgcgttgtggtcactgaaacctcgtgcgatgaaaggcgtgatgct

SEQ ID NO: 10501 - DNA, 115 bp, Glycine max
  unsure at all n locations
aaatgcgaaaaaggatgaccctagggctgcaaactcgtcaatcccgtgggtatggcttttgaaaggggggaaaagaaagttttgaatgtaaaaacgcccncccttttcgtcattc

SEQ ID NO: 10502 - DNA, 420 bp, Glycine max
  unsure at all n locations
agcttgtggttctcataattctctggttttgctctgaattctttgttggtgggggctagttttttaattaagtatgcttgtttttcccaaaacaatgtttttgaagcaaatgggtttaacccaatttgccaagtggatttgtgcattggatactatgctatcttgcaccaactttgaggtaataatgatttttttaacaatcgatatttgaagttagtttacaaattaagaagcgtctaatacgtgtagaatattaatttatttagtaaaaaatgatttcttatttaatataaaatgtgaatgcgatttgcttgttgttgaaatgtattttgagtanagtgtatgtgcaatattccttgtaatggacgtatacatgggaaacataataaatgacatttgagatttgataaacatcaatac

SEQ ID NO: 10503 - DNA, 461 bp, Glycine max
  unsure at all n locations
agcttctccaacagcatagagctaacttcctgcaaatttcaaaataaacaagtatatcaagtagaatctaacaagaaaaaaaaaagagagaagccagcagtaggaaagtgcaaggaaagcataggtaaagatacgaaagaaacatcatactgcaaccatgtgcagggaggaaatggagaaattgaaagacctgngtcactctgactaagaagctggtatcatcgaaccaaagttcagtaaaaataaaaaccaaccaatattataaatacaaacaaaaaaaatgcccaacaccacatatatacattctctttgccgctntggtccatccttgttaacatctgcactagcattatcagtcctgggggtgtctctctttggagcaacagcaaaagcctttgggggtggtgaaactntctgccttggaggtagagtatatcttgccttcatgacattgccatcta

SEQ ID NO: 10504 - DNA, 547 bp, Glycine max
  unsure at all n locations
cgacgtgatagtcctatgatttatgtgcactctagatactcaagctngacttgaccacaaacttgagaatcacatatntattattgaatgtgcngatantngagtacaatattnctaatttaatcagtaatttgatttcaaattctaaatacgcagttacttagaaatacaantttatcagtcatgaanatcctattcgattctctagttaaagatatatgtangatgtgactaggattntagtaaagtcacgaccaacgcanaattaacttcatgcaagacatgttttgctataccattgaacaaatatgtatatatccaaggcanaagctagaacacaagaacatatatattcngctgctatatcaacaggacgtgncttttgcaagcatctcaagtcggacgtcattcataatttatnatagaaaattactagactattatacaactgtaacaatgtgagtcaagggtatactannatagataatgtgatatatcgagtgattgtgaatatctgatactatttatttatgatttgacacaatan

SEQ ID NO: 10505 - DNA, 581 bp, Glycine max
  unsure at all n locations
tagtcacggacactccagacgcacacccgttanttggaaattacagtaattatcaacaactcccacaaccgcgtgnttgagtccntcgcagaccgcganctctagatcnacctgcagcacgcaagcttgaaccgcgacacaaacataagaataacacgttcatgagcnacgacaacccggcggttcacttcggcggatgacaactcgcgagcgacaagatacagcgacctcacagaacgaatcatatcacaccatgagatggaacagccccccacaacaaaacatgcatgttccaccgattcgaaacgacgcggggccaagcaaaccaactgaacatccgaccatgacccttccatcaacaacagcacaacaacacctacaacagaaacgacacagcactgaggcactctccctacccccccgaggaaaagtacggacgcagacgaccatcccaataagcagttcacaagagacaacaccaccattccagatcgaaactcgaacgggctgatagagcctcacatgaactacacccagaccaacgaaaagacaccatcccgcaccgaagtgcagaccccaag

SEQ ID NO: 10506 - DNA, 169 bp, Glycine max
  unsure at all n locations
tcttaatactctgacgatacgatattctttggagaagcatctatggcaaatgtcataactgtgaaggttattctcangagttttgagctggtttctggattgagaattaattntgctaagagcaaatttggagctgttggtcaatctaaggagtggtgtcttcatgctg

SEQ ID NO: 10507 - DNA, 341 bp, Glycine max
gcttcaatctgatcactaagatgatgcaatcttattccgcaagggcattgggtataagactccaacttgatggggcttcagatccaagggaaagccctagggatctcatgagccttaaggtagatatccagcccatgggctaatgatgagcccgcttatctttgtaaatattacaatacgtgctttcttcagctgggccttgtattgctgagcactctagaactatatggctttagccttgtatttcggcgcattcttagtagtcattggagtaaagacttttttctgtattttcatgtcttttgccatgggggtgagcttagctaatattgtgggtgtgt

SEQ ID NO: 10508 - DNA, 283 bp, Glycine max
  unsure at all n locations
gagatgaaattcagagattggacctcttgctagttgttattaatgaatagcttaaacacttgtgcttgagtgaaacagtagccgtgagactgtggtttaagctaattttcttgatatctgtcttatgattagctccatctaattgttcaaattacattntattcttctctttggataactgcataccttgtgaaaggcaagtgatgagggcattntactccattctcttatcatgcaatcagtaactcttgtagcatacacctttgtacatagtcactgcatg

SEQ ID NO: 10509 - DNA, 447 bp, Glycine max
agcttccatcaagtggtaattagagcacaagagcttcaagtaggtgctccttaaacctccattaattttttgctttaccttctcttccattgtagtttcttcatttttctccatgtatctcctcacatgtcttgtcctaaatgttgataacattattctttaaagtttccaccgattaaacttgctatagaagctagatctgattttctatggctcaaatatcttgttcttgatcttgaaccatgaattgtgttgagtttaagatcctttgagctttgtcttgttattgtttgtggcttaaacctaaaccataaaattcttacaaaaatattaatgtagaagacaacctcaaaaatctatagtgacttgttcacctattgtagttttgtcatataagtcatgtctagtcatgaaacttgtcacataagatttcttatgttgtgctga

SEQ ID NO: 10510 - DNA, 266 bp, Glycine max
  unsure at all n locations
attgatcatcctactaggacgactgagaaaactgtggcaaataaagagggtgaggatgagggagaaacccatgctgtgactgccattcctgtacggccaagtttcccaccaacccaacaatatctntactcagccaataacaaactttctccttacccaccacccagttatccacaaaggccatncctaaatctaccacaaagtctgtctaccgcactttcaatgacgaacaccacctttagcacanaccanaaaaacaccaacaa

SEQ ID NO: 10511 - DNA, 427 bp, Glycine max
  unsure at all n locations
agcctttgcatgtttagagatttctatatagagaaaggtccaagttccagatatttttgagagcttttgttgtgcgaagactggtagagaactgagcatgaacaggaagccgtcttgacagcatgagatgagtctgtgagtgattgtgaggttctagaggtgaaggagacatccccactacttgtgtttcttcaatccttcatttttctcttctttctgttgtaaaggaagcttcccagatatagagagctaaatcctctgttggntcttccttgtaggtacttgatgtaaatacctgtatatctatntaatgatgttttatgtgttctttgtgctatcagtatgtcatttcagtgtgctcttgccttgatcacgtagatgcatctctttgtaggatcattcaacagtggaaactggtctgattctt

SEQ ID NO: 10512 - DNA, 316 bp, Glycine max
  unsure at all n locations
ttataatattcttaaatcgagattttcctatgctgtattttgaatgtattgttatgtctctttatataccaattgtttttctaatcagctaaagaaaatatattactgatggtacaaggagtaccatgtctcgtatacaattgtgtgtatgatgcgcttcaacccaaaacaatgcagccttcctaatgcagagaaaaatttacatcccatntaaaccaaaacatatctcagcaactgcaattgaaaccctgcagcagcataacaacanatcanagcttgtcaactaactanactaaaactaatanagtttacaaca

SEQ ID NO: 10513 - DNA, 393 bp, Glycine max
agctcgaacctgatacacctaagtccggtgatcttactagactttatgataccaagtaggactccaccgctaacttgttcatcaagctcctcacaccactacttgtttggggtcatatggaatcaacacacagagtcccagatccattttgtctcactgttatcatgagacaccattaaagcctcagctgactcatatccatcttcaactatagcagtatttctagggactttagatcaatcatgcatgtgccccttttgtctaccaggacaaaatcttcgagtatgaccttctctttacagtgataacatatactgtctggtacattagatccacatcgacatcgtgactaggatctattcccttctgccttataatactacttatactgtc

SEQ ID NO: 10514 - DNA, 555 bp, Glycine max
  unsure at all n locations
cgccgcgttgtttgtctccatcttaccggcactatgagactcagctatattatagtgtaaagaaatacgaagtttgagcttgntataatatagatatgatataccataatctcatattgccgtgtgttaataaactctccgatttcacgcagagatactgtttcaatcatcacatgactaaatatcagaaaagattgatttctattatatatataaccagtaaaggatattctcatgactatggatcacttgcacaantaagaaaatactacatgtgatatggtctcctctattaaccatatattctaggtggcatgcaagaaggtaaatacatgtgcatatgatatttattgtattaaagaagagtctctagactagttatcatatcaaatatcttcttgcccaacacttgaacactcatttgggatgactcagatgtctatatcaatcgtagacatggggatataaggctaatcacgagagatacaccctcctactatgatactgagtacattttacttagaacactaaaaatatgtgattttatctcttacg

SEQ ID NO: 10515 - DNA, 450 bp, Glycine max
  unsure at all n locations
agcttgaacgagagagagacctctaagtgatgcaaagaggagccgacggggagctcacgataggtgaggggagttattataaaatttaccgttttgacaccatagttagggtcagggaacctagctatgagaatatccgcctgttcctgttgcatgctgattttctttcaagaaaactatgttttaaactaatgggatgcgatatatatattgttgatgaataacattattgtttattaaacttgtgttgtttgaagacttggggagtgtggacctcgggcatgaaaaatatatttgtagaagcaaatgactntggtgttttgataatgatcatgatgatttgatgcaaatgggcttttcaagtttaaattcaagataatgattcaagaatacaagccacaacatcaagatgatcactagtattntaggaagggaattcctaattgatat

SEQ ID NO: 10516 - DNA, 260 bp, Glycine max
  unsure at all n locations
tgtcttctcttactccaacctaactcccacatcccacacctcgattngaatatggacaaagctaggttggtctatggcttggtaaccaacatggatatgaacattggagcccttatctcangtcagatttcttctattgctcagagtaactcctctaggctcggatttccagccttgatcactaccctatgcagagctagaggaagtacctctaacagcctgacctatgagagcttgagcccggcattaacttggctaca

SEQ ID NO: 10517 - DNA, 431 bp, Glycine max
agcttagcggattaggtcttcgctggcgaaaggatcaaagtgggtatggaaagaggcaaatatgattatcctgctttgatgaatgcgaaaactggggcaaatgaaaagggtgagaatgaaggagaaacccatgctgcgactgccgttcctacatggaaactcccccgccagctcaacaacatcattactcagccaatatcagcccttctcattacccaccacccagtcatccataaaggccatccctaaatcaaccacaaagcctgtctaccacacttccaaagacgaacaccacctctagcacaaacccaaagcaccaaccaagagatgaattgtgcagcgaaaaaacctgtagaattcaccccaattccggtgtcttatgatgacttgctcccatatccactcgattattcaatgatagccatgacccc

SEQ ID NO: 10518 - DNA, 498 bp, Glycine max
  unsure at all n locations
ngatggtacgctaagcctcacatctanagctaagtgcatatngcagaaaaagttgcgtngcagaaagtgctaagcacagcttattgtgctaagccccagatgctcactggactntacaacttcaagttgggcttatcgcgaggttaggctaagcacttgngtttntaaactcaaacgtcacatgggcacgctaagcacagctgtgcactaagcgcgccatacanaatttcaattttattaaaaccaaaggctaaggcacttgnngtgtaccccacatacctntagcttctccttttgtaaacctgagcaagtgtgtattctgctgcgtgtgtgactgcttgcagcatctctttggtcattcaatcacatcaagaagtggacatttcatntattttcatcctcaacctangataatactctcgttcttatngatgtgtaagtaagtttttagttaggtagcatttggattnacgtactacagccataggggaatggctn

SEQ ID NO: 10519 - DNA, 426 bp, Glycine max
  unsure at all n locations
agcttctacattcaatttcgagcttttcgatatattacgggactcaatcggacatccgagtaaaaagttattgtagattgaatttgctcatggcttcggtattccatttcgagcgtctcgatatattacgggactcaatcggacatccgagtaaaaagttattgttgtttgaatttgctcagagcttcggtattccatttcgagcatctcgatatattacgggactcaatcagacatccgagtaaaaagttattgtcgtttgaatttgctcanggcttcggtattccatttcgagcgtctcgatgtattacgggactcaatcagacatccgagtaaaaagttattggtcgttgaatttgctcagagcttctacattcaatttcgagcgtttcgatatattacgggactcaatcagacatccgagta

SEQ ID NO: 10520 - DNA, 313 bp, Glycine max
  unsure at all n locations
ctcggatgtctgattgagtcccgcaatatatcgagacgctcgaaatggaataccgaagctctgagcaaattcaaacgacaataactctntactcggatgtcagattgagtcccgtaatatatcgagacgctcgaaatggaataccgaagctctgaacaaattcaaacgacaataacattttactcggatgtctgattgagtcccgaatatatcgagacgctcgaaattgaataccgaagctctgagcaaattcaaacgacgaatcacttttactcggatgtctgattgagtcccgtaatatatcgagacgctc

SEQ ID NO: 10521 - DNA, 451 bp, Glycine max
agctgtgtatggtagagatccacctactctggtgagatatcaaccagacatcactgatgttccaactgtgtaggagcaattgactgctagagatgaatttttgagacaattgcaggataatttgatgaaggcttatacatatatgaagaatcaggctgataagaaaagtcaagatgtcaatctacaggtgggagacttggttctagttaaactactaccatacaaacaacattcagctgctcttagaaagaatcataagttgggaatgcacttctttggcccctttaaaattctggccagagtaagagcagtggcctacaagttagagttacctgcagaagctagaatacataatgtcttccatgtctctcagctgaagttgtttaaaggaacaccaggagaacagtacttgcctttacctttaactacaacagaaagtggaccaattatt

SEQ ID NO: 10522 - DNA, 201 bp, Glycine max
  unsure at all n locations
ttccttctggagagtcacttgctctntgatagttgtcacacctctgaacatattcataagcatccttgtgcaaggtaggccaataaaaactagattgaaggaccttggcagtagtcctctctccatcgtaattgccttcacaatgtgaactatggcaatgccacaatatgcttcttgcctccacctaagttacacatcttc

SEQ ID NO: 10523 - DNA, 452 bp, Glycine max
  unsure at all n locations
caagcttcggaaatgatttctatacaaaagttagtcgtatgaagcgactaacaacattcatatccatatattataagaacaactaatcaacctttgggtgatccataaatgtcttataataatgaacttcaattaacccataaaccaataatctataatttagcatccattctatgggtaattgaaataaaattgtcactaatttggaattaaacaaaacatacagatttgaccactgtggtgatcacaaatctatcatatatttaatccaaattactttatccaattttaaattgaaattgacgtaagggagagatattgaatttcaattcaagacattcaaaaattggattcaaggcattccaaactcgaaaacaattataatatgcacaacggaaaatcaaatggtttgaataattntccaattggaatcagattcatacaatgtatgg

SEQ ID NO: 10524 - DNA, 428 bp, Glycine max
  unsure at all n locations
aagaacttcaagactgtgcttcggacacgttcattcattctgagccttacggtctcctacatcgaggcttcatctgtggccatcatgacatcctttaatgcatcagactctattgagactacgatgagtatggacaataacatctattcgactacccatacaatttcaagctgagcctttatggctcgtacctcatgactttgttcctgagccataacctgatttgagtcacagtctctatgagtgggagccagttcatttcttgtgctcggactctcacccacttatgatacccaccgatgatcccattactgctcctcctaaactttctgtgccatcttcacgcctcgtaccatgcctatcgaactcattggatacccgagcgttgtggactctgataccttatgcgatgatangcgttatgcttn

SEQ ID NO: 10525 - DNA, 457 bp, Glycine max
  unsure at all n locations
agcttatacttaagcatatatttattttatcttctaacttatatagttacttacgtcatactcttttgtttcaccgatcttatctcccgtcctcttaacaaaagtctctctcaaaaccaacctgcgaagtccaggaatctacttcagtcacgtccagtataaggtctaaccttagattttgttaagtacattaaatattttatatatttttaaaatattcgtatatttattttttatttacttattttataaactataattatattaaaaaacaatgttgcttccatttgattntccatcctaacgtatgtttagttaatcaatccgaatcatatcaacttaattatgttttgttattatattaattttaaattgaaacaaccttaaagaatttacattgaatcttactatanacttgcttttaagataaaaatatctatacgcaaattactcttat

SEQ ID NO: 10526 - DNA, 294 bp, Glycine max
  unsure at all n locations
ctttacttcttggttagtggatagatccgccacagccttggcacatacaagatcaatactgaatacttcaacanatcctttactactaatggatccggtgatttcaggtttggaatggctaaaaaaatcacctacagtgtctaacacgacatcaaattatcatgtctttcacatcaaaccgaactggnaaatacattntggctacttagtacttaccatcagaaaataaatatatttaagaatttaagagggagatacctgcggaagtggaataatngatagaatatcaatgat

SEQ ID NO: 10527 - DNA, 512 bp, Glycine max
  unsure at all n locations
gtcgttcaacggcacgatgagttgtcgcgatcgcgnaccgcgaaactctaaggcgacctgcaggctgcagtctgtaatacagatagcgccctctttatgttcttatgagccgtcggttgatctcccgatacgtgcctcgaaatatcataaaattgtcccttctgacaacatatttagggccatgggacctatccttgagaataatcgattagtcctgtcacttgctgattttgtatcctgaaagcttcgctgcaaactaccgcgaatctagtttaatatagacattaagtttcagcactgtttattatgaatagagttaggtgaatactcgcggattgatgacctctggcatgaacactatctttgtagaagcgcaagactttggcgtctgaataacgaacttgatgatgttatgcgcacgggcttcttaagttaaattctgcatgtgattctacatacagtccactatttatacacgagacttgatttgatgaaggaagtctaatataccc

SEQ ID NO: 10528 - DNA, 202 bp, Glycine max
  unsure at all n locations
atctctaacaatagtttgtcataattaaaaccaaggatgtggattcaatatgtttaacccacaaatntagagaactagagtagtagtctcgaataacatagatccttgttgataattcgcaatatcgagtttgagctataagcattntgtcacattattttaattgtaattggtcttcaaatgatcccacatatctttaaca

SEQ ID NO: 10529 - DNA, 423 bp, Glycine max
  unsure at all n locations
agcttgctggaagctngctgattggatatttctactggtgagggagcttgtgtgtttgtttggaatatggctctttgaggtggctgaaggaaaatctctctaagccttcccatatcctcattgtggacatgaatatgttgtcttctaggtggtggtgctggaaaattgcaaattgctcaaaatttggtaaattagcttgtcttccaccctaaagcctanaaatttacatgttcatgcacataaatagcataagtataccaaggagtggtggggagaggttcctttaatatgatcatattgttcattggcttccctgctcttaaaaagaattccattactacaaaaaattaggctcttgctgtcttccttttgcattcttgacattagtatttgattgttaattcatttaccaattgtgaaatc

SEQ ID NO: 10530 - DNA, 369 bp, Glycine max
  unsure at all n locations
tttgatggtgactctaatgtaagcaacaattatgttcccattaaggctagaggaaatgaaactntaacccggtattcaaatgctggattntccagcattcttactttctcatggatgagtcctttagtaactctaaggaatgagaagactttagagcgtgaggatctcccacatcttgctactaatgacagtgtggatgggattttgcaactcttcaaacaaacttgagtcagagtgtggtagtgtgataacaaccctacganaatatganggtactgcacagatgaacaacactatgctagtgtgataacaacccttcttacnactatcaatcaaccctgcttctagtgtatggttgtgataacacta

SEQ ID NO: 10531 - DNA, 454 bp, Glycine max
  unsure at all n locations
agcttgtgcaaatcaaatcactcctaagtttcatctctagcatgcantttttttctttacccactcctcacgtttggttttatagggaaaaacaccataactaaacgcgccgcaagggatccctatcgcaccagatccaaatctagaacgatgggtgatcaagaggagacgcaggaacagatgaaagccgacatgtcggctctgaaagaacaaatggctttcatgatggaggccatgttaagtatgaagcagctcatagagaagaacgcggccaccgccgccgctgtcagttcggctgccgaagcagacccgactctcttggcaactacgcaccatcctccctcaaacatagtatgaccgggaagggacacactggggcacgatggcagccctcacctgggatacaaccgagcggcttacccttatggattgccgcccaactattcaccacccg

SEQ ID NO: 10532 - DNA, 297 bp, Glycine max
  unsure at all n locations
ttcgctcgtcaaactccactaacaataaagaatagaanaacaaaactaaaacatacaatctatgtaaccattgcgtgtggctatctaaacaaacaacactctcgcatcctaagcgtgtaactatcacacttaattcaccattgngcccaatcactgccaccaatcctcctaagtcttgatggtcgttaaaaatcatgtggatgtcagtcaggagcaatctctacatatgggtacatcgtacaccaacctctcatctnctaactcanaaagcatagtctcanagtttgcatgagtaac

SEQ ID NO: 10533 - DNA, 447 bp, Glycine max
  unsure at all n locations
agcttctaaaaaatgctgctctaggtactatttgaattgtatcgctcaaattacatgaccaactaatctagcattaatgtttggtttggttgtggccataaagcacatggcttttcttaataaccaagttaggttcatcaatgcatccatttggtgcctccatggataatgcctgtcattaattattgaccaatgaaatggaaaggggaaagacaaagagaaacaaaatcatgctgaagataagcaactacttgtaaattcactcatttggaaaacttgaaatgggccaggtatttcggctgtacgtggcccacatagtacaacttgaaacaccatttcttgaacacaacaaaattatttatagaccanaaaaagagaaacacaattacttcatattcttttgtccacctaaaaccactatatttcgttgacagcaaaccatgcttt

SEQ ID NO: 10534 - DNA, 323 bp, Glycine max
  unsure at all n locations
cgtcatgtgaattcctaacctcttattgaatatatatatatatatatatatgggtgattgtaatttaaaaataattaatacagacatagattatatcttataagagaaaactgaacatcatttctaatttaaatcttttataaataagaagggaagtagtataagtgcggaggaggtagtattaaaaatatatattnttccctccacttcngtcatggtggaaatgtgcggnctacacttacagatgcatatttccttcgtcgtttcctgtccaatattctggtgcaaattggattttaaagtgttataatcctaggaaatga

SEQ ID NO: 10535 - DNA, 453 bp, Glycine max
agcttcgtcctcagatccatcttgttggactaggctcaacttaagcagcccatgtaggtttagactaatttaaactaagcttcgtccgcagatccctcatttaagactaggctcagcttaaacagattacgtaagtttagactaatttaacctaagcttcatcctcagatccctcttgttggacttggcttaaattaaacaacattatcatcacaacatattaagaaaactaaaacttaatcctcagatcctacttgttggactaagtttcaatcctgcttctatgaagttctaaggcaacagtacatttctcaatgctaaagtcacctaactagacatacaaatgggtgatcagaccaagagcatgcagaaattaagcattgaaagaagcattgaacacaggaaacacaatcaattagatattaacataattacatcagctattccttagaa

SEQ ID NO: 10536 - DNA, 426 bp, Glycine max
  unsure at all n locations
agctnttggcacanagaagaagaagaagttcatagagattcaaggcttgtaaaggattctataagattaattggattgatagaaagattgattgaaaatgcaaaacaaagccttgcttttatagactcttcatgtctggtcacgagaaccatttagaagagttatgacttttagaaaaacttaaaaccaatttgaaaaagtcaaaaaccatttgaagagttacatcttttgatttatttagaaacaatcactggtaatcaattaccaaatcagtgtaatcgattacacaaagcttttatgtgaaaggatgtgactcatcacatttgaatttgaatttcaacgttcaaaggcactggtaatcgattaccaaaacattgtaatcgattacagctttttgaaatcaattggaacgttgtaaatttcagt

SEQ ID NO: 10537 - DNA, 188 bp, Glycine max
atcaatacaatgcctataggttggaccttccacaagtgtatggagtcaacaccacttttaacatttctgatttaattcctcttgcaggtggagctaatattgaggaggaggaaccaacagaattgaggtcaaatcctcttcaaggggaaggggatgatgcaatcctccctacgaagggaccaatcact

SEQ ID NO: 10538 - DNA, 440 bp, Glycine max
  unsure at all n locations
agctntntcctcatgaaacaagtcgaacctgatctgctggtcttctatggccatttatagtttcctcttccccatgtctaccacacggcttactgtagacataaaaggtcttccaagaattatgggaatgccaacatcttcttcaatgtctatcactacaaaaccagctggaaatatcaaatgtttgaccctaaccaaaatgtctataatcactccatagggtcttgtgatggagcgatcagccaactgtaaggtcatacgagtgggcattatctctaactctccaagtcaccgacacatggagagtggcattaaattgatactggctcccaagtcaatgagagtcttgcctactgtaacctcaccaatagaacatggtattgtgacactacctggatctttatgcttcaatggaaggatacattgtatgaatgcactgc

SEQ ID NO: 10539 - DNA, 157 bp, Glycine max
ctctaatcattgatggtggaagttgtaccaatgttgcaagcactagattagtggagaagcttggtttaaaaccacccctcaccctaagccttataagttgcaatggttgagtgacaatggtgagttggttgtggataagcaagtgttacttacattc

SEQ ID NO: 10540 - DNA, 398 bp, Glycine max
agcttcagcctttagtgcccatttctgctccaaatcgcgaaaggagggcattttcggagtcgtgaagcgtgtctctacgtgtgggacttcgaaatttcaggtttgggtggacttctttctcctttgattttcgtgggtatggggttttgggagatatgatgggtagtcttgctaggtttttgctttatgatgattatttgtgaagaaatttgtggaaagcatgttgaacttgccatgtttggatgagttaaacatacccattcagttttagggtttttatgatgatgcttgtgatgcttatgtgctgaaattgcttatggaaaactgttagagatgaaggatagagttaacctacggttataaggtgagagtatggtgttgtgagtggaaaaagagtg

SEQ ID NO: 10541 - DNA, 127 bp, Glycine max
  unsure at all n locations
tctatcaactggagcatatgtttnctcataatntatactctcttcttgattatatcacttggctactaatcttgccttatttctaataactatgccattntcatctaatctgtttctaaacacccat

SEQ ID NO: 10542 - DNA, 147 bp, Glycine max
tctaaacaaataaacacgagatgttgcaagtttgtacccccactcatacgagatcgattcacggatgactctatcacttaggactttccccttttctgtcaatgattacagggtgtattgaaactttagtatctatacaaggattta

SEQ ID NO: 10543 - DNA, 455 bp, Glycine max
  unsure at all n locations
agctntgtatttgtgatagtcaatgagagccctactaatgaatttaaataacaaaaagggttaagacaagggagtcatttggcgccttttttattcctagtggtgagtgaagtgtaaaatccacattactgattttaattatggcaaacctttagcaatgcaaattgtaagggtgatgagttttatatgatgactaacattatgctcaagtatttaagtgttaaacttactaagaagaagatgtgttcattgtaacaccctgacgaatcacactagaaagagatggatctagaggctttgcatgtatgagactgtacaattgaggatgacttaaaggaattaattggtactacctataccaacaagatgcatctactttttggtagcccatcacttaagaactccatagttaagcatgcttggcttggagtagttatgggatgggtgaccttctg

SEQ ID NO: 10544 - DNA, 118 bp, Glycine max
  unsure at all n locations
taatagcaaacaaagctagntatgacgatttccatactagttcttgaattttctgcaccttttcttttaatgcatagtacatgtactgatgttcatttctatgataagcataggtcta

SEQ ID NO: 10545 - DNA, 453 bp, Glycine max
  unsure at all n locations
agcttatatgtgtaacaccctaagatattattaattatatattgatgtttaattgtatttatcgtgttatttgactatatggttggcttgaatgagttgaggtatgacttgaattagtcatgtatgaatttcttgatgtggatgttgagttatgtggagttctgttgagctaagttgaaattatgagatttcaaattttacctaaacccatcttagtaaaatcgcaatctcggattcgntaatcgttggattgtcttcaaatgttttttggaggtttctaagacaactctccacattctgaccgttgggatctgcaaaataacatcttgagtatgagatatgactttntaccanagcagaaaaatttgaactggatcagttcacccagcgagtgttgcaggcctcaaatatgtccagcagcgtanaccaatcatcttcttcctccctctcttc

SEQ ID NO: 10546 - DNA, 396 bp, Glycine max
  unsure at all n locations
attcactaccaactaagcatccagtagaaatagtggttctgatgataaaataaatagtgattctgcctcacagttattagagtttactaacgatgcagaattaattatgtctttagcaatattaaacatctaaaagaccataatgaaagctaagttagaaaggttcacaagactatatgaatggtgcatgaacttgaatatcatatagcttgagttgtgaattgngagcaacttacttttggaaggccaaaagaacaagtcatgatttgttgtcacagcttcatggagtatattttatccctccaaatctataactanaggatctggaaaagctaaaatttccttttatttcaagagagaattatatatactgtcttctcaatcacttagaatact

SEQ ID NO: 10547 - DNA, 443 bp, Glycine max
  unsure at all n locations
agctngtcttacctatcaaacttaatgaacctgctttgatatgaacagaggaaggaaatgaggagacttttggtccaagatgcaagtttttcctcactcctaaaacagttctgtcgcagcgtgggctacaacaagatgacgataaaaagataaaaagaggtattccaaaaagaaaatctgggaaagtcgccactaacatttatttaaggaaaaggttgggaaaaccaaaaaggataaggaatggtacggtttgagaaaaaggattcgggagtcgtttacgtacggcgaaggtgttagcatcctacgcacctgtcatgaagatgacaacctttaatcaagtgtgctaaaaataaagtaacactttaattatatatttttcctttagaaaaagaaagncgaattttattttttagaaaaaaatggattttttttaggtcgacatg

SEQ ID NO: 10548 - DNA, 150 bp, Glycine max
  unsure at all n locations
tgtgcgggtctcttgtggatccgagaagttccacgtgcttcttggttacttgtggtattaatgggctgcatgggtatcttagtgggctgcatgggtgcctctatggtacttatctcgctatcaattcccncggtcttgaaataaaccttg

SEQ ID NO: 10549 - DNA, 524 bp, Glycine max
  unsure at all n locations
gtaatttcccggggacctgttntttgtgttaatgcaggaccgggatactcacaggcgagctgcggccttcaagctcgtttcgcatataataagacgaatcacttttatattctagagctgtaacagatttcatgtgattaattggattgatagaaacattgattgataatgcataaccatacctcgcttttctagactattaatggctgggcactagaaccatttagacatagatatcgctttttccaattaccttaccccaacctgacgaactcaaaatccatctgcagaaatactgttgtcgctttatacatactacctgactggagatcgatgaccaaaacaaggagatcgaatgcccaagagttttctgtgatatgatgtgactcatgacatttgaattccaatgttaacattctaaggcactgggaatcgataacccaaacattggactcgactacaagttatatacaaacaacgtatctgtgtggattcactagcaaccttttgctatcacttgtgcg

SEQ ID NO: 10550 - DNA, 238 bp, Glycine max
  unsure at all n locations
tagaaacacaattaattaagggttgaggacaaattacaatacaaaagagatataagattgattntttcatgattggaaaagggaaagagaggtgagagagaatacatttataacaaaactaanaaattaatatttatcagatgaaaaaaattacaattcaagtgcatacaacaaccatgagccaatacttacttttggtntcttanaatagaatgatgaanacaaaataacagtacac

SEQ ID NO: 10551 - DNA, 436 bp, Glycine max
  unsure at all n locations
agctngactttaacccattattgcttgtcctatcaagtcaccactcgctctaaacaaatccacaggatttgttgcaagtttgtacaataactaatacgtgatcgtcttatggatgaatatattacttagcactttagtcttttctctcaaggtttacaaggggttttgaaagtttagtatttatacaaagatttacaaaaagctttataagaaagaatgaaagaatatgttcacgcaagataattcgtatcttgcttctttaaaacttcttctatttatagcttccatcttcaaatatttgttgtctcacaacaggtggattcttcactatgttctttgtctgaagtcttgagctcgctggagaatttaacacgtccattcttcatgaaggttcatgctggtaggcaagcgtgccttatacttcaacagataaagt

SEQ ID NO: 10552 - DNA, 162 bp, Glycine max
  unsure at all n locations
cacgatccatgattcgatcatcttctgtgagaaatngaggcggaatgactggattaaccacaaacctctgcaacttatgcgatntaatgactggttcaacgtgttgtcgccagtgtagatagttggaatcatccaatttctcagctatcgttgtcggaaatg

SEQ ID NO: 10553 - DNA, 404 bp, Glycine max
aacttaagcagctgggctgcggcttgtgaaggagcagatagcccttctgttttgctataccatgatagggagtgtacggcggtgtcagatggcgactcttttactgctactggcgagtgacaagaactatacacacctctgatagccaatatggcatacccaccacccctctttgagtgatgctgatgagatttctctgacgactcagattctggagcaagactgatctgatcaactgactaagaatacagagacaccgatgttatccgctgatgaacaacactacaaagagatagacctagatgctttgacaggctgaaactgctcgcactatgatgacttactcgaccctcatcaaatcatcattactatcaagaggcttctccgcactattttcaaaaatc

SEQ ID NO: 10554 - DNA, 149 bp, Glycine max
  unsure at all n locations
acctgtaaccttgaaaaatatagntgccatcataccactaagctatcataactatttgatgaataaatgcataaattaatatatatcataaatgtactaattttctattaatcataccgagttatacacgtcaattagtgacttatgtg

SEQ ID NO: 10555 - DNA, 449 bp, Glycine max
  unsure at all n locations
agcttgttaaagaatntagaaaaaatctagaattagcttgttcacacatcgttcgcgtgtatgatatccactccacaaggtttgaagttgaggagaccttcaatcctattacgcaacgtggcggacaaaagtgggcagttaacttgaatggtcatgattgtcaatgcggaaggtattctacacttcactatccatgttcacacattattgcagattgtggttacgtgagcatgaactactattaatatatagatgttgtttacacaaatgaacacatcttaaaagcttactccgcacaatagtggcctcttgggaatgaagtggctattcctccttctaatgacacatggacacttatccctgacccaactaccaattgtgcgaaaggtcggccaaaatcaacaaggataaggaatgagatggattgngtcgaaccatctgagcaccga

SEQ ID NO: 10556 - DNA, 309 bp, Glycine max
  unsure at all n locations
atcaaaagatgtaactcttcanaaggtttttgacttattcaaattggttttaagtctttctaaaagttataactcttctaaatggttgtcttgaccagacatgaagagtctataaaagcaaggctttgaattgcttttcaatacattcattcattcaatcttgaatacttttccaatcaatctcttacaatcctttacanagccttgaatcttttgaacttcttcttcttctttgtaccaaaagctntatgaagttntctggtntctaaacattgaaaacttgtgctattcatcctcttcattcccttc

SEQ ID NO: 10557 - DNA, 443 bp, Glycine max
  unsure at all n locations
agcttccgttntcaatttggagcatctatcgattaattgcgacactctgtcgggcatccgagtaaaaagttattgttgtttgaattttctaagagtttccgttttgtatttgaagcgtctcgatatattacgggactcaaccggacatccgtgtataaagttattgtcattacaatttgttcagagcttgtagtctcaattttgagcgtctcgatatattacccgatttaatcggacatccgagtaaaaagatactgtcgtttgaatttgatacctgcttctgttttcaatttggagcatctcgatatattacgagactctctcgaacatccgagtaaaaagttatcatcgattgaatntgctacgaccttccgttttcaattcggagcgtctcgatatattacgggactcaaccggacattcgtgtataaagttattgtcat

SEQ ID NO: 10558 - DNA, 433 bp, Glycine max
  unsure at all n locations
agcttctagccaaatggacttaccgtgaattaattcctttgatagcccttttgagccttgtttccctttccttgttttgaagctcactacaagccttaaatgaaaaaccatgatatcaccatatccttaaggaatttttgagctttggaattgttttgggaataagtgtggggggtttttttttgtttcattggataacttgttttgctggctatgcttcatgatgtattttgggccatacttgatgtacattgtatattggttaaatgttggacatgctgaatgaaatgttgtttctcaaaggctatagagtaaaaaaaaaaaattcgaaaaaaaaaatcgaanaaaaagaagaaaaagaaaagcaataaagttgagtgaataagatcttaaatggcacaagaatgatgaaactctnggttctactctttat

SEQ ID NO: 10559 - DNA, 314 bp, Glycine max
  unsure at all n locations
caacaagtttccacatccacaatgcgcgcataaacncaccatcctctattggccacctncatctgagctcacgtactcccacgtagcccatatcctcgtttctctcaacaccgggtccccatcaatcctcccaagcttgcacaacatccaagcaaaacaaaattcanacagcacaagctatcacagccaagcanaacaggaaaaggcaganaactctgctcaacacaccaaccagaatcacagctnttcccacttaaagaccccagaacaattccttcgatcaattcttaaccgctgatcgactcaaatttact

SEQ ID NO: 10560 - DNA, 442 bp, Glycine max
agcttgttgaaccatctatatggcccctatgattgagacataaagcaagaggctgcattgaacgaaatctatcaaagcattatgacctccaataccaaagggacttttttgagtttgagaaagaattgaaattatagtgaaaacaaatattaaataacaaacaaagaaataaaagtcaaaaagctcaataccaaggacaaacaaaatgactaaccaacaaattcaataacacggaactaaaatgagaaaaacctaaattttctattatgactacagaaaaatgaatcattatcaccaccatagcagactgcaaaagagagatcaattcatatgaaccaccaacatgattggttgaaacacaaaagcaagatcattcttaagtatatatgtttaataaaagaagaaaataaatataaatatataataaactcttacatagtgc

SEQ ID NO: 10561 - DNA, 185 bp, Glycine max
  unsure at all n locations
atgaagataagctgatccgtgaagagaagtgactgagtgagactttttaaggttgattcaagacaacgccattttggagctttnttttatgagaaanacccagtccgagtttcaaaaaccagccaagttgttaggtttacacaaaaccagtcgggttcgatctggtcatcccgggccaaatgcat

SEQ ID NO: 10562 - DNA, 410 bp, Glycine max
  unsure at all n locations
agctttaaagaatgatttcatctattatgaggctttgtccactcttttgggatcctcctagggttgaaacaaagtagcacctatctatagaagtaggcccaagatttaattactggagaaccaaaatccaataaatatataaacattaaaagtcatataaattagttatgcgtttttaaaatgatctaagaacatataatagaaaatccatatacatagaagatattaaacatttttttaaaaacccaaagttataaatgacaatcctcaatttcatgtcaccaagaatgttcatgaatttataaaaaaattgctatatatgttttcttttttacgagaaatcctattagttatatttgaaaaatcaacttatatattntgaacagattatgttactaaataatgtttat

SEQ ID NO: 10563 - DNA, 456 bp, Glycine max
agcttagtcaactcaactaagattacgctatgcaaaagctgcaatgtgtctaatgtctatgctcgagccaaagcttcttattagaaactcttgtgaggtttatagatacaatacaatttacaaacgtttgtatagaataagttacttaaagtactgacacgtatcctaatgtgatatcaatactccaccaatatgaatatgagaagtatccaagcctttaaaaaaaatagaatccttgtgctccttagataagaggcaaagtgaacaggatgaagcatcttgtatagaacttttggagtgtgtttctaaatcaaagagacatttagatcgcgatcttgataatcctaaaccatgcaagtctagaaagtcaattagttctagttcattattttcttgcaagtacagcaagatctcattctgtggcattgaagaccatctatcagatgactgttatga

SEQ ID NO: 10564 - DNA, 149 bp, Glycine max
cccggaatgggtttaggcaaagacaacgacggcataactagcctgataaatgccaaaggaaatcgtgggaagtatgggttaggctataagcccactcaggcagatataaagagaagcatcgcgggaaggaagagcggtagtcaaagctc

SEQ ID NO: 10565 - DNA, 457 bp, Glycine max
  unsure at all n locations
agcttgttgcactagcataaacaaggagttgagcaactgcttctggtcttgggtgtcatggcaatcctttggcatgaaaaattctaaaacaaaatcagcggaggcactccggagtggaatgcccagagcagcatgcaagccaaacatgttagcatgatgtgccagaggatactccgccttgctgaaggaagtaatgtcatttgcaaaacaaggtttggtggttgtgaaagctgtcccaactactccttgcccccccaaaaggtggcactcagagcacgcttccaggaaacccattagctctacatccgccacaaaactagcagcatacacagtcgacacataattcatctcatcgtttgaatgcccacatccactctntcctgcttgttggatgcagggagcccatgtcagagctaaaggcaagttatgcgccttgcatacacacgtcaaaacttgt

SEQ ID NO: 10566 - DNA, 145 bp, Glycine max
taccagcccatgtccttagatgacttcatctgccacatagacaacgcccttcagctcacagcataggtgagatatgttcgcttttatttatcagcgtctattaagaaaagagcaacttcgcaacatcttttgggataattgcaca

SEQ ID NO: 10567 - DNA, 452 bp, Glycine max
  unsure at all n locations
agcttgtcgttagaatcatagacctgtggtttgttgaaactaatgataaatttgaacaagctgaaatgattattatggatgaaaatgttgtcttatttaactttcttatgttaatagatattgtatggtgttataataatttgttttctgattattacctttggactatgatttttgttcttgcaggttgacaagattcatgtccttataagaaaagaggagttaaagacatggaaattgactctaaaggagaacaacacttatatgatgcacaactttaaaatntttaacaacgagggccagtataagctatgtttgcatccatataagttgatttttactggtgtcactattgtcatagaagtggacctttctaatatccctttaaaggcatatgagtttgcttaatttgttgatatccttgctagaacctaccgacgcgatttgttagt

SEQ ID NO: 10568 - DNA, 323 bp, Glycine max
  unsure at all n locations
taagaaaaatcttttcttgattcaagaacattcttttggaaataattatatttttctttntaggaaaaatacttgagtataaattatttttcttttataattcgctattggtagtttataaatgacttgataattgcaatcaaatgtcatgattggtctttcaattatagttgcataattgaatnttgantntatacttnttgggcctcctatcttatatctttgtcttttggtagtggtgtaaccttgtgatacttgagttgttgaaagttaacttcatggtactatatctggggagtggtgaaagagtatcaaattaaaca

SEQ ID NO: 10569 - DNA, 438 bp, Glycine max
  unsure at all n locations
agctngtcgttagaatcatagacctgtggtttgttgaaactaaagataaatttgaacaagctgaaatgattattatggatgaaaatgttgtcttatttaactttcttatgttaatagatattgtatggtgttataataatttgttttctgattattacctttggactatgatttttgttcttgcaggttgacaagattcatgtccttataagaaaagaggagttaaagacatggaaattgactctaaaggagaacaacacttatatgatgcacaactttaaaatttttaacaacgagggccagtataagctatgtttgcatccatataagttgatttttactggtgtcactattgtcatagaagtggaccttcctaatatccctttaaaggcatatgagtttgttaattttgttgatatccttgctagaacctaccga

SEQ ID NO: 10570 - DNA, 251 bp, Glycine max
  unsure at all n locations
tctcttcttttaattggtatattttaaataagacaaatcttttcttgattcaagaaccattttttggaaataattatattnttctttntaggaaaaatacttgagtataaattatttttcttttataattctgtattggtagtttataaatgaccgtataattgcaatcaaatgtcatgattggtctttcaattatagttgcataattgaatattgattttatactttttgggccttcctatcttataatc

SEQ ID NO: 10571 - DNA, 401 bp, Glycine max
agcttcctagaggccttcattgcaaaaccttggtggacctctttttttccaagactccagatacggacaggaaatgtgagttttcattcggccttttatcattattttccatttacttttgctaatgaatattactctttttctttggtgataataggcaagtttgactattgttccattaggaaggctcagattgaaaaggttaagaaggtccttgtggaaaaggataaggagaattagaaggaaaatccccaagatgacttggtgcctcctcctcctcctattgctgctagtgtcatcattcggggcgagcatgggccttccagtagtggtccttcataaaggcagaggttggagttggtgcctgtggttgtaccttcattcgttgagagcatccctac

SEQ ID NO: 10572 - DNA, 288 bp, Glycine max
  unsure at all n locations
cagctataaatatanattaatgagctgaagaccaatgaagaactgttgaaggtgttagtacaatctaactactggagaaaatatggaccaatagaaattntagctgtctctgctaaatatgttgtgaaattcgaagacgaggtgactgcgacatcgctaaacgactgaatgcaatgtttanttttttgctttntcgttgatgtaaactntatctatntacggtgtgtttaaatcccataataaagttcaatgtgttatttcaatggtccanagaataattttttaatt

SEQ ID NO: 10573 - DNA, 425 bp, Glycine max
gccgccgcatgcaagctttctttacaacaaatgaaagagatagatgaaagattgcagaaataaaagtggtggggatgtctcctccacctcttggacctctcaatcactcataaactcagctcatgctcttaggacaacttccttttccagctttggtctctacagatcttcacacaacaaaatctctcaaactctgtggaatttggacctctcaagaaaaatggccaaactcatcctctaaatatgatttcacgcttaaataggtggctttgttcgtgctcgtgcgcttagcacaactctgatccgctcagcacacattagtgaatatcggcttaacgcgattttttctcgctcaacgaatgaaatgaagcggcgcgcttagcatgatgacccttcgcttagcaaacatgcacaactcatctttc

SEQ ID NO: 10574 - DNA, 290 bp, Glycine max
  unsure at all n locations
tccctcttgtagactaggcctagactaaacaacattattataacaatataattaaaaccaaaacttaatccgcagatcccttntgtaagactaagtttcgatcctgcttcaatcaagttctaaggaaataatacatttcccaatgctaaagtcacctaactatgcatacaaatggatgatcataccanaagcatacaaacattaagcattgaaggaagcattgaacacagaaaacataatcaattagatattaggtatttacatcaattgttcattagaaatccccaact

SEQ ID NO: 10575 - DNA, 448 bp, Glycine max
gagcttgtaagttacacaatagagaaattctagtgaaatattatgcatgcttttgtatgtaagcattgtattagattatgtaactactaccaactaactgtacttaggataggtgtgattctctttatatatattcctcatcctatatcaccacttattatcttagcatttaacgggcttaaagaataattgctcttgacaaatattagggagaacaataagtgcttcaattctttcacacatgatgaaatgaaaggtaggaatctttttaggtttcaacagcagcaccaaaggtaggatccacgatgtaagggcagccccatccgattttgatctcagattgtgctacaataacgagcttgaaaatctacacatcccctattaaagaacgtgcagacatatcccagctagctgggaatacgctcgtagtgtatatacaagacataca

SEQ ID NO: 10576 - DNA, 362 bp, Glycine max
attgtcacatcacctatgtgatgtgaattctcctaataactgctctaatatatgaaaatactgcatcatatcttactagaatatcttacactatccttacgattagtctctctctatctgtcttgaatttgtgattagctgccatatttctttatcttatcatgacttgttttcttaattcggattatgattagcatataagggttagtactataggtcttatgaatatatccaatcaaatatgcacgatgttaaatacatctcagttgatatcaaccccagggttcattctcatttatctctcttcctccctcatatctacaagagataatttcaacataattagatatctttggtgacac

SEQ ID NO: 10577 - DNA, 449 bp, Glycine max
  unsure at all n locations
agcttcttacatagtccgcctttgcttgaccttctttatgcttaanaacagaaacattaggcataggcaaaagatcaagaggagttagtggattaaaaccataaacaacttcaaaaggagaacaattagtggtgctatgaacagctctattgtaagcaaattcaacatggggtaaacaagcttcccaagtttttaagttcttcctcaaaactgtcctaagcaaagttcccaaagtcctattaacaacttccgtttgcccatcggtttgtgggtgacaagtggttgaaaataacaatttagtgcccaacttgctccacanagtcctccaaaatttttttaggaacttagagtccctatcactaacaatgctccttggcagaccatggagtctcacaatctccttgaaaaacaaatcagccacatgggaagcatcatcaactntnttacat

SEQ ID NO: 10578 - DNA, 197 bp, Glycine max
  unsure at all n locations
ccttgacccagtgtgataatgtcaatccttaccctcggaagcaaaaaaagaatagaggggaaatttccaatcaaagaanaagagaaggagaatttccaatgaaagcataaaaagaaaagaaggaaaattccccaatcaaagagtgggagaaagcaaaaaaagataagaaggaaaattccccaatcaaagagtgggag

SEQ ID NO: 10579 - DNA, 452 bp, Glycine max
agcttgtacacagtgaagatgttgttagagatatattgtgatcacatctaaatttcataaagctattaaattcatttctaacagtgttaatatgtggtgttataagatgaacaattttggggacaaaaggttttgaggatgttcatcttataagtaatattacatatcgacaccacaatccacatttcaactttaaaataatctaaattaataattgagatgttaacaccaaaatccacacttcgacttttatactagacccgtgttttatcttttatatattacaatagatagataaacagatatgactagtacctaaaatcggtatgagagatatcaaactgcatgcaatacttagaacctgaaacacattgaccaacagactacctttagagaatatagtaagcacagaaagaactcagcgtaatacaatactttgtgcctcgaaaaga

SEQ ID NO: 10580 - DNA, 376 bp, Glycine max
  unsure at all n locations
agcttgatttgtgagttgattttagccttagtttcactctggttattagtcaattcattcaagggaacttttaaagaaaaacgtccgattgatttttttgattattttattcaaagatattttgattattttattattattttttcaagatattttgattattttattattatttgcctttttttgatttaaccgaggttacaacgtgaacaatcagttagattttgttttaatagtgattaaacgagattacaacacaaatgatcggttgaaattcattttatcaattattaggcgagataacggcttaaataaacggtaaaaagctcgttaaaagcggaatanaagaaaatcgaaagtgaacgagatgaagatg

SEQ ID NO: 10581 - DNA, 193 bp, Glycine max
ttctcgctaagccaatctgctatcttagcgagcatctgctaagcgcaccacccatgggctaagcgccaggaagactctataagaagatgagttgtacaggtttgctaagcgaaccgcttcagtccatacgctaaccgagaaaggcacgcactaagccaaaattcactaatgtgcgctcaacggtccataattg

SEQ ID NO: 10582 - DNA, 409 bp, Glycine max
  unsure at all n locations
agctngcaatntatcaaatacgactctgacttgttctacttgactaaacttgtaaggaatcagtaattagaggtttttattattattgaaaattactatgttatgggtgtattgaaaatcattgtgcaaatgagttaataatgctttttaataaatatatttttatttttaattcattaacttaacatttgtaagtttttgcaatttaaatatcatgtcgaaagagagcataaactttcattttttacattcctatgagctcaattttttttcatagtggttgtatactattattgctaatgtcatatgagccgagcccgctttgctctggacactgatccagaattatgggccagttaagttacaatgcccncaaaattaagttcttcaaaatgtacatttaagactc

SEQ ID NO: 10583 - DNA, 427 bp, Glycine max
atacttaagtcacctgctgcatcaagcttctacatgctgaatgaccttttatactgatatggcaaatctcaaggccacatgagttattcttgagggactcacttgccatcagaagaagaaatcctttaaggatgctaatcattatgtgtgggatgatcctcactggttcaagattggagcaaataacttgatcagatggtgtgtcattgaagtggaagccaagagcattctttggcattgtgacaattcaccttatgggggccattttaatggagaaagaactactgccattgtctctaacaagtatttttctggcccataatactcatagatgcacatttgtgtgtgaaacaacatgagtaataccaaagaacaagaggaatctcatgaacgaatgagatgcccctgaacaacattattgaagttg

SEQ ID NO: 10584 - DNA, 162 bp, Glycine max
  unsure at all n locations
attcatttccttcatggtttacaacaaacaatgaagccatatgtcagtcagtcacatggatcaattgatgccactatgctccatcaaaaacccaattttcaataaaatntatcaatcaacaagacattttcaaaagttccagtgaatatactgctatataca

SEQ ID NO: 10585 - DNA, 414 bp, Glycine max
  unsure at all n locations
agaaagggaagcggtananttggaacctctgatcctcgaatccaaccagctngtacccatgtggagttggctaacattaaagctgtccttatcaccactattggtcctctttttgaagttgttaatggttttaatccactacttcctctggatctttggcctatgcctaatgttcttgtttttaaccttaaagaaggtcaggcaaaggcgactatgtaaaaaagctcatgaaaagtcaagatcaaatgagaggaaaataaagcttgctaataaccacaaaggagaaaaagttgtttcaaccggagatggttgggtgccatgaaaaaaaagtttcgaacaaagaatcaacttcaaccaggagatgacattcagtctgaagatcatgacatgctacaatgactaccgtagatatgt

SEQ ID NO: 10586 - DNA, 355 bp, Glycine max
taatatccaatacaacacaacttggttcaggggcaaccgaagcctccatgtcagccctcccacaaacatgcataattatacaaagtgccccgattacgatctttactacaatgacaaccccaaagctgaagatgcgtctttgagagcatgtacaaaagtcctgcttccaattaaagacccgcctgacgctaacaacccattcacattcgcaactgcagatatcttcactaaagtagaataaccgatgaatgtgcagcttgccactatcgcaaaggaaggcagtgtcaacttgaccgcagagagatattattttgtgccactgccaatagtatccgtacgctttcttctgcaataa

SEQ ID NO: 10587 - DNA, 334 bp, Glycine max
ctaatagaccctaagtaatacatgtacaaactcacggtgtaaaagtcttttacactatcatctaatcacggatcatcatgtatgataagttcattgacttttataataaccaccttaaaagtcattcaaaggacaagttcttattgtttgatagcataaaaactctaatattgacagcgtgtatctatgagaactcttctgaatctcgtctacctctacatttggttaaacaaaagtgtttttctaaggtctggttactggcttcataagggaaatatccccccttttgctgttgcacagagtacatcatgttttgttgagaagcacagttgct

SEQ ID NO: 10588 - DNA, 313 bp, Glycine max
  unsure at all n locations
ttgtccttagatccctcttgttggactatgctcaacttattcagcccttgtaggtttagactnaattaaactaaacttcgtccttagatccctcttgttggactaggctcagcttaatcagcttacgaaagtttagactaatttaacctaagcttcatcttcagatccctcttgttggactagacttagactaaacaacattatcatcacaacatattaggaaaactaaaacttaatcctcagatccctcttgttggactaagtttcaattctgcttctatcaagttctaaggcacaatacattttccaatgc

SEQ ID NO: 10589 - DNA, 395 bp, Glycine max
  unsure at all n locations
ttctctgcaacaaataaagganaattggattaagcagaacttgctaaatctattcctgacaatatatgtttggaggtaacatttcaagtatgatcaatatttataagcaccaattatgaagtactcttctatcctattagtttcatgtgtggcttaatcaaatccatagatagctatgtgtcataccctaatttcgtccggngactattgtttgatggcatgcaacctttggttgaccgcttcgaggtacttggcaccctttgttgcataatacgtgaagtttcgagacatgccggaaatcaaaaggaagcattgttacgcaatccgtgaaatttcgtaacatgccggaaatcaaaagaaagttttgttacgcaatctgtgagtttccgtaacat

SEQ ID NO: 10590 - DNA, 231 bp, Glycine max
gtcttagggttgaatcctgacactttgctactgtacattatgacaattcgtgtgtggtgtccatgcgttactttggagtcattgaagaaatctgagagcttagttatgttaaattcattgtgtgttttcaagtgtatgtgggttgatagcaatattggtatgcgaacagatgagtttagatttactttggtagatctgaagaagctagcttatcagaatggatttcatgat

SEQ ID NO: 10591 - DNA, 320 bp, Glycine max
cctgctcctgttgcagcaacatgtctttgtggcatttttaacacatttttcatggagctgcacttccaaaaaatccacagttgttgatgcacaatatatgaccttcaggagggagctggcacccagtcttgtcatggtccattttttttccaacttaccctgcgcaaatgatacatagaacatctaagatcacgtcatcactaatttcataataaacaaacagcactccagagaaaaaccagttatcaactatgattatagtccaatttatgtagggaacaatatagcacccttttcccaatgcaaaatattgatgaaac

SEQ ID NO: 10592 - DNA, 400 bp, Glycine max
aaagcttatagatatgggagggagaataaaacaatcttatataattttacctggcaagcaacgaagagttctttttgcggcttttagatgacgacaggtacgagcctccatacagcgacacacaactcccaccgcatatagaatatcgggccttgtattggttatataccttagactccccacaagactcttgaagatcgtggagtctaccttctctcctttatgaaactgtgataacttcaagccaccttccataggtgtgttcacgggattgcaatcaagcatattaaatatcttaacacttcttttgtgtacctatcttgtgagacaaagataccattctccgtttgcttcacttgcattcccagaaatatgacatgagtcccatagtctgcatatc

SEQ ID NO: 10593 - DNA, 264 bp, Glycine max
  unsure at all n locations
ctactagaaactcaagctggtaacattggtaaatctgtgaatcatttgtgaactcattttttctnggaaatncagaagaaagcaaggggcttagttgacacatggaaaaaacgtgttgaagctgaaatgattataaatgatgctaggtctggttcagttcagactgtcccctggccagccagacaacggctttctgaagttgctcaaagtgggaataaacattcgagtgggtcaactgatgttgccatgaagagctcagttaca

SEQ ID NO: 10594 - DNA, 350 bp, Glycine max
  unsure at all n locations
tcatgatgaatcaagattgattcanagaagttttgatgatttcaaaggtaatgacaaaaagctcanagatcaagaacacttcatgataacaaagatgaagatctcaaagaatcaagaatcaagattcaaggttcaagttccaagaatcaagatcaagattcaagactcaagattcaagaatcaagagaagacttaatcaagataagtatgaaaaaagttttttcaaaactgagtagcacatggattnttctcaaaaccttgttaccaaagacttttactctctggtaatcgattaccagattattgaatcgattaccagtagcaaatggatttgaaaaagtttcaactga

SEQ ID NO: 10595 - DNA, 310 bp, Glycine max
aaacgagcccttatgtgagcactgggcaagatgtttgaaccccctgccctattgggtttttcatacaaacaaagcatgttatttcggtctgagatggggcagatagtacacttgcgtaatcagtcttcaactcgcaagtctatgttattatgtccaatactacatgagttcgactgagcctaccagaaaattattatcgtggcgagttaaacagactagcatagctgagattgttaactaagacgagtttacaagtaggcatgagagtttgacaaccatgtgtgcatgtgtcactaagaacatgtgcctg

SEQ ID NO: 10596 - DNA, 339 bp, Glycine max
  unsure at all n locations
ttgcacgtatcagtcaagtgtatggaccatgttgtanccattttgctcatctataatggtgctagtttaaacgtgatgcctaagagcactttggagaaattaccattcaatgcttcccacttaaagccgagttcaatggtggttcgtgccttcgacggcacccgccgagagggtaggggagagatcgatctcccagtacagataggccctcacacctgtcaagtcacctttcanattatggatatttaaccccccctacaactgtctgttggggcgctcgtggatccactcagtgggaagttgtccctctacactccaccaaaagttgaaattcgtagt

SEQ ID NO: 10597 - DNA, 198 bp, Glycine max
  unsure at all n locations
ntcgcgctctcttatgcttctaatctccgtttaccgaaactgtccctgtctgcatctaagcatcgtgtgcggcgcactcgagcatcgtcatcgttgcactcgagcatcgtcacaagtccttgcttcttcctcttcgccaccatacataggtatgtttcgtctccttcgcgttggcttctccctctctctggcttcttc

SEQ ID NO: 10598 - DNA, 463 bp, Glycine max
  unsure at all n locations
gacactatagaaaaactcaagcccttctaatttctattttctaggacgcaaaatcgcaatttatttanacgttttatngcnncattatatggaagtngcacgcagaacanatgtgtgagaagataagaannatganatgggagtgaacgacccaagcctggaattatgaaagttcgcatggtaccctcgttttcgccctaattcccaattatgaactagggaacnncctaaattaatgaattaacccgtcgattggcctcttaagataattgttnagcctatggtcaatgtaacaccctatttttcataaaataaattaaaaatgattntatttaaaaataaatagaattttagaaaataatgaggtttttataattaaataaataaggagaaataatttatttattaaataatagttttaggtaaataaataaattatgtcttaaaaaatgtttattattca

SEQ ID NO: 10599 - DNA, 111 bp, Glycine max
  unsure at all n locations
ntataagtgcgggttcgggatacaaaggtcatgcgttcgttatatgcgaagatgatattccgagtactgaggatttggtacgaccatgctctcctgatttccagctgggaa

SEQ ID NO: 10600 - DNA, 447 bp, Glycine max
  unsure at all n locations
ncactctggttttgctagtncttgantctcaaaaatcnanagggacccggtggggatgctaagaaaatcccaaacttattccctttttaacaacctatnnagaggcctttagtgccggatggtacaaccttcaaatggtggctcgtccccctatttcttttctgcaaaaaagaaaatcattatcaaagaaaccatggatgaagtcctaaggatgccatgtacatgngtattaatgaagatatagtattatatttccaatcaacatacattgattgttgattacatgtaataagacttttataacatgggtttcccaaatcacanattaaaagcacaactaccaatccttcagagccctttgttaatttggcttgctccttatgtgggggggtttgttaaataatatatacttagcctcctaaaaaactatgactgacctcttttatn

SEQ ID NO: 10601 - DNA, 416 bp, Glycine max
tctggcatggaatgacttggcaattgccttctttatgcagcaccattacaacactgatatggctcctgatcagaaccaacttcagagcatgaccaagcgggaatatgagtccattaaagaatatgctcaaaggtggagagacctagcagcccaagtcgtcccacctatgactgagagggaaatgatcacgattatggtagatatgttgcctacgttctactacgagaagctgataggatatatgccggctaactttgcagacctcatcttcgctggagaaagaatcgagtccggactgaggaaaggcaagtttgaatatgcctccaacgctgcccccaacaataacagaagagccccagtggtgggcacacgataaaaggaaggagatacccacgtggtcaccaccgccccaacat

SEQ ID NO: 10602 - DNA, 327 bp, Glycine max
  unsure at all n locations
tgaacattcatacattaaggagaagcaagatttattcaaattgaaanacctctcagngaaacacaatgctgatagagtctatcattttcttagcaaagttcttgtattgagtcttactttattgtaaagctctctttgagtgttagaatctataattctttaaatggttcgtttatgaaagctangagtcacttagtgacaaaacaatacttgaatgttcttaagttcaaggggagtctaagggttgtgttagtagtgacctagagaattcttgtaaagacaggaggggtaggttagaatatttattgtaatcaatcattgattagt

SEQ ID NO: 10603 - DNA, 361 bp, Glycine max
cgaagggaagagagagaccagtcacgagcttatagcatgtgtcttgaaagaggagttagctgcttgctcaaggtccaagagaacttgtctcaacgttatgcgagacaaagaccacattgtgcccatcgtagcaagtcccaaaagaattaaatctacccacagccacgagcacaagtgacagaaaatatcccgagtgtcgcgaaaaggaggctaagaaggggatcggagtcaagacatcccgattgctaccaggccaagaaatggcgacacctactcgccccgagagatcatgactttcactatgcagctatataacatatggcctatatagaaccgtagaattgatgcactaatctgatat

SEQ ID NO: 10604 - DNA, 387 bp, Glycine max
  unsure at all n locations
ctaagcttgaatccagagccngcatggcaaatgttaaccacctttaacctgtactggcatcactcaaagttaatcactttccaatatgcctccacattccagaccccttctagatattatttacttggcagttgatgggtgctgcactctgggttttctgttcaaaggtctatgattttaggtaactataaaaaagtgtttgggttggagtagctagtcattcctgtatattactttgggtcttgctacagctaacagctttaatctgagctgaatgaattacttcattctgctactttaagttgcgctagtgtanggttatttattctctttcttatcttgggtgatgggtgctaacaaggtgcatttacatctgttttatttttt

SEQ ID NO: 10605 - DNA, 438 bp, Glycine max
  unsure at all n locations
agaaannnnnnnccgtgggnnactgaagngcatgaancntgaaatcattaaaaacccggnccggaaagacactaaattggtttgaaggcccactgtcttaaacaaccctcttgtttttatcgggacatggaccgtccaaaggcataaaatcaacccatagctttaccactttttgcaagaactacttaggtctgagttcctcaccacaaatggaggatcgtcggagtaaagcccactttgtcgacacccttttcaaaaaaaaaaaatcaaaaacctaatggtaatgcctacgttctcttttccaccagagacgtatggccatgcctaactttctctctttcaaaagaatcaaaatatcggtcaaaggcccaacgccttaaacgaaatttgttcgataaaattgaccttgcgaaaaagatcaaaaatcttagccaacct

SEQ ID NO: 10606 - DNA, 453 bp, Glycine max
  unsure at all n locations
aggggnggggnnnccggtaanncctggatgggctgatactgtgcaaccnactcagcttatgatgaggatccaggtggttccaggtggtttggaggttgtcaaaaggcccacagatggatttcaggattcagccaccaggatcaggaccaggataatttccaggtttcttgagaggaatctcagaggattcaggattcangagaggtttgatttcaggaatcaggagaagaatttaagaagacttcccaggggaagtattgaaaagatttttcaaaaacanacatagcacagttttgtttttcaaagagctttctcanaatttctaagtaccagagttttactctctggtatcgataccagtccctgtatcgattccagtggannagttgatntcaaagctttaactaattgcacgtacaaatgtttttaatgggtatcgatacatatattggg

SEQ ID NO: 10607 - DNA, 119 bp, Glycine max
cactaccagaaactcaagcttctatgtagggctggatctttgagcttcaatatggtccttctttggtgatttttcaccatggagttgtagtagaagataaaggagaagaggtgagagga

SEQ ID NO: 10608 - DNA, 252 bp, Glycine max
  unsure at all n locations
tgcattnggaattgcgagagccccactctatcattaggattattacctgacatctcaaacgaacaaatcaaacgtaacaagacaattatagttgctgtttgaatacctcacccactcaagtgtatcacacaattatggcttttctctaatgaaacactcttgccttttaccacatctaattcccttgagttcttaagcaattcaagagattatggccaccacaaagaacaattcaccaatatgtgtaatgta

SEQ ID NO: 10609 - DNA, 399 bp, Glycine max
  unsure at all n locations
tataagatcaaaattgccttaatcatttcttttatgcatgttaattatgacgcatcaacaagaatcaagccaaggctattgtgcaagcaatcaatggggcaaaacacaccaaatgattataatgatggatggctcaaattctcacaaaggtaaaatcatcactttcaaattgagctttcaaaactatcatgacatgtagagaagaatcaangatttcaagtcacaaaatgtcaagaactnttattttcaaaacaattacccatttcttgaacatatcctataattcaaagaaaaacatgcaaagtcgtacgtgcacatgaaattgacccaaaatattaaactgaaaatccgacgaaactaacaacattaacaaattaacacaactaacaaattaacaaa

SEQ ID NO: 10610 - DNA, 295 bp, Glycine max
  unsure at all n locations
ggaaggtgtgtagncccaccattcttttcatatttagaaaacatgtaatgtgtctactatcattgttatcattttttttctccgtcattgaggtgccacttgagctgccaggtctcgcctccttcaatgtccttgagtctttcctctatatgatccaactttccctttcagccatagcaggaggggctcttcctaccgcaaaattgcacggttgtggttgtggccgaaaatgaaggccctccaaaatgttttgcaggagtatacctaccaactgcttacccttcagtggtatatc

SEQ ID NO: 10611 - DNA, 487 bp, Glycine max
  unsure at all n locations
agggcctgnaagcggggggnttttcgaacctactgaatcgctacgctatcctgcgacactacannaaaganaagcangtnacatctatggaggtggaaggcagttttttctaaaattccccagagaggcccggaaaccggnaagccactttgttcctgctccggtgggccaccccagccttcccagccctatggtccaaccaagggaaaaaagttccaaaaggcttaaggaagggaggacaaccgaggatttaaaagttaaaaaatattatataactttgttctatttttttttttttacaattgttcacttctgaaattaaactttttgctctaagcgtcggtaaacagttttataatattttgtctgaaacatatcngggctcccatgttttacattgacgtgtattacaaaaaactagcatttgattttttgattccccttattgactattgagtggccactctttataatgttgcactccctg

SEQ ID NO: 10612 - DNA, 405 bp, Glycine max
  unsure at all n locations
tatgcgcatatttccttacaaacgtactctttacaagactttntttaaccgaaaaaaaatgcacccatatacaatcaaggcagctttgttacctagattatttacacgtacttncaaagtgtatttgttacttacatcacacacatctccttggctaaattcacatacatgcatactcaaagcattntggggtaccaaaaattgcacatgtgcacgatcttggtatttctaatacctatacatacacaaacttcatgatgaatcttgactatctacacaataaggtgctacatttcatgctcttttcaagtntttgctacctaaagccgcatgcanattcaagtatnatttccttngctgactaaaatngtattcaaattaagaggatacattttttgtaatgta

SEQ ID NO: 10613 - DNA, 184 bp, Glycine max
actcaagcttagagagatcctagagattctctaaggcttattcttatattcttccctctacaagaaggttagaaccctaaggacgataatttgggcaaggaaagcttttactatgtaatttattatttgcattgtgttttgatgtcgattttgtgatgctcatttgatgaatattgggtgttta

SEQ ID NO: 10614 - DNA, 318 bp, Glycine max
  unsure at all n locations
ctaaaatactaagcttgagccaaatcctgactcttcataaccttgaccagtttgagaaggcaacctaccctcgaagcgaaaagataaaagggaaattccaatcaaagagaaggaaagaaggaagatctccaatcagggagaaagcaaaaagaaaagaaagaaaattcccattcaaagaatgggagaaagtaaaaaatgaagaagtcgaaaggaagaaagctcctgatcatggatcgcaggaaaacagaagaaatgtgcagataggtctntggaccggacaatatctgaacaatacagaattgtcaccaaatgaacaaa

SEQ ID NO: 10615 - DNA, 356 bp, Glycine max
  unsure at all n locations
tgtcattaataaactcatacttgacatatgacaaactcagggtgaatnaatatgtacaaaaatattattgactctttagataaaaacgttntatggataataaaacttaaatgaactacgttttttgtatttatttcaattaaaattaaagtttaatcttagtaactcatttaataaaagttgtccaatgtgattcagcatataaaataaaataaaagtcttccttaacaccaaagtcaaactttagttaaagaaacataattttttttagttaactacaatgataagtttctatgggatattngtatattatttttggtaaatatcacatggtatttttatgagagatatttatg

SEQ ID NO: 10616 - DNA, 551 bp, Glycine max
  unsure at all n locations
aggggaaannnnnnnacgacttggacccttagggtnccgtcaactncgtacganancnctngcanaagcnnnncntaggacacttgagcaagaaggactataggagagtggtggatatattttaagctgttttcaagtgttgacatgtggaggtcgcttaagccgagcctaagttagtnaaggacactnagaagccacttagagggtccccactttaagccttaagcccttaaaggcacattaagccgagggcaatcaaaagcccaatgggaaaggacaaagaaaaacccccgctttaaggccgtgacnnactctgtgcgcccttaagtgaggaagaaatataataggctgagtttattcccaattcatggagaaccctcgcttaagcattggaacaatctgggcaggttataacaaagccagatacccagtagctaccactanttcccaaatcaaaaggcctcggcttaagtgaggcaatacccacgcttaagcgagaaaattatgccatgcctaagcccatttcaatttacaaaaacccagtgcatgan

SEQ ID NO: 10617 - DNA, 329 bp, Glycine max
atggatcatctaaataggttaatttcaaaagatctagtttttggatggcctaaattaaatctaaaaatattgtttccaccactaaaccattgcaataattacacatggatttgtttggaccatctagggtcatgagctttggtggaagttactatgcattagtaattgttgatgattattctagatatacttggactttatttcttactcataagaatgatgcatttcatgcatttagaagacttgccaaagtcattcaaaacaaaaagaatctcaaattatctccatcagaagtgatcatggaggtgaatttgaaaacattgattttg

SEQ ID NO: 10618 - DNA, 296 bp, Glycine max
atcttgaagtattggctggaattttaatcctgaaaagcccatttgcatcaattgcaacacaatatcatgatcatcatcaaaacatcaaagtcaatggcatctacagcatgcacctatgtggacactcaagtgtcaaatttttatggtcatgtgatgctagggctcaagattcattccctctattttagtcaacccaatgtttccaaaacatgttcttttatccatttgtgcattcattcgagtccattttgggcgtccagagaaacttcacagcgttcacccttcgggtgtacaca

SEQ ID NO: 10619 - DNA, 340 bp, Glycine max
  unsure at all n locations
tacctggggggacctaggggtcagaaaaagtgtccaaatgaccctttggccctcttttttgagtattttccgcatcctttcctgaaacatcaaaaaacctttggaattgcatgacaactggtgtaaagcagttcatttcggctaacaagaatcaaaacgttagcaaatgaaggtcccaaacgaaatagggtatgacatatgttttaatcaattacacaatntgttcaagtntacaaagtatgtctcgtgtcggcttaatcaattacagcatcatcataatcgatcaaatacttgttttgagacaatgattgattattcaagagtctctatttaattgata

SEQ ID NO: 10620 - DNA, 217 bp, Glycine max
  unsure at all n locations
tgcgatgaggaagtgttgaagggtgaaacttcctgctntttttgttgaccacaaagtggtacttggagatatgtcgcgggggtcaggagaccttggggacgtcaggtggggtgctattgcccanaaccaagcttgaccaatcccgacccaacccgggcatagtcggtcagtgagaacctgtgatgtacctaagcaggcgagctcctggcagtcaaca

SEQ ID NO: 10621 - DNA, 350 bp, Glycine max
  unsure at all n locations
actaagctatgcgcatattccttacaaacgttctcttcacaagactttctattaaccgaaaaaaaatgcacccatatacaatcaaggcagctttgttacctagaatatttacacgtactttcaaggtgtatttgttacttacatcacacacatctnncttgctaaattcacatacatgcatactcaaagcatttggggtaccaaaattgcacatgtgcacatcttggtatttctaatacctatacatacacaaacttcatgatgaatcttgactatctacacaataaggtgctacatttcatgctcttttcaagttttgctacctaaagccgcatgcaaattcaagtata

SEQ ID NO: 10622 - DNA, 380 bp, Glycine max
  unsure at all n locations
ttatgtagctactagcaagacaaaaaagtgctgattaatatttaaatggaagcaaaaggaggaatgaaggctatttcaccctcaaatctcatctttattatttctgtactagaaacacataatatccgagtcagaccacatgttgnggagcanccttgaagaatatgtttttccactttttttctacttaaaatggtagcagcatcttgaaacttaagaggtggtacctagtttgatgatgaaactatatgctcctctgtctttntattttttatttgaatgtcataatccaatgtacatcanaaatataaaatctcaaaatatttgtttcacaaaacatgnctttagtcttgggcactttngccaagtacccattacta

SEQ ID NO: 10623 - DNA, 355 bp, Glycine max
  unsure at all n locations
agcttgtgagcacaagtgttgagcgccctatatttgtgagaaattctataactaaaatgggnggggaagctctgtacttttcatccaacgagtgtaaatagaccaatgcattgacttaagattgttaaaagcatgaaggagttatgagtctgtttctaacaaaaaatatcgtcaactacaagatctaagcctttctatggaaaaaatatctgccattgtcttcggcagaaaagctatagaaatagccacattgctagcacatgctcccaaaaaattaagatatcgttgataaaaattgccacttgcaactaaaacgaagcattctctagttgcccatctatgtaacatttaccca

SEQ ID NO: 10624 - DNA, 316 bp, Glycine max
  unsure at all n locations
ataggctacatgccagctttctttgcggatctcgtctttttcggagaaaggattgaatccggactacgaaaaggcaagttcaaatatgctgccaatatggcccccaacaacaacagaagagccccagtagtgggcgcgaggaaaaaggaaagagacgcccacgcggtcaccaccgccccgacgtggatgatagcaccccanaatatccaaagctcataccaacccaatcccccaaatttttaatccgagctgggaattcccttccgactcaagtaaaggaccactcgcagcagaaagagcgccggcacaacgcaca

SEQ ID NO: 10625 - DNA, 468 bp, Glycine max
  unsure at all n locations
aggggngnnnactgtaggancctaaatnngctacgnctngcaatctataanaacccccngnatnggaactgggaaggatcggagaacggcctaccttaggcanaatttttaaaattctganagggcgcccgatcggactcaactggaaaccatggttaaaaaggaaagtgattcctttaaagaatatccgtaatggggggagggacctgccaacacaagtgggctttccaatggtggaaagggtaatgattaccatgatggtagacaccttgacggtggtttactatgagaaaatagtgggctacatgcccttctacttcgcggacttggtattcgtcggagaaagaataaaatangtttgaagaaaggatgtttgantacgtctcctccataagtaccaacgctaggagggacaaagcacaggggaaaaaaagaaggaagagaacccatgccacacttcagtgcctg

SEQ ID NO: 10626 - DNA, 474 bp, Glycine max
  unsure at all n locations
agganggggnnaaaagttgganncctaattgcctagntnnctagcantncacaannaaccnannnanaacacnggagcaggaggactgagaagnggaggattttattaagcttgcttaagagngacaaggggggggctgaggcgagctaagtagnaaggacactcagagccactagaggtcccaacttaagcttaagcctaaaggacataagcgaggcaatcaaagccaatggaagacaagaaaaccccgcttaagcgtgacactctgtgcgctaaagtgaggagatataatagctgagttattccattcatgagaactcgcttaagcatgacaattttgtcagttaaacaagcaaatacagtagctacactataccaaaaaaaaaggccacccttaatgaagcaatacccacgctggatcgagataataatgccatgcacaagcgcaatacaatgttcgaaaacccagtcatg

SEQ ID NO: 10627 - DNA, 393 bp, Glycine max
  unsure at all n locations
atccaaggcactctctaaggggtgtatctcatttttcctggcttattccctagnggatgacacctcctttcacctcttctcctttatcttctactgcatctccatggtggaaaatcaccattgaagaacctcactgaagcctcaaagtttnttagttgatgttgaccaacgatttttttggccgacgttggctacatttatttgaccggcgttggctacaatttttctgctgacatcggtcatgactaacttttgagtagacgcttgctaaggtttttcagctgacgtcataggtttttccagccaacatcagccaaagctagtttttagcaaatatcggctaggattatttttcagatgatgttagctagggtggtttgcctgatgtcaact

SEQ ID NO: 10628 - DNA, 348 bp, Glycine max
  unsure at all n locations
actaagcttaatacctatcaaactcaagaacttgttttagatgattataggaaaaatgagaaaacgttgggtccaagatgcaagttttccctcactcctactacnaatttactttatccacaccacccanatcccaaaaaccaacatanaacacatcanaaccttgaaagagaacacatatatgaaacttctaaaagtgtccatggagaaaaacgaanatggaggatgagagggaaaaaatgaaggtcttttacctttgaaatcaatccaaattcaaacaaagaagctcaacaacaatgtcctttatgctaaaatttcaaggtctcacactctctaatggctctctaa

SEQ ID NO: 10629 - DNA, 324 bp, Glycine max
  unsure at all n locations
ctcaagcttatgatgaatcaagattgattcaaagagttttgatgatattaaagatgatgacaaaaagctcanaagtcaagaacacctcatgataacaaagatgatgatctcaagaatcaaagaatgagttcaagattgaatcaagaacacttcaaggttcaaaaggaaanttgatttcaagaatcaagaatcaagattcaagattcaagttccaagaatcaagatcaagattcaagactaaagattcaagaatcaagagaagactcaatcaagataagcattaaaaagttttttcaaaaactgagtagcacatgaattnttctc

SEQ ID NO: 10630 - DNA, 307 bp, Glycine max
  unsure at all n locations
tgaccaatcccgacccaacccgggcataattctgtcagtgattatcctgtgatgtacctaagcaggcgagctcctggcagtcaacagataaaaggaactaagaccacatagcaaggaggcttgtgtggtggctggccagctgtgaaacttgattgatatatgggaaggggcctctggtaatcgattaccaagggtgggtaatcgattacaaggcttaaaaatgaagacaggaagctaagatggcctctggtaatcgattaccaaggggtgtaatcgattaccangcttgaaaatggaatcaagaaac

SEQ ID NO: 10631 - DNA, 358 bp, Glycine max
  unsure at all n locations
gagcacgaaanngaaggaangaaagagggaaagaagnggaactttgaagtgtatctcataagactttcattcatcaaagttataacaagtgttacacatgcttctatttatagactaggtagcttccttgagaagctttctcgagaaaacttccttgagaagcttctttgagaaaacttccttgagaagctagagcttagctacacacacccctctcataactaagctcacctccttgagaagctttcttaagaagaatcctagagaagctagagcttagctacacatacctctctaatagctaagctcaccttcttgagatgagaagctagaacttatctacacaccccctataata

SEQ ID NO: 10632 - DNA, 249 bp, Glycine max
  unsure at all n locations
gggagaactaccataagggatagagcctttgtgctaagtgcatgtnnagaaacaagccagacaaggcaagtaaggttgtgagaaacaagacaagattggttgccaaaggttactcacaatangaaggtatagactatacataaacctttgctcatgttactcgtctaaagcaatacacattatactctcatttacagctcatacaaaaatgagactatatcaaatagacgtaaaaaggcattcctcaat

SEQ ID NO: 10633 - DNA, 191 bp, Glycine max
  unsure at all n locations
ttgagcagattcaaacgactataacttgtgtctcggatgttcgattgagtcccgnantatatcgagacgctcgtaattgaaaacagaagctcttagcaaattcaaacgacaataacttttgactcgggtgtccgattgtgtcctgcgtttattgaaaagcctcaaaatggaaaccggagctttgaaaaaaa

SEQ ID NO: 10634 - DNA, 475 bp, Glycine max
  unsure at all n locations
cccggggatccttagagcacctgaggcgtgaagcgagtttcaattgttacngaaanacttcttccggaagaagaattattgtatgggcaatttggcacttcactggttgctgggtgccccaccaataatgctgggggccatataacctcctctatgctggattgccagttaaaggatatcgcacgttacgatataaagccatattcaatgtgggcttctacaatgaaccttgtggcgtgagggaaagcccaatgtgcaacacttttggaggctcanttttnatcacgtctgatcggaccacgctattaaaaattatttcgggcctcttattccaagccgttagcctacattctccagaacaaaatttagtcatggccgttgtgcgctcaatcatgctgccagtttactcgctaaaaactatattcacatgcttctacatgagctggcctccactagataatttttgaggaaagcg

SEQ ID NO: 10635 - DNA, 489 bp, Glycine max
  unsure at all n locations
ctcagcttataagagaagaaaagaagagcttgtctaaagctctganagtgtctatacaagaatctgttgaatctgacaactctaatggatccataaatgatgaagtgactctcatgtccaggaagttcaaacagatgatgaagaagaagggaaagtttcaacattcctctaaatgtaaagataccaaattcaaaaagaagaacaagggggaaagcaatgagatcatcttatttgagtgtagaaagtcgggacatataaaggtttaaatcttcaactaaagaagaagagatactccaaggacaagaagaagaaaagtttgatggttacctgngatgactcagacagtgagaagagtagcagtttagacaacgaacaagacaacatctgtcttatggtagatatagatgataaagtcaaggtaaaaacatgttgtgaatctcataccctattttgtgtcttcaccaacaatgaagaagatataccttatga

SEQ ID NO: 10636 - DNA, 423 bp, Glycine max
  unsure at all n locations
catgcaacttngttatgnttttccanccgcgaaacgagcgtgggtgtatacccaangccaatctgatcatctcgctctgataaatgcgaaaaaactgtgcctaaggaagaaggtgtgattgacggagaaccacctgctgtgactgtcattcctatacagccaatattcgcactcggacagcgatggcggtactcctccaataacaaacacttcctcttactcaccggccagtgattcacaaaggtttggcgtatactaccgcatagtctgctacatcccttacatgaccacatgagcttacacatgcataactccaccctgaatgattnttcctcagaaactttaagttacgcccttccgtggcatgtgaattgtcctttataatgtatcaaggggcccatcccccacggtttcacttagtac

SEQ ID NO: 10637 - DNA, 228 bp, Glycine max
ggtatagaacctcctcccataaatacaaacattaagggaaatttgaagcaagcttatgcacatatttccttacgaacgttctcttgcacaagacattgtatttaccgaataatgcacccatatacaaccaaggcagcatcattacctagatcatttacacgtacttccaaggtggatttgtgcttacatcacacacatctgcttggctataatcacatacatgcatac

SEQ ID NO: 10638 - DNA, 513 bp, Glycine max
  unsure at all n locations
gcatttttgcttcgtgacaaccannnaattgagaaccggcccgcgntacnnnnagacgagaaggaaggcgtgcaacgttaattacatcatcctctccgangactaggcgcgaggtagacacgcctcctacgttggactaacttaaactgagctgcatcctcggatccctcttggtggactatacttatcttagatagctcatgagagtttagactaatttagcccaagctttgtccttaaatccatcttgttggactagacttatacccgacaacattattgtaacagcatacttataacccaaactctattccgcgatccctcttgagagactatgctcaactctacttggttcaagctctcttggagctatacaatttcccatgctgatagcacctaaccactgccaccagtgggtgattcgacccttaacttctgaactcatcgccgagagaagcatggacacggacatccagccacctgtgttgacacaatgccactcttgcgtttttg

SEQ ID NO: 10639 - DNA, 246 bp, Glycine max
gaggagtgactgatcactgtgacctgaaacccatataagcgccactttggctatttcccgttcttctgaagacgagcttgcaaagtcccatctagatcgacagaacgtgaaagtggggtacctgcactctacacgagtgaagccctgacatcttgtaagacactaaagccctagctgccagcaccaaatgtctaaacccaccttagggatactatgcccaacaacggaccggaaatctccgatctc

SEQ ID NO: 10640 - DNA, 406 bp, Glycine max
aagtcaaccggcaggcaggcaggctggttctttttccctccccctccctctccacaacctgtgcaaattctctgtagcctaaatgaatactatgatgcccaagggagaactgaaaactgcaccctcatctggcgcaccaacatgcaacttgtgacagatgttccccttccatcagtaagaaaatcaagacaatcagtcgacacgagtcaccatccaaatagttgttaagatagcaaccaatcaatcactcgctactcgctgtcagtgtgcaagtaacaaaagaatgcatcaagaaatttggaatcattttctggcccatgatgccgttcttcccgcacagtgtcaaaagagggttccttgtgcacacataattgagattaagtatcgtggacaataaataatcatc

SEQ ID NO: 10641 - DNA, 336 bp, Glycine max
  unsure at all n locations
tcagctacatggatcacngatgccatctgctcggttaactttctgagccttagaaacattgtctagcctaagattccccttgatgatttcctccaacctcctttttggtctcccacgactcctttttaccagactaacaaccatgcaatctattcttctaacgggcacctcctcttgtggccttctttgtatatgcctaaatcaccataaccagttttctgtcatcttttcctaacttggtcctacaccatatttttcttgtatatagtcatcatgcattctatcctttcttgtatgatcacacacccaacttaatattctcatttatgctactcc

SEQ ID NO: 10642 - DNA, 538 bp, Glycine max
  unsure at all n locations
agacggacttgactcgatatacngcnacatnnanctcgtacccagggaatctctaaagccaaccggcaggcatgcaggctggtttgatttatttcactcctacatattatctctagcatgcatgcattttgtctttacctactcctcacgtatggttnttttaagaaaaacaccataacgtaacgcgctacaatgcatccttatcgcaccagatccaaatctataacgatgggtgatcaagaggagacacatgaacagatgaaagccgacatgtcggctctgaaagaacaaatggcttccatgatggaggccatgttaggaatgaggcagctcatggagaanaacatggccgctgctgtcagttcggctgccgaagcagacccaactctcttggctaccgcgcgccatcctccctcagacacagtaagacggcgaaggaacacgctggggcacgacgacaaccctcatctgggatacaaccgaacagcttacccttatgtgattgccgctactactcacccccatcatgcangagatg

SEQ ID NO: 10643 - DNA, 472 bp, Glycine max
cttgaacgataatcgtatctcttgcaccctgtatgagctgtatgatattgtcaaattttttaaccctgttcttaaataattatctccagatacctttcttagattctaggagagcatatagtttaaggcaaatttaccctaaatttgggggagtgaagttaatagggatgtaaagaaaagggtaaagcatcatcacacacaacaaataaattgtatgttaaaaaaaagaataaattgtgttgttacaataaagtcaaaagcaaattacgtggaaaagatagtgagaaagctacttgtatgacacaagatcatttggataagtctaggacttatgctctcttagaatctaaacctttgaatcctagaaaaaaaaaccaatgaatttttgtaccaagcctcactacaagcctgagaaagtctttctaatactgattatacatttctgactatatggcatgagatgaaattcaaa

SEQ ID NO: 10644 - DNA, 415 bp, Glycine max
  unsure at all n locations
nctccaatggtgccttgaatcaatcaaatccagtatgggtagataaccacaattctctctggcagcagctttcctaggaacaataatgtcattatacctttccaggcctcaggagaaatgaacctcgatcggcatatcggacatgggaaggtgtggcacgtgcctttctcttctttgatgccatctgagaatataagatcaaacaacaagattagtcatggttatttccaacacaacagaanaataaaactaaaaactgaactgggcgctaagagcagtaaggctggcttatcgcgccttatagaatttacccatggctaagcgcacagactccgcttacctaaaacacaaaaatattttctgcaaatatgctaacgccacatgtggcttacctcatctacatttcaaatgaaag

SEQ ID NO: 10645 - DNA, 326 bp, Glycine max
  unsure at all n locations
gggacattactcttanagcagagatggtatataacctccttccattaatacacacatcaaggtgaatttagagcaggcttatgcacatatttccttaagaacgtttcttgacaagacatttattaaccgaataatgcacacatatccatcaaggcagcttcgtacctagatatttcacgtacttccaagtgtatttgtacttacatcacaccattccttggctaaatcaatacatgcatactcaagcatttgaggaccaaaattgcactgtcacatcttggatttttaatacctatcctacacaacttctgatgagtctgctatta

SEQ ID NO: 10646 - DNA, 250 bp, Glycine max
tctgatcatcttgctttgataaatgcaaaaaaactgtggcaaatgaagagggtgagaatgagggagaagcccatgctgtgactgccattcctatacagccaagtttcccaccaacccaacaatgtcattactcaaccaataacaaaccttctccttacccaccgcccagttatccacaaaggtaatccctaaatcaaccacaaagtctgtctaccgcacttccaatgacaaacatcacctttagcacaat

SEQ ID NO: 10647 - DNA, 354 bp, Glycine max
  unsure at all n locations
gcttatctcatgtgggtacatctcaataaattcattcttggagagcttcatggttttggttatcacgggaaggatcattgcagatgcgggaagcatgaccacggatctcgctagaggtgctgatgtagttggtgatatttttgggatcattgatcgtcgtacgaagattgagccggatgatccanatgggtacatgctagagaggttaattggtcaaatagagcttcatgacgtgcattttgcgtaccctgctaggcctaatgttgctatctttgaaaatttctcgatgaanattgaggcacggaaatcaacagcattggtggggcaaagtgtgtccgggaaatcgaccatcat

SEQ ID NO: 10648 - DNA, 384 bp, Glycine max
agcttatttctagatccctcttgttggactaggctgagtttagacagccctcctaggtttagactaacttaaactaagcttcatcctcaaatccctcttgttggactagacttatcttaaatagcttatgaaagtttagactaatttagcctaagctttgtccttaaatccatcttgttggactagacttagaccaaacaacattattgtaacagcatacttaaaaccaaaacttaatccgcagatccctcttgtaagactatgtttcaattctacttcattcaagttctaaggcaacaatacatttcccaatgctaaagtcacctaactatgcacacaaatgggtgatccgaccaagagcataccaaatttaagcactgaaag

SEQ ID NO: 10649 - DNA, 445 bp, Glycine max
  unsure at all n locations
tctagccaaatggacttaccttanattatgttctttatagcctttttgagccttgtttccctttccttgttttgaagctcactacaagccttaagtgaaaaaccatgatatcaccatatccttaaggaattttggagctttggaattgttttgggaataagtgtggggggtttttgtttcattggacaacttgttttgttggctatgcttcatgatgtattttgggccatacttgatgtacattgtatattggttaaatgttggacatgctgaatgaaatgttgtttctcaaaggctatagagtcaaacaaaaaaaaaaagagaaaaaaaaattcgaataaaaaaagaataagacaagccatanagttgagtgaataagatcttaaatggcacaagactgatgaaactctctggtctactcttcatggttaaactttatctttac

SEQ ID NO: 10650 - DNA, 313 bp, Glycine max
agcttgtatctcacagttgcctctctccttcacggtcaggtgacaataataaatttacaaacagatgcgtactactacattattattattattataattactgatattcaatgattaattatatgcaattgtcattaacttagtagtaatgctatgcttttgtaggtgttattatgcttagatggaaggagttaagcattcgggtccgaccaaattggttctatattctacggaggccacaaacattctctacacattccgtggacatgctgttactgtataagacaacctcagatatatattcgtgtctttt

SEQ ID NO: 10651 - DNA, 458 bp, Glycine max
  unsure at all n locations
tctanattctaatatatctatctaatgtttataaatnnttntggtangagatagctagtgtatcaaacaatctacaatcatcattctgggttgtggaggggagcacgagaacatagaactaattactcttggttgtgttaccagatcataattatggtgtaatagataggtaaaaattaaaaacaaaaatatatgtcttgtcaattaactgtaaattgtgaaatgtagatatgtaatggatattaattctaggttaagcccaaagtgcataaaaccagaactctatccattcagatcccacttgaatatcattttaaaaaaattacggtgacctaaataagtcacaactatttactattgaaataagtgtgcagctaacataaaaatatgaccaatgggatccaagcacaagatttacagattcaactcatcatgctataagaaagaattatgagtat

SEQ ID NO: 10652 - DNA, 207 bp, Glycine max
aatgcatgtggagcaagaactaacatatatgtatatatatatatatatatctatgtgacctgccatctttgttaccttatctgaacggattccttctgggatctgtgagtgagtgtaactacacacgtgagcttagaacaacgctcatgtcttctctcaaaatactgatgtctcactcgaagagtgcctagaccttgagagggaaga

SEQ ID NO: 10653 - DNA, 117 bp, Glycine max
gctcattcgagagatactcaaacacggatatcatacaaaataatccactgcatatcatttgcaatcagctcactgtgcagacacactgtgggtacatgcgaacaactcagagtactg

SEQ ID NO: 10654 - DNA, 277 bp, Glycine max
  unsure at all n locations
tgctnttgactcctgattctttggaacttgcttaaatcttgattctttggtgtcataccctaatttcgtccggggattattatttgatgatatacaacctttgattggccgcttcgagatacttggcaccctttgttgcacaatatgtgaagtcccgagacgtgccgaacatcaaaaggaagtaggcttacgcgatccgtgaaaattccgtaatgtgacggaaatcgaaaggaagtgtttctcgcaatccgcgagttttcgtaacttcttcgaaagc

SEQ ID NO: 10655 - DNA, 617 bp, Glycine max
  unsure at all n locations
nggggnnnnnnnnggggnggcagttgctaatgnnctttgannatcgacancnttngnatangacancnctcgcnangnacgngacacnatacgaanactcagagctcacatatnncnggactttgagctgttgtatggatattcttatcagcnnnncatttatggcgtatgcanaganaccagtgaccntaagccagtganaacattgaaacactcaacncaagctttagatattttaataagaaaacataacattgtaccaccaagaatgatacactagtcccacattcacaagtaggtgtacacatacggctctaccactaagttcattttgttaagatggtttattaaattccgatatgcatataggcttacataactaggcaacaccactngtctaacactcaaagaacagcattattaattagttaacacgcataacttctccatctaaggtgtgacacaacagagatcttccctactatgtgtcacaaccacgatacgcgtgctaagagcataaaagaaatatcctaaccgaacaagaaatgactatgacagatgttaaccctgagcttgaatacaatatgcaatgctaaatcgaacgccagagtaaattt

SEQ ID NO: 10656 - DNA, 312 bp, Glycine max
ttcttattatgaaatgataaacttcaactttatttccgcagaaaatccaaacaacaaaatgtttgtaaaccgtaagatatagaacataagtaagactcccactaaactaaggtactatcaggaattacacccatatgattagtgtgctcatgaaaaactttaagtgtcatacatttagtaagtggatcagctagcatgaaatgagctcctatatgttctatacaaatctgcagaagacaagcttataatgaaatgataaacttcaactgtatttccgcagaaaatccacacaacaaaatggttgtaaaccgt

SEQ ID NO: 10657 - DNA, 213 bp, Glycine max
gtaattacgtctgtctctgtcatttgttgcttctcagattcccttattaagttcaacacttgcatgccttgagtcaactcatcccctgcaaacttttccttcatatagttccaaatcaattttgttgttttgtgggtcatgattttagtaaaagaaaaatgttgcgaatcacaacaaatatgcctgatgtaacattctatttttcataaaaaa

SEQ ID NO: 10658 - DNA, 449 bp, Glycine max
  unsure at all n locations
agcttgttcttttttattgaaagatacaaaatcaacttgatgatgcatgcatgcacgttatanangaagtgngatcaccaaatttatattctagaacaatatatttanattataatcttaatgcttttatattgnataatacttaattgtttcaatattntattctttgctatataatagtagttgagtattaatgttttcttaattaattcacttttcagtttctaaactaatttctgttctatttttccgcatataatacttgtaatccatcttatgttatattcccttgagtgtcggagactcttgccacctctataatacgtactagctagcaacttgtccttgtntntgttgttttatgctgagaagtggtttgtccaaatgacggaattgtcactcatgtctaanacaagactaataacagtgtcttgtaacatacactacac

SEQ ID NO: 10659 - DNA, 442 bp, Glycine max
  unsure at all n locations
acacgcagctgttgcaaacattcagaagatttaagtatatatntaatatagaactngtataaaagaaaaatagacaccaccagataattaagtggttcaactntggcatatgtgcaaatgcaaactagctaccaattaagattctcgacaatcctcanagcaacatcacataaacacttcaaaccatcctctctgggagcaagctcagtaggataaaccaaacccgggtagagtttgaacaagttgtgacaaaacattgggtaatcagaagctgcagtgatgtgcatggaagcatagtcacatgcctcattagccaaatcatgtgcagaagcttggagggcatcactggcatacttgtacttttctacacactccttcagcacccttttaaggtggaatccttgttgcagtgcaagcaactgagaagaaaatagagagaagt

SEQ ID NO: 10660 - DNA, 498 bp, Glycine max
  unsure at all n locations
aacgtgacgagctancgaagncanactaggcaattcagctccgacacgcgatacatagaccgacgtgaggcaggcgagtttccttatataatgccaactacgctctagagtggaggaactagctcataacggagagacttcaaagtgactagcatttgttggctctctgtacagagatgaagatgaccatganggagccgaatgtgccggctgatcactcaatggactaaagatctatctccgaaaactactcaagcagccatgaggttatgagactccaggagatggtgtgctcacgatcacgcaaatangaagatcataggaggaactaggctcgcatcttaagagaagactatatatccgaatattgtgaactgccgagattgttgaaaggatatatgcttctcaaaccatcctggtgagcaacattaaaaagaacgggtgctaacagagtcttccactcgattctctggttgaaaacaaagtataaaatgggcn

SEQ ID NO: 10661 - DNA, 303 bp, Glycine max
agggactgaatcacacattcgagtaaaaagttcttatcgttagaatacgcacagaacttcggtgttccattctgagcaactcgatatattacgggactcaatcagacattccagtaacaagttattgtcgtttgaatgtggtcagagcttcgataatcaatttcgagcgtctcaatatattacgggacttagtcagacatccgagtaaaacgccattgtcgtttgaatagactcagaacttaggtcttcactttcgagcgtctcaacataattctggactcaatcagacatccgagtaaaaag

SEQ ID NO: 10662 - DNA, 349 bp, Glycine max
  unsure at all n locations
gttaaaagtgattttctaaatggcttaattcaagaagaagtatatgttgaacaaccaccaggttttgaaatattggataacccaaatcattgttataaattgaaaaaggtnttatatgggcttgaaacaagcccctagggcttggtacgagcgtctaagtaagttcctttagaaaaggactttctaganganagtggatctattcttttataaagagaaaacacatgatatttactagtcaaaatatgttatgacattattttggaccactaacaattgtgtgcaggaattctccatgacatgcaagtgagttgaatgtcatgatggaaattatttcttcttggataca

SEQ ID NO: 10663 - DNA, 463 bp, Glycine max
  unsure at all n locations
agcacactacagatatcttctcaaatatcccaacggtcagatcatggacaagtgtcttgtgaatcttgtgtttgtcttcttcttccctacactctgtaatttccactgtgtatttataattgctgcttttacttttggttaagtttatgtttctattctttactttcttaactttgtagtaaaagcctaattgaatctagtaacattaagaacgatagatttttaattagtcaagacacgttaataattaattcaaccccccccccttcttaattattccgaggcctcttgatccaacaattactgattctcatggtcaatcaaagcctatgataaaggtcagatgatgctttttgccttatatcaatactccaatgatcatagatatatcaatntaagtacaataatatcatcaattccagagatggttaattaanggataattaatctgtcgaagattacc

SEQ ID NO: 10664 - DNA, 116 bp, Glycine max
cgcttcaacttccacactcaatccactcctccattctatcatcctcacctaaattgcacacttctttcaaaatctgcaaactgcatattttatcctctcttgcaaacaagacacgc

SEQ ID NO: 10665 - DNA, 383 bp, Glycine max
  unsure at all n locations
gcagcatctatgttagtganggctgtgattcacctcanggttcnttcgagntttgatcccacaatcaagggggacccacaaaatgtttttctcaagcactgcgagcatcttattgatcctatcagcaatatcatcacttggtggtattctcggagagtgaatgttataaactccggggccaattcctgctccatacttaactccttcacagaacactgacaggagctcttcttctgagcgagaattttcgatggtgatcacatacacatccatatcaatgatcgagtggatgatgtcattgaaattagagtaacacatgtgcgtgtggatctgtcgattgtatagaatacaaaacatattatattttgatggaatgcgttcta

SEQ ID NO: 10666 - DNA, 473 bp, Glycine max
  unsure at all n locations
gtgggggactttgagacanncatnnantngacccggcncgtgaacnnnacagacaggaggaagcgcgctttgttttttggccaaacactaaacaccgtaaggcgcgttgatcatcaaaggtgccacgccttcccctgatgatgcgcttggccaccatgctaaatgaagaactggacgtcctggcataactgtcttgcccgcacctttgactgcactgcagagacaagatttatcaccttattaacgcacgcttcttgatgattggccgataacgtatcgcccacgaaacaaaaagcgcctccactagtgtctctggggaatgaacattgcgagagcggatgataaacacaatactaagtgtagaactgctgctccgagcatagcgcgagatgatttcttcacaaaatggaccgcgcattgacacagccgcccgtttaccgcacactcatttctgctcttaccctcctttatan

SEQ ID NO: 10667 - DNA, 511 bp, Glycine max
  unsure at all n locations
aggacggagttgaggccttgaaatacgacacattgattganacancttgaaaancncccnggcngcaaaccaagaggacnggngcgagtcatgagcncaaacacgttccccngcgctgtggagaaanccacaaggaccaaccgacggaactccagaggagccacaccacaaccggagccaagagagcagaggactaagtgccagaagtcaatcgtggctccgcccgcccttggcaaagaatgcaaaacgacacagccagagacgacatgggagtcttaccccaccccaaacaaaagggaccaaaggacgaaccggccgagaatgaaccggaagccgggagacaagtggcctcaagaagcccaacacggggggcggagacacagcacccaactacgcgccccaagaaaaatcgaagacacgggcaaatgagggaggaatccctcatgacgaacgtgagaaacatccatgcaaagaacaacacaaacggaacacaccacaaaaacaaaaccaa

SEQ ID NO: 10668 - DNA, 324 bp, Glycine max
agtttaatcattcaatttcgaccgtctcgatatattacgggactcaatcagacatccgagtaaaaagttattgtcgtttgaattggctcagaggttcaaaattcaatttcgaacgtctcgatatatttcgggactcaatcagacatccgagtaaaaagttattgtcttttgagttggctcagaggttcaacattcaatttcgagcgtcccgatatattacgtcactgaatcggacatccgagtaaaaagatattgtcggttgaatttgctcagagcttcaacattcaatttcgagcgtctcgatatattacgggactcaatcag

SEQ ID NO: 10669 - DNA, 168 bp, Glycine max
  unsure at all n locations
ttcatacgacaataactntttactcngatgtctgattgagtccccgtatataacgaaacgctcgacattgaatgtttaagctttgagccaattctaacgataataactttttactcggatggccgatggagtattggatatatcgaacgctcgaaatgaatggagaag

SEQ ID NO: 10670 - DNA, 318 bp, Glycine max
  unsure at all n locations
agctttgttttgataggtaaaatacatctcanaattcagcttataagttcataacttcaaatcttcaaagtttctcacatttatagtcaatctatataaagtatctgctgtctctaaatggtccaaaagtttcgtctgagcttgtgtttgaagaaggtatatattagtgaaactgatatagcattgtgcttatctttcctgagccacactctggtagtggttaaagcactttagcgtagagtaggtttgatcatagtangtataacaggcagcgcatcttttgagagaatgggttgatcttttgattgttctcttact

SEQ ID NO: 10671 - DNA, 467 bp, Glycine max
  unsure at all n locations
gcttctcaaggaagctacctagtctataaatagaagcatgtgtaacatttgttgtaactttgatgaatgagagtcttgtgagacacaacttanagttcaacttctctccctttntcttccttcaatttcgtgctcccccctctctctttctctccctcttttttttcctccattgaagcatcctttccaagcttcttatccaaggctcatcttggtggtgaagctccttcttccatggcttattccctagtggatggcgcctcctctcacctcttctcctttgtcttttgctgcatctctgtggtggaaaatcaccattaaaggacctcattgaagctcanagatccagcctccatagaagccccacaagaaagcttccatcacctttcctccttctttattctgctgccattgatcttcaagaaatgaaggactccattggtgaagaagatctaaggcctataagc

SEQ ID NO: 10672 - DNA, 206 bp, Glycine max
  unsure at all n locations
ttaatcaagcacccgcgagctatacancgaccgcagcgaggaggcagcttaatttatcaaaaaaccacacacgggcgggtgcacgtgataagaacccctccctcgccccaacgatcctaattcacatcacatacgcctaacactaactgcacaagacctaaatcattcctcttcagccactaaaccagctgttaccacattctctt

SEQ ID NO: 10673 - DNA, 291 bp, Glycine max
  unsure at all n locations
gggagtggctgaacgacctgaacccnaaacagacgaccgggggggaatagaccgcgtcttcccaagaccacggctagcaacaacagccccaaagagaaacgccaacanggcacgcccacccggcagaaggacctatcccaaacacccccggacaacccccgaccacgcgagccccccccccagaagcggcccaacccacaaccacaggaaaacccaaacgcacgcccccccgagccacccagcacagaccccgcgacagagcagggcagaagaacagccaaaaccccccgc

SEQ ID NO: 10674 - DNA, 316 bp, Glycine max
agcttcttatgattgtttgttcctaatttctctacaattgcatcacctctcaatgagctggtgaagaagaatgtggcatttacctgcggtgaaaaacaagagcaagcctttgctttgctcaaagaaaagctgactaaggcacctgttctagctcttcctgacttttctaaaacttttgagctagaatgtgatgcctctggagtgggagttggagctgtattgttacaaggtgggcaccatattgcttattttagtgaaaaacttcatagtgccaccctcaactaccccacctatgataaagagctttatgccttaa

SEQ ID NO: 10675 - DNA, 453 bp, Glycine max
  unsure at all n locations
actcagctttagcattttagagaacactttgtctcgagacattcatagnccttttgcaactcgaataggggagttcattgtagacagttgaaccatctgttgctagagaacttgattatctttgattcactgtgttcactcgggcagagttggctgtaacaatttacaaagtcttcaagccattattgacaatgaaattaatatccggtgcatgatcaagtctgtcaacattttatcaatacaaatattggcttcacgtgaagatctttatatatatatatatataaagtagatgtgtggacatttttgtagaatcaactttccatcctcttgttagtctctattatagtaaaattgcatctcatatttagatatatgtgctaattaatgacgattataaattagctctctctttttacagctgtttacttttaatccaatttatacgtacgt

SEQ ID NO: 10676 - DNA, 352 bp, Glycine max
  unsure at all n locations
agcttgtataatggccaaacatgatacatgtcagggtttggtttggttcaagggtaaaagggatgccccacattatttccatgacacaaatgcaaaaatgatgatttggaaattttatgcaaaactggtcatgcatgcacctatgcggacactcaagtgtcaaattnttatggtcatgtgatgctagggctcaagattcatttcctctatttttagtcaatccaatgtttccaaaatatgttcttttatcaatttgtacattcatccgagtccactttgggcgtacgggaaaattttcacagcattcacccctcaggtgtatacacanttttttttataaaaactagttatg

SEQ ID NO: 10677 - DNA, 463 bp, Glycine max
  unsure at all n locations
tgatgtcgttggacctctgtgtcgagttcgacaccagaattattatctaaggcataatgatattaaaactcaatgtcattaggatcactatgtcgataatcgacaccaggattggagttgaggcatgatgatttcttgataaatcatgtaatttctctggctttcaagcacttgtgagaaattgaggactgacgaagaaaatgacaatatggctttttaaccacattgtcatgtcatttcttgttacactccacattgatgactattcaatgaagtcagtaatatttgtaaccatggaaggtgttgcatcaataaatggtgtacttaccaccatgatttggtattacatgacttttgttggatggagtctaaattaggtgtnttatcttgngatcnatgtttgtggccatagtttgttgttagctcgagagtctttttgaaaatgttgttaanattaaagata

SEQ ID NO: 10678 - DNA, 372 bp, Glycine max
  unsure at all n locations
tatcttatttgttcagcctccatagaagctcaacaagcggagcctccatcaagtggtaatcacagcacaagagcttcaagtatgtgctccttanacctccattaattttttgctttaccatctcttccattgttgttacttcatgttttctccatgtatctcctcacatgtcttttgctaaatgtttttaacatgattctttacattttccaccaattaaacttgctatagaagctatatttgattttctatggttcagatttcttgttcttgttcttataccatgaattgtgttgagtttaagttccttcgagttttgtcttgatattttntgtggctgaaacctaaaccataaaattcttacaaaaatat

SEQ ID NO: 10679 - DNA, 516 bp, Glycine max
  unsure at all n locations
aggggcttaacgtagngcttganatcacnctttgatagaccatttganaacngacacaagatactagagcttgagtaggatgtattgtcaacccctatatttgttaacnacttttgtgaanaccagncggtgaagcatctgcaaatatgcctgtgacctagtcaacttgaccagctatattaagatgacatcccccatatgaagaaatgacaaccactgcactgacagtgacacgttcaagaccacattacaatttgctgttgatgtaccagacaaaacagccatatagatagttgctcccccactgaaataccaactctaagaatatatgaacttgtgtcacccgcagacacgcatagatgattaaggaccgtgacctgactatactctagaaacatgatgcatgtgatcgtaatcaaaacaaactacaatctcttacacttggatagaagaacggtgctgccaagatcgtgagctacaatcacttcctgccaaggatatatatggccatataag

SEQ ID NO: 10680 - DNA, 387 bp, Glycine max
ctgcattttaataatatataataagagaactatgactatggaagaatctattcatgtttcctttgatgagtctaatgttattcctccaagaaaggatattttagatgatattgcagaatctttagaacaaatgcatatttatggacaagattctaaaggaaaagggaaagaaagcaatgaagatcctccagaagaagccaaatcaaatgatgaacttccaagagaatggaaagcttcaagagatcatccacttgacaacattattggtgatatctcacaaggggtaacaactagacattctcttaaagatgtatgcaataatatggctcttgtgtctatgattgaacctacaaatttaaatgaagccataatagatgatcattggat

SEQ ID NO: 10681 - DNA, 541 bp, Glycine max
  unsure at all n locations
ggaggaganagttgaaaccnttngaagntcgangncnntagattgatcaccnttcgcaaaaacgncacacnatagaanactcaagcgggcatncggaattgtgagagccccactccatctttaggaaaangtgcctgccgncncanacaaacaaatcaaacggggcaagacaataatagangnnagctgaatacctcacccactcaagagnatcacacaaanatggacattctcaaatgaaacactcttgccttataccactctaaataccccttgagttcttaagcaatncaagagatcatggccacaacaaagaacaatccaccaatatgtgaaaggaaggctagagagacaaggaaaagggtaaccaagaaaaaggctaacaatgcctttaggcacaaatgaaggaaatanaattcagaacttaagaattcaagtaacaatccttcatgcaaccagaatattaccttaaagagatnttnttctaaaagtcgtcacgcatgaacaattcagcccaacttttttataataacggtataca

SEQ ID NO: 10682 - DNA, 403 bp, Glycine max
  unsure at all n locations
agcttcatcattattttcgagcgtctcgatacgttacgggactgaatcagacatccgagtaaaaagtattatcgtttgagttgctcagagcttaacattcaatttcagcgtctcgatatatgacgggactcaatcagacatccgagtaaaaagttattgtcgtttgaattggctcagagcttcaacattcaatttcgagcgtctcgatatgttacgggactcaatcagacatccgagtaaaaagttattgtcgtttgaatntgctcagagcttcaacattcaacttcgagcgtctcgatatattacgggactatatcagacattcgagtaaaaatatattgtcgtttgaatttgctcagagcttcaacattctatttcgagcgtgtcgatatattactggact

SEQ ID NO: 10683 - DNA, 368 bp, Glycine max
  unsure at all n locations
cgacaataacattttactcggatgtctgattgagtcccgtatatatcgacacgctcgaattgaatgtngaagctctgagccaattcaaacgacaataaatttttactaggatgtctgatataatcccataatataacgagaccctcgaaattgaatggtgaaactcttgaccaattcaaacgaaaataacttttactcggatgtctgattgagtcacgtaatatatcgacatgctcgaaattgaatgtgaactctgaccaattcaacgacaatacttttactcgatgctgatgagtccgtacatatcgagacgctgaattgatgtgagctctaccaatcaacgacataactttctcgatgctgatgat

SEQ ID NO: 10684 - DNA, 490 bp, Glycine max
  unsure at all n locations
nggagcgcagccgtttcgaagtcntacaaggcaancagcaccggcggacgtttaagagaccgacggcaggcaggctaattttatatattcgagcgcctccatatatgacgagactatatcggacatccaggtcacaagttattgtcgttggacattccttagagcttccgttttcaattacaagcgtctagatatattacagggctcgatcaaacatccgagttaaaagttattgccgttagaattttctgagagcttcacgtgttcaattacgaccgtctcgatatcctacgggacacagtcggacatccgagtcaaaagtattgtcgttgaattactcagagctctgtgtcaatatgagcgctgaatttacagactcatccgacatcgatcaaagttttgtcgttgacttcaaaaggttcgacataattcagcttctattattaaaggctatcgacatcgattanagtatggcctgaattctggaccc

SEQ ID NO: 10685 - DNA, 331 bp, Glycine max
  unsure at all n locations
aataatatgtgcatgatgtcgatgaggaattgctcgatcggcgtcagcaggtgattttctttntagacctcgatctgttaactntcgttgccgatgtcggctaggatttttgtcgaccagtaccggcgaataaagttttgttccgacgtgggcaaatgttttccctgccgagtaaatgaacacatggcggtgtgggctgaaacaaaactatggctgagctcatacctaacaacttacccgagcgacattgtcaattcttaccgcaacacccaacaaataggcatcctctaccgtaagaaaatatcatctgccagcatttataaaataattg

SEQ ID NO: 10686 - DNA, 308 bp, Glycine max
  unsure at all n locations
cctgtgatgtacctaaccaggcgagctcctggaagtcaacagataaaaggaacaaagaccaccaagcaagaaggcttgtggtggctggccagctatgaacttgattgatgtgtgagatatggcctctggtaatcgattaccaagggtgggtaattgattacaatgcttanaaatgaagacaggangctaagatggtctctggtaatcgattaccaagggggtgtaatcgattaccaggncttgaaacgagatcangaagtcatganggcttctggtaatcgattaccaagggggtgtaaatcgatacc

SEQ ID NO: 10687 - DNA, 518 bp, Glycine max
  unsure at all n locations
gaagatgagtttgaanctttgagattcacacattgatttgacgcttcgaacaacccanggcnggcggcattcagagagcgcccncaattttacatgccacccactatctangagngttttgtgnngnncacaacggcgcaacaaccgggcgaagacgaaaacgacannancagaaaagagngccaaacaacagcacgcagcacagaagaactcccaaacacaaaaagccgtcctgcatccaactctagcccctctgttattattcttcatccactagaactacctgcccatcaatatgctatactgcctcaaagcagatttagattcatccaaagtaccaaacttcatccgtaattccaacttctgttcacccactccactactttgactatattgaggataaacttcaacatccttatcttcatcatcactattaactggtgatttctatctcctctgattgatataatctggctcacttgaacttcacttctttcttatacaaatgaatgttaaag

SEQ ID NO: 10688 - DNA, 187 bp, Glycine max
  unsure at all n locations
aatggactctaactctttcatatgtaaggattcaaactcacctagtacaagttgagacacaccttcttactctgtctctcctttgtgggaggttgaagctatcccatgccccttacagatgttgcttaaaatcttctcgacacatcatcatctaatgctgataatangagagagccttctgctctct

SEQ ID NO: 10689 - DNA, 508 bp, Glycine max
  unsure at all n locations
agaggcttagtctgagcgcttttancttctacactctttgnancacagccananacacaaggngccaggctcttctggaaaggcaaacggtgtgcggggccnncgttcttaacgaangtgggcgctccaaaccggggaatggcgagccacngangaccngggacaggaaaaagaaccagaaaccgcncagccacacgcaaccgagacagccagagaaccgcacgcaccgccacctggagaagccactgcgccgcagatcngactctctcaaatatgctgaatgacatagtatggcgaacaagattacaatgaatctttgtcctgctctacatatgtgaagatctttgaacttaggctggactcttctgatgtgtaggatctgccctcgctgttctgggaaggcaagacaatactctatggtataggagcaaggcaatacacagtcccgcattatccaaggctccaaacacccgccaaacttcataacctcttatacactagcccgcgc

SEQ ID NO: 10690 - DNA, 198 bp, Glycine max
  unsure at all n locations
taaaatatcctactatttatgtcaacatacaaagacattcaacacattttagttaccacacatatatatatacatctttgaaaagacatacattcttgtctcaggcattgtgtaaaattacacctaatcacatctnatattctgtatacaaactcctatcatattgaagattacatacaattatgtgttgatacatta

SEQ ID NO: 10691 - DNA, 279 bp, Glycine max
agggggtcaagagaccttggggacgtcaggtggggtgctattgcccaaaaccaagcttgaccaatcccgacccaacccgggcatagtcagtcagtgagaacctgtgatgtacctaagtacgcaagctcctggcagtcaacagataaaaggaacaaagaccacaaagcaaggaggcttgtgtggtggctagccagctgtgaatcttgtgtgatatatgggttatggcctctggtaatcgattactaagggtgggtaatcgattataaggcttaaaaatga

SEQ ID NO: 10692 - DNA, 330 bp, Glycine max
agtttgttttgttgcgtatgatattggttttgcgtctgtgataataaagtcaaacacatcaaccaaaaagagaggaagaatcccttttgttttaattgattgtgagaggagtgaaaaatatatagtatacaagacagatttactttgaatggtgactatcactataaaatgtgggtctccctttaagccacgattgaaacccagtttgggaggtgaagggtggatgatcaacttgacatgtgggacttataatcatgcattgactaagtcattcactatacatccatatgttggtcgactaattgaggatgagaatattattattgatga

SEQ ID NO: 10693 - DNA, 285 bp, Glycine max
  unsure at all n locations
tcacaccttcggccagggccatgtgtgatgaatcagaagtagaaagagcaacaactgactgttgatgtgcgttccaactgattgatgtaccaaacanagcaaacacatatgctgtcaaggactaccttgtgtctacatttcttgcagaatccgcatctgcatagccggtgactactgcatcatgtgatgactacatgtacactaaaccagctttcaaagatccaaatagatacctgagtgtacactgaacaactacccaatgcgcgctgccaggatcacccacga

SEQ ID NO: 10694 - DNA, 356 bp, Glycine max
agcttttgtttgcttaactcgaaagcacaagtgtggtgaagaagaagctaaaaacgacagtcactacggttaagacagactgtgatgagctgaaagatatcaacatgaccacgcttaaagcattagagcgggaaacaaaaagggcccgaaaaaaagaatggagcacgaacaagttccgaggggctctatggagcagcagtaacgtgctcaagcttatataggttgagagggatgaatcaaagatggaaagcatggtgttagaggataagttacacgcttatcagaggttgaagagatgtttgatagaatagctgagcaaaacagaagagaatatgttgataattggtgatcaacat

SEQ ID NO: 10695 - DNA, 463 bp, Glycine max
  unsure at all n locations
gcttacacaggaaagtgttcatcttaatttaaatccagattgttttatatcgattttgcaagtcattcccatcaaatcaaggataatgtgcataatcaattcatggatcaagtggccttagaataattaagaaagggaggttgaattaattattcgtaaacctttactaatntaaaaattactcttctaaggattntactatgttgttaagtaaataaagagtagaatagacacttaaccaaaagtaaaagtgggaattaaaatgcatagcggaaattaaaagagtatggaagaaggagacacacacacaagagtttttatactggttcggcaacaacccgtgcctacatccagtccctaagcgacctgcggtccttgagatttcttttccaaccttgtanaaatccttttacaagcaaagatccacaagggatgtaccctcccttgttctctttgaacaacc

SEQ ID NO: 10696 - DNA, 407 bp, Glycine max
  unsure at all n locations
agcttggttttagatcctntcaatngagtagcattggaaattgtacctgtgcacagatgctacaacatgtccctcgcttgcaatcttccaaactcaagcaagcaaaacaaataatagtctccctaaaaacaaatcaatacctgcatgtctgtaactccatacaagtgaagcttccctttattcaaaatatgatcgggcacctacatgtctctaataaaataaaaattattagtgatatcctcatagagcaaaaacagagaataaattattaaggaataaccacaaaatttagatttcatcaactatcacaaacatatgttagtcaaattgtaattctaattgaaatccaacatcataattactcacggatctgcataaatattataagagtcgacaatatgatatct

SEQ ID NO: 10697 - DNA, 279 bp, Glycine max
agaatactcagctgggctatcagagagtcggctttatttttcatgctgcagatttgtatagctgctactctccctaacctggcatttcatgtacgtaatgtcacctactatgaagaacaccatttcttactcacccgtctcctcggtctatctcctaagataacatattcttttcatatacctaacaatcagtttattgtactcagatcccacacacattgtgtaacttaaagtggcgaaagagcctttgacacacaaattcagtgaaccaccgggtaa

SEQ ID NO: 10698 - DNA, 345 bp, Glycine max
agcttgcttttacggagttttccgactatcctctcgtgtggtggatcaagctacaaaaggagagagcatgaaatgaccagccaatggttgatacatggacggagatgaaaaagatcatgacgaagcggtatgttccggctagttactcaagggacttgaaattcaagctccaaaaactaacccaaggcaacaagggggttggggagtatttcaaggaaatggatgtgctcatgattcaagcaaatattgaagaagatgaggaggtaactatggctcgatttcttaatggttcgactaatgatatccgtgatattgttgagctgcaggagtttgttgaaatggatg

SEQ ID NO: 10699 - DNA, 211 bp, Glycine max
tcctaccaagacgactgacaagactgatgcaaatcacgagggcgacatagacggagaaacccatgctgtgactgccattcctatacgaccaagtttcccaccaacccaccaatggcatgactcatgcataacaaacctccttacccaccacccagttatgcacagaggccgtgcctaaaacaaccacgaagcctgtctaccgcacttccat

SEQ ID NO: 10700 - DNA, 452 bp, Glycine max
  unsure at all n locations
agtttttttggcttttaagaataccatacgcatactcctatatctctcagtagctgatgaagccgttagctcaacccacgtacaagaggaanggaaacattagtttcctaaaactttcaccagcaacatactctataacgccgagaagtgctaccatagccacaccatactctataatgtcgggaaacattagttcctggctttcaagaataccatagccacaccaccaatagcactcattacctcggctcgacgacttaagccctactttcagagtcatcaagtggtggtcaaaacaaactacagttagagataggggagcaacatgaagacttagccttgaagcttgaagaaagttttgtttttacatgcccaaatctctttagtggaacgttgattgagtgtatattgtgattgctcatataacatggatcatctaatagggtattcaa

SEQ ID NO: 10701 - DNA, 419 bp, Glycine max
tatgaagactcaggctatgggagtacatacatgggacctacttattgtatcgcagagagtacgtcgtatctagtcaagggctgagagaccatacaaggacgctaacgatttgtaattatgcccgccaccaagcttgtcctatgccgaccctacccgagcataccatgaatctgttaaccggcggagtacgtgtctgccgtcgccttggccttggctaacaatcggggaagttctagactcccgttcaaggtgagagcaaaccgatccatccacatggatgcctcttggtgtaaagagtagagcacccttcctctaacctctttttgcgcgtatacttgggcatactcatccgcgattctacgctcgtgggccgtggctagacctaactcttcttggtacttggcgatgatagctaacat

SEQ ID NO: 10702 - DNA, 300 bp, Glycine max
  unsure at all n locations
agctttgttaaatgttgttnttcatctttntgctaacccaatctgctggcttagcgagcgtccgctaagcgcaacactcataggctaagcgtgaggaagactctggaagaagatgagctatacaggtttgctaagcgcaccgcttcatctcactaagcgcaccactttagttcattcgctaagcaagaaaggcacgtgctaagacgaaattcactaatgtgcgctaagcggtccataagtgcgctaagcgcacgagcacgtacaaggccacctatntangcctgaaatcagattttagag

SEQ ID NO: 10703 - DNA, 538 bp, Glycine max
  unsure at all n locations
aaggacgatagactgatnctttcganatcgacactttgtactgacacnctcgttananacngacacnannagaaactcaagacgatagcgncgctatctagcagnatatcatgtttcatataacaccttgaaagagnancnacncccgcnaaacaggggagggacacaaacancaacagcaancaccgcgaaaccaaaagaggaaangacnngaaggaacnngnaaaacnnaagaccgacagccacgancaaaccacagagggaccgaaaaagcnagcacaccaaagacccngagacaccgcaaacaaagnnaccaggccgcaccacacgaagnagaacgccaaggcgcccannaagaaaaacagccanaacacccagccgaaggagcagcaaaacacagcgagcgcccacagacangagcgggcccagacaaaccccaagaggagaccgggagaaaaaggnngcccnaacancaacgccgccnnncngaggaaaaaccgcagagacgagacaacccacaaagccccgacaaaacccg

SEQ ID NO: 10704 - DNA, 397 bp, Glycine max
  unsure at all n locations
tgcttattgatcaaaattgcctcaatcatttccaaatatgcatgtgaattangatgcatcaacaagaatcaagccaaggctattgtgcaagcaatcaatggggcaaaacacgccaaatgattatgatgatggatggctcacattctcacaaaggtaaactcatcactttcaaattgagctttcaaaactatcatgacatgtagaggagaatcaaggatntcaagtcacaaaatgtcaaaaacttttattttcaaaacaattacccatttcttgaacatatcctataattcaaagaaaaacatgcacagtcgtacatgcacacaaaatcgacccanaatattaaactaacaatccgacgaaactaacaacattaaccaattaacaaaaccaacaaaac

SEQ ID NO: 10705 - DNA, 491 bp, Glycine max
  unsure at all n locations
agagtgagttganncctttgangttgangtcctttgactgatccccctcgtatnnaccgacacnatanaatactcaagcctctcanagaagccatcggggaagcttcttgattgataccctnnaattgagcttcttgaggaagccacatgaagnggcctcggttaaaacgcttcccagccttcattaaccgctggatcttctcgaaatttggtttacaacttcacaagacacttgtccatgatctgaccgttgggatctttcagaagatgtctggagtgtgggctaacctccgtcctggagctttcttatttaacatttcggccttgctttttgtatcttaagaaaacgcctttctctccttctttttccaacgcattttaacattcccatacttttcctctgcacacccatttccccacaaccttgttttcccttgacccccacggaggaaccttaccaagcgattttccacttgcttcggttcgtaaaa

SEQ ID NO: 10706 - DNA, 359 bp, Glycine max
  unsure at all n locations
agctntatgttattttttggacgcatggactaagtatgtgtcgcaacctacccttcngcngaaaggcgacgcanggcttcacggtgcgtcttctaaggaaagaaggcgcgtggagtcgccaccaacgtttatttgaggaaaacgtctgaanaatcgaaaaggtgtggtctacaaactttaagtgtgaaaggtccgagagtntgttttacgcacgatgaaagtattagcaccccacgcgtccgtcacaaaggacgacaacctttantcaagtgtgcaaatatgacttcagaatatttattttcccttttttatgtctttttgngttttatgcttatatgtttttgatttttttacctttt

SEQ ID NO: 10707 - DNA, 458 bp, Glycine max
  unsure at all n locations
tgagacaacttccttgagaagctagatcttagctacacacttccctctcataactatgctcacctccttgagaagcttccttaagaagattcctaaagaagctagagcttagctacacacacatctctaatagctaagctcacctccttgagatgagaagctagagcttagctacacaccccctataatagctaagctcacccccataacaaaatacatgaaaatacaaaaaaattccctactacaaagactactcaaaatacctcanaatacaaggcaaaaaccctataatactagaatgaccaaaatacaaggcccaaacgaaggagaaacctattctaatatttacaaaaataagcgggctcatacttagcccatgggctcaaaatctaacctaagtatcatgagaaccctagggccttcccttggatctctggcccaatctgcttggagtcttc

SEQ ID NO: 10708 - DNA, 523 bp, Glycine max
  unsure at all n locations
agatcactagccctaagtcacgcnatnaaccggacccggcgttctttagacaaccggcggcatgcaggcttttttctttatttacggaaaatctgggacttagccatggtagaagtctctaccgattgcatcccgttcccagtattatgaccagcccctaaggtgcttcacatttcaggactttccagctagtgccgcttgtgaaagagtttgaagaattcctgngatgcccactgngaggaaagaagccatatcttttctctggttctatcccttcacgacaagagttgcaaggtagtgaaaatctcagcacaagagttgaaccanngtaagcanaatangaatggngtagtcggagtatcaaggaaatgtttggaggaaanggaanaggcctttggaaatcaaggcgaatgggctntcttttattgacatctntgcgccttttgatctttggagtgtccttcttttcgatatngnanggttagtggacctnacagtgattgacgctttcctcgcctttctn

SEQ ID NO: 10709 - DNA, 399 bp, Glycine max
  unsure at all n locations
tggccggctaacctagagaacgggctattatctttncttcgtttctcccttngccaggcagaattcgccagggactatccgcctgaattcttttgtgtctcccttctcccttgtcaaagaattcaaatcgacacagtctgagaattcttttaattcttccctttccctaatacaaaagtgttcaaagaactaactgcttgagaattcttttgtatccccattcacaaagcatcaaaggtttaacagcccgagatctttgtcttaacacattggagggtacatccattgtggtacaagtagagggtacatctacttgggtttgactgagaacaagagagggtacatctcttgtggattagttctagtggagggtacatccactagggtttcaaagagaac

SEQ ID NO: 10710 - DNA, 160 bp, Glycine max
actgcccggatctaagacggggggagcttttttgtgtaaggatttatggtatcagagaatttgtacacccagttgaaatgaaacaatatgtaaatgaaggctatggtgacagcctagctgacacgtaaaatccttaaaagactttaagaaagatcttctt

SEQ ID NO: 10711 - DNA, 613 bp, Glycine max
  unsure at all n locations
agagagaagttganacagtgagattgaancntggttgacagcttcgaacacactacaganatcntctaaaatatgtcctacgggcantatagtggacaagtagggtttgggacacnccgtgtgttgtcctcttacgtacctacactctcatagtgtccacatgtgtatnctataatgcgctgctttttactgttgtggttaaagtctcatgtaatctatttctttactattctgtaacgtgtgtgatgtatcagcctacattgaagttctagttacagttaaggaaggaatagaatgtttaatttgtcgcagacaccgttaatagttaaatgtccacctcccgccgcccttcttacatatatgtctcgatgcncatcgttgaatcacaacacacttacttgtatttttcagagggttcaatcatatacactcataatataagggtgatatagattgcctctattggctttacaattaaatactgctacatggatcagngantatatagtcaaactctgaggttacgaatagctatgcatccaatatgcccgaagagtgggttatataagggattcaatatatacttgtgcgacaattaacgccgaccaattcg

SEQ ID NO: 10712 - DNA, 431 bp, Glycine max
  unsure at all n locations
attgtaaaaatagaaagcttttttgaaacacgtaattaatatattttttgtattaccaatttatgtatattcgatctcttggtaatttcctgtggttttaatcttcctttgggtattgtttgtaagtctctaacgtgctgtttaacttgaatgcatagatctaaacatccctgacgtactttgagaaaacaaatagaatnntagttaaaaattacatanttcgttttagttaaaattattttttatgtatgcgttgaaatgacttgttatanctcattttgttntaaaaaaatatttattttgaacaaaataactaanaatatttaatataanattaaatttaaataatnnttgtcacatgaaaagagatgttttgataaattatttatgccattaatantttagaatatataaatattataattttatat

SEQ ID NO: 10713 - DNA, 174 bp, Glycine max
  unsure at all n locations
ccttatggcttgcctccggacttcactccccgtgccactccttgatgatntaagccatgtcccctacttttgatgggcaactcccgccttatgacgactatcccaggcaagacgatgaggaaggagatacccatctcggccccctgctccacctcaaagatccgtccccacatg

SEQ ID NO: 10714 - DNA, 478 bp, Glycine max
  unsure at all n locations
agtgggttgccctttgaattctgcgaattagtcggtccgggggcccttagaccccgaggcggtgcgcctttttttagttctctttccgcgttggtggttagaataaatcattaaatggtggattcgtggttcttggcaatgtaatttgatgtttgatttttcaggtgcaaagaatgtcattagtgtttgccgcgaatgtatatgtgaacccttgtatataacagtctgctgatgttgattgatggtttgatgatattncgatggagatgaatcgtggcgttccgtggaaagtaaatttgttgacgaagtcttttgtttccaacctgtaatggctaaatagatggtttgtttgcaatgaatagcattctgatangggatgtgaatgcnactgacacatgttagtgaccttagctcaagcgagcttgatctgatgccatgaatgtggctatgactgcttttctctatatgtttggactgg

SEQ ID NO: 10715 - DNA, 269 bp, Glycine max
  unsure at all n locations
gtctccgttggccttctccagtatcttcttctgcacactgtacccgaatntgccgtcgctgtgctccctccagagggagtcgatggccctgagggcgctctcggagatgaacttcacctccgagaagaagacgtagccgcgcttctgtgcggcttcgccagcaagcacgatgaggagacgacgcgtctcctcatcggccagctgaaagttattggtggagagatggtggcggaggaggtccaaggacagtgtggtttgggaggtggtgg

SEQ ID NO: 10716 - DNA, 483 bp, Glycine max
  unsure at all n locations
gcctgcacgcttcagagacggcnatcatccgacccgacatctgatctcaactgacggacagacgcattatattgaccaagactaccaggcggaccttccttaccctatagctcgacttataataagtacgtcatatatgtaggatggcgagcattacactcggtctctggtaattgaggacatggttgtagaactcccaacacgtccatatattttctagaacatcttgaaagacataatgttgtttaaacacaccatagatccttgtctccctccgtcgacattccaagaaaagtacaccacttgctcaaatgtcaatacacgaatttgtgaggttatgccagacaactttgctgctctccatgtggacatccttatgagactcattaagattttggcattgtagggcgacaaggtggactcttctctcgcctttcgcgtcgaacgttgaacttctctcactgtttaatcactgccttatcn

SEQ ID NO: 10717 - DNA, 518 bp, Glycine max
  unsure at all n locations
aggaaggtggcctgagcccgttgatnatgacnacatagnatacacacgctcnatatagaaaactggcttgatactccaggaggacgcgngccactcatctcttcagacttttctcacctngttgagaagaatccgccagggaatatccgacaaacttagagcgtgcctcccttctcccttgtcaaagaatacatctcgacacagtcagagaattctagaacttatctcctcaccctaagacacaggtgagcacacaactcaaacgcaaagacaatgcttttgcatacccattcactaagcatcaaatgctcacagaccgagatattcgacgcaacacaccggaaggtacatacagagcggtacaccaagaccgtacgaaggacgaagctattctgatatcacgagagggacatgcttagtcgaaacccagggcggaagaacatccccaggtgatgagacaaccaggggacggcctgtactcgtggactttgttggaaaggaatatacatggcgaacag

SEQ ID NO: 10718 - DNA, 274 bp, Glycine max
atggatccaaacccagtccctctcattaagaactagctcctttcttcctctattgcctttagttgaatacacctttgtttggttctctatttggatcttaaccctctcatgcaacttctttacaaactctgacctacattccccttctttatgtataaaagaagtgtcaagtgggaagggaatgacgtctaatggtgttacgggattgaacccatacacaacctcaaaatgagatggcttggtggttctatgaacccttctattgtaagcaaat

SEQ ID NO: 10719 - DNA, 269 bp, Glycine max
caaggcttaaccatccagagaagacactaaaataatgcttagtcactcaacatagaagtacaacaacaatacagtgctgagacctccatggtaaaagcatatacaatgcttaatcaccctggacagacgcttacattagtatatagaataacacgaaacttgtcttcagtgacgacatttcacaaacactttgtgaaccaacatctactaaagctaagccatccatggtaaaagctataacaatacttaacgcaccatggacagaagct

SEQ ID NO: 10720 - DNA, 349 bp, Glycine max
  unsure at all n locations
agcttattgtctagaatgggcatagatgaacccaactagattaattgcccttctaattgtcttccttatcaagggaagcttaccaatgtcttcaagcctcaaatcaatacaatgggatgcacaaggagtctaataaatatgtttccttttgtcttctaacaacttacccgctaaaacatagttgctcccattatcagttacaacttaaacaacgttctcttctccaacttcctccacaatagcatcaagcaactcagaaagcttttcacctgtcttcacaaaatcagagccatcaatagacttcanaaacattgtaccagcttgagagttaagcaaaaaattaatgatg

SEQ ID NO: 10721 - DNA, 265 bp, Glycine max
tcaccgcttctatgtgtgatgatcttagacaaatagattttaatgtgacttctctgtacttggtatacgaaatgtgggattcagtgattgacacagtgagataggtcatataccgacaagaaagataggcacgaattgaagaattaaaatcttataatgtcagaccctaatttcatccggggactattgttcactgatattatgattcttgctagttgaattacagagattgacaccagttacagtgcaaagcactgaattactc

SEQ ID NO: 10722 - DNA, 400 bp, Glycine max
  unsure at all n locations
ctttttgtgccccacaaagccaanaggaggcgcggtaagaaccatcactgagaccacacacgaccgtgcactcgagaaaaactatgcaggcacccgacctaaatgtctgaagacaagaaacatagtcggaagcgtgccgtaaacaccaatgcattcatgtcccccgctgacggagctcggaccaagcactatcaaggatgagcgtctagagcgccgcatgatgcacatgcatgcaccactttcttgacacacactaggcacacttcatgtcttgacaacatacttttgacccaacgcgatgatttctacaacaccgaccgacatgatgccgcgcagaaacgaatgccggctagagaccatccctcagccaagatctgaacaacatccattgataaccccc

SEQ ID NO: 10723 - DNA, 258 bp, Glycine max
ggggtgactgatgactgtgactgaaccacttggaagccgactttaaacattgcacatttcaacccggaactcctctacaagtgatacttgcccgccccatgacctcccacacaaagctagcgcatcgccccccctcgcatcggccatcgaaagaaagccccaaaggaaaatcgggtgggtccactgtagattgtcggcaacaagactcaacagcccaagattcagcacgcaggtcgaaggaaaggctctagcaacgcg

SEQ ID NO: 10724 - DNA, 247 bp, Glycine max
atctttgtgtatcttcaaacaacaataacttttgactcgaatgtctgatagagacccgtaatatatctagatgctcgaaattgaataccgaagctctgagcatattcaaacgacaataagtttttactcgtatgttcggttgagtcccgtaatatattgaaacgctcgaaattgaagaccgaatctctgaacaaattcaaacgacaataactctttactcggatgtatgactgagtcccgttatata

SEQ ID NO: 10725 - DNA, 250 bp, Glycine max
  unsure at all n locations
gcttcgctattgcatggcgagcgtctgtcttataacgggagtcaattctacatccgatttagtaagaatngacgagagaattagctcgagagttcgacattcaatctcgagcatctcgatatattacgggactgaatcagacatccgagtcaaaagcgatcgtcaatagactttgctcagatcttcaacattcaatttcgagcgtcgggatgtcttacagcactacttcggaaatccgagtaaaaaccca

SEQ ID NO: 10726 - DNA, 309 bp, Glycine max
agcttctctatatattatgcacctgaatcagacttccgtatgaaaagttatgaccatttgaatttctcgagagcttccgtggttcaattccaagcttctcgatatattatgcgcctgaattggacttccgtgtgacaagttatgacaattttaatttctcgagagcattcgttgttcaatttcgagcgtctcgatatattatgcgcctgaataggacttccgtgtgatcagttatgaccatttgaatttctcgacagctttcgttgttcaatttcgagcgtctcggtatattatgcgccagaatcggac

SEQ ID NO: 10727 - DNA, 206 bp, Glycine max
  unsure at all n locations
atcaatggtcttattctaaagctaactaattccgccacacnncttgatatatagngcgcctgaagcggactttcggcnganaagacatgaccatttgaatttctccagagctttcgttggtcaatttcgagcatctctttatattatgcacctgaatcggacctgcgtgtgacaagtcatgaccatttgaatttctcaagagcatt

SEQ ID NO: 10728 - DNA, 368 bp, Glycine max
  unsure at all n locations
tgcttcatggtgaatcaaaggtgattcanaggtgttgtgatgataacaatgatgataacaaaagatgacgacaaaggtgatgacaaaaagctcaaagatcaatcaaagaacaactcaagtgaatcaagaataattcaagagttcaagataagaatcaagaagaattcaagactcaagaagaaagtttagagtcaagaatcaagattcaagattcaaggttcaagatctcaagaatcaagatcaatattcaagactcaagattcaagaatcaagagaaggcttaatcaagataagtattgaaaattttctcacaaattgagtagcacatgatttttctcaaaacatggttaccaaagagntttactctc

SEQ ID NO: 10729 - DNA, 383 bp, Glycine max
  unsure at all n locations
aactgtgagaaagcaaccatactatgaaggtataatcaatgttctctctctatgatctccttgagattatgtgaattttttcatctgtctagtcttggttgtggctacccaacaaattgggtggagctcatggctcttgtggaatggtgctggcagtctccatccataaccgtctccatcctgaagaatctctgtcacatttaatggctcagcctcagacaaaataaaaaaccatatatgatgatattntcctactcacagaaaataaattgaatgatgagaggtaactctacacaactgatttttcgctttcagagaagatattcttatttttattaaaagaacaacgtaaaatatttgtacactataatatgtttaaatgt

SEQ ID NO: 10730 - DNA, 386 bp, Glycine max
  unsure at all n locations
agcgtccttaagttgattcctaaagaagctagaagctagctacacatacctctctaatagctaagctcacctccttgagatgagaagctagagcttagctacacancccctataatagctaagctcacccncatgacanaaaacatgaaaataaaaaagaagtccttattacaaagacagactcaaatgccccgagatacaaggctaacaccctatactactagaatggccaaaatacaaggcctagacgaagganaaacctattctaatatttacaaagataagcgggctcatacttagcccatgggctcgaaatctaccctaaagctcatgagaaccctanggcctntccttggatctctagcccaatctacttggagtcttct

SEQ ID NO: 10731 - DNA, 468 bp, Glycine max
tgtgtggtctccattccagaatccaaacattacaagcaaaatttgtcattcattgatccacatgggctttattgggcttgtaacgtggtcaggggtaagagggctatgaaagaaaagattagagaggcttaaagagtgtttaagggtgtcataccctaatttcatccggggaccatccgttgttgggatgcgaccctcgtttgaccacttcgaggtatttggcacccatcgttaggcaattagtgaagttctgagacatgccggaagccaaaagaaaagggttgtagcacaatccgtgaagttctgtgacatgccggaaattaaaaggaagtgtgagtgcacaatccgtaaagttccgtaacgttccggaaggcaaaaaagggatgattacgttatccgtacagttccgcaacattacagagataaaacaagtatcgttacgaaattcgtaagtgtccgtaactttac

SEQ ID NO: 10732 - DNA, 317 bp, Glycine max
  unsure at all n locations
agctagtttttctatatctagatgaggatgtttcatatgttctcaagactggactaatacattcgctacccaagtttcatggtcttgcacgtgaagatcctcaaaagcatcttaaggagttccatattgtatctttcaccatgaagccccctgatgtccaggaagatcatatctatctaaaggctgttcctcattctctagagggagtggcgaaagatntcctgtactaccttgctcctaggtccattactagctgggatgaaccttagagggtgttcttggagaaaatcttgcctgcatctangaccactgccatc

SEQ ID NO: 10733 - DNA, 462 bp, Glycine max
aaatgatttctatacaaaagttagtcatataaagcgacgtacatcaagccacatttacctgcaattatcttacacttattgaggttaccacacccgacaccagacaatatttgtccatgcttcgtcaccctctacttgtcaacactactacccctgacatcagatactctcctttgacactggacaatctctgggacacatggcactctaagacacatgtcaaccctccatgtcagccctgcaatagaagcgcgaacactcagccattagcagtcgggctccccaaataacaagttatctctaacctattgatattgtaatatctttatctattggcaggtagttaattatctacaaagccacaaaattatctacaaggtacaattatcttctagcttttatctataagctatgagttatctctaacattatctataagctcctggctattatctataagcc

SEQ ID NO: 10734 - DNA, 533 bp, Glycine max
  unsure at all n locations
ccccacaccacccacaccatgaagccaagaaacaccacactncnacnccctnccccccaaccaagagttgacctgcatccncncnnnanaanacccggccngggaaacacaacgagaggaggaggtttgttttaccaaaaagctcggctngggcgngggtgcactgcacaagatgctgcaccagcacaacaagaagccgcaaaagccatgcatggccctagagcccgaaagaactaacccgagccaaaaaacactaaaggaccaccagctgctaacggaacgaataaaaactcaccacaagggtcccccgagaaaagcgggacgctcaataactgacgagtaggagtgaaccaccgacgggtcacgaagacagaccaagatttacaacagcggcgtccccgaaaaacagaaaaaagcccgcccatccgcaagcaggagctgatacacacaaagacagaaggaacaccatgcccagacagcgcatcaaggaaaacgaagcacacgccgacgaaaaacccgaaacccaagaaccg

SEQ ID NO: 10735 - DNA, 508 bp, Glycine max
  unsure at all n locations
ggcgagaagttgagacccgtgagnttcgacacacntgttgaacagcctcgtancaacgcgcanacttngcacacagagcaagggcangatattgctgcncaccacatatttccaagattttgtcaaatcagagccgggaggcgagacggcacattttccaccaacgatatgcacgtgagacacggcgagctcctcccatagaaccattcatatgggacacccctaaaaatgggaccgactaacccccaatttaagatggcgctcgcaccgttatcgactggcgcccccaagaactttggaaaaggagccacacatccacaaagtctgtcccaacagtacagagatccactcgtcctaacaacaaccccatttcgcagaggggtgcccgcgagcaaacagtagccccaaaccacagcgtatccccaacaaagacatactttatctaaacacaccgcctgatcctccaaaagaaaggacttaagtacccctccagcggagcggacccccg

SEQ ID NO: 10736 - DNA, 346 bp, Glycine max
  unsure at all n locations
gcccctcattgcccaagtgtagggctttgaggtatcaaccttgtcttttgtcatgaccttgtagtaaagaagaaactatgcatgttctcaaaaatgaattttccaggacaagaaacattttgaacgattttttttttcaattgacanactaagtcaaatgattcctacttntgataactcacattctctctcaaaaaagataaactctcaagaatgataaaatgaggtcacatgaatgtctgtactctatttgacacacagtcaatcaaatgtttttattcttctattttgaaacttatctgtttgaactctactcatcgttttacgacaccctcaccaaatgtgt

SEQ ID NO: 10737 - DNA, 434 bp, Glycine max
  unsure at all n locations
cttgagaaaacttccttgagaagcttctttgaganaacttccttgagaagctagagcttacctacacacacccatctaataactaagctcacctccttgagaagcttcctttagaagctagagctgagctacacacacccttctaataactaagctcacctccttgagaagagaatctagagcttagctacatacccctataatagctaagctcacctccatgacaaaatacatggaaatacaaaataagaagtccctactacaaagactactcaaaatgccctgaaatacatggctaaaaccctatactactagaatgggccaaatacaaggcccatacgaaggaaaaaacctattctaatatttacaaagaagagttgatccaaccttgacccatgggctcaaaaatctaccctgaggttcatgagaaccct

SEQ ID NO: 10738 - DNA, 347 bp, Glycine max
  unsure at all n locations
gggtctgggagacaaaggtcaagtggtcgcgatatgcgaagatgatgttccgagtacattggatttggtacgaccatgccctcctgatttccaactgggaaattggcgagtggaggaacgctccggcatttacgcaacgagcataatgtaaacctttatggttttaaaagctctatagttgggcctaagctttagagttntttccttttgttgaggctttgtgtcttttgtttntgaatttataatacaaggatctttcttcatctgttcctacgtctctacccattctcattcatttgcatgtttacttctttttctgaaacggcagatccgatgacgagtccccc

SEQ ID NO: 10739 - DNA, 435 bp, Glycine max
  unsure at all n locations
cttctcncccaattntctataaatngggggagaagtgaagtananttttggttagccccttatgcacttctctctctctcgaaatagctgaggaaaattagttccgtgaacaaaatccaagccgaggcgcttccgtaacgtttccgtgagtaattacgcaaagattctcgaccgttcttcaagattcatcgttcgttcttcgatttcttcagtcttcaacgggtaagtacctcaaaccaagcttttcaattcattctatgtacccgtggtggtccacattntgtttcatgtatttatattctcgttttcatttactttttatacccccttttgacgtgcttaagccatttatttaagtcatttctcgcttaatctaaaaaataaatatatttccaccgatcgtttgaattgtatcatccgttaatttcgggtaaa

SEQ ID NO: 10740 - DNA, 347 bp, Glycine max
agcttattaactaatgagatggggtgaggccttatctttttcttgatcttgtttgctttaaccttgaattattcttgaagcaatgcttaacctttgaatgtttgttgaagtaaccttgtattaatcttaaagcaatgtttaacctttgaatgtttgttgaaacaaccttgttgtttgattctactttagcatcatcaaaaccatgtattcatacattcacaggctttggggttagttgatacacccatactgtgtagccgttgtgagaatgaagaaaatatctctctctggacctaaagttcattgatttctctcattcttaacgaaatcacattttgagtttgata

SEQ ID NO: 10741 - DNA, 381 bp, Glycine max
  unsure at all n locations
tccagattggtatgcgatgctacaactgtgcgtgccaagctgttttgaaaganatggtccaataacttttcgtgcgcagaatacgcccccatcttccggcaatacatccggagatgcccctttggacatgtcgtccctatgtacttatcaaagtctagtactttgaacttgtgagggatgacgatgttgggcacaagacataagtccgccaaatacgagaatgggtaattgccaagaccctcaactgctcttaacctatcttcaagcgcctcaatctatcccttatcttccgcgaagggaacagatacttttacgggtgtgggtgacgccgagatatggcagactatgttcggctggggtaaaacatgcggagatggatct

SEQ ID NO: 10742 - DNA, 344 bp, Glycine max
agcttgttattaacggaagtaaaggataccgacagtaaacgagatgaagatgaaagcataccaaacaagattggatcactaagggtgcatagaatgaattgaaagcttctaaataaaaaactaaccgattgaagctcgacgaacgatgaagaatgtatgaagaacagggaagatactttcacggaattgatcacggaaacgtctcgtaagtgttacagaagtgtctcggctgtgatttttcccttctttcttcttctcctcaataatattaggtgatttctgagctatcaaagtgctgaacccctcaaactcagccccctcacgccattttataagaaaatggg

SEQ ID NO: 10743 - DNA, 177 bp, Glycine max
tcttgcgtagccgctcttggtgctcagtatatcccaaaaacaaattcctcttattactagctattttgaattctttagttcctgaatatacaaccttcaaattgttgctcgttcccctcttcaaaaatgaggaggatcttcataggacttcatccagttgatgtttatcgccagtta

SEQ ID NO: 10744 - DNA, 340 bp, Glycine max
tttctacaaataaaccaaaatcaatgggttgatcgttgatgtgccattattttctcctatctcgtaaccctgtatgcaccattctaagtactgattaatgttaattgtcgaattaattaagcagaatgattatttgggcccattaacctaatttgatgctcttaatctaatttcaaaaattaatgaagcattgggcttgaatccacaattgggcttggatttgaagaggacaaactatgttattctactaaattagatcttatcttatcatatctagatattatttagattggatctcatcgagatattatttcagctagatctaatcttatcttatcta

SEQ ID NO: 10745 - DNA, 461 bp, Glycine max
  unsure at all n locations
ntactatgcagagaatatccaaggaatataccttcatctgacttatcatcaaatattcctaagttatcttttccattattcaatacaaaacatttacaaccaaagatatgaaggtgtgagatgtttggttttctgccattgaacaattcatatggagttttctttaaaatgggtcttattaaagccctatttaaaatgtagcatgcagtgttaacgacttcagcccaaaagtattttggaagaggagtatcatttaataaagttctagcaatctcttccaaagatctatttctcctttcaacaacaccattttgttgaggggttcttggtgcaaaaaagttatgctcaatcccatgcttatcacaaaatatttcaaattctttattttcaaactcacccccatgatcactcctaatagatataatctttagatttttcttatattgaatgatttttgcaag

SEQ ID NO: 10746 - DNA, 301 bp, Glycine max
  unsure at all n locations
agctttgttgttntggtcttcgccagcaaaaggattgaagtgggtctgaaaaaagacaaatttaatcatcctgcttggacgactgaganaactgnggcaaatgaagagggtgagagtgaatgggaaacccatgctgcgtctgccgtttctatataaccaagtttcccaccaacccaacaatgtcattactcagccaatatcagcccttctcactacccaccacccattcatccatgaaggccatccctagatcaaccacaaaacccaccttccacacaaccaatgctaaacaccacctttt

SEQ ID NO: 10747 - DNA, 419 bp, Glycine max
  unsure at all n locations
gcttgtaggcctaggatcttcttcatcaatgtattcctttgcttcttggaagatgaatgtctgctgaatggagaaaggaagagagagaggagacgccacttcaaggagaagatgagtctacaagaagctcaccaccatacgaggccatggataatagcttggaggaagaaagagatgaatgaggggagagggagagaagagcacgaaattttgtgctccaaatgagctctgaaatctgaagtttaatattcaaatgatcaaagttganaaaaatgcacacacatgacctctatttatagcctaagtgtcacacaaaattggagggaaattcaaatttcacttgtatttgaaattgaatttgtggagccaaactctggagccaaaatttcactaattatgatcagtgaatgttagttatg

SEQ ID NO: 10748 - DNA, 327 bp, Glycine max
  unsure at all n locations
agctnggtttgaggtacttacccgttgaagactgaagagaacgaagaccgaacgatgaatctttgaagaactgtcgagaatcttcgcgtaattactcacgaaaacgttacggaaacgttacggaagcgtctcggcttggattttcttcacggaaataattttcctcagcaaattcgaaagagagagaagtgcctaaggggctgaaccctgttcttcttcacttcttcccctatttatagcaaaataggggagaagcttgccgcccagctcgcccaggcgagcaaggttgcttcctccagaagagacaaccttctggaggaatctttt

SEQ ID NO: 10749 - DNA, 456 bp, Glycine max
  unsure at all n locations
atagaaactcagcttgtggagtagaacatgggaccaattattgtatttcanaaagtaagtcgtatctattcaaggtctgagagaccatacaagtttcctaacgatttctaattctgtgggccattaagtctatcatatgctgacaatagccgagaagcccatgaatctcttcgggggcggagtaggtgtctgccatcaccttggccttggctaacaatcggggaagttcttgactcccgttcaaggtaagagcaaaccgatccatccacatggttgcctcttggtgtaaagagttgatcacccttcctctagcctctttttccgcgtatacttgggcatattcgtccgcaatcctatgctcgtgggccgcggctagacctaactcttcttggtacttggcgatgatagctagcatattggtctccgtctcgcataaacgctgagacaagcttcttt

SEQ ID NO: 10750 - DNA, 295 bp, Glycine max
  unsure at all n locations
ttcttgtatataagcatgattgggagcttactatatttaacagctagcagacctgacatcacctatgcagtaggtgtttgtgcaagatatcaagccaatcctaagataagtcacttgaatcaagtaaagagaattctgaaatatgtaaatggcaccagtgactatgggattatgtactgtcattgttcagattcattngctggtgggtattgtgatgctgattgngctggaagtgcaaatgacagaaaaagcacttctggtggatgtttctatttgggaaccaatcttatttcat

SEQ ID NO: 10751 - DNA, 242 bp, Glycine max
  unsure at all n locations
tcaagaataatggtttcatcaaattatttatttcccgaagggatttctgtaaatatgcctcctatacttaatggcgttggttaccattattgtaaaacccacatgcaatattttataaaggcaatacatctgaatatctgggaagcagtggaatatgggccctacattcccactatggtggcagaaaatacacatagaagaacctanggaagaatggatggaggaagaatagatattatttc

SEQ ID NO: 10752 - DNA, 312 bp, Glycine max
  unsure at all n locations
ttctttctttcaacaaagagaagagaaagatgaaagattgaataaataaaagtagtggggatgtatcctaataataataatctaaaaagaaaaaatcatcatcangaatcaacaatgtcaacagtgtctaaattggggaatcagtgagagcaacaacttctccagatgacgaaccacanagatcagcaattcctccaactanggaagcaggggggtcagctgtttctccagctggtgaatcaagaggggcagcagcttcatctaatgatgcatcgaagatgagaattagaggtggagatcggggaactactt

SEQ ID NO: 10753 - DNA, 417 bp, Glycine max
  unsure at all n locations
gcggagcctctactctatgacttgcactagaacatgnnaanttgctggtagncgnaacaggagagacatccgagagacttgcttgccaatgttaggaattcttcctggaatctgctgcaagtgatctgtctgtataatttcggtaacgacctcttgacaatcaccataatcaatgcatctgatcctgcgacaaactcagctttatacttgcccctagcccttcaagctatgttagcattgtttttcccactcctccttccatgtgtacaggaaggctcatctatgtctgtgaaaagcacttgcagatctgttgttaataactggttataaaagaacaccttcaagcactggaaccacatagagagatcatattgttgttgcacaggaccaactgcatgtaccttaaacacaataacc

SEQ ID NO: 10754 - DNA, 369 bp, Glycine max
  unsure at all n locations
agcttgtctgatgtctataccgctgatttaatgtaattagagcctatagatttcctttctctattgttttctgaaatctacctcattaaataaacaaagagatcttgtttcatctgttcttgcagttccaccttttctcatatcattntgcatgtttttgtttctttggtcttgtttggtatagatatgagggtcgattctttgaggatcctaacaacgagggtttgacaactcgatttgatagagatataagccaaacgataaacgaggaagaggaagaggacgtcctgtcaccatagttggagaggttggtcgctcacgaagaacgtgaaatgaagccttaccaagaagaaaccgaattggtaacat

SEQ ID NO: 10755 - DNA, 442 bp, Glycine max
  unsure at all n locations
tagtagggaatctatccttcctaagatggagtttaacccattcaccctcattaagaactatctcttttcttccttaattgcctttagttgaatacacctttgtttgtttctttatttggttcttaaccctctcatgcaacttctttacaaactctgacctagattccccttctttatgtataaaagaagtttctagtgggaggggaatgaggtctaacggtgttaggggattgaacccatagacaaccttaaaaggggactgcttggtggttctatgaaccccctgttataggcaaattctacatgaggaagctactcatcgcaagacttatggttgcctttcagaanagcccttanaagggtggataaagacctattcactacctctgtttgcccatcagtttgtggatgacaagtggtagagaaaacaagtttagttcct

SEQ ID NO: 10756 - DNA, 529 bp, Glycine max
  unsure at all n locations
ngacttactagacgctaagaacactctaagcaatncagctccgggccgcgattcaatgaaccgacgtgcatgcagcgctaatttatttctccactcaccttatggcattccattcctcatactctcctttaccataagataataactaacctatctaatttctaattcatacccttcatattccaactattcccttacataactatatattgaggtatagcccttctttgtcttcagtatagatcttgattcgaatattgcgatcccttgcttatttcgttacctctgctggcttcctaagaggagaacacanatagtagcagcctcaactgcgaaataacagataactccaacanttaagaaacacaattcagagctctatgttccaatagaatagtagcagcagcaactgctggcttcctctgctgcacttacatanagccaactcccaatttttgctccaattgaattggcaattgactagttgagttctcacccttggtggtggcggtgatgagcacaagtaccg

SEQ ID NO: 10757 - DNA, 378 bp, Glycine max
tactttgatgaataagaagtctggggcatatgaagagaatatgagagagggaggaacccatgtcgtgactgtcgatcctacatggccaaatttcccaccagctcaacaatgtcaatactcagccaatatcaacccttcttattacccaccaccctatcagccatgaacacccaatcattcacaaaggccacccctaaatcagccacaaagcccgcctgccgcacatccgataccagacaccacccttaacatgaaccaaaacaccaattagggaaggatatttccagcaaagaatcttgtaaaattcaccctaactccagtgtcgtatgctaacttactcccatatctactcaataatgtgatggtagccataaccct

SEQ ID NO: 10758 - DNA, 288 bp, Glycine max
  unsure at all n locations
ttacattgatgtttatgggaagaggttgtacgccatttttgttttaagagtagtgtcccactggtaaaactaactttccaaatgtttgccttcgcaggaaatggccccaaggaagcttgcctcatagaggtccaggaaagacaaggcagccgaaagaactagttccgctccagagtatgacagtcaccgctttangagcgctgtacaccagcaacgcttcgaggccatcaaaggatggtcgtttctccgggagtgacgcgtncagctcanggacgacgaatatactga

SEQ ID NO: 10759 - DNA, 305 bp, Glycine max
caaccatctggatgaatcttctggttggcccaagtgggcctggttgctatttgcaccctcattttactaatacaccccctcgcccttttatgggatccttttttcgaaagtacggaactacggatttgcacaatacttgtttctttccgaatttacggaacttgggatacataatcatcccttttttactacggaagttacagacctcactaatgtgaacgatgctcctttgatttccgtggtacggaacttcggatttgcatcaaacttttttggtttcggccatatggactcacaattgccta

SEQ ID NO: 10760 - DNA, 412 bp, Glycine max
  unsure at all n locations
gcctttgagagctccccctgaatattctttcgaaaagttttacttggctttcaccacaatattctttaagcgtctgcaaactttacccaagtatctttctgaaagtctctctaggctaagaaccctcattatacttgttatttgactcttatagcaacttgtcgtgatcactcaaaacctttagaaccagtaatcccctaattgctctcccgaggttccctattctacatagatttttttatcagcanatggttagttgttagaatgttagtttttttagtagagggggatngaatcatgacttttaccctcttcccttctccattaacaatcannacccactaatangggtttgtgtaagacaagtatctaatgcacctttcatggaaaactcatcagtaagctccccttg

SEQ ID NO: 10761 - DNA, 444 bp, Glycine max
  unsure at all n locations
cttctacttatgtggcanggcgggcttccttcactttcttgactcctacgcgagctctgaccactgttcttccttcccgcgatgcttctttgtatgtccgcctgagtgggcttatagcctataccatacttcccacgatttccttgagtttttatcaggctagttatgccgccattgtctttccctaaacccatcccgggttcanaaccgttccccaacataactcgggccatcattaccgctgcatcggacagacaaggttgcccaaagagggagtcaacggaggaaatgctgaccacctcanaagactgganagcagtttctaacgattcttctgcggcttccacataaggcatggaggatgggcagcttaccaagatatcttcctcgcctgacacgatgaccaagtgcccctccactacgaatttcagcttttggtggagt

SEQ ID NO: 10762 - DNA, 530 bp, Glycine max
  unsure at all n locations
agaagctgcctttgctagacacacacgggaanngagcaccggccangcgataaagnaaaccggaagggatggaggcgggttacttatcttggatgganctctgagaacagaaggtgttttggccaacaaaaaacagaacttattttcctcttggaaagattagaagccgataccttgttttcattattgatatacacaaactgttgggtttgatttgttgttactacaatttaaatattctgcatgacattttgtgattctatacaatattattgacctgtccgtgtaaataaattctgaagcttgttgtctttgagaatgcacaaatagggaaacttgatccctactctgttccagaatccaagaaaatgcgaacttgtgccactgctccagtgatgatggctgctcttctgcccaacanaagataatgcaaacttctgctgctgctgatgctgctacatatgcttcaactagcactgtggccactangaatgaaccatatatcctgttatgtcatcttcaaaaccatg

SEQ ID NO: 10763 - DNA, 445 bp, Glycine max
  unsure at all n locations
ngatgtcgtaggacctctgcgccgacttaagtacacccgacacattatcgtccgcatagtgagangattgacagaatggcattgngatcactatggctatgatcgacgccgcaattggagggtatgcatgaagatagctacctaaatcatgtaatatctctggctttcaagcacttgtgagaaatcgaggactggcgactaaaagacacctggcggtttaccacctcgtctggatgtattgaacactcccatggatgacttctactgggggtagaatagatgggactgtctaaggccctctttcacagatggtgtcgcacacccatcataaggtcttacctgacctccgtcgctgacacataacatagtggacatggggcgaccatttcatagcctaaccaagagcacatctctggattataaaatgcggcttgtatagaacccn

SEQ ID NO: 10764 - DNA, 290 bp, Glycine max
tctttgcagatgagaatgcttcagaaacattaagaaagctagcagatgggcctaaaagaaatgttataacccggcaaggatacgacataaacaggtattcattttacacaaaagcacaagatgacaaaagtacaatgcagaacagcggggtcaccctaagggctgaatctcaacactttgcaagtgtcaatgacgccaatccctgtgtagcttccatcccttactttgggttcattgatgaaaattgggagcttaattatgtgaaaattacagtatgtgttttcaaatgt

SEQ ID NO: 10765 - DNA, 211 bp, Glycine max
atggaatctattatgaaattaaagtgcatcttatggttgtatggacttctttttttctttttcaagttttgacttataaaatgagtctgttaggtgtgaaaatatagggtaccatgtaaaatttatgacaactgattcccagaatacttacaaatctaaaaaatgagtttaagagtgaaacatggcagcaacttcatattggacattagat

SEQ ID NO: 10766 - DNA, 339 bp, Glycine max
  unsure at all n locations
agctttgttcttccaccgccgccgccaccatcatcttagaatatattttaatattattagtactttgattttcagccttgtattttggctatattattatggtatttgaacaatttactatttccttatttgcatggtatggttgaacaagtatgttatttgactatttangaaagatcttacttcacgatttggttgatgttttttcatgaatgttgtgtgaatgtttagttatgattgattatttcaaatttgttacacactttagctctttattgatgccaaaggtggagagaaatgggattaaaatcaagaactcacatgagtaatcaatttaat

SEQ ID NO: 10767 - DNA, 424 bp, Glycine max
ctcaagcttcttatccaaagctcatcttggtggtgtatctccttcttccattgcttattccctattggatggcgcctcctctgacctcttctcctttgtcttccgctgcatctccatagtggaaaatcaccattaaaggaactcattgaagctcaaagatcgagtctccatagaagccccacaagcaagcttcctcaagtggtaatcagagcacaagagcttcaagtaggtgttccttacacctccatatattttctgctttaccttctcttctattggtgtcacttcatttttctccatgtatctcctcacatgtattgtgctaaatgtttttaacatgattctttacagtttccactgattaaacttgctatagaagctagatttgattttctatggctcaaatttcttgttcttgttcttg

SEQ ID NO: 10768 - DNA, 311 bp, Glycine max
  unsure at all n locations
atcttgtttaatggctagacatgatacatgtcagggtttggtttggtttaaagataaaagggatgccccacattatttccatgacacaaatgcaaaaatgatgatctggaaactntatgcaaaactggtcatgcatgcacctatgtggacactcaagtgtcaaatttttatggtcatgtgatgctagggctcaggattcatttcctctattntagtcaacccaatgtttccaaaatatgttcttttatccatatgtgcattcatccgagtccattttgggcgtccggggaaattttcacagcattcaccct

SEQ ID NO: 10769 - DNA, 350 bp, Glycine max
  unsure at all n locations
ctataagcgcgggtctgngagacgaaatgctagtggtcgcgaatttcgangatgatgttccgagtacattggatggggtacgacgatgccctcctgatttccagctgagaaattggcgagtggaggaacgccccgacatttacgcagcgagcataatgttaacctttacggattcaaaagctctatagttgggcctaggctttagagttcttctttaggataaggcttagtgtattcttttttttaaagttataatacaaggatctttcttgatctgatcctacgtctctacccattctgatgcatttgcatgtctacttcttttctgaaacgacagatccgatgacgag

SEQ ID NO: 10770 - DNA, 353 bp, Glycine max
  unsure at all n locations
agtttgatttttatgagtnagctngggaaaaggacaagctaacttggagaaaccttctatgaatctctagtaatatcccgctaaacccagaaaaattctgatctcaaacacaaacttaggactctaccacttaagaacaacttttatcatacagggatctacaactatacctccttaggatatcacatgtcctaagaaactaactttctctaaccaatactcgcacttggacaacttactgtaaagatgctggtccctaagggtttgcaagacaatcctctagtgctcttcatgctcctctctagtgctggagtataccaaaatatcatctatgaatactaccacgagctatc

SEQ ID NO: 10771 - DNA, 449 bp, Glycine max
  unsure at all n locations
tggtggatctcgatgttctactgaccgaattattgttcatgctcatttagtctgagctacgggctgctagagagagggaggccaacaacgagcttgatgatgagcttttcattctcaagaatgatgccgtggagcatcatgaaacatggccttaacaatccgttggtgcatgctgtgttcttcaccaacgaccttgacttgggtctctttgacccttttaacgacgtgaagaatggtgttttgcttgacatagacgatattgctgctaacgaggagtaaggcgatgatgccattggttacggtgcctttcgtgtattctcttcttttctccattgtttgaatctaaccgcatgggcctctgtatcatgacaaattttcttcataagctctccttcgatgacanaatttgcactatatatgtatgtcttgagcgtatgcgtttatctatg

SEQ ID NO: 10772 - DNA, 202 bp, Glycine max
ctagagcgtgagctcacacacgccatctcataactatactcacctcctggagaagcttgcttgcgatgatctctcacgaagctagagcttaactacacatacctctctaatagctaagctcacctcgttgagacgagaagttatgactgaactactcaccctctatctacctaaacttacccccatgacactaaacatgcta

SEQ ID NO: 10773 - DNA, 277 bp, Glycine max
  unsure at all n locations
cccctattgtttgaatgatgctaatcttaagaatacgcggatgactcttgagggtatttgattgagaaccatttctctcccccttgggcatcaacgaaaagccaaagtgcgtatcaaataaatntaattttaacatccatacaatgtgcataaaaaaaatatccaccaaatcatgaagcatgaagcaagaaccatgaaaccatgaagctaacaaccatgcatagataaattataaactccacatagtcaaatgacatacttattcaaccaaaccatg

SEQ ID NO: 10774 - DNA, 355 bp, Glycine max
  unsure at all n locations
agcttattctgtctatactaacaatatgcaataactagccctccaacttgatccccactacaacacacccattnttttccttttcaaagccattcacaacatactcaaagaaaaagaataaaatactcaaattcaagaaaattgttggatgcctgatatctttagtttctagaaaagaatatattagtttatcttttaaaatttttattttttttaaaccatatcaaaatttacatcaagtgaataatccatgttaacaacaaacatcatcaattcacaaaactagaagttcacctctcactctctcagtcactgtataaaaacanagaaagaaagattttcaacaacacacaac

SEQ ID NO: 10775 - DNA, 511 bp, Glycine max
  unsure at all n locations
aggacgttgctgatgcttgtaatcacacatagtttgacnctttgcatanacngacacnatagaatctcaagctgtgctgcncacggttgctatanagagagatgtccacgcnccttttagtagagacaganaaggcagcgtgaagatctgcatagaccagatcttgaaacacgagccgagatgagagcttgaaatgattctgcgagcgattgcgagatcctataggtgaccgacacgatcctctccactggtgttgtaagcatcgttcctcatgtacttttcttatgtggtgacaacgcttacagggatggaaagctatattctttgatggttcgttcctcgaggtacctcgtgaaggataatctatatctatttaacgatgatntgtgggctgtccgtgtactctcatctattacacgccctatagcacctgaaaccgttgagcttgcttggttaggtgatcaatacttgaactggttagccataacccctggtatggaggctcacttcc

SEQ ID NO: 10776 - DNA, 243 bp, Glycine max
  unsure at all n locations
agcttttttaactcattgtaatcgattaaaacagagaatttttgtctctaaagaaattnttctcagatagaaaattntcttcactcagactatgaggatgcacaatgcaacacanatatcaaatgtactaaaatgcaacaatcaagttaacaaccaatacaaatgccactcaaaggagttgggcatgtaaaagccaaaacttcttctaaaacttcttcaaattnttctttgagcttcaagttt

SEQ ID NO: 10777 - DNA, 434 bp, Glycine max
  unsure at all n locations
tctcanaataagtattcatgtagaacttgtctttgtttcctatncatgttcttctaatggaatnncagctacaagtaactttctcnagttcttccacgggctgctcgagccttacccacatgagtgatcatgtcatgactggtttgcttgaggactgtaactttcatggttgcatcaaacanactttggatatcattggcaaagatttcttgggctttcttccaaaaggaacgacatgatttaaatgatcgaaggatttccaagatatccggctcaattgattgccataacacggcacacagttgataatcaagcttctcccattcaggtcttttatcatctgaaacagaatctgaggttttctccaagtggtcatggtgtccttgaccaaggaaccacaactccacggaagcagaccacgaagggtagttttt

SEQ ID NO: 10778 - DNA, 492 bp, Glycine max
  unsure at all n locations
nggctgacgtagctagctatcngcattnactcgacccgggtccttaacaaccggggcggcgcctttttattttttggttctaaccttgaactggcgcttcatcttntctttccctcttcccttggccaaaagaattccgccagggccattccgccggaatccttttggggcctctcctctcccttttccaaagaaccnaagggacttacccgcctgatatcttttggtgtcttcccttctcccttgtcaaagaattcaaaatgacacaatctaagaattctttgattctttcattcctaatacanaagtgtcanaggactaaccgcctgtgaattcttttgatccccattcacaaagtatcanagggttaaccgcctgagatctttgtcttaacacattggagggtacatcctttgtggacaagtagagggacatctacttgnngttgttgaaacaagagaggtcatctttgggatcagtctatggaggtcn

SEQ ID NO: 10779 - DNA, 433 bp, Glycine max
  unsure at all n locations
gattcctaaagaagctagagcttagctacacacactctctctaatagctattctcgcctccttgatgtgagaagctagaacttagcttcacacacctttctaatagctaagcacacctcctagagatgagaagctagagcttagctacacaccccctataatagctaagctcacccncatgacaaaatacatganaatacaaaaaaagttcctactacaaagactactcaaaatgcctcgaaatacaaggctaaaaccctatactactagaatggccaaaatacaaggcccaaatgaagggaaaacatattctaatatttacaaagataagtgggctcatacttagcccatggactcaaaatctaccctaaggctcatgagaaccctagggccttcccttggatctctggctcaatctacttggagtctttta

SEQ ID NO: 10780 - DNA, 313 bp, Glycine max
tcgataaatcacgggactcagtagaacatccgacacaacaagtattgccgttggattaggctcaaacctccaccatcaaattctaagcggcttcaatatgtaccgggactcaatcagacatcctagaaaaaagtattgtcgtttgattgctcaaactcacatcattcagcgttgatgtacgactatcaactcggaaaagtatgcgtgaagctaagtcacatcattcagcgccatttacgactctcaactcagaaagtatgcgtgatgctaactcactcatcacgccattgacggctataactccaaagatgcg

SEQ ID NO: 10781 - DNA, 437 bp, Glycine max
  unsure at all n locations
accaacgaccataactatttactcggatgtctgatagacgctcgnaatatttctagacgctcgaaatcgaatgttgaagctctgagccaatacaaacgatactgactttatactcggatgtctgattgagtcccgtaacatatcgagacgctcgacattgaatgttgaacttctgagctaattcaaacgacaataacgattttctcggatgtctgactgagtcccgtaacatattgagacgctcgaaatagaatgttgaacctctgagctaattcaaacgacattaactctttactcagatgtctgattgagtcccgtaacttatcgagacgctcgacattgaacgttgaagctccgagcgcattcaaacgaccataactttatactcggatgtctgattgaggctcgtgatatatcgagacgctcgatattgaatg

SEQ ID NO: 10782 - DNA, 534 bp, Glycine max
  unsure at all n locations
agcaaggacttaagcattcgntggtacangcncaatnnnanctnngnacccgggggatcctttnnagncaaccggcaggcaggcaggcgggtttattgttcttgcccccagccaaaaatgtcgagaagagtgttccacagctttcactataccaaaaattgccggcatgacttcggcaacacaagcttttggttaactctaaatcgcaatcaacacagaggcccaccatacccagcacgaccagtgcttacctttacaataaaactgatcaattatcatattagatcacaagtactgaataacattatctgatgaaatgactaacgaatatcaaattacatacataaacatatttatataatgctcttatacaaaatcttactgtgattttcatgatataaatatatcttatagcgcttataattntagtcttacgttgattgcaacacttgtagcatttatttatagatctccgcttctctcccctgaaaataattaaatcactatcagtgactttctaagaagagagctctg

SEQ ID NO: 10783 - DNA, 173 bp, Glycine max
  unsure at all n locations
gcactcattgcanatgcgtcatcctcagctgacatgacgataagccactatggattgcttcttagaactccacgatattggtgttgcaccatacgtgaatatgcaacctatagtactcgctatgtaattttggactcatccccaatccgcatcagtatatcccactaattctt

SEQ ID NO: 10784 - DNA, 373 bp, Glycine max
ccggcggcatgcaggcttatttttttattggcctcactcttttataataaactaaaagtttggtatttcttacataaaagtggaaacatcacaatcttaaaatgctcaaactttgaattagtggtaaacaacaattattgatgtggatttatatgtatgtgatttcagggtcattggagctattctcatagtaatgggactttactcagttctgtggggcacgcacaaggagaacaaagagaaagaggcagagataactattgacgtattgaagtgttgtttagaacatgggatgccgttggagactatggtaaaagatgtcgaaacaaacaatgacattgacatgcacaagggtgaagcctcaagagagtta

SEQ ID NO: 10785 - DNA, 364 bp, Glycine max
tgacataatcttggctcctggttgcggggttggtgacttggagagttgctaggttcgtgagttcctgagttggtgtgttctcgagctggagagtttgttgtttaacactgttggatgtgcttactgcaatgattgttattggtgcaccattatcttgtttgctgagtgccattgctgtgttctagggtataagaaaacaagacgccgttcgcattggatttttgctttgaacaatggttttgaaaccctagacactaacctaagactttgtagactcactcctgtgcacattatgtgattgattcaatataaagacagaaatgttcatctggaaacctatttcccctcgcaaactctaatcctc

SEQ ID NO: 10786 - DNA, 532 bp, Glycine max
  unsure at all n locations
agagcaatgatctttgtcatgcaccacngactcgagacgggatgcgttagatgaccggaggaaggcagngctccttatttgtgtaccaagagatcgcggctccagccaagctatcttggaaaaagtgcattattaagttttcatccctagaatgcgcccccatcttgtgacaatacatcttgagatggttcttaggacaagtcgtccctttgtacttgtcaaaatcnagtaccttaaattttggggggatgacgacatccggtaccaagcaaagatctgccatgtncgcgaacggatagtcgccaaagccttcaacagctcttaacctctcctcgatgagatcgagtntncttctttcttccgccgtcnggggtggtccctctgtggacaaaaaatattgttgtgctgtggggttgtgttgaagcaatacattgtgtgtcgacccctcaacagggaccggcgggtagaaatcgacatccccttgggcatactctcgatgatcctcgtgaatctcgtcggcctgtcgaagaag

SEQ ID NO: 10787 - DNA, 510 bp, Glycine max
  unsure at all n locations
agaggcggctgaaccatgaagntttaagcctgnctgaacactcgaaacccacaaccngcaacacgagctgccgccnttagatgagagacgccagagagttcgtaaacacccttccacaggnncnacagaggggacgactagcgaagatagcgcaccccccacgcgacgcaacgacgaccaccagcagacaaaacgggaacgacacaggacggattctagagcgagggcccggacagacgccgcacgcgcccgagcgcgaggccaccgagccggcggaaatcaggaactccgaccagcgagacaagagacacgacaccaagaggacgccactgggaggacgaagcgcggacccagaagccatgaaccaagcacggggcagcaaggcagacaaacacccgaacgcacagaccggccggagagcgcccaaagcaacagaggcaggacacggaccaccctggagaacgccgccacagaaaggccggacagactcataggacaggacggcaaccg

SEQ ID NO: 10788 - DNA, 391 bp, Glycine max
  unsure at all n locations
agtttattcacggaaaatgnaataatgaaatggagatgcccgatgaaacaccatttcctagttaaccatgcattaggtaccacgttcaattattttgtttttaagtgaaacgggtttatgatacccaacatggtggctcgtggtgcctaacacatgaaactaagaatgtagtgtgaagtttcacgcttcccccttttttgttttgttttgtagaggaaaacgcaaggatgagcaaacatgaaaacaaatgatatgccaatttgcagatcaaaaagtttgttgaacgcatatgcatgatgatgccatgactcatgcaaaatgtgaggctggaatatgataacggacaaatgcangatatgtccattatgatngtatgaagagatgcttatgc

SEQ ID NO: 10789 - DNA, 335 bp, Glycine max
taattacatcaactgttcattataaatccccaactagggttgttagccagccatacaagagaccctaatacaagtgagacagataatacagagcaattgttgcttacacaggaaaggggatcccttctcctcttgttggcacctcacaatcactcagcactctttaatctttaagaatgatgaaccttagcctccttgcttggatgctcctctatgttgtctccaaaagaactatactctaattgtgtgcctacaacctttgtacatacatactctggtcctttgcctaggactcactcattctgacaattgaagcttaaataagctctgaatca

SEQ ID NO: 10790 - DNA, 392 bp, Glycine max
  unsure at all n locations
tgaaaacgttttgggtgaaaatgggtaccaccatatagggctatataattaatatatatactatcaatccacacctagagaagaaatagctatgcagtaggcatagggaaccctattttgagaattgcagatgatcagtgaaaaagaagattaatccaacccacatatatatagaattgccaccagaatttagatagttagtagtaataattagtaactacataatattgttgatatcttanatgaatttggtgttagtgtgtcaaccttttgttcatagtcatgaacttgtataaatattgttcaaataaaattttatttattagagctgacagactaagatcttatggaaagcaaagcttaaatcaacaggactataaaacttccattta

SEQ ID NO: 10791 - DNA, 452 bp, Glycine max
  unsure at all n locations
cgaatctgaagctgaactatcgggtcatataatcaattntnggttgattagattcggagctgncgggatntctgatcaatggaagcatgatgcagcaaagtacttgaactgcagctgcttaactcttctttntgtgtatcttggcatacctataggggctattaatgcaacaaaatggtgagctatggaccagagttttgaattccaaatatggtggatggaggaaccttgaagaaacaggaaattcagcanaacaatgtgtttggtggagggatgtaaaacaagctttcaatcaatctcatcagggactggttattcaaaataacatgaagtggaaggtgggggatggagagaaagttagattttggacagataagtggattaatcaagaggagtcgctagcagaaaggtacctcangctgtttattatatcctcacagcagaatcacacc

SEQ ID NO: 10792 - DNA, 403 bp, Glycine max
  unsure at all n locations
agcttattgttgcccgagtcattcatccctatgagatgttgttgaagtattggcgatcagaattgccattccttggattatagggttgaaccaagctcacgcttttacaaaaaggttcatcaagtcaagttgaaatatggaagtaaccgtcttgcaaaattggggcaaaagatgaatcgagtcacatcactgcttcgtctactgccaaacatatttaggattattgatgtccttgttacttccagtttcaccttgacaaagatgtcatggaccatgttgaanatctaaattgattcaaccccatatcttgcgtaaaaattcgcaatacttcaactgtacatcattcgcatgcatncatgcttttcatttggttgcattgctcgtgcattctttccttgaaaat

SEQ ID NO: 10793 - DNA, 464 bp, Glycine max
  unsure at all n locations
ctcagcttgtcgaatgaagaacatcttctgttctctggtgatccttttctccatctcattgaatcgaatgtccactagtaactccaaagtatcaaacctttcaccaacaaaggtttgaagaccatcgaacctgtccaaaatcttttgaagaagagaggaatcttctccaccatgtaaatgtccttcttcatcaatgggttgagcaccctttttcacccaaaagccatcatgctctttacggtaaccaaaggatgcaacacaacagcgcctattagaaaggatctcttgattggaacataaggttcaaaatcaagaggaatgttgaagtgttgaaggaagagagtgactangtgtggatatggcaatggagcatttaatcacaatgccttatgcatgcgatatcggactaagtgtgcccaatcaatttgtcggcctttatgaaaagcccacataacaataagatc

SEQ ID NO: 10794 - DNA, 320 bp, Glycine max
  unsure at all n locations
agcttgtttcatgtgaaaactcacaacaaatttgaaataagtagcaactatgtctgttgaatgaaatanaatgacttaagatattttcctttatataaaatatgttggtactaaaaaactatattatttagcgacaagaatgagatttagcataaggatttatttagttaatatttttcaatgcatttctcttttttttttaatgtcttttatttttccttttctttntattgacctttcctttntatccctttagaaaaagattctccatcttttcatccttcaattgtctttttctattatctttgttaccctttcat

SEQ ID NO: 10795 - DNA, 482 bp, Glycine max
  unsure at all n locations
ctctatanaacactcaagcttgcacactcagaaggacatctcacctatatctgtgatgaaaactttcatgtacatttgtccattacacaaaaatgacaccatctaaacaaacttaactgagtagagactagttctctccttcttccataccaatatgtcctcctcactcagaatcaaattaatacttctaaagtcatgaccttttatctaagtaaattattatatttatttctcctaatgatatagagatttctccatttccatctgcacaatcaatttccctccctccagtcacctaatcctgacaccctggctgttatggctactacaaggttgtataatctactatacttcctacatgtgaaaataaagcacttccacccacaggtcttgagaaaataaaagtatccgctaaccctcccaacccccacccaccttctaactaactcagatgccaaattctttcttccctcatagntact

SEQ ID NO: 10796 - DNA, 292 bp, Glycine max
  unsure at all n locations
tgcttgttcttgattnttcctaagttctgtaacaagcttagaacaataaacttggccttctcttaattgtctttgggcttggcgaccacgatcaacaaagtactttcggcacctactatatgttgacttgaccaacgctgttattggaatgctgcgacaatctttcaacaccttattgacacattctgataggttggttgtcatgtgaccatatcgtcgtccagatgtatcgtaagccatgctccatttttcctttgaaatgcgatcaatccatcttgctatggctggactc

SEQ ID NO: 10797 - DNA, 277 bp, Glycine max
agtatgtgctagggccaccctatgccagtatggacttcgagcatacagtgactgtaacatcccaacaaaatatctagtaaaaatagttgacatttgaaagggagttaatgttaaagcattttaagtagtggaataattattttgtgcatgtgtgatatacttcaatggataagcgctctagaattttaattctaggcttaataagatgtgttttaggcctaaaaagccttggacaaaaatttgtcaaccatagtgaaccagtcaaggtaagagaatc

SEQ ID NO: 10798 - DNA, 338 bp, Glycine max
  unsure at all n locations
agctntgttttcctttgttccgganacctttcttttctcatgtgcacccaaacccaatctccgggttcgaagacaaccttctttctccctttgttggcttgtttagcatagcttttatttttcctctcaatttgatctttgactctcttatgaagcttcttcacatagtccgcctttgcttgaccttctttatgcttaaaaacagaaacattatgcaaaagatcaagaggagttagtggattaaaaccataaacaacttcaaaaggagaacaattagtggtgccatgaacagctctattgtaagcaaattcaacatgggggtaaacaagcttccaagt

SEQ ID NO: 10799 - DNA, 515 bp, Glycine max
  unsure at all n locations
aggacgtgtgactgatacctccgagatcgacacattgaatagacaccctcgcagcaccngacaccannngaaactcaagctagagatgaggaagtttagacnggcgacactttctgctatnattgttgaccacagagcgcgaccgcgagatatgtcgcatgggtcacgacaccttgttgacgatcacgtgaggtgctattgccgcaaaccaagcttgaccaatcccgacccaacaccgccatagacgcgcagcgagaacctgagaattacctaatccagcgaactcctgtgggggaaccgataatatgaacacattacctcacctcaaagccgctcggggaggctggccaactgagatttnagtgaatatcgtggattgcggcctatggaaataattactagcgctgcgagatcgatacaacgctcgaaaataatgacggacgcctagatggtctctgggatcattacaaagggggaaaggtgccagctgtaatccacgagcactatgagcttgg

SEQ ID NO: 10800 - DNA, 360 bp, Glycine max
  unsure at all n locations
tatctntattcaagacaaagaaattaaagatattcaagatggatgatcaagacagtctatagagtcttagaaagggtatattaaataggaagggaattccaattgaagtagcaaaaagtttggccaataatttttaagttaaaaagtctttttcaacaaatttactctctggtaatcgattaccagaggatgtaatcgattaccagtggccaaaactaatttacaacagctactaaaatttgaattcaaaatttgcactgtgtaatcgattacacatatatggtaattgattaccagtagtttccgaacgttctaattcaaaatttaagattggtatcgattacatatatactgtaatcg

SEQ ID NO: 10801 - DNA, 423 bp, Glycine max
  unsure at all n locations
gtgagaagnagtctattgctnttctctcatatccattcatggtttgtgatattataatgagagcccaacatgataatcctgttgttgtgggtgatgcccgaaacacttgaataccctntacgatagctccacacttgcagtacatgtcaataattatggtgagaacaacgacattcaactcaaaattcccctttttacataatcatgaacccactccccatgtagaagtgcacctaagtgagcataaacacttaacaaactcatcactgtaaattcactaggctgaacccttcgtctctgcatcttgcggaaaagctccaatgcctccataagccttttattcctaacatatccactaatcatagaatnctaagtaactctaattcttgtaggcatgttatcacacaaccctctagatttatc

SEQ ID NO: 10802 - DNA, 436 bp, Glycine max
  unsure at all n locations
cactcgacccngatccttaagtcacctgcggctgcaactgattgagtttgccatacnaattgaagatactgtattgcaattgaacacgaacattaaattcgctactacgaaatcanaagggggaggtgcanagttttaccaaaacaaaagcaaattcacaaacctaacagaaaaggatcaatgattgaaacgaggggtttgtttctcanaacgaaagaaagaagctatgtctctgtctgggagcgaatcanatgaaacaaagatgaagttgaaactacggtttggtttgatgttgntntgttttgtttgagtccaacacggaacgtctacttatactttctgtatacgcctcgaatcgtccctttcacaagtaagcttcgttgtgttgcaaccttctgtcanaaactgacacctaaatgcatanttntttcatttt

SEQ ID NO: 10803 - DNA, 463 bp, Glycine max
  unsure at all n locations
ttatatatataaaaataattaatgtcgtgtagtttccagatgaacagtttaggttacttgattgggtccaatgagggacgtgtgtgaaatggnggaagaggggagcatctttgggatgactgagcaagtgcgtgtgaacgtgcatatgccattggaatcttagacttaattagggataactggcttgtttttttttccatttaattntagcatatcacgtgtgggcttggttaatttaatcactttccataaccttttatcctccatgatcgacaaacccactaacgcggtaaagaatcttgtgctttcaaattaaaccaatttttttagcggtgctgcgcagtttctcttcttgttaattaaatttctggaaactacaatatcgttgaataagtaacttattattttatacgataatctagaatcattgatattttgaatcgaacgttataattgaattggg

SEQ ID NO: 10804 - DNA, 260 bp, Glycine max
ttaaggaccggggaggcagcatttattttttcaagctttccctgcctcgcttattggatcccaaatatcagccttcggcccttaaaaattcattttgcggtgataccattgtggagggaaatcccagatgtatgatttatcagttacatgtacttgacgctaattgcttctaagtatgatccttttggccattgttcactggatgctgatctcttattaagtatttgtcagtgctttactgctaatttgcacttgtaaat

SEQ ID NO: 10805 - DNA, 393 bp, Glycine max
  unsure at all n locations
gcgcacccgctatcatgggggagttctatcggaagatttgtcatttcaactaatcttatatgtgcacatatcattgctcacttaatttattgcttcattcaatactataaataaaatccctgatttctgatcatgtattcatctgactttgtgcatcattacacaccacatatatatagatatatatcatttaataaggcatggagcaaatggattgtctgacttcccgttgaaggtcctcgataattagcattataaagccgcattcatgtattccacgacgatatttgtatctatgaatgccctgctcaaattaacgcaagaaaatagatcttaaatccacctaatacctanggtagatcgaataaactcatgatttttaatctattctga

SEQ ID NO: 10806 - DNA, 113 bp, Glycine max
  unsure at all n locations
aaatttcgagcgtctcgatatattacgggactcaatcggacttccgagtgaaatgttattgtcgttcgaatatgctacgagcttntgttttaaatttcgagcgtctcgatata

SEQ ID NO: 10807 - DNA, 335 bp, Glycine max
  unsure at all n locations
cgaacaacaataacttttcactcggaagnctgattgagtcctgtaatatttcgtgacgctctagtgntaaaaccgaagctcgtagcatattcgaacgacaataacatttcactcggaagtcctattgagtcccgtaatatatcgagacgctcgaattatagaaccgaagctcgtagcaaattcgaacgacaataacatttcactcggaagtcctattgagtcccgtaatatatcgtgacgctcgaattttataaccgaagctcgtagcaaattcgacgacaataacatttcactcggaagtcctattgagtcccgtaatatatcgagacgctcga

SEQ ID NO: 10808 - DNA, 219 bp, Glycine max
ctatatcagggaaaatgctacacgtatgtagtatgtagacattgttaattctcctgatgcttgcacctgatggcatataatatacccatgtatctaatgaagaagttatttacctttagtgtttttcattgttcactctcattatctgatttctgtttctcacgtttctgatcttaaactctcagtggatcacttggaaaaagacagagacttttactt

SEQ ID NO: 10809 - DNA, 238 bp, Glycine max
tacatcttactgatggctatcgaagcattatcctggagaagtgcagaacaatcattagttgctacttaccatggaggctgagttcatttcattatctgaagcgacatcacaaggcatttggttaaaaagtttcatgggcgatctacaagtgattgattatgttcctagaccattaaagatatattgtgataattcagctgctgttgtcttgactaaaaaaaataaaagtggaaggtga

SEQ ID NO: 10810 - DNA, 326 bp, Glycine max
  unsure at all n locations
tttcttgttgganaactngatgccttggtcaacctagtgacccagcttgccatgaatcananatctacacctgttgcaagagtctgtggtctatgttcttctacagatcaccatacagatctctgtccttctttgcagcaatttggagtcaatgagcaacctgaagcttatgctgcaaacatttataatagacctcctcagcagcaaaaccaacaacactagaataactatgatcttttcagcaacagatacaatccaggttggagaaatcatccanatctgagatggacaagtcctcgacaacaacaacagtctgtcccttcttt

SEQ ID NO: 10811 - DNA, 390 bp, Glycine max
  unsure at all n locations
tctggacacttgctctgtggacaaggaggtcttcttgatctntttacagtngatagctaaagactnttctttcttaattccttcgtcctattgaagttcttgttcatgaactttgagagtaccaactggttcttcaagggaatagagtcaagattctttagagcccttagcgttgttacatgtggtctccattttctagacaaacttcttaagattttgtcaatatgattatagttatcataagttcttcctagagatcttaattcatttagaatggtttgaaagtgcctaaacatactttgtatgtcttcgccttcttccatagagaagagttcatgcttangagcgatgagactcaatttgttcctctatacctgtgatgttccttct

SEQ ID NO: 10812 - DNA, 337 bp, Glycine max
  unsure at all n locations
agcttttttaagaggcttcctccagaagcttcctcgtggtttctttgagaagctttctcaagaggtttctttgagaagctagatccttatctatccacccccctctattaactaaattaacttccttaaaaataattaccgatgaaaataacgcaacanatattcaaacatcaaacataattactaatagtatatagatatatatatatcagggtgttacaactctcccacccttttagaaatttcgtcctcgaaatttaccttactcaaacaaggatgggtgagcttctcacatctgactttctaattcccatgtggcatcttctcctgatgcacc

SEQ ID NO: 10813 - DNA, 716 bp, Glycine max
  unsure at all n locations
agggaaacgatgggagactttgatcngccngttgnnaacnatccgattaccccctangcaatacnaccgacngacacgactacgcaataactacatagactntggtacnggatntactagtgtagtgacgcncgctnncacattgttagtgctacntacnggngcgcangtttcttgncnganntggnngcagcgaacacagtntttaccacgatgncaacatanagcagacgcgatagaaacncacacgcaattccccacttgtatgcncacacnacatcgcaacatcgagcgnntcacgtgacntcgctcacagtnatcnccagtagacacttcggttatcatcttcaaacatacgcgggtcnccncgatcatatgcgcttcctcaatgcgctctcctcaaaccatcagaaggtataatcgaagcattgcactacgagcaacaatatttactcacatgcccaatgaaactacaggggcaagagcgcaggaaagaagctctgccctaataacaccgaacgcaagagtcacgagcgtgtttctcactttaaacgaaccccagtaacaaatggtcgttcgatccgaattctgttaatccgttgggatgcgactcccagaaattctaccggaacgtctataagtacataagcactacatttttgagcagtgtggatctactagtaaacatccagaactcattctgcactaatgtttcn

SEQ ID NO: 10814 - DNA, 342 bp, Glycine max
agcttgtttgtcagtgaattgattgaacattgtatgcagtggctggtttggtataaaatgagtgtttgaaagtgattgattgagcaaatgtatgaatttaatggattgggatgattggatgattgttttgatcaagtttgctgtcattagaagagaatgagcatatgattggaattatgtatgaaaatgttagtcggttgtcagattgattgtgaaggaatacattaaccgtatcccggtgagagtgtgatcttaaaattttgagagaaacgactatcatttagtgctgatttttgcgtgaatctctgaagtatggattggatgcattaacttgacgatgat

SEQ ID NO: 10815 - DNA, 461 bp, Glycine max
  unsure at all n locations
tgacatctcaggctaagcgcanattgcttatacaatttaagtgtttgcctgctgtgctaatcccaaaactctctagaatttgannaattggaattgggcttagcgcgaggtcgggctaagcgcaaggctttgttaaaaccaaacgtcatattgactcgctaagcgcgactgtgcgctaagaaagcaatacattnnttgcttanaaggaaattacttaggcagtttcattcacccagaagctnttatctcttgtgcttgtgcctacattcgttcttttgtgcatttttctgcctgtgcttcaagttatcttctgcatcctttntgctctcatcctgcatttcaatcacaatctaagtaagcttcttgttttattttcattttcttttcaaagcttanaccttagggtagatgatttattgctttntagtttgcatttctatttagctttagtgttttcagtt

SEQ ID NO: 10816 - DNA, 471 bp, Glycine max
  unsure at all n locations
ttgcagtagcaagctttccttctcannttcaatatgaggggaaccttacaagcttgaatgaagatgaacgaaagctcaacataatacacccatggtgacttagctctataaggggctcaacaaaagaagagagctaaagatgttgttgttgatgctactgttgtaattgatgagcaagaagctgctactactgctgagaaagttcaagctggagcatctactanagctgcggacaacaccaatgtgtgtggggtcatcattgaccttacaaacactagtgtcatggatgagactggtgaagcgtccaatgtagatgaagttgaaccactcattccagatcttgcatccaagctgttagagataaggggagaaacatgaagagttagcattgaagcttgaagaaagttttcttttacatgccaactctcttagtgactttgcatgatagtcgatttatgttcatctagtctc

SEQ ID NO: 10817 - DNA, 442 bp, Glycine max
  unsure at all n locations
actaagcttgatgcctaatatacctgcgataatanatataacaaagattggacatganaaagagaacattggagaccagctaaatcagacagtcaaagtatgatttatttctacttcaataaacaggaaatttcataagaatgaaaataaaattacaacaaagtaccttttccagaccaaataattgtttcggaatgctcctctggagaggtctaatcctggggacacaattccacaaaaccacaagttactacttcagcctacatgtgtctgacgtggtgactgatggacatcatcaaaatgcagttagctaggtggtatagttataggacgtcaaggtttagttggtcttgggagggtgtccttaaacatatagctacatcaaatgatccctgaaatacgcatggttgagagcacctaatantagtatatttcattcatg

SEQ ID NO: 10818 - DNA, 431 bp, Glycine max
agctttctctctgcaaaattcatttcttggttggtgctcttggtttgtgctaaaggtggtgttcgtcattggaagtgcggtagacagactttgtggctgatttagggattgcctttgtggataactgggcggtgggtaaggagaaggtttgttattggctgagtaatgacattgttgggttggtgggaaacttggctgtataggaatggcagtcacagcatgggcttctccttcatcctcaccctcttcatttgccccagttttctcattcgtccaagcaggatgactaaatttgcctcttttaagacccacatcgatcctttcactggcaaagaccaaatccgcaaaagctttgaaagtgcgtagcccaccattttccatagtagaatactggtaatgtgtctactatcattgtcatcgttttttcgtca

SEQ ID NO: 10819 - DNA, 283 bp, Glycine max
  unsure at all n locations
acgagctaattgaggtcctgacgctaagcgctattatggcaactaagcgaaatttattgcggcaatatgagcgctaagagagtacctctcagctaagcgcatgctcctctgtacttaagatgcatcattatagctaagctggccagagccatgcttatcgagagttgcagcntttctaatctgcagacctcgctaagcggacttactctctcgctacgctgagtntcagttaagaaaaaatattctcgaatttgaaacgtccgctaagcgcacgtgttcgcta

SEQ ID NO: 10820 - DNA, 353 bp, Glycine max
  unsure at all n locations
ttcttttatagacatgtcccatggaggaaaatcaagagagagagagagacagatatagatagaacgggagcaccaaattgaaggaggaaaacggggaaagacgttgaactttgagttgtgtctcacatgactctcattcatcaataacacaacaagtgttacacatgttattatttatagcctatgtagcatacttgagaaacttccttgagtaagttcttcgatcagctagagtatagatataaacacccttctaataactaagcttacctccttgagaagcttccttgacataattctttgagacctttcatgagaaaattcctagagaagttatagctntgtcacacaca

SEQ ID NO: 10821 - DNA, 287 bp, Glycine max
cctttcttactccaggaactttcaaaagctttaagatgcccctcacaaactttcaagaagctcctacctataaataacactgtgtacacttgagtacttgataatgaactcttggagacacactcagaggaaacttctctcccttgttctggcttcaatatagtgctccaccctcgatctttctctccctctgtattttgcaccatcgaagcctcctctccaatcttgttatccgatgctcatctaggtggagaaactttaacttgcatggctgattccttaatgga

SEQ ID NO: 10822 - DNA, 425 bp, Glycine max
  unsure at all n locations
agctntttaatatttaaattcaaatttctaaaagctgtgacaaatagtttaaacttctggtaatcgattacgtaccttgtgtaatcgattacaggcttttaaattcaaattcaaaatttgcaaatttgtttagaaatcaatttaaccactggtaatcgattaccagagacgaaatatcatatttttgaaaatatgattgttcttaaaaaacttttgtaaaatatttcctttagtcctgtgcagcatcaattaagggaatttttctaagatcctaactaagtacatcattcttcttgcatttctaaattcttgacttgaatcgntgtcatctttggcatcatcacaacttcatatcatatatatttctacacataatttcattaaaaaaataagtgtatatttttaaaataaataacataaactga

SEQ ID NO: 10823 - DNA, 151 bp, Glycine max
tactggacctgtcagtaactatgtgtttgcgagaccacctttatattaaatctggaccaatgttgttaatggcggatagcccataatccgatatacaactatggcgcatggcgtggcggacaccaaacaatacatatatttaaactcctcg

SEQ ID NO: 10824 - DNA, 448 bp, Glycine max
  unsure at all n locations
ttcttctaatgtccatgatntatcttgttctatacattttttagttttaacacacaaactcgtgatttattcaaacaaaaaggatgaaattgggagcacgcacgcaagaaacttacttgttggtggcatagttgacaaggttggaaaagagaatgccaagggtgatattcaactggaaaagtatattcaatgctgcacgtattcttgaaagtgcgatctttgaaagaaaaactggcacaacctgttgtcataaaaaaaaattaaaccaacaaagataagtgagttcgaagaagcacttgctattacacaacattgaacactggtttcataaataaaataaacacacacatgcatatggcagaatgtctatataacgaaaatagaatgacanaccctcattacaataaattaatatcttcaattgaacaacattttgacctatttattt

SEQ ID NO: 10825 - DNA, 540 bp, Glycine max
  unsure at all n locations
agcggtgtggacgtttgacnnccagtagnangtttganggccttcgnactgatcccactcgtcaanacccgacacnatagaatacacaagctgtgagnctaataatgtcatgcataaaagattttaggnngcacttatatatctnctcgctactctaanatgtcgaaactgataatacactcattctcctatcaaattacatcctcttcatcatgcacaagcaaatataaaaacgaacggcgaaatacagaaccagtgaagatatgaatccaaatcatgccccgtcctagacaaaacaaagcctaacaaaattatcacatccgtccatgcttataataacttctcaactaattcatatcccgctatcacaaaaattagtttaggtaatcatattaaatttatcaattatctatactatgattttgacaaagttcttttatgcttctatgcggagaatactttttatacatgtctggacataaataattaactagggtatgaatgaaaaaactcatacatataagtaacaaatagctatac

SEQ ID NO: 10826 - DNA, 426 bp, Glycine max
  unsure at all n locations
tctctaaagaaaagtgacaatatatttagccggcctcattaaatttggcttganaattaactcacttatattggagtctgatatatgaatattgctagaaagatatttgtacccggtttctgggatgataattttccctcctaattgtcttcctataatgcttgttgagaagttatctaagctgacctaaataatatctactatatggtgagtcaaatactatcccagtagtcctatttgtagcatggttttgtcagctgagttcaactngcattntttttcttttcatgatttgactcaacatttcttttgttacaatctgaagtgcgttgaacatctgatatttctcaagtgggatgatggatntttatattggggattcttctcatgttaaagtctgntcttcaagttttgtgttcactatan

SEQ ID NO: 10827 - DNA, 225 bp, Glycine max
atctatactttaatgtagagacgttatatcctaatacacaatcgtagattcttgacttactatacatttatgtgaaatattaaaaagagagttctaatatatatctaacaaaaaaaattagtcaataatcactgtattgactctaaaaaaacagcataactttaagatgtagggtaagtcctttatcattatagcctcccgctaaatcactcctctaagtatttg

SEQ ID NO: 10828 - DNA, 342 bp, Glycine max
  unsure at all n locations
atggtatgattacctgttaaacattgcttctattagtatttgatgtttcctgagattattaacattagagacagataaaagatatcctatgtttcattcattnttctgttgagcataagcataataaaagtcatttgttcaattgctgatgcattactcaacactcactaggcactgaacttaaaaagtattaatttattttacaggcatgggaactaaaattgaatattccataaatcttctagcatcctcagtagacagcaacaacattgtgggtggtgtggatgtctgggagcattatcagaacaaagtagagactaacaaacattgtagtattggagt

SEQ ID NO: 10829 - DNA, 329 bp, Glycine max
  unsure at all n locations
tgttgaagagtcaaattntgattcggtgggaatttaagtgtaaatccagtttgagcaagtttagatggatgttatggactggtgtgaggtgagagtttgcttcaaatttacctcattctcaatttcacttctcanacctaganaacccattgaatggaggggtgttggacacctagattatgtgttgctgtgttttgaagcttggttntgggttagacatgattgatgcatgatttgggacttgtangaagtgatttgggcaagattggatgagaggaagtgtgattttcgaaatctgcactttgtgcagaattttgctgtgaaattgt

SEQ ID NO: 10830 - DNA, 511 bp, Glycine max
  unsure at all n locations
aaattcagggcttgggagcttgcatcactnaaacnatgccnnaaacagctgccactctacctcaggtgttgaaaggtgtggttatcttggatttctangtatattcaactaggagaccttggtggtggaaggaaatggtacggtgggaattcaaaaaatccttccactcaagcttaaagatcctatgagtgtaaccattcgttgttcaattggagaagtcactgtgagacacgctcttattgacctgtgagccagtattaacttaatgacactctacatgtgcagaacgttgggagagttggagatatgcgcactatgatgacatctacactggctgaccgctccattaccaaaccatatggagtaattgaagatgtgctcgtcaaaataanacattttatcttcccgacagactntgtgggtatggatatctgaagataattgatatcttggagatttggggagggcattcatgttaacttgcaaccgcataatggatattgggattaag

SEQ ID NO: 10831 - DNA, 450 bp, Glycine max
  unsure at all n locations
agctncatnattatgcttcctccagaagcttcctcgtggctgctntgagaagctttctcaagaagcttctttgagaagctagatccttatctatccacacccctctattaactaaattaacttccttaaaaataattacggatgaaaataacgcaacaaatattcaaacatcaaacataattactaatagtatatagatatatatatatcagggtgttacaactctcccacccttttagaaatttcgtcctcgaaatttaccttactcaaacaaggatgggtgagcttctcacatctgactttctaattcccatgtggcatcttctcctgatgcacctccccagatcaccttgaccaacagaatctctntccctcttaagtgtgttgtgtgcctatcctcgatcctcaaatgcactgtttcatatgtcacaatctccttcacttgtacat

SEQ ID NO: 10832 - DNA, 233 bp, Glycine max
tgaaacctgttgaaatgagaactttggagaaatttttaaaattgtgaccaaatttcagaacatggtttctttagacatgaaggctttcttttcaaagaaaacaaattgtgtgtgcctaaatggtctactagaaatttgcttggttgtgaagcacatgaaggaggtttaatggggccatttggggtccaaaagactctagaaacattacaagaaccattttattggcctcatat

SEQ ID NO: 10833 - DNA, 328 bp, Glycine max
tttttaaaaccttgtgcctctattgaatagaaacccctcactaccagaaaatatgtaattgctacaaaacaaggggtgtgaataaaaaaccatcttttgttgtcattctccaataaatctccgaatactaaaaagagggcaatctcaaattggataaaaagatatatcaaatgttgtgatttcacaattttgaatatgattatatgaatgaaccgctactgtacttgctgcaatgatgaatgatgactaaactgagatacgtgatcccaaaatatgtgcctcttataatctaaaaaccccttttgtgttgcgcatgaattacataaac

SEQ ID NO: 10834 - DNA, 281 bp, Glycine max
  unsure at all n locations
gtgctaaaggtggtgttcgtcattggaagtgcggtagacagactntgtggctgatttagggattgtctttgtggataactgggcggtgggtaaggagaaggtttgttattggctgagtaatgacattgttgggttggtgggaaacttggctgtatatgaatggcagtcacagcatgggcttctccttcatcctcaccctcttcatttgccccagttttctcattcgtccaagcaggatgactaaatttgcctcttttaagacccacatcgatcctttcact

SEQ ID NO: 10835 - DNA, 455 bp, Glycine max
gaattgcgaaagccgcactccatcattaggattatttcctgacatctcaaacaaacaaatcagacgtaacaagacaattatagttgctgcttgaatacctcacccactcaagtgtatcacacaattatggcttttctctaatgaaacactcttgccttttaccactctaattccccttgagttcttacgcaattcaagagattatggccacaacaaagaacaattcaccaatatgtgtaagggaaggctagacaaggaaaaggttaaccaagaaaaaggctaacaatgtttttaggcacaaatgaaggaaacaaaattcagaatttacgaattcaagtaacaatccttcatgccaccaatatattaccttaaagagttttttttttagttcttcagcatgaaccatcagcccatttttttttttttaatttgctatacaaatctgttcttttttt

SEQ ID NO: 10836 - DNA, 542 bp, Glycine max
  unsure at all n locations
aaaattcccaaagtcnagcgtgtgccganaatnagtcnanncaccagccagccattctagtcagcctgcctgcatgcaagcaagctttttgattatatctaatgagagctcgagcttagctgcagcatacctatataatagactaactcacctccttgagaagagattcttgagctcagctacgctcatcctataattgctaaactgacccccatagccaatcacgtgcactttcaggttcaaagtgcttactgcttccactactcaagatgcccctttctacattgctgttaccctattctacatcaatagccaagactcaaggtcctgacaaaggagaacactctctcatatatatattataagcgggctcatactcatgccatgggatcaatatctactctaaagctcatgacaaacacttggtcttctctgggaactctacaccatcatcgtggagtctattacccattgccctatcggggtaagatagcctcagatgtgtgtgaaagttgtcaatcatccataatatgttgtgacan

SEQ ID NO: 10837 - DNA, 227 bp, Glycine max
aactgaggcaaacatagatggtgagaaagagggataaacccatgctgtgactgccattcctatacgaccaagtattccaccagcccaacaatgtcattactcgagcaataacatacctccttacccaccacccagtgatgcaccaaggccatcccttaatcaaccactgagcctgtctaccgcactttcaatgacgaagaccacctttatcacataccatataacac

SEQ ID NO: 10838 - DNA, 359 bp, Glycine max
  unsure at all n locations
gttgatacgctgggctgtgactctgaggataaacaaattttctanttttatgattttcccaaacttaagagaaaaaaaaagaaacctatataacacataanagaatggaaacctgatgacggcttcaaattgcaattaataccgaatcgattgaactcttctgtaagcatcttaatgattcgatctacaagaatatctacagcaattgttaaatttcctcgaagacaatgcgaaataagaagaatgaaggatatgaaggaaagagcgagtaccgtccttgacaacgtagaatctgaagaagaagaagaacagatgagatttcgctgacgaattcagagagagtgggagagatttgctta

SEQ ID NO: 10839 - DNA, 277 bp, Glycine max
  unsure at all n locations
agcttctgtatctctgtgangatgacatttatgacgtcacactggacatgcttccaccttccgtgacctagagaaagcacagtgaaaggcccctttcagacttccggctctaaaggtaggctatcaggttgatgtccggctctagtcatccttaccctgctagctcctaaggtccacctttatccncctttgatgctcaagatgttgttgcttacacgaatgtttctaattcttctttgcctccttctccatatattgaggaaaatcctaccccttc

SEQ ID NO: 10840 - DNA, 101 bp, Glycine max
aacacgtattccgtaaatacagcatatatttacattataaaactctatgactgtaatcaataactgttaaaccactattcaattattaattcacatatcaa

SEQ ID NO: 10841 - DNA, 447 bp, Glycine max
  unsure at all n locations
aattgagatcagatctnntntannacgcgccttaaggatgagagggcnctttttttaaaactgccgggggtctttaaccaccccttgaagaaactgactcacacgccccctataatactaactcagcccctgacacactgacttacaggtaaaaggcttactacatagactactcagaatgccccgaaatacatggctgttaccctattctacatcaataggcaagatacacggtccagactatagatatacctgttcttatatatataatgaaaagcgggctcatacttaacccatgggatcaaaatctaccctaaagctcatacaagaccacggccttccctgtgactctatccaagatacgtggaatcttctacccaatgcactagcggtgtaagatagctccaaacgtgtggaactttactatcgtcctcatatgggtaacag

SEQ ID NO: 10842 - DNA, 513 bp, Glycine max
  unsure at all n locations
ngggatcgtcgatnncctttgattgctgagacantccagacacnatagaatactcangcttagtgtgacattgantgtctatgcacggataatctctgtgaagtcctatttcgaacatggacaagagagtatcagaagcttcagccatttggttttcctttctaagagtgtgatgaaatgatatatcatcaccgatgttcatccactcctatatgtacgccctgtaaggcatcaacttatggtcatttggctcgcatcacctttgaacagatgaattacgcacacttaatctccatacactatgagcgactgaccctacagtcgatggtagctcagatatctanggcacatgctgcgtattctgacatattatttgtacaattgaaaaacaatcacgccgcgaaatgaaacatcatttgtctggcgatacaacactngcccacttcatgctccatgcattgaangcacatcaaanttcaatccattcttttgtctcatctaccatttcctaag

SEQ ID NO: 10843 - DNA, 393 bp, Glycine max
agctttgatttatattctttgaaaataataagggaacatgataaataattatatcctccgatttaaaattaatctttgatttatctccttaaataatttataataacaatggtttaaattttataattgttaatttgaataattataattaatgattttatctaatttactaaatcattgctccatttttaaattctacattattttatttatatatttatcttagtttagattaatcttacgttccattatacaaatatatatacaattcttttttgaccaaattccagagttaagtcttgtttgtcactaactcactattattgaagataacatgataaatgagaaaaaaaatactatattttaatacattgtccttcaatcactcataac

SEQ ID NO: 10844 - DNA, 396 bp, Glycine max
  unsure at all n locations
tctcaggaagttntctctagataacttctcaaggatatctaccttantctataaattgaagcatgtgtaacacttgttgtaactntgatgaatgagagtcttgtgagacacaactcanagttcaacttctctcccttntcttccttcaatttcgtgctcccctctctctctgtctctccctctatcttttcctccattgaagcatcctctccatggtggaaaatcaccattaaaggacctcattgaagctcanagatccagcctccatagaagccccacaagcaagcctccatcaacttgtgaccgcaatgcganattcgacatcgagatagtcatggaattctatgccgatgccttgcctaccgagganggagctcgggatatgcgctcatgggt

SEQ ID NO: 10845 - DNA, 401 bp, Glycine max
  unsure at all n locations
agccacccttatggctggcctccggatatcactccccgtgccacccttaattatctattccaagcccctnactttgaggggcaactcccgccttatgacgactatcccggacaagacgatggggaaggagatacccatcttggccccctgctccacctcaaagatccgtccccccatgaactacccccaccgaacatagtctgccatattccaacctcacccacacccgtaatagaatctgttcccttcgccgaagataacggaaagatcgacgcgcttgaataaaggttaagagcaggcgagggccttggcaattacccattctcggatttaacagatttatgtctcgtgcccaatatagtcattcctaccaagttcaaagtatcggactttgataagta

SEQ ID NO: 10846 - DNA, 322 bp, Glycine max
attgcacagtgactaacactcaatcgtattacagacagataaacaatcttagcacgtactcttttctctcaaaaaaatcaaggtattttgagagctattttaaacttcaaaagaatttacataaagtgatttttacaaaaaagaatttgaatgagtgctttagttggttcttcatgtcttcaacaagtgttcaatgtctctaaatggatagatttctcctcttaagctcgtgtttgaaaaatgtggtcattgggcatttaatgcttgattgctagcatgtacttcttcaaaaaccactattctttgctaacatgttgaacac

SEQ ID NO: 10847 - DNA, 501 bp, Glycine max
  unsure at all n locations
aaannnaaggggnggcnnttggggcgcttcgtatcacctnanacntaggctncaacaatatggatggcttggcctccaaggcccagaggagcgcaatctttatccttctcacactcacccatacacaagggcattgcgcaaaatttggtatacctttcattttacccatcacagaaattccgctccgggttatgcctcctattgaanaattaaggagattttcttctaagagaaggccttgtcatttggtataggacatactttaccattgacctacctattgaatatcccctcactaatctgacctaatttgtgttgcttcctcaacaccttctaggtgctaagatcaggtcaattaaactaaaattgattagaaagattgaacagaaataagacaacctttatggtanggagagtgtaggagtagtgtctcctcagaagttactagaaggaagcatttaaataaaacaacattaagaactccttctaaccaccccattg

SEQ ID NO: 10848 - DNA, 359 bp, Glycine max
  unsure at all n locations
aaaaacttgctgataccacacttaataccccctatggaagagcgcctaatgggaagcttttccgttttgcctcgaacacaagcgacctgtctcctttcacccctaatcatggaacagttatacatgatactatccaagctgttgtttgaaaacatcatgattaaaatcattcttatggaacccacaaaactgttagaaaatcctgactcacagttaaaagccgctcccaaactttaaacctcagttgctattcagtaaagcgagaacccgtataaaaggcatttaacccacttataacagcgaggtctgagccccctgacataaccgcaaatgaaataactccgacaggccggcgaccn

SEQ ID NO: 10849 - DNA, 205 bp, Glycine max
gcttgtgccacccgtgccccgaagacccctcattctatacatgaatgtgttggatgagtcgatgggatgtatgctgtggcaacatgacgagtctgggaagaaagaaagggtcgtctacaacaactactctttgcttgaaaggacatgttgtgccttggtgtgggcaacccatcgtctaaggtagtacatgcctagctacaccact

SEQ ID NO: 10850 - DNA, 359 bp, Glycine max
gtttgatccactgacattattacaacaacaatagtcctacatactacatgcccttagagtttagaagatttgtcaactggatccaaaaccatagcagaaaagaatgtaaataacatgtgaataaaaacctgaccaaccaaattgcaaatatgaatttgctggggaagaaaggggtagtcagtataagtgtaaaaccaagaaccggatcagaaatgtagaatgtctccctgtgatacttgttgagaggagcattgagagcaaatctctttggcaaatctggattagccaagaacaaacgaccgtaagcaacagatcagccctgtcttcagctactgcattgatcccatcttgcgatcata

SEQ ID NO: 10851 - DNA, 376 bp, Glycine max
  unsure at all n locations
agctagtgttttcttaccctgatgaggatgtcccatatgtgcttataactggactgattcatttgcttccaaagtttcatggccttgcaagtgaagacccgcacaaacatttgaaagaatttcacattgtctgctccaccatgaaacccccagatgtccaagaggatcacatatttctgaaggctnttcctcactcattacagggagtggcaaaggactggctgtattaccttgctccaaggtccatcacgagctgggatgaccttaagagagtattcttagaaaaaattttccctgcttccaggaccacagccatcaggaaggatatctcangtattagacaactcagtggagagagcctgtatgagtactggga

SEQ ID NO: 10852 - DNA, 514 bp, Glycine max
  unsure at all n locations
aaatataaggggatcanngcatntcgcacantctanannactgaagcgctgagacagcgagaacgctactcacgatgacgattaccaatgtattaaatgttttattcatatgatggaactcatcataaggacttagctttcactactatataaatcttctaaagatataatcttctaaagggactacgtgtacagacatgactagtcaatataagcagagctctcgtttccctacgtatacaactagtgctgtgaatgattgcattctcttgtgcctcttgcagacagaagtggcccacgaccaacaccccgaattatttctgagttacactctcccttttcaaaagagcgacaggcgatccgccggaggtcttatgtgtctcgcttctccctatgcaaatattctttgctgacacagtgagagaatcctcacgacatttccctctgcttagtacaagcgtgttagtaggctagacgactgtgaatatggttgacttcgcatttaccagcatct

SEQ ID NO: 10853 - DNA, 539 bp, Glycine max
  unsure at all n locations
ncctctacccaattcangagtntcnncannntagctcagacnccccgagactctctagagacgagctggaagactgccagcttatattaaagctgaatctatgaacttcaatgagttggtgcaatggtgattntccaccatggagatgcaacacaagatcaaggagaagaggagagaggaggcaccatccactatggaataagccatggaacgagaagcttcaccaccacgagagtgtctttgataagaagcctacagaggaagccttcatggacgaagacaatgacggagataaatagagacagacaagcctggaaagtttaagggagaacaggagaaaagtttgacttttaaagtgggcttaccagaattctttattttcaaagtattaccagtggtattcctgtgttttttatattctagggcctaactaaatgaaagctctcttgagaagctctcttgagaaactttcttgttatacctccctgagaagctatagcttatctatcacacacccctctaattatctctgctcaccn

SEQ ID NO: 10854 - DNA, 83 bp, Glycine max
tagtcgaagagaagttcaagtccatagccatcaaagtctgaaaagagtatgatgaactaagggatgtcaatatggccaccgat

SEQ ID NO: 10855 - DNA, 162 bp, Glycine max
taggaagcaagccgacatacgcccctttgtataaccgatctacatctgccaagatcataattgccccatgatagatatgccagctagagatgaactctagtgccagatcttcccatactcgagatgagtggggactggggagcgccaacccatatgggttat

SEQ ID NO: 10856 - DNA, 403 bp, Glycine max
  unsure at all n locations
acactattaatactcaagcctctatgtganaggatgtgactcttcacatttgaatttgaatttttatcgttcttaggcactggtaatcgattaccaaaacattgtaatcgattacagctttttgaaatcaattggaacattgtaaattcagttgaaaactttntcaaatccatcttgctattggtaatcgattacaataatctggtaatcgattaccagagagtaaaaactcttcgataaacatgttttgagaagaatccatgtgctactcagtttttgaaaaaaccttttcatacttatcttgattaagccttctctcgattcttgaatcttgatcctgattctcgaaagcttgatcctttgaatcttgattcttgaaatcaactttcatgttgaatcttga

SEQ ID NO: 10857 - DNA, 273 bp, Glycine max
  unsure at all n locations
cgctcgtcttcgttgcgcagaggtgctatacaggtatgtggtactggtgttattcggctatggttttggatcttttcttttaatattgttaaagttttgtatgctatcatgtaatcatgcatcatgagatcattaaatgagtgtgactatgacaactacttgaaaagtcaaccatgtccaatcatgtatcaacaaatgatgagaattactcanagtttctcgtgtcagctaaatcaatgacgaatattctatcgagacgatagctaatcccta

SEQ ID NO: 10858 - DNA, 446 bp, Glycine max
  unsure at all n locations
gtgagtngaaatttctaccataagtatatgtattttgtgaaatccatctggaacttgactctaattatcaatatgctgctaaagtttcacaacaatttatattttgtattaaaactctgtcccagttgttgcacactttataccatggcatgcagcattacatttgatgttctgctagacagtgccattagaattttgggtatcttccatccatatattgaagttttagacttagctagtacttttaccagaggaaattatgtcagtgaatgctatgctatgattctgtcctctttcatatataatatgctngcatgctcaaccatntattgccgatcaatttggttaaggatctngacaatattcttagttgtatcttggagtaagctacgaagaaaaataagatgagaagttagatgtatttgtagttaatgtctaattattta

SEQ ID NO: 10859 - DNA, 338 bp, Glycine max
  unsure at all n locations
agcnttgnctttttggtcttcgctggcgaaatgagcgaagtgggtctaacaagaggacaatatgatcatcatgctttgatcaatgcaaaaaanaatttgggcaaatgaagagggtgagaatgatggagaaacccatgttgtgactgccattcctatacagccaagttttccaccaacccagcaatgtcattactcatccaataacaaaccttgtccttacccatcacctatttatccacaaaggtcatccctaaatcaaccacaaagcctgtctaccgcacttncaatgacgaacaccacctttagcacanaccaaaacaccaaccaagaaatgaatt

SEQ ID NO: 10860 - DNA, 496 bp, Glycine max
  unsure at all n locations
nnnaaagaaaggtcaatccatgngacnctcgcannaccngaancatgantactcaagctcaatgtgacattgactgtctatgcacggacaatctcattgaatgtctattttgaacatggacaagagagtatcataagcatcagccatttggttctctttctaggaatgtgatgatatgatatatcttcaatgagttccattcataccttgatgtaagcttggtaggcatccaactatggtctctggtctcccattcacctttgaacagatgaattaccacactaaatcttctacactatgacaacttaaccctaaagtcattgttgcttggatcctaaggacatgctccgattctggctattatttggcaattgaaaacaatcaaccggaatagaaacattattgtctggcgaaccacactgccccattcgtgtccaatgcttagagcaccataaacatacaatcactttatttggttcatctcacgtcttctaan

SEQ ID NO: 10861 - DNA, 386 bp, Glycine max
  unsure at all n locations
agctagnttannnttcgttaaggatgagatgggaagtgaaaggaagacgcatagcanacaaacaaacaaatctttaattatataagagtaaaaaatcaagaatattttntagttgcttaagagggacaaatacagcaaactagaagcaacaagtaacacatcacatacctttttctgacttgatcccggaggagtgcaaagcaatgtcggtgatgccagtgtcggaagagtggaggtggcatccatagttgatggttggagttagaatgttggaattaaaactggaaagaacccaagtgcaagtagaagaagagtctcaaaagtcaaaactcattaataaataaagcatcatcatttgatgatcattgcatttgatggcctatata

SEQ ID NO: 10862 - DNA, 354 bp, Glycine max
  unsure at all n locations
catganagnctttctgaaattatgagaaatactgatacatttcattagaaatctacaacgtatgacttgatgttgtgttgaacaggaggttggtggagtggcatgcctacactgtcttatgacaggtatcacanactatcatttgctcttttgaatttgtctctgtgtgcatgaattatattattcctttctttcctttcttcaacagtcagttcttagccaaagttgaggagatgttccccaaagatgctgaattaattgttgtatgccagaacggactgaggtgagattatgcattcagttggtgattgacactcatggagttgttctgatctaattttctgtacttaaaat

SEQ ID NO: 10863 - DNA, 323 bp, Glycine max
tcataactaagctcacctactagagaaacttgggtaagaggattcctaaggaagctagagcttgagtacacgtacctctctaatagcgaagctcacctccttgagatgagaagctatagcttagctatacacgcgctataatagctaagctcacccccatgacgaaaaacatgaaaatgcaaaaaaagtccttactacaaggagtacgtggagggccccgaaatgcaaggctagagccctatgctgctagaatggccaggatacaaggcccagacgaaggataaacctattctaagatttacaaagatgagcgggcgcatact

SEQ ID NO: 10864 - DNA, 474 bp, Glycine max
  unsure at all n locations
actaagccactccgcacaatggtgacctcttggaaatgaagaggaaatntttctcttttgaagactcatggacacttatccctgatccaactacaattcgtgtgtaaggtcagccaaaatgaactatgataaggaatgtgatggattggctcgaaccatctgagcactgacaacaatgtagtagatgtggaacagaaggacacaatagacgtcaatgtccaatgcaatatgaacgaggaagttgctaaattaattgatntatgtatttagtttgtgttcttcaatgaaatcgtagctatccatgattagtttgttttgaagttatttattatgttatttctgtgcacgacataaactgcatccattagtaaatcttcataaaataaacaatcatacaagtctcanattgatatgacaaacatacaacaacatatttaaatagagacatnaaaatcattcattatgatgcccgtg

SEQ ID NO: 10865 - DNA, 269 bp, Glycine max
  unsure at all n locations
ttttggtagaactggggtggaaactgaaactggtgctttcttacagtgttaggatgtgtcatatatgtagatgactcttaatatcagtgttgtattttttaaagattacnaatacgcatgcacatgctttctgtatgtgttgtcaactacaccaatgacgtgacatgctttagctngcatcagatctgcatgtgtagtcatgctgtgcanggtcctttcacgcgctntatgttaatgcagaccacaatntatcatacacgggttttcac

SEQ ID NO: 10866 - DNA, 289 bp, Glycine max
  unsure at all n locations
atacttctctaatagctaagctcacctccttgagatgagaagctagaacttagctacacaccccctataatagctaagctcacccccatgacaaanaatatgaaaatacaaaaaaaagtccttactacaaagactactcaaaatgccccgaaatacaaggctaaaaccctatactactagaatgaccaaaatacaaggcccagacgaagganaaacctattctaatatntacaaagataagcgggctcatacttagcccatgggctcgaaatctaccctaaagctcatg

SEQ ID NO: 10867 - DNA, 510 bp, Glycine max
  unsure at all n locations
aaggccnngggnatgctaccgtgcatngcaacactnataganaagcnncccgagcagcttgagcttagctacacgaggggatggaaaatcttgctcactttcttgagaagcctccttgagaaggtagagcttagctacacacacccatctaaaaactaagctcacccttcttggacaaatacatgaagatacaaaaaaacgtccatacttacaagactacttcaaatgccctgaaataccagggctaaactctatactactagaatgggcaaaaacaaggctcaaaagaaggagaaacctatctaatatttacaaaaaagagtggatccaacacttgaccattggctcaagaatctaccctaatgttcatgagaacacttagggccttcttagtagctctagcccaaccacttggagtcttatttccatgtaaatgcaaagattatggggaatcaaagtggatcaaggtgttngatgaaacaatgatataacaacatagatgacaacgcg

SEQ ID NO: 10868 - DNA, 207 bp, Glycine max
acctgagggataggaatggtgaggtgaacaacaattgtgacctggactaggcctgcataactcttcatgctgataaagatcacatggaggcaactctgtggagcattggcattgttggggacaggagcgataaaaggaatgatccacatggtgtatgctgctcggaggctcaggtaaacaacgcacatgtggaaaattatgcttttg

SEQ ID NO: 10869 - DNA, 380 bp, Glycine max
  unsure at all n locations
ttctgccttcttctatcctcagattgggaatgcctctaacagcacctttgtcaatgattttcttcatgcctcttaagtgcagatgtccaaatctntgatgccatattctgacttcatcttctctggagaatagacatgtggaggagtaactggtttcttgatgtgtccataggtaacagttgtcctttgatctactgcccttcatcagaacttcactcttctcatttgtcaccaagcattctgactttgtgaagtttacattgaatccttcatcacacagctgactgatgctgatcaagtgtgcagtcagtcccttcaccagcagtactttgtccagactaagaagtccatcatggactaactctcccattcagagatct

SEQ ID NO: 10870 - DNA, 316 bp, Glycine max
  unsure at all n locations
atactcaagctngagatgacgaagtgtggaagggtgaaacttcctgctctttttgttaccacacagaggtacctgcagatatgtcgatgtgtcaagagaccttgaggacgttaggtggggtgctattgcccataaccaatcttgaccaatacctacccaacacgggcatactcggtcaatgagaacctgcgatgtacctaatcaggcgagctcctggccgtcaacagataaaatgaaaacaagaccactactccaggaagctcgtggtgggtggccagctgcgaagtttgtgtaatatgctgattgagggctctgg

SEQ ID NO: 10871 - DNA, 400 bp, Glycine max
  unsure at all n locations
agccttcacatttcaatttgagcgtctcgtaatattacgggactcaatcagacatccgagtaaaaatttattgtcgtttggattggctcagagattcaacattcaatttcgagcgtctcaatatattacgggactcattcagacatccgagtaaaaagttattgtcgtttgaattagcttagagcttcaacaatcaatttcgagcgtctcgttatatcacgggactcaatcagacatccgagtaaaaagttattgtcgtttgaattggctcagagcttcaacattcaatttcgagcgtctcgatatatgacaggactcaatcanacatccgagaaaaaagttaatgtcgtttgaatttgctcaaaggttcaacattcaatttcgagcgtctcgttatatt

SEQ ID NO: 10872 - DNA, 417 bp, Glycine max
  unsure at all n locations
ctgcagatntggtcttcgccagtgaaaggatcgatgtggtttcttataaaaggcaaatntgatcatcctactaggacgactgagataactggggcaaataaagagggtgaggatgagggagaaacccatgctgtgactgccattcctgtacggccaagtttcccaccaaacccaacaatgtcattactcagtcaataacaaacctcctccttacccaccacccagttatccacaaaggccatccctaaatcaaccacaaagcctatctatcgcacttccaatgacgaacaccacctttggcacaaaccanaaaaacaccaacaaataggaattntgcagcaaaaagcctgtanggttcaccccaaattccgttgtcatatgctaaacttgatcccatatncactcaataattcaatg

SEQ ID NO: 10873 - DNA, 390 bp, Glycine max
catggaaggacttggcaactgccttcattcggcagtaccagtacaatacagacatggctcccgatcggaaccagcttcagggtatgactaaacgagagcatgagtccattaaggaatatgcccagagatggagagtgaaattctgataccaggggacagatgtcgtacaggatgtcacgacatcacgcttcagaacatgcagattgtatgtgtccgtatgaacagattaaacaagtaaataacacaagagaattgtaacccagttcggtgcacctcacctacatctgggggctaccaagccagggaggaaatccactctcaatagtgttagttcaaggtctaacaacccctgtttacaaccttctcacctaaccactacccgtgcgatct

SEQ ID NO: 10874 - DNA, 391 bp, Glycine max
  unsure at all n locations
ttacgagcgtctcgaaatcctacggaacacttattggacatccgagtganaagttattgtcgttgtaatttgctcagaacttctgttttanaatacgagcgtttcgatatattacgggactcaatcggacatctgagttaaaagttattgtcgttggacttttcttagagcttccgttntcaacttcgagcgtctcgatatcctacgggactcaatcggacatccgagtaaaaagttattgtcgtttgaatntgctcagagcttctgtnttcaattacgagcgttttgatatcctacgggacacaatcggacattcgagtcaaaagttattgtcgtttgacttttcttagagcttncgtttacaatttcgagcttctcgatatattacagg

SEQ ID NO: 10875 - DNA, 360 bp, Glycine max
  unsure at all n locations
tctcaacatgaatacgagcaatgcctcttgcgcattctaagtttatttcagtcgagtatcccaatctaaaggcaccctatcctctcctcttttgcctgaaatttgcagaaagcagaatggcttttacacgcaaggacagtgtataaatgtagtcgtgtaatgtactaaaatagcattttcaagacaaattatntatttacatagtttgaatcttgacttcttttgcaaaacagaatatattgtgtgtaaggtacactaagagtgagaaattgcaagatgtttctaactatggnggcattaaagttatacaagcactcaaatattgaaaatgcacagaaatatcaacatatttactttcct

SEQ ID NO: 10876 - DNA, 209 bp, Glycine max
cctcagaagggatagtggttgaagataatgacaaaatggaatacgataattctaaagaatcccacgaagaattatctaactttgaaaattaggaagaggaagaaggttatgcctcaactcagaagatggactagaaaaaagaaccaatcatgttagggttgaagaggattacagtgctttacttcgtgtttgaatcgacttttatcact

SEQ ID NO: 10877 - DNA, 519 bp, Glycine max
  unsure at all n locations
ggccagggaacttatccatgatgattctngaactttgagtcagncttcagacgcatgtgaacctggggcatcagtggtgacaagnagcnnngtcnctttgtctacaacaccaccataaccgtggggtggtgtttctttgattttggccttgaaaacccctcatttagaatatatatatatatacgtgggtgcgccggtagggagcgcagaagcaacaaatcacgtgccactaccccttacatacccactcatacttatccaagcctcccaccgcgtgggagtaccttcgcgcgtcgtcaaatatggatcttccggcttggggaaactcaccgagtcgtggatgatcaaccccactcggaatataccgatcgttagagaccttctctcgatgggagcgcgtatcacatcttgccataccactccggcctgtctgagtcgcgggaaaagaacttcatagatacctttggggggaggaatcaagtcgccatgacaatctacatgtaattccctccgttgccc

SEQ ID NO: 10878 - DNA, 502 bp, Glycine max
  unsure at all n locations
agcccgtcgggtctttgtantctngctagtgagcagcacccgggacctcaaaggcaccggcaggcaggcagcnttgtagtntaggcgctacagaaaacgggcgaggtccaagagctatgacacacccgcggcgcgaggatcggcacagaccatagcctgcagtggaagtcggtctgagagcttgcgaggactctgtgagacggcgcgagaacctagaggtgacggagacatcctcaccacgcgtatcttgcaatatcgcacctagcgcttctctacggggcacaggaggcctcccaggtatggaaagctagaatcctctattggatcttccctgcacgtaccatatgtgaacgtctctctatccatctagagatgttcagcgtgccactgagccatcacgcgtcatgactaccgccgatgcccagacacgttatgccggctcgggagggcatgcacactccaactgcccgcacagggacgccccggacgggcaacgtgcacc

SEQ ID NO: 10879 - DNA, 510 bp, Glycine max
  unsure at all n locations
agagagtggtgancctgagcnctccanancncacacnatagaagacacaagctcganctgnctatnaattatgatctagaaggtgtatctttcactgttcaatcggaggactcctcatagagacctggatctatctttcaactgtttttcacgaaaactttccaattccattaaccattagaaggctcttaactatctggatnttcattcagctgaacttaaaagacctattgctttgtgtttatcttatctcacttggacctttgttggaacaatntcngccgtgagattccatcatcactttcaaatcctcaacatcttgcatacattgtttattctcataatagcttcacctggagccattgctaaatgtcttggaacatcgcacaagtaaatcgttaggggctcggttcaataacttacgtgatgagatccatcattacttttcaccctcagcatcttacttaatctttatataatatttggtggtaaatcaccgattgttgacct

SEQ ID NO: 10880 - DNA, 284 bp, Glycine max
  unsure at all n locations
agcttgtaattttgaaccatantcatgactgcaaaggacaggagctacccttctctgccaagagttcatatcatctgattcatcctcctacataacaaaaattggagtgagtaaggagagatatcaattatcaactaaacccagacattaatcaaaatgccacatagccccacaccattgtttccattgaatcattgtcatactgccccaactgctccgacttaattaaagcatctgaaggttgctcaaatcctgcaatcttgagcaaccaagcttcagtatat

SEQ ID NO: 10881 - DNA, 164 bp, Glycine max
tgggcacacagtttcccgatccaaatgcgcaaaacccaccatccctgatgccacctccactgagctacgtactccacgtaccatatcctcgttctctaacatcaggtccatcaatctccaagctccccacatcatgtaataacattcaacagcacaactatcac

SEQ ID NO: 10882 - DNA, 279 bp, Glycine max
  unsure at all n locations
ccttttttttgggattcttttttcgtaaagtaccggcacttacgaatttcgtaacgatacttgttttctttccgtaatgttgcggaaccttgtggattacataatcatcccctttttgacttacggaatgttacgaaacctcactaattgtgcaacgatgcttccatttgaattctggtgtgtcacggaaccttacggattgtgcatcaatattttcttttgtttccagcacgtnccggaaatttcacaattgcctaatgatgggtgacaagcacctta

SEQ ID NO: 10883 - DNA, 425 bp, Glycine max
  unsure at all n locations
ctaagctcgaccgattcccatggtgggctcgcaatcgatcaacatgtgttctttactgttctccctatgattttacctagtgagagtgacctaacttaccagtgtgtggtttgttttgtcatatactcgtaggtgtttgatgaggattttcactgacatgatatcacattatatataggattgagtcttagtgtatctgctgtataacacatgtgtaatgaatcttgtgatgatttcgaaccttatgttcgtgggagcacatggttaggtggatgattataaagaaccttgtgctagaggatgctgaaacacaacgctatgatangatgtgacattgaaacatgagtntctgtattatttgcataatatgtcgaacatgttactttatgttatttcgctaattaacttgttccttttgtaaaaaa

SEQ ID NO: 10884 - DNA, 545 bp, Glycine max
  unsure at all n locations
nnnntttcccttagcatgattnctggcaatttagctacgaccccgggatcctctgagtcgacctgaggcatgcaaccttgacgtgttattattccagtgaccggnaccaagaaggatgaganagaccagaaagtcttggtatggtgtggtgcttatgggccatggggagtggccatttggggaaagtgtggccgacagagatcttacgtggactttttgggacccctagatgtaagaatagagaataaccatttaacaaaaaagaatgtacagcgccagagaatataaagtgggagctacatattgaagaaagagaaaaacattctaagacggttnttacaaaaccgtcttggaatgacagtcttctaaaacgatgttcacaaaactgtctttgttgaanaatccatatttacaaaattgtcactgtcttatatactaagacgattcttgctgaacgttgtcgtttcgctgtcgtanaacatgctttttctagtagtgttcagaagggtattatgtttgctanggatcttcatcttatcaatgcn

SEQ ID NO: 10885 - DNA, 311 bp, Glycine max
tttatatgtgagagagcattttttaagagaatcatgttgattgtatcatatgtatgaaaagtatggcaattgtacttgaatcttgtatcactttatacaaattagatactcttttgatgtaatattagatagtgataataggaaatataatgtggttttgctctatagatgctgtatacatttttcatttattgcaaattcaaagttatttgagccagaaggagggctttggtcttgcaagattgaaatgaatgtgaataggtattttccattgtgtattcatgaaatttggttggtttaattccttgtct

SEQ ID NO: 10886 - DNA, 359 bp, Glycine max
tatggaggctggatctttgagcggcgtgaggtcctttaatggtgattctccaccatggagatgcagcggaagacatatgagaagatgtgagaggaggcaccatccactatggaatacaccatgaaagaaggagcttcaccaccaagatgagccttggataagaagcttggaaagatggttcaatggaggacaacaacgagggagataaatacagaggggggagcacgaaattgaacgaatgaacgatggagagaagtggcacttgaatatgtctcacaatactctcttcatcaaattcaacaagtgtaccatgctttatttatgactggaacttccttgaaagcttcttgaaaaacttc

SEQ ID NO: 10887 - DNA, 488 bp, Glycine max
  unsure at all n locations
aaacgaaaggaggggatatatactcacnctagaatgcccaggtcgcccccccacnctactagataagggctgtattttcctctgtgcaancccctgcaccggtgggaccggtcaatcctaatcggacaaccttgaagggggtcacattaaaaccaattanggtgtggttgtggaaccaaaatattaaaaaaactaattttgattcgtaacccgagactatcctttacaccattaacaaataatgtgtaaacagcatactataaaaatatccttgcacagctcctgatttatcaaaagtgcaagctctggtgccttcattgtaaactcgcactgtgcccttcaatagacagatgagatggcttcatgtggattccgcattntcgtgctcatattgtactggccgatataacttctcagaatcaatttggttcccaaattttctagacctatgagaaaaaacttcttggacttgtcactatacaagaccg

SEQ ID NO: 10888 - DNA, 371 bp, Glycine max
  unsure at all n locations
ttttggtggcctttgagaggaaatggcagaagggattntcctgtgcactagtgaagatagaagcatgttctcaactcaactacccaacaaaagggataagagactgtccgttgagacttgagaaggttctttctattgcatttttcctaccctgaattcttctatgattaccacgttacctttgcctctttgaagagcccaagcctggagagggaanatgtcatttaacttaacccatgccttacatgataagtcacaaaattcctagaggccgttatacaatgagactctatgcacaatagacaaatcaactaaccaatatcacacacacattgacgttcttctcttaatgagataacaacactatgaca

SEQ ID NO: 10889 - DNA, 281 bp, Glycine max
  unsure at all n locations
aaactattataattccttggatgctcatangagtgatttactctcctgtcattggaactaacctagggtgtaaatatgatatttgcatttcgaaagactatgttttacaaagatctaaaactattcatttgatttttcctgccaaaatctattgggcgatctttcttgtctcatcagacaataacgctgatgttgtataaaaaagatgttcaactcagttagatcacaatccaaccctcattctagagatattgatctatatcataatgattcatcatatc

SEQ ID NO: 10890 - DNA, 191 bp, Glycine max
gcctcattcctgataacagagacaaaatattaatgttgtgtaatagatagcaaaaaaaagttaagaaaaatgaaacaaaaaaaaaagttattaacatatcctctatttatcttttaacgtgaataatgaccgtgctgagattagaacctatgacccaatgaattctatcccaatccctccaccacaatatg

SEQ ID NO: 10891 - DNA, 276 bp, Glycine max
  unsure at all n locations
acatattctgcaactgantacgagccgtcacaggtgggtgattgcatatgaatggacatgtatgatgactcatatatagctatacactgaacatacactatgcgtatgatgatgattctgcgtgataagtattagtagtcaagctcctcagaatgtgaagggaggacagcatattgtgaggcatggagaacacctgagacatgtacatgacagtgacactagcatgtatagctgtatcaactatgtatacgtgactcactattcacaaggatccct

SEQ ID NO: 10892 - DNA, 387 bp, Glycine max
  unsure at all n locations
actcttgctcgagaatggagaattgcactaagcaatcactacgcatagctctcttactcgaaggtggaggacacatgaacgagaacacaattcatggnngctccgaaaaggggttgagaatggagaattacactaagcaatcactacgcatagctccaaacttgaaggtggaggacacatgaacgataacgcaattcatggtgctccgacaagattgagaatggagaattgcactacgcaatcactacgcatatctccaaacgcgaaggtggaggacacatgaatgaaaacgcaattcatggggctccgaaaagattgagaatggagaattgcactaancaatcactacgcatagctccaaactcgaaggtggaggacacatgaatg

SEQ ID NO: 10893 - DNA, 233 bp, Glycine max
agcttcattttgatctctaagcgacaccttgtccttggctgagcacgactcagagtcgctaagcgcaattccttacggtcataactgaggtccatgaagttaagcgccattcatggcagctaagcaagattcattgcggcagtgtgcacgctgagcgagtccttatcagctaagcgcatgctcctctgtacttaacatgcatcattttagctgagccacccatagtgtggctt

SEQ ID NO: 10894 - DNA, 420 bp, Glycine max
  unsure at all n locations
tccatcacagtgagactaaataatggtagaggaggagtgtttgaccatttttgttaaaaatttcctttggagactaaaagttaaatttcaattaaaaaagtataaaaaccaaaaacataattagtcctatagattattatctattattaaattattatattaaatactaaattaatagagttaataaccgcttaaggaaaatttcacaaaacggacaacaataggttacaacatagtcatacaagataaactgaagctttaattattgtntaatcaaataaggcgcaaaacatacaacaatatgttacaacaaggtctatatcacctagtcactcaagacaattatagcctcactgctcatctctcttgtgtcaaccacatgtccctttataccatcaacaacaacgacctttggcattt

SEQ ID NO: 10895 - DNA, 371 bp, Glycine max
  unsure at all n locations
agcttgctattggagcttctatggaggctggatctttgagcttcaatgaggtcctttaatggtgattttccaccatggagatgcagcggaagacaaaggagaagaggtgagaggaggcaccatccactagggaataagccatgaaagaaggagcttcaccaccaagatgagccttggataagaagcttggaaggatggttcaatggaggaaaagaaagagggagagaaagagagaggggggagcacganattgaaggaatgaaagagggagagaagtggcactctgaagtatgtctcacaagactctcattcatcaaagttacaacaagtgttacacatgcttttatttatagactacgtagcttccttga

SEQ ID NO: 10896 - DNA, 507 bp, Glycine max
  unsure at all n locations
aagggaaggagaagctaggcatgcatntcggacanttatanannnaacccaccgtacaacanagagaagagaataatggggagggaagattttctttactggggaagcccctacaccgggtggaccttacaatcactcacagactcatctcatgctgttaggatggcttcttcttcgctttcattgctctttcaggatatgtataacagatgctctcataactcatcctgaacttggaccttttctcttctacagatatctaatcatgcacaagcttagagaattgccccaactccccttccatttctgatattaggcttagataggatggcttgttggggctcggccgcttaacgcaactttggctccgttaacgtgcatagatgaatcccgcataatggccaatctcacttgagtctgaaatgaatgtgcgaggcaaatcttgtaaccaaatttactgatctagatagcgaattctactatggtctatccattattccaaaacag

SEQ ID NO: 10897 - DNA, 199 bp, Glycine max
agtctaccaaagcgaccaagatgggtaatatcaaagggtaataggttatgattattgcgcttacacgacaacatggttagcccacacatacatgttacatgtatatgtgctactacgtgatgatatagtggtgtagtcaacgcagctgtacttctaggagcataacacactgcccccttctactcctataagttctata

SEQ ID NO: 10898 - DNA, 291 bp, Glycine max
  unsure at all n locations
aagctgacacattgatcccactactaagagagcgcatgacgactctatacccatttcataancncctaacacaccaacattacagaggtgttttcaaccaccaacaaaggccccatgtaccaattggaattcatatgcaaccctaatcttgcatgtccacttcattccagcaaaaattacgagaataatattgtgaagctattagatatggacaatcttgtaatttctatacttgacagagtggtaattttctttttcaatctaaaaatcaatattctattcatagtatta

SEQ ID NO: 10899 - DNA, 311 bp, Glycine max
  unsure at all n locations
agcttgtaaagggttatacatgatacatgtcaaggcttggtttggttcaaggataaaatggatgccccacattatttccatgacacaaatgcaaaaaatgatgatttggaaattttatgcaaaactggtcatgcatgcgcctatgcggacgctcaagtgtcaaatttttatggtcatgtgatgctagggctcaggattcatttcctctattntagtcaacccaatatttccaaaatatgttcttttatcaatttgtgcattcctccaagtccatttcgggcgtccggggaaattttcacagcattcaccct

SEQ ID NO: 10900 - DNA, 348 bp, Glycine max
  unsure at all n locations
ggacactactcttaaaacaagaatggcatacaacctcctcccataaatacaaacatcaatgtaaatttagagcaagcttatgcgcatgtttccttacgaacgttcacttgcggaagacatcctattaactaagaaaaatgcacccatatacaatcaaggtagcttcattacctagattatntacatgtacctccaaggtgtatttgttatttacatcacacacacctccttggctgaatttacatacatgcataactcaaagcatttggggtaccaaaaactgcacatgcgctcatcttggtatttctaatacccctacatatacaaacttcacgatgaatcttgact

SEQ ID NO: 10901 - DNA, 425 bp, Glycine max
  unsure at all n locations
agagcgtcatcctaganctcganaccagaacatanatactcaactgctaccctggaactgctattctgccctcttttggttggccatctagatggcctgatttctcaggtcacttgacccattctaccactacaaaccctaaaaactatttatctaccaaacgtcacttcttatattgcatagaggtgtttcctaagactgaagaacttgctgaatgtctagtgatctcacgctctacttacctaaatatctcaaataacactacaatctacctatgaaccctaaacatgatcataacctataaagtgctggtgctagtgacccaaagcatactaccatcatacaacaaacttgtctgaagcgtttncactcataccttttcatctgattgtgataccactttagaccattttgaaagatttgcg

SEQ ID NO: 10902 - DNA, 325 bp, Glycine max
catcttcctcaacctttgtgagtggagactccattgcattgaagcgcatatccactcgcaaatccaaagtgtcaaacctctcacccacacacggttgaagaccatcaaacctgtccttcttcaacagcattgctagcaccctatttcagccatgagccatcatgctcctttatatacccaaacgatgctatgactgaagcgcctatgatgaatgatcgattgattggaacatactgttcacaatcaatagggatgttgaactgttgacggagaatggtaaccaagatgatgataatgcgatgtggcattcaatcgcaatgcctta

SEQ ID NO: 10903 - DNA, 437 bp, Glycine max
  unsure at all n locations
ggaatctgactaagcttgcatnacggaccatagatactaagcttgctgcagcatttctgaactatcggtagatctattctctcgatatgatgacctgcaacttgtctgtagcgagaacaaagagggattgactcaccttatcctacattacaggtttgcagtcttacagcgctgcagatctcaatgctatatctttgtgggcgcaatagagttttctcacacaccaatgtagacttctctgatggagtgtgaggttctgtaattctttgaacgcaccctctactacttggtgccatgcatcttaagttctgacctactttcatatataaaaaaggaaacggatcattaactccttgagttaaacactacttcgaattcactcttacttggtatatactgatgactgtcatctatgctaagaatagtagtacatgctt

SEQ ID NO: 10904 - DNA, 514 bp, Glycine max
  unsure at all n locations
gcggggcagaggacggtgatcncttagtaccgtcactcagttagacccgngccncttaagtcacctgcggcatgcgagcgaaccattttatactttgcgacctgacgnacggcgccggaatatttgagtgaaagtaccatcctctatcctaaatgagccgtcaatctgtcgacatggagtcctaactttttattctcctaactatagtatgaatgctatgcgatgcaacaacctaaaacgcgcgttgatctatggtggccaccctctactgctagaagatgaaatattctcatcctgagcaaagtgcanagctagatacttagtctcaatggattgcaggcttcagctacactttncggacattgtttattcgaaacgttcgtgatacccacaggccttttgcgtgggtgataaccatgacttatcttaagatgctaccacaatcccctttgacgagcataggctatgagcctctcacatgaataggatggtactcatgccccacaaataaatt

SEQ ID NO: 10905 - DNA, 245 bp, Glycine max
ggttgttaatgaatgaagccggctagacggaggagaagtttgactacgcccaggggttgcggatctaatacgctattcgcccatatcgctatcactccaaagagcatgatggacttatactcacgtgaatagagaacactcacaaatttatgtaatggaacggtcattcacgccattaagcacgataaccacttgctgttcaaccgtcttacgtatatccgcacactcgtgatgcttgatgaagc

SEQ ID NO: 10906 - DNA, 218 bp, Glycine max
  unsure at all n locations
tactcaagggacttgaaattcaagctccaaaaactaacccaaggcaacaagggggttgaggagtatttcaaggaaatggatgtgctcatgattcaagcaaatattgaagaagatgaggaggtaactatggctcgatttcttaatggtttgactaatgatatccgtgatattgttgagctgcaggagtttgttgaaatggatgatntgcttcacaaagc

SEQ ID NO: 10907 - DNA, 504 bp, Glycine max
  unsure at all n locations
nnnnaaggggtaaatgangcnttcaccactagactaagcctgagcaatctaacgacatacttttactcgagtgccgcttgtttccgttaaaaaccagacactccggattggtatttggaacctctaaccaattccaaccaacattaccttttaactcggaggtctgattaagtcccgtaatatatcaagacgcttcgaatggaataccgaagctctgagcaatatcaaacgacaattactttttatctcgatgtctgattcagtcccgtaatatatcgagacgctcgaaattgaataccgaagctctgaacaaattcaaacgacagataattttntactcagatgtctgatgaagccccgtaatatatcgagacgctcgaaattgaagaccgaaactctgagcaaattctaacgacaataactttntactcggatgtctgactgagcccnggaatatatcgagacgctcggattggatttcgaaactctgagcatattctatcn

SEQ ID NO: 10908 - DNA, 526 bp, Glycine max
  unsure at all n locations
agggaagttcgatcttgatantcnnccattttggaacnatcggcgnactctcagaggcccgcagaagagtagcagcaactnttatctgtgttgcttgngacatgatcaccgggacatgtttggtgatatgtgagcctcacccacataggatatggtctaatctttaccagaatccattcatcatcctcattgctgttctttcttacatcatccaatgattcataaaagatggtcttaatgattgccattgcacatgctcacccaatggtcacttatcaaatacagtataccatggccttatagcgggtgacccatgactacataaacacctaaagtgtcggtcatagaaccatattgaagctttgcaacgtcatttacttatataataatacctatcatgcggagatgngttaccagattcacaagactgatatacgttatatgcgaatcttacctgaaactctcatatggaatacatgcttatttactgtactaacaccttatgccatataaaaagaatcatccg

SEQ ID NO: 10909 - DNA, 256 bp, Glycine max
  unsure at all n locations
accaaaggttccaaaacacaaattcagggctcctttgaatcaagatattgatagatatgcacaaaagtttccatatacaccagaaagcttctatcagaaagcttcttataaacaaatntatttgaataaagcactaatatctcttttatttnttcctgttgcgattgttattgatgatgcaacctctgtgctctgtgttgctggtggctatgtgaagaatgctgctgaactacagttcaagataagagagctatat

SEQ ID NO: 10910 - DNA, 155 bp, Glycine max
aatatgttcttttatcaatttgtgcattcctccaagtccatttcgggcgtccggtgaaatcttcacagcattcacccttcaggtggtgacaccgttgttcttcaaaaatcaggtatgatcaatgaattttttttcatagaagaagtggaaatcat

SEQ ID NO: 10911 - DNA, 289 bp, Glycine max
  unsure at all n locations
aattttctcctattccttaaccctttttgtcaccaatttaattactgattaactctaattgtcaaatttattattcagctttatcaattgggcccatttgacntaattggtgtttttaattcaatttcaggataattataagcaattgggctgagccagattggactagaagagagcaaacaattntattagatttcgtctaatttcattntattgcgttcaatttttatttcgttttaggccaaaataatgtaatcaggtccagtgactttgagtgccctttaaaaat

SEQ ID NO: 10912 - DNA, 444 bp, Glycine max
  unsure at all n locations
cagatttgcatctganatatcaagcaatggttagtgaatgncatgatgtgatataacattattggatgacatttaagatttcatttattactctatgtttgagatccattntacagaggacatcctcttaggatctgtcaaatcctatgaagaataaatgaagttcgagatctgaaagttgtcaaacaccattaaaagatgcgcactgcttgtgatagatgtgcttgacttanagcaagtagttttctgctgaagtgatcaactcanaagctcacaaaagtgatactaaacatagtatctatggtagaaatgaactagtataaatctgtgtcttatatgctttttttactcttctgctttaactaacacagggtttgaattggatttattttgaaattctgctatttgtaaattgattccatcgctaaagtgttttgcaaaatc

SEQ ID NO: 10913 - DNA, 395 bp, Glycine max
  unsure at all n locations
gagctntcttcttatgtcttcacaaataatcatcacacagcaganaactaacaaaactacccctcatatctcccagaaccccatacccacgaaatttaagagagaaagaagtccacccaaacctggattttcgaagtcccactcgtagccacgcacttcacgaccccgaaaatgccctcctttcgcgatttggagcagaaatgagcaccaaaggttggagctttgttggggtttcaatggagaatggaggagaatgattaagcaacgtgaggaagaggggagagcttctgaatttctgttttggctgagtgaggagagagaaaagctttctggtcttaaataanaggttttcctctttttctattattttattcaagctctaccacatgtcccta

SEQ ID NO: 10914 - DNA, 502 bp, Glycine max
  unsure at all n locations
gaggcgctacatgatctcaccacttganaattacccnnngnccatnnatagangagaagtgggaggcgcagccttcttctatttatgagaccgaaggggatgtgagngctgtgatcattcattagcgtaacatatacatgatctagtggcatgctcaccacagtatgttcctttaggactactcactataactacaatagcgcaaacgcagccactatacgcccgatgcgaatgaaagatgggtgatgaagagggagatgacggaccatatgaatgacgatgtgtgggctatataagatctatggcttatgtgaccgactccatgctaaaagatattattcaacagaagacgatggtacagatggcgcttaccgcacaactagggaagcagaccagtgctacttcccgaagtgaactcgggcctatacagaatctccacaggttttgaatctaatgtatggatctcaagcgtaccatacagcgtgcctcacacttaattccg

SEQ ID NO: 10915 - DNA, 441 bp, Glycine max
  unsure at all n locations
agcttacagttgtccataaccacatgtcactgcacttacaacaatgcatttcaaaccgttaaaaccttggtattgatgaaaatttcacattcataattgattcactagcttcttttcagttgtgtcaaacaacccatggacaaatgttgcaaataagaaactaaatagcatgccttctgcaagctataacccatgtgacacttatcatcttctgaaagctataacctttataacaagtgcaacatgcctttntctccacaaaatggtacggcaattgcaacatattgtggctctgaagttgttatatatttatttatttataaagaanaaaggagttgggttaacagaagaacaagattgatatggagaatatgcgatctatctcacaaattctgatagttaatgcaaagcaatttaatgatactagctagtatatgtagt

SEQ ID NO: 10916 - DNA, 353 bp, Glycine max
  unsure at all n locations
cattcaatttcgagggtctcgatatatgacgggactcttctgacatccgagtaanaagttattggcgtttgaatttgctcagagcttccgtattcaatttcaagcgtctcgatatattacaggactcaatcagacatccgagtaaaaagttattgtcgtttgaatttgctcagagcatcaagattctatttcgagcttgtcgatatattatgggattcaatcggacatccgagaaaaaagttattgtcatttgtatttgctcagagcttcaacattcaatttcgagggtctcgacatattacgtgactcaatcagacatccgagtaaaatggtattgtcgttttaatttgctc

SEQ ID NO: 10917 - DNA, 518 bp, Glycine max
  unsure at all n locations
aggggatgttgatcttcgtcgtcangcattagatanagaccgcgcccnctcanagacgacctgaagcatgcaagcagnattccttttttgtctccaaaccaacaaggggcggttttaatacatgaacgatactccaacccgctggcggcgaccctggtttcggcctatcttgtggccatgatggcttcccatctcataacatgtctaatgcctaatacatgtagcccctgatattctacatcggctctctacatgtgtgcaatgctgcgttttcaagatcaaacactatgagttagatgcctcgatcaccgaacctcactcttttagatactagattgtctcttgctccccactcatagaagctactcttagctatacgtaaagacctacatgaacggttgctatagcactttctagagagttcttgacaaaacaaatctggtggtcgtgtatccctgaatagggagaaccattactaggctctgatatgtgattcctacggtggtgagggaatgtcg

SEQ ID NO: 10918 - DNA, 318 bp, Glycine max
  unsure at all n locations
tcaagtggtcgcgatatactatgatgatgttccgagtactttggatttggtacgaccatgccctcctgatttccagctgggaaattggcgagtggaggaacgccccagcatttacgcaacgagcataatgtanacctttacngttntaanagctctatagtcnggcctaggctttagagttnttccttttgttaaggctntgtgtcttttgtttttgaatttataatacaaggatctttcttcatctgttcctacgtctctacccattctcattcatttgcatgtttacttctttttctgaaacggcagatccgatga

SEQ ID NO: 10919 - DNA, 251 bp, Glycine max
agctctagtgtttagttttactctcgccttttaccactcagggcctctgaagttcctggatgaatcatattaaacacacaaggtatataacaggaaagacagtctaattatcactgagtagcacatctaattgggataacaaatcacaattgatgctgggtaatggactagacttgatttggattcagatccgaattggataacagattggattggatctggataactgactagacttgatttgatttgga

SEQ ID NO: 10920 - DNA, 295 bp, Glycine max
  unsure at all n locations
aatcactcccgcattgtatctctagcatgctttttatgttggtctcgtcctttgtcacgggaagccgggaggtccatatcaccttcttaattgtacacatggggcactgcacccncaaatgcacatgtaagaagagataattttccgggctctcgtgtccgtaaaatgcattcatatcatgcatcgcataagcatctcttgacaacatcataatggacatatcctgcatttgtccagtatcatattccagcctcacattgtgcatgagtcatggcatcatcatgcatatgcgttc

SEQ ID NO: 10921 - DNA, 383 bp, Glycine max
  unsure at all n locations
agctttgatttaagttggcttgctcattgntntctcgagcaatatgttgaatctcatntttaacaaaggcatctttgagtcgagtatccatgtggtagtatcttgtcatttatggatctttggtttagtattctccattcaacctaccaatgatgagtntggagtcgctccaacactntatgcatttgtcccttacttccttagctaatagaacttcatactcgacttggttgtttgttgtttcaaattcgaaccttagagaatgctctangatgacttcctttagcctttcaagaatgactccagcccattccccttttcattatataaaccatctacatacaacctccaccactcagattntgtctctgtgttggttgata

SEQ ID NO: 10922 - DNA, 380 bp, Glycine max
  unsure at all n locations
ctcagctgagttgaaaaggtcaaggactctcttgtctccatganttttctaacattacattggctggagacaactcgaacttgaaggcttgtgtcgctgcccttaagctagagtcaaaagggttggagaatcgcgctacaaatgtcanagactccgcanattaaatgtgaagaaatggaaggctganactctgttgcctttggtgagaaggagagagnatgctaaaaggaagagaanacgtgggttgaacaaacttcctatgatgacgtgtatgaagcgtacacatctggttttaatcattgcctctgccaagtcctttttcattgtgaggttcatgatgagtcaattntttatattgaaaaaaatggttataatggaaa

SEQ ID NO: 10923 - DNA, 298 bp, Glycine max
  unsure at all n locations
cctccacctctntagtggctctcaacctctgtatccaatctataccttatgcgtaggctttcaaccatctacggtagccaccgacggccctgttgctacttcccctgagttccttgtccttctttggcaccatntcccatgccttgttgaccccctgaagcacccacgcgtggggggctattgaacctcgtgcaataaaaggtgtgaaggccttctctgatggtgccccnctcatggggtagccaagttgccttatggcgaggacgagattataattaatgcaacccctcgtcccatc

SEQ ID NO: 10924 - DNA, 222 bp, Glycine max
  unsure at all n locations
ataaaaagatggatgaatgaatatcggtaattcaacttacgatgtgaaaaatatgtagtgacagacagactataatgacgacangtggacctcacatttatgatccagtcatatacgcattttctatagatcgcaagaattgcatgtttgacactcagaaatattgttgacagctctacagtntacgactttgtgatatctatgatcgtgatgtatacagac

SEQ ID NO: 10925 - DNA, 237 bp, Glycine max
cttatttctccctcagatggcccgtttagcatatcatataattctacacgcaatgagatcaaagacactcttatgaagctacttcacatagtccgtctttgcatgaccacctatatgcttaataacagaaccattaagcaaaccatcaagaagagtaaatggaaaaaaccataaacaacttcaacatgagacaattagtggtgccatgaacaactctataggatgcaaatacaacat

SEQ ID NO: 10926 - DNA, 219 bp, Glycine max
  unsure at all n locations
taattcttacaatcaatatcccaacaatttcaatcaaggacaaggcttcaggaaagtcaagggatgtataggcctcaaaccatgcaaaatcaaaggcctagacaagagaaaagaaaacctactcttcaagagaccatgcttcaatatatnggcccaaatgatcagagaatgaagctggtggagtctcaactcaccaacatacaattccttttgtcacaa

SEQ ID NO: 10927 - DNA, 310 bp, Glycine max
  unsure at all n locations
nttccccgatcccgcgacactagaaacccccaacggctcggtcaataaactgacatgtttagtactggacacgtgcatatttacaaatttaacttttggctttcctaaagattttttccaaccaattatatggtgtttttatacaagctcaacctcataaaatgggctctccatgtggacttatacacccatgggtgattatactcaacacaatctgtgagttctatgtcaactaaatcttgtgataggagacttgccttcagttgttctgaactttttttccttactcggacctatcaggaatattcgt

SEQ ID NO: 10928 - DNA, 233 bp, Glycine max
atacgatattgctgacacaataatctcttctatatagttactgagaatcattgtgtctgcaacacaaatggaatccaggtcatcacaatcaagatcagtggctgcaagcacttccatgatatggctcttgttatcctgaactgtgatcatcttcatatcctcttccaattgagacttccagctgacaagatgtgattcatcttctgggggcctgatgtctatgttgtatggga

SEQ ID NO: 10929 - DNA, 433 bp, Glycine max
  unsure at all n locations
gataagaanaaganaggagaatagatctaccttgaaaccncgccggccggcacgagagagctttttacccaccggaaagggggcagacccagcgccagacatggaccaccgaaaaagggaaagccaagccgcaagctggcgnaaaaaatgaatccgaaatgtgacaaatggatcagccttacgtccacaattggtttgcggatggaaggaagctccataagattggagggacagaatcggacaggacaacacgcctatgagagaagaataaatggacttactctacaatctaaagatgaaaattcgaccgagagcttatacaaatatgataatggggaataataccgcatcactaggaacgaacgcaacctgagttcatatgatgccaaaagaacggctgaccgcggacatacaactgaaaggagaacccccn

SEQ ID NO: 10930 - DNA, 336 bp, Glycine max
  unsure at all n locations
agctngtgagttatgtttcactctngcctcttaccactcagtcgctcttaagttcctggatgaatcagattagacacacaaggtatataacaggaaagacagtataattatcactgtgtatccgatctaatntggataacaaatcagatctgattntgagtaatggattagactcgatctggatttagattcgatttggataacagaatggatttgatatggataactgactagactcgatttgatttggataacaaatctagaattgattcgatacggataacagatcagatccggataacacaatgaatatagtttggataacagatatgataa

SEQ ID NO: 10931 - DNA, 313 bp, Glycine max
  unsure at all n locations
aaaatggtgacaaactccacatactacacatgtaaaacattaacaagccatcctgattcctaaacacatgatatgcatcttcattttcaaagccacggactgaggtccatcatctacaccaagcttctcaaggtcctcaaaaaaagcatcgggattnttcttccacaactcttccaccttatttatttgctgttcacttatntggcgagcccttaactgcttcttaaggtataagacttgtatattctctatgtgataaccctaaaggcactttcttgaagcatcatatgatatgcccaaatcatcacattct

SEQ ID NO: 10932 - DNA, 345 bp, Glycine max
  unsure at all n locations
gccatttgaatttttcaagaccttccgctgctcaatttcgagcgtctcgatatattatactcctgaatcggacctccgagtgaaaagttaagaccatttgaatntctcgagagcttccgttgttcaattttgagcgtctcgatatattatgcgcctgagtcggacctccgagtggcaagttatgaacatttgaatttctcgagagcttccgttgctcaatttcgaccgtctcgatatattatactcctgaatcggacctccgagtgaaaaagtatgaccatttgaatttctcgagagcttccgttgttcaatttcgagcgtctctatatgtgatgcgcctgaatc

SEQ ID NO: 10933 - DNA, 353 bp, Glycine max
  unsure at all n locations
acgacaataactgtttacatggatgtctgtttgagtcctgtcatatatcgagacgctcgaaattgaatgttgaatctctgagccaatccaaacgaacaataacttttactcngatgtctgattgagtcccgtaatatatcgagacgctcganattgaatgttgaagctctgagccaattcanacgacaataactntntactcggatgtctgattgaggcccgtaatatatcgagacgctcgaaattgaatgttgaagctctgagccaattcaaacgacaataactntntactcggatgtctgattgagtcccgtcatatatcgagacgctcgaaattgaatgttgaatctctg

SEQ ID NO: 10934 - DNA, 583 bp, Glycine max
  unsure at all n locations
ccggannnacctnnttcttttctcagtggtgcactctcaaacnnccaatctctncgggnnntcgaagacanacnctntnnctttcttcccttnttagttgngccttggtnnttagccatangcntnntttatnttnttccctttctcanatntnntgatcatnnttgaccttcttctnntatngaaagcntntctntcgaccattangtccccgcncctttagctgtagaccctntctnnnttatgcctnntaaaanacaagaaaaccattatnggcccaaaagaaatcaagaaggggagttagtgggggattaaaaccccataanacanacctnntcaaaagggagaaaccaatnntagtggtggcccattgaaccagcttcttatttcgtaagcannaattcaacattgagggtannaacaagcccttcccanagttnntttaagttatttctctctannaactgtcncctaagcannagttccccaaagtccttattaaccaacttcccgtntgccccattcggttngttgggtgaaccaagtggttgaanaataaccaatttcantgcccaaactttgn

SEQ ID NO: 10935 - DNA, 414 bp, Glycine max
  unsure at all n locations
cattcggaattgcgaaagcccactcctcattaggattatatttgacatctcaaacaaacaaatcaaacgtaacaagacaattatagttgctgtttgaatacctcacccactcaagtgtatcacacaattatggcttttctctaatgaaacactcttgccttttaccactctaattccccttgagttcttatgcaattcaagagattatggccacaacaaagaacaactcaccaatatgtgtaaggtaaggctagagagacaaggaaaaggttaaccaagataaaggctaacaatgtctttatgcacaaatgaacganataaaattcagaatgtaagaattcaagtaacaatccttcatgcaaccaatatattaccttaaagagaatttttttaaaagttcttcaagcatgaacc

SEQ ID NO: 10936 - DNA, 443 bp, Glycine max
agcttgagcttttgctgtggatagggttgcccaaatccagtcccagtggtcaagtgaatagtactattgttgccataatctaagagcactattcctcccccatcacctgcatataacaaacataaagcctcaaatcactctaaagttgccaacttttacattaaaatgtggaacccatttttagcatgctgaatcaagagctcactcacataagaggacaaaaaaaagaaaaccaactttcttttattatttgaatgttgtaaaatatatagtacttatttgattccacatcttggatctgaattttcagattttggatgtgattctaagaaacttgtagttatagtttttacatcccaaattgtccttcttaacaattcaaacacactattaataaatacacataaaaaattattgatgggctggacatagattatacatgt

SEQ ID NO: 10937 - DNA, 384 bp, Glycine max
  unsure at all n locations
tcctgactcaccataaaccttgacccaggtgttagaatgtcaattcttaccctcggaagcaaaaaaaaaggggagagggaaaatttccaatcaaagaggaagcananaaggagagaatgaaaatttcaatcaaaggaaaaaaagagaggaaagggaattcccaatcaaagagtgggagaaagcaaaaagaaaagaaagaaaattcccaatcaaagaatgggagaaagaaaaaagagaagaagaaagggaagaaagttcccgatcaaaaaaaaataatatgcagaaaggtctttggaccggacaatatctgaacaatacagaattgtcaccaaatgaataaaaagaaggaaagggaaccatgacctanaatggtcttcccccttt

SEQ ID NO: 10938 - DNA, 267 bp, Glycine max
tctaccccattttcgatagtacttgtgtaagcccaatccaggtggtaccaaagaaagggggcatgacaatcattcagaatgaaaagaatgacctaatcccaacaaggactttcactgactggagaatatgcatcgattaccacaagctcaacgaagccacgaggaaagaccactttctttttcctttcatggaccaaatgttggataggcttgcgggacgggcttattactacttcttgtatggatactttggatataatcaaatta

SEQ ID NO: 10939 - DNA, 132 bp, Glycine max
tggctttttgttttcaatgtatttggttcaagagcccagtgcagttttgtacatgtttaatcaatattgataaggattatgaagattagtgccgtttgaaaggattacatattgaagctgggatatgtcgtc

SEQ ID NO: 10940 - DNA, 303 bp, Glycine max
  unsure at all n locations
ctttggccatccgattcagattagagcgactctatagatatgtctgttgctatttccgaagccgacctgaaggctatggcttccgcaatttgcggttcaaaacaattagggagaagaatatagcccaccgccaaaacttcaccacaatggttccaaaagaccactcccagcccagtacgtacctttgttttgctnntgggaagcgccaaagttngccttgataatgcctcccttggacaagtctaccctctatgattcaacttgngatgctcagcacgatggtctatatgaacctgaatagag

SEQ ID NO: 10941 - DNA, 261 bp, Glycine max
  unsure at all n locations
agcttgtatatcctttcatgaataaagataccaaatagaggggtgttaagtgagtaactgtgttaactgtgtgactggttagtcattattgtctctctttgggttcctaacattttattattttgattttggcaaaatcttgtttccatagattcaaatgctatcttaagcttcattgagccatgaagtactctnttggtgaaatgtatatgtcatatgatgtatatgtatattgatgagctattaatgcttaacatgtgt

SEQ ID NO: 10942 - DNA, 127 bp, Glycine max
tgggcttttgaccccatgctctgatggagctgaaatcccctgcagagagctctgagactctctcggactatcactcacctttacttacaccacttccttcatattatgataatagacactcctaaca

SEQ ID NO: 10943 - DNA, 511 bp, Glycine max
  unsure at all n locations
naaaaaaaacatgacgaatcccgtcagtatntgcgngacacnncttgggtaatcatgccggaaactntaaataaatgggagatatcatgcattaaaataatgtatatgtggtnttggaaaatacaatccatgaaaagatccttcttttagccagctagaaccagtaccagaattttgaggcaatctttcaatcttcgacatcacatggttcagtaacacgtgattgctttttggtattgggcatttggcatagtcaatgataactgcattgtgctaacttattttgtaagctgttttcaaatacttaatttcacaaaataaatcagctcttctaccttttgtgntagtacacttctaattgtattgacattaaataagtttatctgggtgaagtcatagccaactgttctcaatttgtgtacgattaaaatggaaatcatggctggctngactctgcatttctattgcaaacgttttttacttgaagagtgaatatatcattttttttgta

SEQ ID NO: 10944 - DNA, 364 bp, Glycine max
  unsure at all n locations
nnnttcttggcttgnngagttttgtaccnacataanacnatagcgcgcaaccttcggtgcccatttctgctccaatcgcgaaggagtattttcgtatcngancgcgtcttcctgtggaccttcaattcaggttggtgactcttctcctgattcgggtatgggtttggaaatgaggatttctattctctctaatattgaaaattggagctgtactcctgtgatattactaccctctttaggttaatatctgatgtatgctaatcctttgaactttaaagaggtaataaccagttaaaggaatggttttaggaaaaataggtttaactgcgtaactgccctgttttgacgaacaaccttctcctcc

SEQ ID NO: 10945 - DNA, 329 bp, Glycine max
  unsure at all n locations
gatctttcactttcaggtgatatatttaatgatgtggtgggcagcccatactatgtagccccggatgttctgcganagcgttatggtcctgaggcagatgtttggagtgctggtgttatcctttacattcttttgagtggagtacctccattntgagctggtgagatcttttgtatttatttggacagtgtaattatgacctctattcatataaatgtatgcctttcttttttctgattattaattctcccttcgtctttgtgtggttcatatggttgtgtagaanacgaacaacggatatttgaacaagttctgcgtggtgatcttga

SEQ ID NO: 10946 - DNA, 119 bp, Glycine max
  unsure at all n locations
tctctcttagaagagatagatggacaatgaagatcaataaaaattccttattgaatatgcaagtggttgaccaaggaatctttttgagaggataaaactattgggcaatgaanactctc

SEQ ID NO: 10947 - DNA, 527 bp, Glycine max
  unsure at all n locations
cggggagagctagngactgnagtancnnncanttgatcangnaccccggcgatctntagagacgaccaggaaggtgcgagcgnnatagtgacttgctgctctacatgaaccaccctggggggcgcttacaatggcacagactccactcattaagggcgatggacatacgctatagacaacgttatctgtagcaataaatggatggacaaaataactccagcagagcgatgaggaagcggaactatacaagctactcgcaaaatgatgtcctatacatacagttagacggtaaaagcgactagcactgtgcacgacagggngtacccgacacttgccgcctagtattacatagtgaaagtgtcttgcatgatggctatcgcaaatgagtgaacgatgggacgacgtagtatcgggagtaaaccctgggcatgcggcatatgaccatgattgaccggccagttgaaaaattgctgcaagggattcaggccggccgaatcagagaatctgcacgaacgagaatggcgcgc

SEQ ID NO: 10948 - DNA, 504 bp, Glycine max
  unsure at all n locations
aaaaaatcgggtttgatntctnacactnattaanattnccncangangacccnccntanggaagcttcgaaggaggggagcttttttttgattttgtgtgtatgnagctaagcgactagcttagggatgatatgggagtatgtanctaatcctctacctagggtattaatagaatcatgtgtcacacttgttgtaactatgatgaatgacaaactcgtgagacgcaactctacgttcaacttctctccctattattcttcgttgatatcaagtgccgcatgtctctttctatcccttttttatatcatccattggagcactctgctcaagctacctattaaatgctcatcttggtggagcaccacatgcttacatggcgtattccataaagaaacggcgtgtgctctcacctatactactatgagataccatggaatacatggtggataataacattaattgaacccttgtagcagcagatttcggctctatagtccataagca

SEQ ID NO: 10949 - DNA, 395 bp, Glycine max
  unsure at all n locations
ctatcactgcctcttatggaagaacaatatgcacttcctgcattgtatatttgtttgattgtcgtataactattggcattgtgctccttcagtgttagtagaatatttcttggtttcaccattgactttgcatgtcagcaataatcgtcttttcatccttagtcaatcgaccagggtatagatgtccaactaatgactttggcatttcatgattgtgactcccacacattaacttcactatccatccttggcctccaaccactggtttcctgcgaagcttatagggacatctatatntcctactgccaatatctctttttacaaaatcttgctttctagacctatactgaccactcttttcacaatcaattaagacaaatgaaagtctttctcta

SEQ ID NO: 10950 - DNA, 494 bp, Glycine max
  unsure at all n locations
ntttaaaaaggttcgagagaacttagaaacacacccgagcgnaacccgctctgagatttaggcaaaattggccttctagggaccctgtgccctttaggggaactttgttatccacaaacctacattcttcagcggagtgggaggattaacaatatagtggcctgaatgtgcaacatcaatctcatcatcagcactatcttgaagttgctctttcccttgacctatataaagaatcgaaggatcttcagataccttaagaaacaatactcagtctgatgtcatcaaatatttatgtcaccaaattagtcactttgaacgatatctgtaagattttagtatattcaagggactaattcggtgacaaacatctttaaaggactaatgtggcggcaggctggcaccataacctttggatgactagagcatttactcctttatatcaataccataatctttanggtttcaagtctatattatactaaccatatcctcct

SEQ ID NO: 10951 - DNA, 474 bp, Glycine max
  unsure at all n locations
gggaggcgatgtccatgattctgcccctttgagaagccgcagacgctgtgaacctgtggcatcataagaccattaactnggtcccttggcttacacttcctcctagctgagtctgtagtgctttggatttgggcatgaanaacctcaaattagatatatatatatatatgtgtgtgtgtgtgtgtgtgtgtgtgtgtgtgtgtgtgtgtgtgtgtgtgtgtgtgtgagtgagcgtaatactaacgaacctcccaatttacacttgatagcactccacttggatacaattagatattagcacatcgtggaagtatcaactgtggtgattaaccctcttgaatgatgacaccctagatacttctctgggtgtatccatatagatagctcggacttctgaactagtgctgttgacaacaaattagggatctatggtgttgaatgaaggcacttgatgtttatgttgacacttttagc

SEQ ID NO: 10952 - DNA, 353 bp, Glycine max
tgctttctaaccaacttgaaattttaacagaaacacttggtaagtttccaactaaactgtctattggtcaaccaacacattcttctgttttgcaggttataggttgtaccacctgtggtgaggctcatgaaacagaccaatgtattcccattgaagaaaacactcaagaaattcattatatgggaaatcaacagcgacaagggtatgctcaaggatgattttcagtcttccaacagggtccttataataaaaaaggataatggaggtcacacccttgcaatcagttcaacaaagaccagggtggaccttcgaacaggccaattgttcgcagccggcaagtgtactggatcaca

SEQ ID NO: 10953 - DNA, 101 bp, Glycine max
  unsure at all n locations
atcctcattcagcgatcagtttggttnttgcgtattattttgaacaacggctcacanatggcggtgagctgcgatatgaaatctggcatataattcaagcg

SEQ ID NO: 10954 - DNA, 275 bp, Glycine max
  unsure at all n locations
ctgtgaacgttacatcaagacatatatgcctgatgctgattttgtgccttttntgcttccttctcctggaagattaccgctctacgatccaatggtcctttctcctctctcttttcagatgttgactttatttctcttttttagtttaacaccaagacatgtcgccattttcatattctttagtggtagacgttctctcatttattgctataaaatgcgtgagtctcgttttttcacgatgttgatatcatggtaataaactccctgctgagttc

SEQ ID NO: 10955 - DNA, 287 bp, Glycine max
  unsure at all n locations
agcttaactttcactnttggcacttcatgacttagcctgtgtgtcacctacaattgcacatatttcatcattaaatccaatggacatattctagagacaactttatccataaaaataaatttatttacaaaattactccaaaataaccataaattgnggaactatacaagttttggaaaatgatttctatacaaaagttagtcgtataaggcgactagcactgtgcacgatagggtgacctcgacacttgctgcctagtttatctaagcgaaagtgtcatgtacaca

SEQ ID NO: 10956 - DNA, 399 bp, Glycine max
  unsure at all n locations
agtctcgtatcggtttaatcaattgtcgattctgtgtaatcgattacactattgtttgagacaatgactaatttagtcaggagtctctgctttaatcgattaccaaggggattaattgattacttctctctcgttcagttgttcanaggtgaacaagaacactttaattgattacttaggtcatctaatcgattacattattcttgggttgttttccagatgttggatgaacactntaatcgattacttagataatctaatcgatcactttgctaanataaccgattaccttatagatntaatcgaatacaaatgggtataactantttttctataaataaccaacttgtgttcacatctacacatcacgagatcattagagaatactcaatacatctc

SEQ ID NO: 10957 - DNA, 634 bp, Glycine max
  unsure at all n locations
ggggncacccccccccaagaagaatgttgttangcctttcatagtacnnaccgcgcgaatttcagctcggcaccccggnngatcctctanaagtcgacactgcagagcgatgcnnaagctnttatgtttagtatagtgtagcnncagcntgngatagacctanacgtgtagcgatacttctctagacatacntctnngatactcgacgtaccannatactttcacntgcnctgcncgacagtaccgaacacctgagtgtcacncgttatgtatgtctgagcgatcaatatctcagagtacagtactctctaagacaccctctaggatgatgntttacaccttcatttcgttccccttggcagcgtgtttgtgaatatttcaccgttntggtctccgcaaatctagtagtgtttacaaacatttttaaccccccagaaaccatgctgtctagcttcttttccacctgatgaacatcgtgcacccctttgaatttaacaaacccgtatctctctcaaattttgtttcgattcggagatatgaaaaatctccctccataaccacctgctcgaaatgcctacaaaggtctttttctgtggctcttcagagatccagaaaataacacgaagtacgtccg

SEQ ID NO: 10958 - DNA, 488 bp, Glycine max
  unsure at all n locations
aggaacggggtcangacntcgtanantcaaanaattnagaaanaagccnacacggaagccatgaagggcgaggagagttttttgttttgttgcnccaaggaaacggaggctagagagagtgtcacatgcatctcattaaaacacgctaataaatactagaacagtggcggatgaaccagatggtaagactgcaggtgcatcaagacgagtcatggaagacatatggggtcgacttcatcaacaacaattagcatgcaatgacatgtcgtggcctggtgagggcatcctcttatatgcaacgtcataaatgcaactctaatcatctacatgctatatggaaccgacatagatctagtcagtgttgcaaacctgctgtatcatacgctaatttggggaagcgcacatgttaccttcctatatactttcaacgataaatgaaggcttggacattactctgagagctccttacgactccacttgtcctgagg

SEQ ID NO: 10959 - DNA, 192 bp, Glycine max
  unsure at all n locations
tgaaatgaccctaaacaattaagcttgagtgaaacattgactatgaagttgtggttgatgatccttccttgatatatgccatccttactagcttatttcagttgtgactctaatgtgtatgttcttatctttganaagctgcatgtttgtgaaaatcaattgattgatgcagtccatgatattcagttcata

SEQ ID NO: 10960 - DNA, 501 bp, Glycine max
  unsure at all n locations
nnnatgggatgccgattgantncttcngtatnancncacacattgagtactcaaccttggaatgaagtggatggatcacataatcaaccttttttccctttgtagaccacctgtaatcactggcctcccaccaacactacctacctatggcaccaatggggactcattatttcttcttggcaggtttcagggtaagtaatgaccaaaggggtaggaaaaaccaatatattgtccctggtccacattttttgacacatcaccgacaacaaatccgttgaaaacccttgagcccatgaaattaattaattgtagggtgagaatgaacttanttatttgtagcctttctaacacttgagcgtgtagatcaattgtgtaggataattccaatntaatcacgacggttcctagttaggtgctatgagagaatgtnttgtgcttatatccatatattacctcgatagattactttaacaaagatactattgctagaagaagaaaaan

SEQ ID NO: 10961 - DNA, 206 bp, Glycine max
tcatcctattatgccgagaatatgatatcgatggaggaaagatattgcatagctgaaaacgtatgtcgtcctaagcatagtctacacgttgacagctggtggtgctcgaagattctgtaacgtacatactttacagtgtcatattcgagtgaacttcatattagcactgatatatattcttatagaaacatcatgcgtacgtggta

SEQ ID NO: 10962 - DNA, 352 bp, Glycine max
  unsure at all n locations
tctaacctaatagaagcatacctgccagcttctncgttttatctaactcaaaagcatccaactcaggtctttctggtttagtaacaggcatacacaacgtttccacacatactaagccttctttgttgatgacaaatttgttgattttgacgagaacctcattacaatcttcaagcacatattcaacctttttatagaatgttctgatagtgccaaaaagaagttagccaagcactctgtatgatacagcatcaatttcttgcanaatcttgtctgcagaaggtaaaaatgaaatgaaaataatggcaaaacaatagcatatatcacaaatcttataatgatttcacagaag

SEQ ID NO: 10963 - DNA, 495 bp, Glycine max
  unsure at all n locations
ngggtgggtcggatttgaactctaaactatgctccttggtgnnttttacattcttctcttggtcaggacttntgttatgggttattttcctccgaanttntaatgggtaattatataatctttcagattaatttaattatatagggattatattcctcccaattataagggccaaacctttctttaactttggaagagagatacacanntgaacagcctatgtagagacagcgtagnttggttggatcacccaatgaacatcgcatganaagtaatgagaatgtggcgaaactgtaccattgacatctcanaatgctgttcacgaagataaaccatttggcaatgtttatggagtggttgatatatctaaatgttgataatccttatatgnagaaaaagtgcaaggtgaagcacacaagaaatcaagcacgctaccccaaaccaaccgcgaaacctcccacactcacttcaactctgcgtttgagcttaatcaan

SEQ ID NO: 10964 - DNA, 514 bp, Glycine max
  unsure at all n locations
gggagatttgcatgattncggcaattacgagaccgcgatctctnagtcacctgaggcatgcaagcttgtggtaatgataaaaaatnggaccatggagaggagcgatgatccttcctttccaggggatatattaattgattgtgtggggcagcccttactatgttgcccgggatgttttgcgaaagcgttatggtcctgacgcagatgatcggagtgctggtgttatcctatacattcttttgagtggagtacctncattctgagctggtgagatctttcgtatttatttggacacgagtattatgacctctattcatatagagctatgccttttgtattctgattattaattntccctccgtctatgtgtggttcataatggtgncgagaacacgaacaaggaatatttgaacaacttctgcgtggtgatcttgacttttcttctgatccctggccttcgaattctgaatgtgcacaacatttagctacaataatgctggtctacgacctatag

SEQ ID NO: 10965 - DNA, 384 bp, Glycine max
  unsure at all n locations
ggtncanaaaaannnnaagggacttactgattcgcacantaaactagctatacaaggtgtggttcatattagatgagatttttacaaccttgaaatagggtggtttatcctaacgtgacctttgatgcagaggaaggatattgatgaattgactgaaggaactaaataaagaagtgtggagtgatcagtaaagagttaatatatatgagagcttacactatacttctaaagtggagaatggcattcaaaatttttagcacactatgcatattccaaaaataattatatacagaatcaccttcagtgaatattttgttcttattattttaaaaatacttgcaatactgatagaatccgaatattattttttaatattttaattat

SEQ ID NO: 10966 - DNA, 359 bp, Glycine max
  unsure at all n locations
aacacaagcgacctgaagtaacacaaanaacngctaaccatttacaggccgggagaaggatttcccttttggttatgaaaaagaaaatggagagaaaaaaataagaagcttgatttgaaaagaaggagataatttatcttacacatactttttatattcaataacataaactatccttaccaatttacctatgtggtacacctactgctctagtgagaccctttgctatgcgaactaacctaaagatagataaagtcgtagaatcaaacaatattacatatatatcctggctaaatttcactcttctttacaaatcatcatacctaacactttgctttatgaatgatgaatgcattgtg

SEQ ID NO: 10967 - DNA, 500 bp, Glycine max
  unsure at all n locations
atttcctccccncagccccctctcccnnactcgggaaaatcccgccggcnnnncgtgtggaaaggcttctttaggttatagacaccccncaaaaaagcgcgcgcgttgagtgataatanacacaagaggctntnntgtttcaaaataaaagggtttcctcttttcctataatttaattcaagctctgccacatgtccgtcggggccagttttcgaaagcaagcaatatatatatcacaacgctcataataaaaccccgagcgtggctcacaggttggttttgttaaattctaagtcgcacgcaaaacgatgaattttatactaattacttaagagttaacccataacctcccagttatggatttctctctcttaattagcctaacccgcatatcttgcccccactattcctacttctaccaagaacatatatgcatatacactgaataatacttatatatatataatcattcaanatacatcgttttcaaaaatatccgg

SEQ ID NO: 10968 - DNA, 123 bp, Glycine max
tagaggggacaaatataacctagataattgtataataaaaatctacattaactatttatttataaagaaaaatctaaaatctattaacacacactatgatgaatgccttgtacaacttaatat

SEQ ID NO: 10969 - DNA, 314 bp, Glycine max
aagctacaaaaggagagagcatgaaatgaagagccaatggttgatacatggacggagatgaaaaagatcatgaggaagcggtatgttccggctagttactcaagggacttgaaattcaagctccaaaaactaacccaaggcaacaagggggttggggagtatttcaaggaaatggatgtgctcatgattcaagcaaatattgaagaagatgaggaggtaactatggctcgatttcttaatggtttgactaatgatatccgtgatattgttgagctgcaggagtttgttgaaatggatgatttgcttcacaaagc

SEQ ID NO: 10970 - DNA, 318 bp, Glycine max
  unsure at all n locations
catcagaccacttccgggtgctggagctacttcattttttcttgatggggcctatgcaagttgaaagccttgtaggatagacgtatgcctatgttgttgtggatgatttctccagatntacctgngtcaactntatcagagagaaatcagacacctttgaagtattcaaggagttgagtctaagactccaaagagaaaaagactgtgtcatcaagagaatcacgagtgaccatggcagagagtgtgaagacagcaagtttactgaatactgcacatctgaaggcatcactcatgagttctctgcagccattacaccac

SEQ ID NO: 10971 - DNA, 236 bp, Glycine max
  unsure at all n locations
tgtagcttcaatgcaaggaggcatgcttaaatttggttntagagtcagaacatcatgaaaattatgatgctcttgcgagacttcttgctccaatatgggttgccccatgtttgatactttacatagaagtagcatggaacacaccttgcactagtgtgtcttcataggtcaatataacaactatgaactccctagcaaagtgtgaatgattgtcttcctagatgaatgtatgatag

SEQ ID NO: 10972 - DNA, 400 bp, Glycine max
tactaccttagcctaatcgctagcgacagcttatgtgggcaagcggtactcattgtcccaagcgcaattccttacgaccttaattgaggtccatgacgctaagcgctagtcatggcagctaagcgagattcattgcggcaatatgagcgctaagagagtccctctcagctaagcgcatgctcctctgtacttaagatgcatcattttagctaagctggccagagccaggcttagcgagagttgcagcttttctaatctgcagacctcgctaagcggacttactctcgcgctaagctgagtttcagttaaacaaaattattttcgaatttgaaacgtcagctaagcgcacgtgttcgctaaacgagcttggttgataaaccaaacatctctcttgctcact

SEQ ID NO: 10973 - DNA, 377 bp, Glycine max
  unsure at all n locations
agctattaattgtatttgctacgttccaattgatctcagagtggtgtaatcgattacaagatattggtaatcgatgaccagtgtatttgaaagtcgaaattcaaatgcaattagtgaagagtcacatcctttcataaaaagctttgtgtaatctattacaatgatttggttatcgattaccaacgacaaattntgaacaaaatcaaaagatgtaactcttccaatggttttcatgtttttctaaagggtataacatcttcaatggcgttcttgaccagacttgatgagtctataaaagcaagaccttgatgtgcattttaataatcttctacaacctgtacagacaactattacacatattctttcacaacctttga

SEQ ID NO: 10974 - DNA, 395 bp, Glycine max
  unsure at all n locations
ctcgtcggatactctatgtcatgggtcttcgcacagtggttattggccactgnatggtcaggggtggtcgtggcggngttggctgatggaccgctgggtaaaatcgacattcttctgttcgctgtggtatcggtggggttgccgtccacccattccggtgtgattgcatgccccgctccgcttacaagcttcacacgggcttccatggagtcctaacgagtaccctcgccctattcagtctacgcaactcctgcacatgatcatccatctccaccaaatctcctatcggggcgacaatcttacggatgcttgtcgtatcccatgcctctaatgggatgccccaacacaagacccatactagtctatggcctattttgatattgctgctccatttc

SEQ ID NO: 10975 - DNA, 350 bp, Glycine max
  unsure at all n locations
tatgctccttgaaggtggcagtccatgaggaatctccttggaaaagacatctttaaattcctgcaataacggttgaacactangagaaacataaatagttaactgattagaattatcactctctctcttttgtgtatcactcttttcctcgggtgtatcactcttctttctcatattcctttgtggagcctcacgtatttctttctcttgttctctcttttctctcattctgaattggtcatcacatgcttctctacgggatagaaggttaagagtaaacgaagaagaattgactattcgtctgtaaggctcttctttgttacngatcaacaaacgttgcatttgtatag

SEQ ID NO: 10976 - DNA, 376 bp, Glycine max
  unsure at all n locations
tgcacaacaagnnntccacatcctcgttgcgttcataaacccaccgtcccctccnacccacctccaactganctcacntactcccacatancccataacctcntttctctcaacaccgggtccccatcaatcctcccaagcttccccaacatcaaagtaaatcaacattcaaacagcacaaattaccacagccaagaaaacagggcaaaggcagaaaactctgcccaaaacaccaaccaaaatcacagctnttctcacttaaagaccccagtaacaattccttcgatccaattcgttaaccgttggatcgactccaaaantttactggaagtctatagtacataagcctacattttgaccgttgggatctactaat

SEQ ID NO: 10977 - DNA, 219 bp, Glycine max
  unsure at all n locations
agcttttagtgattacccaccattttcatagtagaacactgttaatatgtctactaccattgtgataatctctntctctattattgagggtgctacttaagctgtcatatccctccacctttgggcatattctttgaaagattcatgctcctttatgcacatgntttgtagttgcatcctatccagagccatatcataaatgcactgatactgcctaac

SEQ ID NO: 10978 - DNA, 325 bp, Glycine max
  unsure at all n locations
atcctatctccgacagccaatgggtgagtcctgtcccggtagtcccgaagaagaccggccctacagtgataaaaaatgagaaggaggagctaattcctactcgggtgcagaacagttggagagtctgcattgactatatgaggctgaaccaggttaccaaaaaggaccattntcccctgccattcattgactagatgctngaacgactggcangtaaatcccactactgtttccttgatggttnttctggttatatgcaaattactattgctcctaaggatcanganaggaccacattcacctgccccttcngcacttttgccta

SEQ ID NO: 10979 - DNA, 341 bp, Glycine max
  unsure at all n locations
agcttatctttttgaagtctgtaagatggtatgtcttattgactntgttagccttaagaacttgttcatttcttgttgttaccaaaattctgctacctgatccaaaatggtcaagagctattttgttctaagtgatgtaaatcattcacgtcatcaagaacaataagaaccttcatatggccaattctcctaacaatatctttgggtaactgcatccacgtcatatcctagtagtgtagaaaatatttttttcttcaaagaaattattccatgtttctttgattcttctctttcatgggctaaaaaataacaaccatcatattcagaccgtaacttttcta

SEQ ID NO: 10980 - DNA, 303 bp, Glycine max
  unsure at all n locations
aaacaatgcatcaacctcatgtgtcagagttaagtccccaagagtcacccgcgtcatatgaactacaaatgagtaacatctttcaatatacttgaattgtactcaaaggcatgaagccatagatattgataaatctagcatgttcacacncatagggtagatcgtgagtaactctaagtgtgtagccacaagcaaaactgttagtacctatgttgtcaatccgtttcaactcatgataaatgacatcttgtgcttctcttgatacaaagccgcatatgttcttatatactangatattaaaca

SEQ ID NO: 10981 - DNA, 522 bp, Glycine max
  unsure at all n locations
ngagggtagtnccgttagnacantcnncnaattaagcnangccnccgngatcctatagaggcaggcatgaggcgangcaacttnnatattattctctgacgccacgcaccccagaggggaggtattcttgtcaggccttcttatcttgagctcgttactgcgaccccacagagccgctcggaactagaactagcatcaatctttacttcggacactatatgatggccgctctatcgcgtaataagtggttacgttgatgtctttcatctgatcacactatttcctgacgctagtgactgacgtcctcaacttctctctcaccttcgagctgtgccgtaaagcctgcacttgttactttgcggaagaatttgagcgctttactacgaagctttttagctttgggagcccagttataccttgtggtctacacttcagccactagtgatagccggagaggacgccagagtacttccttaagctgctaatttttcttcgacactaatcctgctgaaagtatccgag

SEQ ID NO: 10982 - DNA, 422 bp, Glycine max
  unsure at all n locations
nccattttacttcttccccagccccctcntgcncgaccnggtgtgncncnnnnnngnnntnnnnnntnnnnnnnnnttanatacaacaaaannaaaaaantattttttttaaaattngtgnccnccaaaaaacacnnnnnnannnnnnnnnnannnaaaanaaaancnaatanaaaaaaaanaaaaaaaaacaatacannannnaacaaacaaaaacaancaccattcacaacaaacaacaaaccaaaacaancnaaaaaaacaaaaaaaacaacaaaaaccncaacaaacaacttcaatatataattaataaccctttctatcactcataaaaatataactaaccatatacttatccaaattttcttttaaattaaaacatttttatatcataataataaatttatatattatcataacan

SEQ ID NO: 10983 - DNA, 255 bp, Glycine max
  unsure at all n locations
ctataaatagaagcatgtgtaacacttgttgtacctttgatgaatgagagtcttgtgagacacaactcanacttcaacttctcttccttttcttccttcaatttcgtgctcccctccctctttctctccctctntcttttcctccattgaagcatcctcttcaagcttcttatccaaggctcatctntgtggtgaagctccttcttccatggcttattccttaatggatggcgcctnctctcacctcctttcctt

SEQ ID NO: 10984 - DNA, 459 bp, Glycine max
  unsure at all n locations
gtgtattncttctgacntggttcttccccgaccnttgctttcnanaaaananagnannnnnaaattnnnnnnacattttttctttnnnnnnanccnnnccancgtttggtgtacacattaggagacttcccctcttcacnatctnccnnaacattcaatcaaaactataactactttacctcatttaaaccttcaaaccattttcctccatttttaaaacctattntctaattcctttccttaaatccaaataatatctatatatttccaatattaattacaaaaaccttncaaaccccttcttaacaattttttttctttaaaaatcaaaaaaactttattaatttattaataataaccataatttttcaaattcttaattaataaaatattttacaccaatttaattattctttttttccaaacataaccctttaaaatcattaactacataatttn

SEQ ID NO: 10985 - DNA, 392 bp, Glycine max
  unsure at all n locations
agcttgtattactaccataaggaaagaaagtaatgggtgtctacaaacaatatggatgaggcaggtaacgttgtcagaaacaagacaagattggttgccaagggttactcacaacaaaaaggtgtagactatacaaaaacctttgctcttgttgcttgtctagaggcaatatacattntactctcatttgcatgtcatacaaaaatgagactatatcaaatggacgtaaaaaatgcattcctcaatggagtaatataagaagaagtctatgtagaacaacccactgngtttgaaagtaacactgttccacacatgtgttcaaactctataaaacattgtgtggacttaagaangctccttgagcttggttgaacatcttagttcatttcatg

SEQ ID NO: 10986 - DNA, 356 bp, Glycine max
  unsure at all n locations
ttcctagcttntaccatgnatnctccncnnnctaaacaccgtaggtttttacttcatttcatactagaggaaccatgcaggtgaaaaactgatcacgatcgtttccaaaatgtaccactcgccgaaatacgtcaggttttaaaacttactgatgaaccgatcaactcttcctttgacttctccaatttattacggatgatataaacacattgccacctcggaataagaagcccgaatgcttttaaccacttatgcagcctttaaaacaatgtcgttatttttttcctgtaaaagtttgtgttggcggctttaaatgcatgtgtaggaaggttttgtcaccaaataataattagccc

SEQ ID NO: 10987 - DNA, 378 bp, Glycine max
  unsure at all n locations
caaaatctattaaagaggattgtgattattaaaaatggtcgctatattttaattaattatttcaaaatttaaaaccccaacaactttaatatcaaattaacggatgacctatttgttacaaattaaatgaccaanaatgcaaatttaaaaaataaaggaccanagcaagagttacgtaaaacatatagaattaaaagatattgtggcttttatataaaaaagaaagataattgaattaaagataaaagaatatatatatatatatattactattaatatacgtggcaataacaggacaatattctaggaatgttttttattgtaatcttttttctttttttcgctttttctccaaaaaaacggcgcaatgcatgggtt

SEQ ID NO: 10988 - DNA, 331 bp, Glycine max
  unsure at all n locations
ggaanaagataactagatcatgcanacacnaccnatcgggccctcattagtgggcgccgctgttgtttttttaaangcgcggtgtggcacaaactttatggcttcaaaacaatgctcttcactgtaaaaactaccctaatcattctatatttttaataaccttaaatttattcttaaaccattactgccgaatgttttgacaacttttagattgatcccggaaattgcctaaactagtttctaactattctgctgtccacaaaccattaaacactttaatagagcaaaggtaatcatttaagccaactataaattgagtgtcgggtgcctg

SEQ ID NO: 10989 - DNA, 399 bp, Glycine max
  unsure at all n locations
agcttgcataatggattcagcgatgtctttctatggggggcaggataaccctcatcaattctgtcccaacagccctccctatctaccttctctcttttttcagaattcctaaaaaagtgatacataaggtagtttctattcagaggaactttntgtgggggggtggttctgaaacagctaaaataccatgggtgatctgggatattgtttgtcttcccaagactaaaggagggttggggatcaaagaattgtctaagtttaatgaggccttgattggtaaatggggatgtgatctggctaataaccagaatcagctttgggctagagttttgatgtccaagtatggtgggtggaatgctttatgttttggaagaaacagtgcagaatgctccccttggt

SEQ ID NO: 10990 - DNA, 470 bp, Glycine max
  unsure at all n locations
aggtgtgatcgatgcnatgcgaacaccanttaaatatnnaacctncttaggattctccttanggaagctcctcagggaggtgagcttantttttgaagggtgtatgtacctaacctttcctaagtaataagagggggtgtatgtacctaatcctttaccaagtcaataaatggaaccttggtgaccacttgttgtacctttgataaatgaaagcctttgtaaacccacctttaagttcaactcccttcccttttttttcttccttcatttgcgggctcccccctctttcttcctttccctctttcatttcctccattggaacatgctttctcagcttcttatccaaagcttatcttggtggngaaacccattcttccatgccgattcctaatggaggcccctccttcaccttttctctttgcttcccctgcttctcatggggaaaatcaccataagggacctcttgaacc

SEQ ID NO: 10991 - DNA, 354 bp, Glycine max
agcttgcatattggaatcagcgatgtctttctatggggggcaggataaccctcatcaattctgtcccaacagccctccctatctaccttctctcttttttcagaattcctaaaaaagtgatacataaggtagtttctattcagaggaactttttgtgggggggtggttctgaaacagctaagataccatgggtgatctgggatattgtttgtcttcccaagactaaaggagggttggggatcaaagatttgtctaaatttaatgacgccttgattggtaaatggggaatgggatctgctaataaccagaatcagccttgggctagagttttgatgtccaagtatggtgggtgga

SEQ ID NO: 10992 - DNA, 448 bp, Glycine max
  unsure at all n locations
gagggtgaactgagcnttccactncgagnacncncaatctnctttaggaatctcctaaggaagctctcaggagggagcttattatganaggtttgtatgtacctaacctctacctatattatgagaggggtgtatgtacctaatcctctacctaatctataaatagaagcatgtgtaacacttgttgtaactttgatgattgagagtcttgtgagacacaactctaangtcaacttctctccctttttttcttcctcaattcgtgctgccccctctcttttctctcctcttcatttccccattgaagcatctctccaacttttatccaagctcatctggtgggaagctatctccatgcgtattcctagtggaggcgcctcttcactctctctttgcttcactgctctcatgtgaaaataccttaagactcatgagctaagatctactn

SEQ ID NO: 10993 - DNA, 443 bp, Glycine max
  unsure at all n locations
aagtcaatcttcccagccccttcntncctgacctctttanncnnnnnnnnnaaggaanntcacttcacaagacactttatctctaaganaaaccnccccatagcatgtggaaccttatgggctagactatcaccannacttccaagatattctngtaccaacaaacacacatttctttgacataaggacctacatgactactctaacactttggctatcaaaagagcctacgcgcacaccttgggattctaatacctaacatacgcaacttctaaagaaacttgacaaccacacaaaaaggctacatttatgccatttttattcttactcccaaaagtgattcaaatcaatatatttatttggccactaaaatgaattcaatgaacgggttttttatcccttgtttaatacatgcacaaattaaaaatttggaaacattgatt

SEQ ID NO: 10994 - DNA, 375 bp, Glycine max
  unsure at all n locations
tatcttaagctttggtctaaaattgttatatttgcatggaggctaatcagagatagactaccaactagagcgaacttgcggaggcgacagatacaggttggagattcatgatgcccattctgcacagttgaggaggagagcgcaagtcatctattctttttgtgaagcaagatcattccagtatggtgggaatccttatcttgggtgaacttgtcgggcacctttgcatatcatccaaggcaccactatctccaacacatttatggaatgatagatggaatggggtctatgagatggacatggtggtggatggcactgacatggaccatttggaagaacatgagtaatattatcttctcanaaggtacattcaat

SEQ ID NO: 10995 - DNA, 498 bp, Glycine max
  unsure at all n locations
tatggggnnnnaagtccccnnnnnatnactngaanactngacnnnnagactnnnnanccttagganaggatggagcggaaagatattggctcctgctntgttatngngaatagtagctgagggatgtaatgatgattgtgatgtgacacatgtnttactcctttaaacaatcgcgtcatttgcatatttcatttctttgacgtgcaggtctacttttcaaaacttacagaactaatagtctgatataaatagaaaagtcactggtgttaatttgctaactcatgcacactctatgcttggtgggtagggacctacctactgtaattatttttaaatggccagccttctcttggncatatacgccaggggggatagggaaattccattctaacccacatagtggtgatgttttgactcggaataccaagggtntcctcgcgtttggaattcctcctccccacggtaaaatcacttccctttggtaatttcaagtattcg

SEQ ID NO: 10996 - DNA, 348 bp, Glycine max
  unsure at all n locations
atctngtttactcttacctgagtcagtggtgcctaccactatatttcattatacagcaccctcaaatcctgtcaaaattctggccttattttgttatctgtgtaacattactcatgttgaaattactgttaagtaaattatttgatagtgtacaattgtaaggtaaccagttcaattctaagtctctatcaggaataaaaataaaaacaagtcattgatgaatgatccttatccttactactctaaacatgacagcaacacaagacatgattcattgaccactacttttactataaatcaaagccttgtattctggaggtacaaaagccgaaatatcaatgcttcata

SEQ ID NO: 10997 - DNA, 141 bp, Glycine max
agcaaatgagaggatgtacatccgtagcacagtgtcaattggtcctctccatcatggcgaggagggtctataatacatggaagatcgcaagtggcattacctcttcacacttctgagtcgacaaccaaatcagcttgaatc

SEQ ID NO: 10998 - DNA, 259 bp, Glycine max
atcttgtgttctttctttttcagcatctccttgaattgtctagacataagagcaacttcatcgttcatgaactctttacaattgttgtatggcttttcagactcaacaatatgtactttgagagctttagaatagctgttatcttcttgttttcgagagatggtctctttagacatgaaggcagtcaaatcttgttttggaagatgatctatattctaaagatgcacttcgtggactcttatgatacccaaccattcat

SEQ ID NO: 10999 - DNA, 197 bp, Glycine max
tttctgcctgtgcagatcttgctatagctaaatggggggaacaaattcatggccatgtattgcgtttacgtttggtaatgctatgtcactggcaattccattgtactcttattcaaatctgggttgtaacctcaactttctagtgttcatggtttactagaaaagatttatctcttggagcactataatgctgaaaa

SEQ ID NO: 11000 - DNA, 219 bp, Glycine max
ttctttgttcaaattcacacgatattaactggtgaatcggatgtctgattgtgtctcatacgatatctagacgctcgtaattgaaatcagaagttcttagaagaatcacatgacaattaagtttaactcggatgtacgatctgaccctggggtgtatggagacgcacgaatttgataacgggagcgctcagagatatcgaacgaacttacttataactc

SEQ ID NO: 11001 - DNA, 427 bp, Glycine max
  unsure at all n locations
gttagtcttcaaggacgagcgtgaggggtagtgactgttctctatangacttctgagtagcaagcgagtgcattgcactgataagggagcatcccgtctcaacttcaaccggtcgatatattacacggctcgatcagacattcgagctaagactaattacagtctgatgatactcaaacttccgttctcaatctctagcctccttatattcttcgaacacagctgcctctgagtcagaattacctgtgtgtgaactgcatagagcttcctcttcaatcttcatctgctcgattattacggaggtcaatctgaactcncattgaaaattcttagcggataggcctcccaaaacctcgtttcctatgcttcactgcgatatctggtgaacaccaccggactcgacttaatgtgcttcagatcaactccc

SEQ ID NO: 11002 - DNA, 380 bp, Glycine max
  unsure at all n locations
nggtgcaatcctcgacctacacnctgtanaccanaccgnaaaaggaaggtggaggggaacctcggcttaattgtactttaaggtcccggaatattcccgggtttgaaccctgggacctaagggggtgtttgccaaacacttacatccaccaccggttacgcaggaaacttgattcctaaaagcaactctggctcaccattaaggaccaacccaaccgggagctgtgttgttgccaccataaccttgatggatgtggtattgcctctgtatcaataccanggtggtaatcatacaagctaaaatgagacagagctagatggctctgtatcatacacggggtaatcatacagctgaaacgagcagagctaggagctctgatn

SEQ ID NO: 11003 - DNA, 392 bp, Glycine max
  unsure at all n locations
agcttggtattcagtataggttaaatntgcattatttaccatctgctctgcacaacttaatttgngcttctgctctatgcagcattaaaaaccataggtaaccctatatttangctagtaattcgttcttcaaacatgcaacanagaggtcataaaatcaaaccccttacacaattttcagtcgtccatagaggcaagtcctaaaggcatacaacatgactaaaccctaaccatcatcatgctgagcatataaagaagaaaatggcagacatcaaaggttggtaaagagtttgcgttgagcactaaacttgctccaatgtgccccccaaagtccatcacgttacccaaataagaaaggaccttgttcaacacattcaaccactccaatactt

SEQ ID NO: 11004 - DNA, 236 bp, Glycine max
tgctcaaactggcctcgtctatgctgtattgtgcagttgtggaatacaaagatctttgaacatctcctttactacatttttgcaacacctacccctttctctctctctctttcactcatcctaagtttgatttttccttctctcaattcccaacctcgcatctcccattattttattctcaaaccacgacaacaaaagcacaaacttggtttcttaatttcttcttctcgatccta

SEQ ID NO: 11005 - DNA, 273 bp, Glycine max
  unsure at all n locations
aaattaactcgaaagagaggttttcttagatacaggggaaaaagtctctctataatcgattccttctctttgagtgaatcctttagcaacaagtcttgtcttatgtctctcaatgttgccttctaagtctttctttgttntgaagacccatctacatctgatggcttttacaccaacaaccaactcaacgagatcccaaacttggttagatgccatagaatccatctcatccctcatagcattataccacannattgattccttagaactcat

SEQ ID NO: 11006 - DNA, 476 bp, Glycine max
  unsure at all n locations
ggtgaaggttacgngatgcgatntactaaacncagcctggaagangaancgggaacggcgaaacagccgccagatatattttaccttanttnngnacaccccaagctgggcaagtgataccccatgcatggcaagctgtgtcataggttattaagagtaactcccccaaaattctaaacactaacactcagaacgagattccttttaattttaatagaattaacttaaatcccgctaattggtttgcagcacatgtgaatatggtcgaatcaacaatgaaatccactattgaagtagtttgaaattgttaaattaagcgtgggacctctaaattattctcagtgatatttgacaaaaagaagttgattgtgactgactcattaccattagtgaagtcataaaccgatagcattgattcattattccaatatatgaatattctgacncacgaagcgattctagaccagcgtgcgccg

SEQ ID NO: 11007 - DNA, 380 bp, Glycine max
  unsure at all n locations
gcttcaatgcnaggaaacgtgcttgattctggttttagagttagaaaaacatgaaaattaggattttcttgtgagagtttttgctcgaatttgggttgccccatgtttgatactttacatagaggtagcatggaaaacaccttgctatagtgtgtatacataggtgaatataagaagtatgaaatccctatcaaagtgtgaatgattgtcttcctagatgaatgtatgatagtgtggaatgccttttttgaatgcaaatatgtgcaggatgtaattagttctccaatatgcatataaataaataggagtgaaacagtaaaaatttgtatggtgtacttcaaatgtatgtaagtagtttgtgataacaaatgtttatgata

SEQ ID NO: 11008 - DNA, 106 bp, Glycine max
  unsure at all n locations
agcaaatncaaacgacaataactcaggactctgatgtcttattgagtcctgnaaanatcgagagctggaatggaataccaactctaacaaattaacgacataacct

SEQ ID NO: 11009 - DNA, 365 bp, Glycine max
  unsure at all n locations
agcgngctttatatccttgaggtaanatgcgtcaagctagtgacgttaaagaagcgctaactgggaggctacccaactctttntctttggtgtcttaatcattgcatatagtcaggtttcaacttgtttgggattgctagagtaatacatcaacatgttctgtatgagaaaaaaagggtagttcacgctcctgtgaagctgtggatgagagataactctgaaaaattttagacatccactcgcttagcgctctctgtacgctaatcgaatcatccttcatgtgtcgagcgagtgctgactcgcgctaagcgcaccaacccttacccattggctgaagggtccatctaaacgagacagttgtgcca

SEQ ID NO: 11010 - DNA, 365 bp, Glycine max
  unsure at all n locations
gactatngctattnctatgcatnacanaacctnaatggnncccnncccacccctccgaaaagaatattccttagtttccaaaaannggggaaatggcctggtttccttccaaatggaaaatacccatttaaccgtgtagcctattctcttggccaataggcctaaacagggggacaccattataccaccttaataccgtaccaccttattgagcacttttggaccccaataaaatatgatgctggggccagggcccacatcctgacaatgctctaccaaccgaatacattgcggagaccgtaatgcccgtatatccacaaagtcaatattaaatatgatggataagatggaaatattccctctcg

SEQ ID NO: 11011 - DNA, 406 bp, Glycine max
  unsure at all n locations
agcgggattcttnnttttaactttngacctttgaggatcagatcagagtcctagaatgtaacttgaataaaaaagttcattgtaaacagttgaaccatttgttgctagagaacttcattatctttgattcactgggttcactcgagcagagttggctctaacattttacaaagtcttcaagccattgttgacaatgaaattaatatccagtagatgatcaaatctttcaacattttatcagtacaaatattggcttcacgtgaatatctttatatatataaagtatatgtgcgggcatatttgtaagatcaattttccttccttggtttagtctctatattagtaaaattgcatctcatattttcttcaatacaaaatgaaaattataaaaatctataaatatatg

SEQ ID NO: 11012 - DNA, 320 bp, Glycine max
  unsure at all n locations
gctgactagtatgcaacntaaaatacccccccgggcccccaggggggcggagagagcttttttttctcccccccaanggcgcggatattttcttaaaggggaagtgattaaccccaatcggttgcagggaccatatgcccttcccccttctctcctaaaccgaatcccaggaccaccttatggacgccatccgtgtcataccttcaagggccaaactgctgggaaggaaacccacctcttggaatcctgattcaacaccacaacgacggacattgtgggtgaacccccctaggacccataggctttttagaccttgcttc

SEQ ID NO: 11013 - DNA, 245 bp, Glycine max
agcttgtgtatccggtgatgatgaattctttgacgttacacttgacatgcttccaccttccgtgacctagagaaagcacagtgaatggcccctttcagtcttcgggctctaaaggtaggctatcgggttgatgtccggctctagtcatccttcccctgctagctcctaaggtccacctttatcccccttgattgctcaagttgttgttgcttccacgaatgtcactcaatcttcttgcctccttc

SEQ ID NO: 11014 - DNA, 371 bp, Glycine max
  unsure at all n locations
gggncnnnggatgcttctgnatgtgcttttganaacganacatgacacnaacnnggcgggctcggagagaagcattatcctctnattggnncaggccgagagacttgtgggggagggaaccactcaggaggcgtgatattgaagaggatggatgataatttatctttacacagacattatataatcaaataacataaacatccatacaagattagcatagtgaaacaccactgctctaaggtagacccttatgctaacaaactaacatgagatagatagagccgaagaaccaaacaaaatacaatttatacctggcataaacttactcttcttacaaaatatcatcctaacactcttgatttatgatgagc

SEQ ID NO: 11015 - DNA, 275 bp, Glycine max
attgcttctgtgaacaaaaatgcacaccattaaattgcaaaataatgactaacttcacacaattctcaccccatccaatcaaataaataaaaggaagacccagacagacatggaaagatggagcattgacaatattcagataattgtcaaaacagaacattaatataacttttggatgagatatatcccataagtccatcagacatacttcaatttttttggggtgtggtggtgttgggagggggagacacctaatctgatgggtttttctctaa

SEQ ID NO: 11016 - DNA, 462 bp, Glycine max
  unsure at all n locations
gatgatatgnacccgtcgacggacnntcttgananatagactagncaacctaatggcgaacagcgcacgagagagcgcggaagattgccngatanctcanacaaccncnncaagcggaacagagacatttatagctgctgggtgaatccctcacccactcaagtgtatcacaccattatgggctttcccttactgaaccactctggcctttaaccactctaatccccctggagttcttaggcaattcaagagattatggccgcaacatagaacattcaccatatgggaaggtatgctagaacaggaaaatgtaaccatgaaaaagctccaaagttttctggccaaatgatgaaacaaaatcctaattagaattcaagacaatcttatgcaccaaaattacctaagaattttttttaagtcttagcatgaccctcacccactttttttttaatttgttacaan

SEQ ID NO: 11017 - DNA, 362 bp, Glycine max
agcttctatattcaatttcgagcttttcgatatattacgggactcaatcggacatccgagtaaaaagttattgtagtttgaatatgctcagggcttcggtattccatttcgagcgtctcgatatattacgggactcaatcggacatcagagtaaaaagttattgttggttgaattttctcagagcttcagtattccatttcgagcatctcgatatattacgggactcaatcagacatccgagtaaaaagttattgtagtttcaattggctcagggcttcagtattccatttcgagcgtatcgatgtattacgggactcaatcagacatgcgagttaaaagttatcgtcgtctgaatttgctc

SEQ ID NO: 11018 - DNA, 456 bp, Glycine max
  unsure at all n locations
gtctancctcgngtacgantcgagaacatnaatantnaacnnggccagagaaccaggaagagaggaggattgtgccatantgattcctnanancccnagacccgcggcgagggcaaacctaggtatnncacaaatccaacccaaagaccccgtgaatcgcaaggtggcaggagctgccaatgataatgaagatcctaaatatggaaggaaacgcctccccagattcgccgccattcttcattgcttcgatggagataagacccgaaaatatttaaacccgtggcatagatatttgtccataggtcaaattgaccaattcaaacttgtctctcgaagctcgttagccccggtgaaattggcaacgttgatattgaatggggggcctccggcaacgtgaaacagatgatttcttccttggagatgacggtcccattggataccacccccttaatgctt

SEQ ID NO: 11019 - DNA, 350 bp, Glycine max
  unsure at all n locations
ttctnttcttagtcgtctgtaaggatgattgngtgttagaaagcggcgatgcctactgtagactgtttttctcccatgtttcagttgtatgtaacttgtattttcttcacagatggggcatgcatgatgacccttaacactgtaaccgctgagatttccatatgctggaaagtcattaatggtacaaaaaagcattgcacgcatttcaaacgtctctttgcgaaacgcatcatacactacaaccccctcgtcccacaactttctcagatcttcgaccaacggacttagataaacgtcaatgtcatttcctggctgtcttgggcccgatatcatcatacacaacattctgt

SEQ ID NO: 11020 - DNA, 240 bp, Glycine max
  unsure at all n locations
aacatnactcccactattttttttatgcataatcatcaaccaaatctacatcaaaatcataagaagtaatnggatgaaatctgtatattgtaacgagaagattggtttaagcctttagtttggcaccacaaactttggatcattggaacaatgtttcttctgctcctttaaattttttttatcatatacttattcgaacatatcttatttcatatatgtgctctcatcaattattacatt

SEQ ID NO: 11021 - DNA, 350 bp, Glycine max
  unsure at all n locations
atatgtcannggtgtgtggctctggttctagggataaaagaggaatgtcccacattatcttccatgacacaaatgcaacaatgatgatttggaaattttatgcaaaactagtcatgcatgcacctatgtggacactcaagtgtcgaaattttttctggttatgtgatgctaaggctcaggattcatttcccctattttaagtcaacccaaagtctccaaatatgttcttttatcaatatgtgcattcattcgaagccattttatttggtttcaggaaaatttaacaacattcacccttcaagtgtatactcattttttttttcaaaacttggtttgattagttgaaaaaa

SEQ ID NO: 11022 - DNA, 439 bp, Glycine max
  unsure at all n locations
gatactcggatcganacgaccataaatccagctgagcctcgacggaatggagaggggttttacttttngtatcncggaccnnncncnctcnagaggcnctagacatgcaaagctttaaatcccaacccaaactcctttaacaaaatctgatttcaggcttaaataagtggccttgttcgtgctcgggcgcttagcgcatagctggactgcttaccgcacataattgaattttggcttaacacgtgttattctcgcttagcggaaggactgaagcggagcgcttagtgacatgaagcggtgcgcttaccgaaactgaaaagttgatctcttgccaaattttcatgcgcttaccaatgagtgttggcttaacggacactcctaaccaacggattgcttagcgagaagtgaaaatacacttaaaaaactgcttattacctga

SEQ ID NO: 11023 - DNA, 237 bp, Glycine max
  unsure at all n locations
ttcttgatgtatgctaagcctcgcatctcagactaagcgcatattgcagaaagatttttggtgttgaaaaaagcgctaatcgtcgctgccgcgctaagcctaaattcttactgaattttacaacctcaagttgggcttagcgcgaggctaggctaagcgctagtgttttaaactcaaacgtcaaattggcacgctaagagcagtngtgcgctaagcatgccatccgaatttcaattt

SEQ ID NO: 11024 - DNA, 442 bp, Glycine max
  unsure at all n locations
gggaaaaannnngggccgtgtacggtgactgaanacgtaaacananaccnngcagacngngaacannggggggcacaagagagagaagacgacctaacatttctngngcanccnagccacagggggnaggggaaggncaaaaccacccaaccacggngcccccaaaagaaaacagggaccgggccgccaaaaccccaacaaaggcagacnncaccgagggcaaanggcaaggcnnnagannncgcananaccaacaccancaagcggacaggnaaccgccagcccagaagaaaaacgacgagggaagaaagccacgggcaccagacacanacaccgcaaccaagaacaaccgaccaaancaaagccacccaaagcaaacggggaacgaccaaggcnccacaacagagggaggggagcgagccggagcnccacaacccccgcc

SEQ ID NO: 11025 - DNA, 183 bp, Glycine max
  unsure at all n locations
ttcacaacaatccttgtgataaaccttgaacttattacaagctataactgcacttatacgagtaactgattaatgtcatcctcttcangctaaagttcatgtcatgtggataatgaccagaccctccttctagatacatcacgggtacttgaaatttttaccttacgaaactaccttactgaa

SEQ ID NO: 11026 - DNA, 155 bp, Glycine max
atgagtctacgtcaatcctttgtattatctcttctgcagcgctcaaactcagagaagtaacaagttgacagaagcaacaaatgacatgctcttataaatactgttagaaaatcgtgatcccctgaatagcctccttttctacatggctatgattg

SEQ ID NO: 11027 - DNA, 388 bp, Glycine max
  unsure at all n locations
agcttaagtttccgtctaaaattgttatatttgcatggaggctaatcagagatagactaccaactagagcgaacttgcggaggcgacagatagaggttggagattcaagatgcctattctacagagctgangaggagagcgcangtcatctattctttcagtgcagcaagataattccagtaaggtgggagtccttgtcttgggtgaacttgtcgggtgtctttccaaatcatccaaggcaacactttctccaacacatatatggaatgacagagggaatgaggtctagtaaatggaaatgatggtggttggcactgacatagaccatttggaagcacagaaatgatattattttctcaaatggtacattcaatgccaacagaatcct

SEQ ID NO: 11028 - DNA, 288 bp, Glycine max
  unsure at all n locations
tcgtccatgactttatcggagctgaanatctggttattgaaatctaccgaanngctatgcttccaaatagacatggatagagctatccaaagcacttcccatctcttgtctagatatcttttgctattccaatgagagaattgtatacaatgattcttagggtcaatggggaaagggcccactctactaacccaactcagaacctcccaccaaaggctcctatttgatgtgcaggacaacatgatacgaccaactgtttactcctctacatcacataaagggcatcta

SEQ ID NO: 11029 - DNA, 391 bp, Glycine max
  unsure at all n locations
agctttgttctcagaaccctcttgttggactatacttagaccaaacaacattattgtaatagcatacttaaaaccaaaacttaatccgcagattcctcttataagactaagttctaattctgcttcattcaagttctaaggcaacaatacattntccaatgttaaaatcacctatctaggcacacaaatggttgatcagaccaagagcatacaaaatttaagcattgaaagaagcattgaacacaagaaacacaatcaattagatatgaaaataattacatcagttgttcggtagaaatacccaacaagggtgtttagccagccattacagaagagaccctaacaataataagcttacaaaacctaggtatctttgcaaaagctgcttctc

SEQ ID NO: 11030 - DNA, 468 bp, Glycine max
  unsure at all n locations
gggaggtactcgatgagnctattgannaacnnaacctgctgggaattaggacaggggctncctgctggtgtgtgattttccatttnccatttttccggaccaaatccattatgatggtgtgaaggttagaaccatgaattccttattaaggaattcatgggccaatttttgaattactttgtaatggaccaagtcttattagaaccaaagaccttttaacccttatttccaaggacaagaaaacctccattacacttaagggaacccccttgaaatcatctctctaattcattacttgcacctgctttatatattatttggcaatcttaatataaccaacttcacaattgatcctatattgttattagatggtaacaaatgataatggcataaaaactcccaatggttgaacttactctggtacttctatgcagtgattcatggatggagcttggacagttacactag

SEQ ID NO: 11031 - DNA, 391 bp, Glycine max
  unsure at all n locations
gcgatccatttctgannctngcnatngcaannccnngcccnnagcagagggaagaggggggtataatttttanncccnaaccaggccgagggggatcaaaccaccaaccacacccaaccagaccaagacgagacacagggacacaaaaacaacaccaagaaaaacagcaaccgatagcagaaacgaaagaacaacgacagcccacgccccgaggggcctcaaaccacagcaaacagccacgcagaaccgcacaacaaaaccaaagacgaacacgacccacacaccaagccaacaccgaaaccacaccccacccccccagccacccgaagcaatacgagcgacgcacgccagccacgctaacaaagactccaggaaacacacacaaagaacg

SEQ ID NO: 11032 - DNA, 409 bp, Glycine max
agcttttatctatcctttttagctactaattaacttttcagtttgcaattagattttcaactaattttatcgaatataacctatatctcattttaaaaaatataaaacaataaaagagcatttgtttcataaaatctttttacatttattaccaaaaatataacaagggaatatcatttccttgtatttaaaaaatcgtttggttacatttttatattattgagaataatttttgaaatttaaaataatttagataaaaaataaataaaaagaagtttcagacgtattagacaataaattctcacattctcatgaaaatatcactttctcaccctcctcatgggaatataaatattagagaatataataaaaaaattataacattaattctcaagaatcaataatacca

SEQ ID NO: 11033 - DNA, 355 bp, Glycine max
  unsure at all n locations
agtgcatgatcttganncacaccttcctttcgggggccatatggcgaaaattaattttctttcggccaaaaagggcccaggaaggtaatacacccttccatcctcttgacaaaattggatattgtggataatatcttccggctttggtactcgttgaggaaccatttccggccaagagttatcttggaacctagaatttgaggacttcctaaaacataatgaaccactgttccataccagagaggagtgatggcaaaattttaccccgctatagatcaactcttaagcatcttaacctgacaccaagaatccctatatagagaatttagactagattgaacacggccaaaatgct

SEQ ID NO: 11034 - DNA, 374 bp, Glycine max
  unsure at all n locations
agcttgtatttagttatgtgccacctggataactaacttacatactccagctactctgaactgagtacaatactcactgcctccgcatacgacccttgttcacctttgtttctggcatcattctcaggtacgtatctctagacccctctggatgatgtttaccctcatttcttccncttgcagctgtatgtgaatattcacgtattggtctcccaaatatagtagtgtttacaaacacttttaaccccccaaaaccatgctgtctagcttcttttccacctgatgaacatcttgcacccctttgaatttaacaaacccgtatctctttcaaattttgtttcgtatcagagatatgaaaatctccctcacatcac

SEQ ID NO: 11035 - DNA, 443 bp, Glycine max
  unsure at all n locations
ggaagattcangcttcgtacancttanaaattaaccccnaccatggatggcttggccatcaaagcccaagggagccttcttanctttcttcactccacaaaccccaggacttccgggaatttggaaaactttcattctccaatcaaaaattggcctccgggtaatgcttcttttgaaaataagggaaatcctcttaggaaggccttgcaatttgataggagaaccatttcatggacctactaatggaattaccctaacattcttggaactaaatttgggtgcatcctcaaacactttttcagtacctaaggatcaggtccaataaactaaattggattggaaaggaatcaaaaagaaatagaccacctttatggttaagagaatgtaggaagaagtgctcctcaaaggtaactaaaagaaagctttacataaaacaccttaan

SEQ ID NO: 11036 - DNA, 409 bp, Glycine max
  unsure at all n locations
aaaaannttgtatcctgatcgantcaaactaacataacnngaccaggactcgagcgaggagaggttcgccttnacttggnnaccaggggagagagaaacgaaagtggcaattggagccactaggccccaacaagcgatgacacagacagcagggaaactgagatacgccaaagaggccgccaaatcaaaaacggctacaggcccccaattttacccaaaaatggacacgctacctccggcaaggggaggcccgcgcacacacaacctttcaacaacaaatgacctcaacccggaaaatccattacccccctaacaccgaatccaatgggccgacaaccctaatcaacacatttcaaacggaccaggccccactgaacccaaggaacaaccctacacctaacgtaaccac

SEQ ID NO: 11037 - DNA, 394 bp, Glycine max
  unsure at all n locations
tttctntattatgctccatgantctactntacaaaacagataaacatacatgcgaatgttaaactgatgacagtgacactgaataaatttagaatgttaaactgctacttcacttcatgatgataatgtttatctttcttgtatttttaaacaatttatctactatgtaaatatattatcaatgtgtaatctattttaattggcacattagttttcattttattcctactttataaatcagataaacatacatgcaaaattttttacaaacaacccgtgtgtacgcacgggttgccaactagtgtacatatataaaatgagaagtgtggggttagttctgaaatataaacagaaatggatggggtattttgggaaaaattattttagaataatg

SEQ ID NO: 11038 - DNA, 281 bp, Glycine max
  unsure at all n locations
atgcgccatattccctacgaacgtgcacttgcacaagacattctattaactaagaaaaatgcacccatatacaatcaaggtagcttcattacctagattatttacatgtacttcaaggtgtatttgttaattacatcacnacacgccctcctttggctaaaatttacattacatggcatactcaaaagcattttcggggtacccaaaattgcacatgcgctcatcttggtatttctaatacctatacatatacaaacttcatgatgaatcttgactaccta

SEQ ID NO: 11039 - DNA, 406 bp, Glycine max
  unsure at all n locations
agctttgattagtgttgcttttcaccttctcgctaagccaatctgcaggtttagcgagcatccgctaagcgcacgcactcataagctaagcttgaggaagactctggacgaagatgagttatacaggttcactaagcacaccgctgcatctcactaagtgcaccacttcatcacatctgctaagcgagaaaggcacgcgctaagccaaaattcactaatgtgcgctaagcggtccataagtgcgctaagcgcgcgagcacgaataaggccacctatttatgcctgacattagatattagaggggagtttggactgggattcagagctntgtatgtctagggtttctagagaaagagaggtgcaagttccatagagttgtgagagattgtgctgactgaagatctgc

SEQ ID NO: 11040 - DNA, 363 bp, Glycine max
  unsure at all n locations
gatgtgacctgtactatcgannctgaacattgacacnaacctggctccccttcactaacctcaggaattacaactttatgtcccagctaaaccaacataacatcgtcctaatgtcatacctttaatggtggtcatacgccctctaagcttaccagttaatatccacagcatggctgaatacaaatttatctcagcaaaggacatgagggctttgcttaaagcaaggtccatcttttgtgaaaaaatagaattttgagtattgttcccagaccttgaactaaagaataccaattcacccatctgcacaggtaatcctttgaatgctggttattttaaaaccatattgtggaaaacatttgcgaa

SEQ ID NO: 11041 - DNA, 356 bp, Glycine max
  unsure at all n locations
ttcttacatatgaagatgtgtttgttggagaatttaatgcatgcttccattaaatgcacaccctttccataccgagaaaccactttctttagctttcttgaagaatacttcaattaagcagataaccatgtgcttttggtaaaatcagttttgtcacaatagccacaacaatatgcatcttttgaaattgtttgaacttgaaagtgtcaaatgttatcttacttcttaagacttcgacaaatcccggaagaattnttttaagacagtttctataaaacgaatatcagacacatggtattaaatgaagtcttaaatacttcactataacataacatatgtctattttcgtctaatac

SEQ ID NO: 11042 - DNA, 89 bp, Glycine max
  unsure at all n locations
tctagctcacccttcacgatatgtcattgaacatttttcttttttgtgcatgataaanagatatagggttccaagtgggaaatacaagt

SEQ ID NO: 11043 - DNA, 303 bp, Glycine max
  unsure at all n locations
ttctntttgttaagacacatatcttcaaaccattttgaaaaggcatgaagggcctatatatatgtgtgtccgacttcaaaaagtaagagagagagagagatattctaagagaacttaattgccaaattctctcttaacaactcttaggcaaacacttgcaaatctattgagaattcatccaggaacttcaaattgtatatcatctctaaaagagagaaattcctctaagaacttcaatctgtatcatccactcctaacgagagaaatattcctgttcatctcaaaaagtcaattgtaatcaag

SEQ ID NO: 11044 - DNA, 263 bp, Glycine max
  unsure at all n locations
cctatactcgggctcctttacagccaattacacaaacgaagccttccttatacctgtgntgtgtagacctacaatcaccgccgaaatcatttcataacaacgattgagcccaccgagacatccttcgattgtaaacactataacaatttgatattcagttcctacacatttatttataaatcctcaaatatgacatatacctgaaagattgaatgctcgacatcacatgggtcattactacatcttttatttatatcatatcc

SEQ ID NO: 11045 - DNA, 260 bp, Glycine max
  unsure at all n locations
ttcttgtgcttttcaaatcactcctacatctcatctctagcatgcattttctttctttacccactcctcacgtttggttttttagggaaaaacaccataactaaacgcgccgcaagggatccctatcgcaccagatccaaatctagaacgatgggtgatcaagaggagacgcangaacagatgaaagccgacatgtcggctctgaaagaacaaatggcctccatgatggaggccatgttangtatgaaacagctcatgga

SEQ ID NO: 11046 - DNA, 201 bp, Glycine max
  unsure at all n locations
tcagaccanaataactcagaatctaggcatctaaatcctctctttttagtggatnnnncaaggtttgagaagtgaaaatgagaatggggtaaatttggagcanactttcacctcagacaagtctatatcatcaatctaaacttgctcaaactggttntacgcctaaaattccaccgaatcanaatttgactcctcaacacc

SEQ ID NO: 11047 - DNA, 160 bp, Glycine max
  unsure at all n locations
agcttctatctcaatggacttaccttgaattaattccttcgatagcccttttgagccttgattccctttccttgttttgaagctcactacaagcctcaagtgaaaaaccatgatatcaccatatacttaaggaattntggagctgtggaattgttttggg

SEQ ID NO: 11048 - DNA, 267 bp, Glycine max
  unsure at all n locations
tctcaacaagagaccagagcctccattcagagcttnctttatctatgggacaatnggctacacagttaaatcaacaactgtcccagaattntgacagattaccttctcaatctgtccagaatcccaaaaatgtgagtgccattacattgaggtcgagaaagtagtgtcaaggacctcaaccagcaacatcttcctcatccgcaaatgaacctgcccaacttcactctactccagaanaagatgatgacaaaaatttaaagagtaagt

SEQ ID NO: 11049 - DNA, 386 bp, Glycine max
  unsure at all n locations
agcttctttgttagacctcgatcggtcatctttccaggccgaggtcgaccgtcatttatttcgatccatttcggtgaataatatttttttgccgagatgggctaattgtttcctggccgaataaatgggaaaatgccagtttcggccgaaacgaanagtcggttgggctcgcacaaaaaaacctagccgacctacattttaaattttttatgcaacaccaaaacaagagaacttcctgtgccgtaaaaaaaaaacattacatgacagcgagcgttttgaaaaacaaaattgcgcaacgtcggcttgaaaatatcaatcggtgctttttcacgaccgatgccggctattgagtgttcaattcaatccgtgaacaaaatttgcatgat

SEQ ID NO: 11050 - DNA, 402 bp, Glycine max
  unsure at all n locations
caccggatgacgccgatcgaacatttcctaaccgatgtcatttaaattncgnncagggatngaatngaaagctcgttatgcgacatctgtcgtgaagtaccgaccgatatttttcagccgacattgcacaatactttttagaaaagctcgctggtcgataatgtctttttacggcaaataagttttcttgttttggtgtgcataaaaagttacaatgtactcggctaagttttcgtgcgagtccaaccacttttggttccgccagaaaacatatgccaacctctgcaaaaaatatttgctacccgctncatgcattttgcatcaacgattgaataaaaactcatacccgacaccgtcgtaaaaatcccgctgaaatttcacccggatgcgcatttttttaaa

SEQ ID NO: 11051 - DNA, 403 bp, Glycine max
  unsure at all n locations
ggggcaggtggtgagcatgtacatgngctctaactctacacgcgatccttaagtcaccgcaggctgcagctgagtataatgtttagctcggatgatagtatgaactccagattgccattgtcagggatgtgatgggtaccttcacttgaggtgggactatatctcattggattgtgctaaggtgtgctgtttggggtgattttgtacgatggtaaccttgaagactatgagaagacagtcatttatgaagtaaaactggctatgatataggagtgcttgtgatctttgcccgcttataacattatttgatctttagtaagtctcgatcttatgtttaccttgagtgaagtaagaacacctgtctattgatttctttgttaatgatatttacggttatatggac

SEQ ID NO: 11052 - DNA, 458 bp, Glycine max
  unsure at all n locations
nnaatgctcgacgagtcagnggctactngcannancacnnaaccnngaggcatggactcacggccaaaggatgaggacgaggaaggtgtcnntcttaaatgatnnaaanaaanntagaaaaatggggatggttcactttttccagagattaaggggatctattattacaagggcaatgagttccagttntggagattccttctcaatccagggacctagtttaggtgatgagagtctcatgtatacgcccgttttaatctttgaccaagttaagggggggacccttctccagcatggaacaaatgtcgcctattttattggtgctgattaaatgtgtttgcctccacttatccaggctctggtttttggttggcaaactctaatgagcgctttcatccctaaagaaaagggttttaaacctgccaccccacccttttctttgtggtgcatcccttggg

SEQ ID NO: 11053 - DNA, 384 bp, Glycine max
agcttggctctaaatgatccctactcgagggaaaccacatattaaccctagctgaggtcaaccactaaccctagttgaggtcaagcaaaaatagtctagtcgagtggctaataataaccttgattgaggtctagctaaaatagccttggtcgaggtcatttgagattagtcttactcgagtcgaccgaaaataaccttggtcgactttgtccaaaaatagtcctgaccgaagtcaaccgaaaatagttatggtcaaggacgacccacaataattctggtcaagctcggtcgaaaaataactctagttgaggttgatcgaaagatgtcggccgataattgaccctaattgagatcatactgaaattaaccctacctgaggtcagt

SEQ ID NO: 11054 - DNA, 527 bp, Glycine max
  unsure at all n locations
ggacggatgannccatgncgncgttancngtancnnnctgtngannananntanaactnnggcaacggcgaggtgcganngnaagccgaacgctgtgagcgtgaggcatgtgtatccactcnctggnntaagaaangagaaaaatcccccaagaagagagatgttnccgggtgagatttctcnctcttatatttacttaaaagaggganccttntatataatacaataatagtttaccccctttttggattcccacctgggttcggcgccaacgaaccaatcggaattcttttaacccgaagttaacggatataccatttaaaccagatcgggggaaaattaatttattttttaggttaacaaaaatgacttaataaaatggtttagcccgtcagaagggggttctaacaaggtaatgaattgagaataaaattctccgaaacccattgtggccaccccgggtacttataatgattcaaaagctgggtccaggacttacccgtgaaaccgagaacgatagaccatga

SEQ ID NO: 11055 - DNA, 388 bp, Glycine max
agctgacttatctcccatggctaccaacgatctgattcggatcattctcttttcttgcgcataaccggctccacaattaccatcctcttagtatatgtagacgacataattcttacagggaacagcttgacggagatacaggctataaccactctgttggaccaagagtttcgaattaaagaccttgggaacttgaagttctttctggggctggagattgctcgaacctctaaaggaattcatctatgccagcgtaagtatgtattagatatcttatctgaatcaggcatgttaggttgcaagccgcattcaacaccaatggattattcaataaaactacaaaagagctcgggtaaccctcttccgaacgagtcttcttcctcttatc

SEQ ID NO: 11056 - DNA, 429 bp, Glycine max
  unsure at all n locations
gatgtattcatgcantccaacaccntnaacacnaacctngggctctgaggactggctccantggctcagcatgactgctattgtcctcttctncttaggccggaaaagaacccatcattgggcctacggcctttgaacctaattcctaaaactctccataccccaaacaccttattcaatttaccaattaggaccgaaggacttttccacaacccaaattcttcatatttctacttacccttcttttgttcacataaccacaccttgtgccaaatctagataaattcgaatccttcatatcatgatcaaactcctacgtaaagttgtaagccaccttttttccttataacaccttaaggagttttcaatctccatctctttgatgggtgcattacacaactgacatactctccaccttgagataaatac

SEQ ID NO: 11057 - DNA, 387 bp, Glycine max
  unsure at all n locations
agcttccattttgatttacatgattctttagaatttccaccgattaatcttgctatagaagctacatttgattttctatggttcanatttcttgttcttgatcttgttcttgaaccatgaattgtgttgagtataagttcctttgagttttgtcttgttatttattgtggctgaaacctaaaccataaaattatttcaaaaacattaaattataagaaaacctcataaatatagagtggcttgttcacctattgtagttatgtcatagaagtcatgtctagtcatgaaacttgtcacataagatatcttatattgtgctgaatcttatttttcttgcttctttgtctaactcatttgttcatgattgtatgaaattctttcacctat

SEQ ID NO: 11058 - DNA, 476 bp, Glycine max
  unsure at all n locations
nnttcgccagtcangcatcagcgactccgtgaananntnaaccnnggaggctgtggagaagaattacatgtggctcatcatcaaatttggagttantgtgtttgtatccatccgtgatgtggataaccatggcttcagaattattacagaattgctcacaccatatacgcgtggttccaagattattccaagatggatggctccacactataccatggcttcaaaattattccagaatggcttcaccaattaaagccttccttcangattacctcaaatttcaagccttgccttanaacaaagtgctttcagaacttgcaaggctttgataatcaataacctggcagtgtaatcgattaccagaagatagggtggaaaaattgctgtcgaaaggggttttgaatttgaattttcacatgaaccgtttacatatgtcggtatcgataccacatcgaacctcctgaattcaaatcaan

SEQ ID NO: 11059 - DNA, 329 bp, Glycine max
tggatgcaaaagtttattatgactatggttatgatgactacaaatgatacacaagtctcaagagaatcctgcggtccatatgccctgttgagggaagggacaataaatctgcacccttggattttcaaaccccaaaaagatttggcaatcactacttcataaacattcttgaagggaaagacttgttaggttctgacaatgttcttattagccatgacttacttggaaagattacagagcaggtgtgggattatgcctctaatgaaaaaatcttgtctgcttcatttgctaaatctatgattaggatgggaaacatcaatgttcttact

SEQ ID NO: 11060 - DNA, 458 bp, Glycine max
  unsure at all n locations
tgggatganctttttgannacngcactcgtagaaccccagcgcntaggtgtataatcaatagcctcattaggagagagcgcaatattgtccaattgggttttaaaaanaaaggaggaggagaattggtcctggaccaccaaataacccacattaggtcttccagataaccacccgccaggaatntaacagaatttaccttagaatacggggcattagaactaaaaaaaatntttggggaaatgctagaaaaacactttgagaccttctttaaggataatactcattctgatcctgaaatgtgaagcaggacaaattaatctgaaaaagaaaaatcaatttagccctatggacaaaagggtgcagatggtcttgccttaattgggaatcatttgaatggcaaaatcaatttgcctgcctatcttgagggacagtttaaccttcttaccccctaattgtg

SEQ ID NO: 11061 - DNA, 401 bp, Glycine max
  unsure at all n locations
gttccaattacaggacgtgaccgtggcagagagaactgtgaaggcatgggaatacaataagcgatgcgactgggatatgggaacaccacccatacaatacaacacagatatccgttcacattacacaggcaccacttagcagactctgctgcattgatgcgaggggaggcttgattgagcttcgtttttcctttccttaccgccatattacgttgagaatggcattgccggtattctccgatgccaactacctaaggatgtcgaccatgctcgccgaatctcctcgcactcgtcgctaacaagaactgcgctcctctcatgctctgattagcagtacttcatcatcttcctctctctcactctgtatatattagtttncttcttcaattaaacgattgact

SEQ ID NO: 11062 - DNA, 489 bp, Glycine max
  unsure at all n locations
ggagacatatcgagcattgcacnncnnnanaaatnnacccgcaaccngncacgcggacncccnaggaagagagaggagacatttacctactngancnannnnnccncagcccacgggacaggccagaacagacaacancccccacccggaaacacccggaaancccccacccctaccaaagacggagaccggcacatggacatacacaagggcccacgataaaacgcacacactgccaaagataaaacacaggcacctgccagccccgcaggacccaatactagataaccggagaatgcacagaccaacctagcgaaatatgccagataacagactttgccaggcacgacaaacagatgggaagaatggaatagtgatacaagacaaaggcaaacacagacgcatcgcgcccaccccggaccaaagccaacagacgcagcgcccgcggcaccacacaaacgaagggccgacaaacaccaacaagcaccc

SEQ ID NO: 11063 - DNA, 686 bp, Glycine max
  unsure at all n locations
agcnnannaagggttgcgactgatgccatgacagcnatcgcacactccannggacgaattcgagcctcggtaccccggnggaatcctnnctagagtcgactcgtgcagggcgatgccatatgctntacttatcagnganacncnnctatctntcnnatgagtgctatngacgcagtnttnnttcttggacccacgtcntgnngtcttccccgtngtntngtntngtnntcntcngtnntcttnnntatcantgtnnntctacacctnntctcccttttatcctntcacanacntnntcttnntctggtcattatnncacagtcatttcccttttttcanacatgtcattatcttcacgtgtatcaccagtgctattcaccttctgtcagacatctctgttcgtaccccttttacttgcgtgctagtgccctattatcanaccatatcttttcatcacactgatcttgncgtcttattcccctctattcaactgtcattgtaatcaccttgtacaccccgtctatcaccttgtncanacgttctatgtctcccctgnttcacgcgctatcnncttttcgtctttaccnncgtacaacggttcacgcttatcatgcctcctgtattcacaattcccttcatttctttcccttttggtagtattttacttctttcacttatcatttgcn

SEQ ID NO: 11064 - DNA, 167 bp, Glycine max
  unsure at all n locations
tcaagctgtgatattatcttagaatgtgggcttaagaccctacttcaactctccanaaccaactngtaaggggaggattgtctaagctntataagttctatttaagtcatatctctaggtggtgtgagactaaacatgcccccttaagactacaattaaagcaaccc

SEQ ID NO: 11065 - DNA, 397 bp, Glycine max
  unsure at all n locations
tgcttctttgaganaacttccttgagaagctagagtttagctacgcacacccatctaaaaactaagctcacctccttgagaagcttccttgagaagctagagcttagctacacacacccatctaaaaactaagctcacctccttgagaagcttccttgagaagctagaggttagctacccacccctataatagctaagctcaaccccatgacaaacaaacatgataatacagagaaaaaatcctactacaaagactactcaaaatgccctgaattacaaggctaaaaccctatactactagaatggccaaaatcaaggcccaaaagaagaaacaacctattctactattacaaagatgagtgacccaaccttggccatgggctaaaaatctacccta

SEQ ID NO: 11066 - DNA, 158 bp, Glycine max
  unsure at all n locations
ngagatgaggaagtgtngaagggtgaaacttcctgcttnnacttttgacctcttagtggnaccnggagatatgncgcgggggtcatgagaccttgnggacctcaggtggggtgctattgcccaaaaccaagcttgaccaatcccgacccaacccgggc

SEQ ID NO: 11067 - DNA, 141 bp, Glycine max
tgattgcttagatatgtgctgtttgcctctccctggctgtgtctgcctatatgaatataatccaagtctataaagctaataactctctatctatcctccttaatcatgttaatactcttcaggagctaaagagagagagag

SEQ ID NO: 11068 - DNA, 316 bp, Glycine max
atacaaactcatggttggggggtaactttaatagatagccaatgaacccttattgaatgccctcacctaaaaagtgggttaattggtagaaatacaatgcataatttaagtggcgtttaaaaaaatataagtggggcagagcattggataaggaggccagacatttttttcagggttcataattctttttttcaaaattgaaaggaatacaatttggggtgacatgacttttagacacacttgctccgccttataacaaccaaaattgtgattaataacatcttatttgatcgttataatactcattatggattgg

SEQ ID NO: 11069 - DNA, 351 bp, Glycine max
  unsure at all n locations
agcttctatataaggttcgttcctaatatctctacaatttcatcacctctcaatgagctagtgaagaagaatgtgacatttacctgcggtgaaaaacaagagcaagcctttgctctgctcanagaaaagcttactaaggcacctgttctaactcttcctgacttttctaaaacttttgagctaaaatgtgatgcttctggagtgtgagttggagctgttttgttgcaaggtgggcaccctattgcttattctagtgataaacttcatggtgcgacccttaactaccccacctatgataaagaagcttatgccttaataagagcactccgaacttgggaacattaccttgtt

SEQ ID NO: 11070 - DNA, 283 bp, Glycine max
  unsure at all n locations
tnttggttngtattggatgatgctagtttaagaatattttggcttgtgtgtgaatnnatatnnngaagggttcaatgattgacttatactatgtattgctttattactttaattgtatcatgtatgctagtgaataacanattgacaataggaacacaaactattaagttgtagcgctagtttgatgtccctgccttctttcattaaccaatgtctagttttgctaaaagtttctcctacttcagtgtttgaagcccttaaaattattctttcattagaatcc

SEQ ID NO: 11071 - DNA, 348 bp, Glycine max
agcttcacttcacagtatgacagtcacacagaaacagtttatttgttttttttaagaaaataatatcttatacccattaattattgatctaggaggtgcacaaattacagcggcttcgttcttcttatatgattgtttagctgtctgaactttctcttttatcatttcggtgacaaaagtgtagaactactaacactggtgttgagataatgattcttagcacctgctagtgccactatttaatagtagacaaactgttattcactgttcttatatagacaagaagaaaatatatttgtgtcacataaaaatgaaataattggttacaatatgcataatatcttaaca

SEQ ID NO: 11072 - DNA, 360 bp, Glycine max
  unsure at all n locations
gcgtctgttcattttctttatnntgcacacatgaaaccaaccggagatctgcagggcatgaannangcnaanaataaaannnnagcnaaannnnggngnaagatagagagaagaccacgccanncaggngaaccngngaaaaaaaacnccggggggcannaccaaccaacacccggcggncccaagcngaacgaccgacaagnggaaccaaacagcagggcaccgcagcaaacacaacgcccacaacaaaaaccagnaaacgcggggcccgaacaaagacgaaagcacacgcnggcagggaccccgncagacagaccgcgccggagacaaagagggaaacaagggcaggaaaaaacacaa

SEQ ID NO: 11073 - DNA, 317 bp, Glycine max
  unsure at all n locations
agaagattcctagagaagctagagcttagctacacacacctctctaatagctaagctcacctccttgagatgagaaactagagcttagctacacaccccttataatagctaagttcacccccatgccaaaatacatganaatataaaaaaaaggtccctactacaaagactactcagaatgccttgaaatacaaggctaanaccctatactactagagtggtcaaaatacaaggtccaaaagaaggaaaaacctattctaatatttacaaagaagagtggacccaaccttggcccatgggcttagaaatctaccctg

SEQ ID NO: 11074 - DNA, 470 bp, Glycine max
  unsure at all n locations
aagcactcgatgcagtgctaatgaanacacnaacctaaacataagtcatancccaaaatatggcncaaaagggtttttttttttttttaannaanaacaagggacaggtcatttgggaccatctaaaatcttttaatntttttaaagtaaaccaaaggacaattcttcaaagggaaccaaagaaacttaaaaaattattcctttttggaataattaatttaaaaataatattatttttaaaaccttaaaaaaaatccggtaatttaaacctgaaccaaataccacatggcactggattnttcccaaaggtaacccaaccaagcttatgattntcattgaaaaaccaaatcgtgaaaaccaatgcgtgaacaactatatatnttatttaaatataaaagaccggaatcttgggtttttttttccttttaatataattgggaaaaaagttaaatacctgtttnttagcagcn

SEQ ID NO: 11075 - DNA, 377 bp, Glycine max
agcttagttttacttatttacaaacaaggccgtgcttcaagcatgttctactcaaccgtcaatactaataagacaatcaagacttaaaattggctatatgtgcataatgatggattatagctcacgtgataatacacgatctagcttcatttgctgatgataatatatgatttcatataatttacaacctatgacttaaatgaagcagctgatgattctactttatggttgcccttcatactaccggaatgaacttagaatactaataatttgatctgcaaaactaattaatatgggatagttagaagggacagagtcggccattgatttgctgttgatgcataatggttcacaaattgctgcatgcctgcctgtac

SEQ ID NO: 11076 - DNA, 414 bp, Glycine max
  unsure at all n locations
gtgtgaactagacctcgannncgtgaaaatanactnnncaccgctcctacancaatggaagaaaggaccagttttgactttttgacagnaangacancctggggaacgttcaaccaatggtaattcccttttgacctatatattacagacctcaatatgtatcccatgagatagcctcaagaatttacctgctgacaatatttaaaaaccaacatgaaccagtctaccttaacaaattatcagtgcgtttcaatattaaatattctaacttatgaacctttgctatctgtacatttaatagctgcgttttaaaacctgccgataataatttgcactgcgatgctggcttaggaaaacacatggtggtataggtcacatccccaaacgctaggatccatttggttactaaccacg

SEQ ID NO: 11077 - DNA, 385 bp, Glycine max
  unsure at all n locations
agctatgattcttgctttggactctngaaatctgccaaagttggtcgaaacattctcagagtttttattttgaccaatatatttccgacatgtttcgctatatttcatgttttcagatacttttttctttcttttttctctttcttctttaatattgatgtatcgtatcctccaagttaaaagtgttttcaacacattccaacttgtggggtattagacataaaattaatttatttagttattaggaacttatctgagtaatttagtagattactcaagttatagttactagaaattatttgagaaagttattgttggttactcaagatagatattttctatcttatataaatacatcaaccttatagtactttgatgaatgaat

SEQ ID NO: 11078 - DNA, 214 bp, Glycine max
  unsure at all n locations
gacatgagctgaacnactaaaaccaacagagggaaatccgcattccacccgccgccgaaacgaaaaaacccaccccggaaccacaacaaaaaggaaaaaacacgacaaccccccaaaagaaaacaaagaacgccgcccaacagaaaaagggaggcgaaaacaaaaaagaggcacccaaaacaggaaaaaaacaacagaaagaagaccgcaaacc

SEQ ID NO: 11079 - DNA, 398 bp, Glycine max
  unsure at all n locations
agcttgacttatccctacccaacccgggcatagtcagtcagtgagaacctgtgatgtacctaagcangcgagctcctgacagtcaacagataaaaggaattaagaccacaaagcaaggaggcttgtgtggtggctggccagctgtgaactttgattaatatatgggatatggcctctggtaatcgattaccaagggtgggtaatcgattacaaggcttaaaaatgaagacaggaggctaagatggtctctggtaatcgattaccaagggagtgtaatcgattaccaggcttgaaaacgatgtcangaagctaggaaggcttctggtaatcgattaccaaggggtgtaatcgattaccacgcttaaaaatgaagacagcatgtngtggaggcctctggt

SEQ ID NO: 11080 - DNA, 424 bp, Glycine max
  unsure at all n locations
ggggnnnnngggtgtaagcttgctatgctacncnntnaaannaacccggggcaangacccggcggagcaaagaggggggcaattaatttttaaaaggaggccaccacggggatcattaaaaaaggaggtnacctaaggagttaccataacatccggttccacagaaaccggtggttaacctactaaggtaccatcggttttccaanaaccgggggtcccaattaaggtaacttccgtttttcaaaaccgatgtaaggaaactaataacatcgttctttaataccgatgttacaactccctttataccatttgcaccggtaaccttacacaatttctcaactgatttaaggacatgtaaatgaacggtggaccacttgaggagggggcctcctgacaaattggatgcttctcagaggctgtcgtc

SEQ ID NO: 11081 - DNA, 324 bp, Glycine max
agcttggttatgatgcttcaatggaggaaaagaaagagggagagaaagagagaggggggagcaccaaagaaaggcctttcattggaagtgtgttggggggtaggattgcatcagctgcgcacatcacatatgaaaacttgttttttttgcgttgtgactattcatgaccctgttccgcatcacgcatcgacctcacacagattattaagatctacattaatgcggtgtctgtgcatgttaatgaacagtgtgtagttgcacatattgcaaatgttagcctggttttttgtgtcatgactattcaaggcattgttccgcatcatg

SEQ ID NO: 11082 - DNA, 419 bp, Glycine max
  unsure at all n locations
ggggataacatgcaatcgacnncngaaannnaacctnnnagcgtagccnctagcagaaggcgtggcgaagcactcattatcttattgnctntgaaatgaaagacaaagacatggaatctttaaaatgggactgagacatggaatctttgaaaagaaaaagactgagcgattgaatctttgaaaagtaaaaggtaaagacatggaagctttaaatgtaaaggctgaaacatggaacctttgaaatgtaaagatgaaacataaagctttaaatgcaaagacggaacttgaagctttgaaatgtgacaagacatgaatcttgaaatgtaagactaagacttgagctttggaagaaagacgaaaaatggagctttaaatttactaatggacatgctgaagaatcaacctcaccataaacccct

SEQ ID NO: 11083 - DNA, 293 bp, Glycine max
tgctttttgtttcaattacgagcgtctcgatgtactacgcgacacaatcgaacatccgagtaaaaatttattgtcgtttgaattagctcagagcttctgttttcaatttcgagcttctcgatattttacgggactcaattgggtattggagataagagttattgtcgtatgcatttgctacgagcttctattttcaatacccagcgtctcgatatcctgtaagactcaatcggacatccgtgtacaagtacttatgggatgaatttccaacgaactgctcgtttcgattacta

SEQ ID NO: 11084 - DNA, 506 bp, Glycine max
  unsure at all n locations
ngggatggactangaccttcnannncgtgnaanatagactcncaagcttgccgccacggagnnnaccgagtatgcggcgagtgatgntggaataaggctncaanangganaagaccaagaaattgatgagccaatgggntgatccatggaccggagatgaaaaaagatcatgatgaaaccggattgtgcccgcttagtaactcaaagggacttgaatttcaagctccaaaaactaactcaatgcaacaaggaggttgaagaggtatttcaaggaaatggatgtgctcatgattcatgcaaatattgaagaagatgaggaggtcactatggctcgatntcttaatggtttgactaatgatatccgtgatattgttgagctgcaagagtttgttgacatggatgatcttgtttcacaaagcaatccatgtggagcgacaattaaaaatggatggagtggctaagaagagtttaaccactgtaggtcttctagttggaaagaccacggg

SEQ ID NO: 11085 - DNA, 377 bp, Glycine max
tttctttgtttcctagaaaaaccatgatttgttggaagcctaacccaattacaagcctagaaagtccttcggattcattatgtgtgttcattgctgtatgatatgggatgaaatgcaaaggttgggacttgtgttagttgtttatgatgaaatgagcctaaacaatttaacttgagtgaaacattgactatgaggttgtggttgatgattcttccttgatatatgccatccttactagcttattcagttgagactctaatgtgtatgttcttatctttcgaaagctgcttgtatgtgaaaatcaattgattgatgcagttcatgatattcaggtcatatggttgaatttctctgtgatgcaacaccatttttgattg

SEQ ID NO: 11086 - DNA, 439 bp, Glycine max
  unsure at all n locations
ttacaaccagtattgtttatcctaccaaatcatgttcanactcanataagaagannnatnngnggggatggcacagngactaacactcaatcgtattacagacagataaacaatctagcacgtactcttttctctcaaaaaattcaaggattttgagagctattttaaaacttcaaaaaatttacattaagtgattcttacanaaaaagaatntgaatgagtgctntagttggttcttcatgtcttcaacaagtgttcaatgtctctaaatggatagatttctcctcttaagctcgtgtttggaaaatgtggtcattgngcatttaatgcttgattgctaccatgtacttctatcaaaaccactattctttgctaacatgtcgaacacttcaacaagaaatcactttcttttgtgtcgagccatgttgttaatagaacc

SEQ ID NO: 11087 - DNA, 179 bp, Glycine max
tttcttcttttgagccgaaccacgaggctggggtcatctacgccttgcccggcctcttatgagaacctctcactatgtaacaatgacgaggagcttaatctgcctacagggctggctgcctgcttgactagtataaatgaaactaacaccgacttgacttgcttcatgcgcctatgtgt

SEQ ID NO: 11088 - DNA, 299 bp, Glycine max
  unsure at all n locations
gcnnnnngggtagtgtatcacacttaaatacccgctgaaccgggcaaccgagggggattcattcnttanccccnggggtttggggaaactactacaatcgcctttaagatcacacaacctgaaggctaaacagaccctgcaccgttattcataaggccctacatgttgagctactaccggcgacatgacataggacgtaagaatggctctaggcacgctacatccctagtggaaacaaaatgttcccctcaattaagagccaactcatggccctatcaaagtttgtttccccatataac

SEQ ID NO: 11089 - DNA, 125 bp, Glycine max
  unsure at all n locations
cgaacccgggatcctctcgancgagcggaggcgtgctatctncgttgtgggcatgtccattccgatctttgattatcggatagtctatcaaacagacggactcctggaacactgcgtataaatga

SEQ ID NO: 11090 - DNA, 369 bp, Glycine max
  unsure at all n locations
ggcgcatcgagcacgcatncngaancaaaaccggagctgggcccggagactcggggagcgggcgaatgtcattttncccanncngcccggaggggcgagcgaagcccccacgctgaagggccaaaagaaccccggggcccgccagctcagaacaacagccccggaacgaggaacagaaaaacaccgcaacaccacccaccgcctggcatgacgccgcctgccaacacacaaaaaccaggcagagcgaagacaaaacccgcaatccgactcccgcacagaaagacacccacgatccacgaagaggcggcgaggaagcccagcccccgggaaaaagacccaccccgaaaccccccgacgcacagaaaaacc

SEQ ID NO: 11091 - DNA, 304 bp, Glycine max
  unsure at all n locations
atctttgcgttaataagactttgttttctcacaacaagagatggttggaaaatgctctaacacccatgcctgtaaaacatagaaactattcttagcatcatataatattaacaaagagacaattaagtatacaaaataattcttaccatgagtagtgtcatataacctaccatatgcttgttgatatataggctcacatatgacaattgatcataaagaaatgtcagtgcaactactccccaggcgtactacttgcagtgacttagatcactgangtattgcacgtagcatatgtgtacatgca

SEQ ID NO: 11092 - DNA, 495 bp, Glycine max
  unsure at all n locations
ggggnnnnnnngggggtcggacaaacgagnatgatccanctgcannnacccangnacacncaagcttncaccgangganaaaaaggagggagcgcagngatgaaatttaganctngccggaccnccnagggaggtgcacgggctacaactgccacacaccgacacggccaaaggccgaagaggacgacaacggcgcgtatactgtcaacgcatactcacagggtgacatggtagcagcttcccacggctcacagtgacagcacatgtttcaatacacgaagcaaaagatctgggctcgttaggttctacgcacatgaaactcattagcccttccccatcacacgacaatgacatacacgtaacgggctcgggcacacacgtatactacgaaagccatggagaagcctgccccataatcaaccggacacaccccgttaactatgaaggctaagacccgctaaggacccaccaaaggagggcaaccaacaacattgg

SEQ ID NO: 11093 - DNA, 338 bp, Glycine max
  unsure at all n locations
agcttggatagaagggtgaccatgagagcgtttggagctgaattaatcctcactgatccagccaaaggaatgggaggaacagtatagaaggcttatgaactnttggaaaacacaccaaatgctcacatgctgcaacaattttcaaaccctgccaatactcaagttacctgaacctaaattactattgctgtttgaaatctcctaccaagacagaaaaatcagtagaactaggctngtattatgcttgtgtgatgcttcattgtacttaaagttaatactagaatatatgtctaacatagatgcttggctgtacaatggtgcatttatttattaaatga

SEQ ID NO: 11094 - DNA, 342 bp, Glycine max
  unsure at all n locations
gctattatagccttgaatagggatactattcgtngtgctcttgtgtcnggaagaccaggcagagccgaaacttacactccaatcaaacctcaaacgttactggacttgatatccttctatgattcatgtatatggtgcaccaattaagccacattattttatcagggtgatcatggcttcctagtaatccaatcatattttttatatcagaataattaatatttagtcaaaataaattaatataaataatgaaactttttgttcaaacatgcagtctcatattcagaaatctaatttaggaattataattaacctaaataattttatacttatccacctgca

SEQ ID NO: 11095 - DNA, 96 bp, Glycine max
agcttcactatcaagagagtgacttggataagaagcttaaagaggaagcttcaatggaggaagagaataccagagagagagggggaggatgggggg

SEQ ID NO: 11096 - DNA, 294 bp, Glycine max
  unsure at all n locations
tcttatccaagtcactctctnnggggtgttgcttctccttccatgactnatnctctaggggatgacgtctctctacctctttcttatcttcctgcatccatgctaaaatacatgaagactatgaactcaaactacctctaaactctaacacttcacatggataaccaaactcagagctctaactcctatttacttctctctcatgtgtctcgtcttctgactctctgctggcgagtgtactatttaaatcacatactgttgaactattattttgtaatctgctgtctactatgg

SEQ ID NO: 11097 - DNA, 405 bp, Glycine max
  unsure at all n locations
agcttaattgcactattcaatggagttgacaagaacattttcagactgatcaacacttgcacagtggccaaagatgcatgggagatcctganaatcactcatgaaggacctccaagtgaagatntccagattggcaactcttggctacaaaattcgaaaatctgaagatgaaggaggaagagagtattcatgacttccacatgaacattcttgaaattgccaatgcttgcactgccttgngagagaggataacagatganaagctggtgagaaagatcctcagatccttgcctaagagatttgacatgaaagtcactgcaatagaggaggcccacgacatttgcaacatgagagtggatgaactcattggttcccttcanacctttgagctaggactctcggatg

SEQ ID NO: 11098 - DNA, 335 bp, Glycine max
  unsure at all n locations
acatgctgatncatgaanaccaacctgatcactatgattacctattcctgggattttatttgttagaaggaatccaaaaaacgccatagttttttttattaccaaaagatttgaaaataatataattgccctttttggttaagtggtttgcttaccaacggcgaattatttaaaaaataaaaagtccatccaaagatgggaattattattttattagcaaaaagctaattatactaccagcaaagggtcggaagattaataaataagcttcaacaatgggacccaggtcttaataataaagtgattcgaactccgttaaacagacacaaacaagg

SEQ ID NO: 11099 - DNA, 378 bp, Glycine max
ctcccccttggagcatcaaagagccaatactgcgtggcaaccaacacaagatgatataactaaagtgtacataatcaatcataagtcacaaccaaatataagccaatcatacataagtgaaaaccaaatataatccaagcataagtaaggcatagcctaatctaatccaagcataaaagactaagtgctaattatcaaaagataatgaaaggtgagaaaatgataacgcaaaaagcataaccatatacacggcttataataaaagactataacatcctaaaaactaagacggtggtggaaggtcatagccccgacgaagataagtgacatactcttcaagctgggtgatgcgggtatccatgccttcaaagcaccatc

SEQ ID NO: 11100 - DNA, 412 bp, Glycine max
  unsure at all n locations
gtttttttttatcttacnnttgaaaatngacagaaccggggccacaanngggggttacgagaggagtttcattatttcncacagcacgggacgggggaccagaggccaacacaggcacaaaaaggngacngaaaaacgaaanggcnaaaagancnacaaaacaccaagaggggaaccccaaaaagcaaaaccgngaagccccaaaagaaanccaggccaagcaaaggcagacaaaaaggaagcaacgaggcccaaacgcaaaacaacgccagcaggaaaaaacaacccccccgcgcaaacccgaagaagaaaagaccgagggcgccggggaaaaaaaccgaaacaaaggaaagggccccacggggccaccgcgaaaagaancacagaaggggacccccaccggggggggggg

SEQ ID NO: 11101 - DNA, 292 bp, Glycine max
  unsure at all n locations
agcttagtgtatgcattgctgggatcatcttctactatagagagtggccataggctccgatgctaggacacctactagctcgcagagctaccgttaaagagggaagagctgataccnctgangatagtgaagaggtgcacgtcttgaatgcggaactcaaaagaacccaactggtcaaagagaagttcaagactacgaccatcaatgtcctgaaagagtgtgacaagctgaaggacattatcatggccacagctgaagcattataacaggttgaaggtatgatattacagga

SEQ ID NO: 11102 - DNA, 426 bp, Glycine max
  unsure at all n locations
gagcgatatctactggcagtncaaccnncntngagcacanaagccgaggggcatgnaccancaggggctaggccgacggncgaggagatccaactctgnccggccaanaannagggggagggtagggagagcaaccaccccccncaaagggcggcnagcagggaacaaaaccccggaaggacaaagaggcgccaaggaaccacaccccgggacgaagaaaaanccaaccacgcgggggaagcaaaagccgcaagagaccgggaaaacaaacagggcaagccgcccggggagcaggcggggagagaacaaacaagggggggggggagaaaaggcaaggangggggaacacnacagaaccagacggggcacgggggcaaaaacgagaaaaacccaccaagagagaacggcacgcgagcaaagaaggag

SEQ ID NO: 11103 - DNA, 399 bp, Glycine max
  unsure at all n locations
agcttgtgttcccattatatgcagcaataaccaaactataagctatcctttctacattgaagggatacaagaacccttttgtgggtactcctagttgtggcctatcttgtggcaatgatggcttcccatttctcaacatgtctaatgccaaatacatgatccaccagatattctacaacaactcactacgtgagtccaatgctgtgttttcaagatcaaacactangagttgttttcctcgtacaccgaacctcactctttcagatacgagattggctcttgctcccaaccaaagggagctattcttgttgttcggatgtgacctgcatgaacggttgaagagcacataattgggtgtttgaagagaacaaaccggttctgtgtggcatgaatgggaaa

SEQ ID NO: 11104 - DNA, 433 bp, Glycine max
  unsure at all n locations
ggggnnnnnnnggtgtcttattgttacttananctntaanaataaacacgggggcctngctggagtngnggacccgaagaggacgaggggttttttgctcacnnggncgaacccaaaaaggcgggggggaaggcacaaccaanccaaaccccccggggcccaagnngggnaaangnccacgccgggacnaggaacaacccaagggggcacaaagagaacaggcnncggaagacanggcnnacaagaaccaaaccaaccanngaangcccccaaaaccagggagccnnacggccaacaacaaacgngggggnaaaaaaagagngaaccagaaaaaccaaccaccccagccaggaaannccaaagaaaacaccccaacccaaagaaaaaaggggggacanggccccgggaacaggggacggcggggnaacccccg

SEQ ID NO: 11105 - DNA, 366 bp, Glycine max
agcttctcctccattttcttataaatagggggataggtgaagagaaatttcgttcagccctcctggtaattcagaatcacttaaaattagtgaaaaaaatcggttccgtgaagaaaatccgagctgaggcgcttccgtaacgtttccgtaacgtttccgtgggtgatttcgcgaaggttttcgaccgttcttcgacgttcttcatcgtacttcgggcttcaaccggtaagttccctaaatcaaacttttcaattcattctatgtacccttagtggtcctcatttgcgtttacgtgccttcatttacatttcatgtactttccgtacccccttttgacgtgctttagtcatctgcttaagttatttt

SEQ ID NO: 11106 - DNA, 337 bp, Glycine max
  unsure at all n locations
ttctatcagaatcacacggaacaaaccgcagcagacacgcgcacaangcaacgtatacatccnggcaccaacacgggataagcggagcaaagacccagcagggcccctgagacaacgaacaggagtacacacaacgggagcagcccaagcaaaaacaaacaaaagaccagtaagcaaagaacataccacatggaaagcacgcaccatcagtaaaatcaaagcaaaaccaaatgaacatgcagccccaggcaaaaggccaaagagccaacactgcacaaaccaacaggaacgacaccaaactaaccaaccccaaaaaacaaggaactatctcagcgga

SEQ ID NO: 11107 - DNA, 214 bp, Glycine max
  unsure at all n locations
ttctttgtttgtctagtgattctagagagagaaaggtccaagttccaaagagtttttgagagattntgctgtgtgaagatctgcagagaccagagcttgaagtggaagttgttctgagagcttgagatgagtttgtgagtggttgtgagatcctataggtgaaggagacgtcctcaccactcgtatctttgcaatatttcatctaggtcttctc

SEQ ID NO: 11108 - DNA, 471 bp, Glycine max
  unsure at all n locations
gagttagcatgcgatcnatnnccgaaaatngacaaganccctcnacatngaagatngagacactcatgagagancttgccnatttcnttatcacnacccanccatncccaacctgggatanatgtgaagttgtgcatggctaacaagaatgcactattgatgacaagttaggtacaaccatggatgatttcaactttgttgggcagaaaataattcttacagtcaatatcccacaatttcaatcaaagacaaagcttcangaaagtcagggatgtataggccttcaaccatgcaaaatcacaggcctagacgagagaaaagaaaacctactctttaagagaccatgctctcatatatggcccaatatgatcagagaatgaagctggnggagtctccactcacccacttacatttcctttgcacaaaaacagacaacaacctctttacaactgaacaaatcataaggaagag

SEQ ID NO: 11109 - DNA, 366 bp, Glycine max
  unsure at all n locations
agcttttattttatcctctaacgtcatgctttccatccttgattcatccctgccggcccttctaatcttgagctcgttactgctaccccacagagcccttcggaacttgttcttgcttcattctttctttcggaccctttttgtttcccgctctatcgcttcaattgtggttaggttgatatctttcagcttatcacactctttcctgaccctagtgactgtcgtcttcaacttctctttcaccttcgagctctgccttcaaagcctgcactttttcactttcctcangaatttcagcctctttcctacttaaactttntaagcttgggagccaagttatcccttgtgttctagacttcaaccact

SEQ ID NO: 11110 - DNA, 478 bp, Glycine max
  unsure at all n locations
gattgtcattggngttagtatnnntgncacacnatagaacacncaagccgggcaaagannggangnagcgagtaggaagcgaatcttnanaattcaatgttcancnnnnnaanncnnacngggngcgttatctatgcttaaatgcaaacacgtttntagttaataaaaaatcttaaatcctttcgtactatacatttatgtgaatattaaaagagagtgctatatatattaacataacaaattatttataatcatgtaatacttttataaaaattgcataacctttaagaattagttttaaatctctttatcattttaatccctcgcctaattcactgctttaaatattttgatataagctttcctaagtatatggctctctataatataaaactttaaaaattgatatatattttaccaccatatcccttttaaattagaaaatcctttaaaggtttctattaataaatttaggtga

SEQ ID NO: 11111 - DNA, 391 bp, Glycine max
  unsure at all n locations
ttcttctctcctattnngctataaataggggaagaagtgaagaagaaaagggttcagccccttaggcacttctctctctctcgaaattgctgaggaaaattatttccgtgaagaaaatccaagccgaagcgcttccgttacgtttccgtgaggaattacgcgaagattctcgtccgttcttcaagattcatcgctcgttcttcgtattctttagtcttcaacgggtaagtacctcaaaccaagcttttcaattcattctatgtacccgtggtggtccacattttgttccatgtatttttatacttgtgttcatttatattttatacccccttttgacgtgcttaagccatttatttacgacattactcggcctatctaaaaataaatatat

SEQ ID NO: 11112 - DNA, 469 bp, Glycine max
  unsure at all n locations
nggtggtcagttcatgcatttccacnnccgtgaacnatagaacacgcaagcttatccttatggctggccgccggaggacacgccccgttccccctcaaagancnaagccaagccgcgacnnttgaggggcaacacccgccccacgacgacnancccggacaagacgaaggggaaggaganacccancnnggcccccggcnccaccccanagaaccgnccccccangaaccacccccaccgaacaaagncngccanancccaaccccacccacgacccgaaaagaaacngnccccccccggaagaaaaaggaagaangaggcgcncgaagaaaggaaagaccanccagggccccgacaacaccccncnggaanaacagaanaaggcccgggcccaaacggcaaccccccaaggccaagaacggccaggacaaaccaagggacacaggccaagggcacccnggaggaagcg

SEQ ID NO: 11113 - DNA, 353 bp, Glycine max
tatgcttccattagaaggcgcatggagtcgccaccaacgtttattctaggaaaacgtcatacaaactggaacgtgtggtctacgaactttaatcatgaaaggtttgggagttgttcttacgcatggggaaagtatcaacaccccacacgtctgtcacaagggacgacaaccttcaatcaagtgtgcaagtatgacttcaaaactacgtattttccctttttttatgttttcttgctttatatgggccttctttgtattattcatctttttgtggtcgacacaagtgtgtgcctcactactacgtatcctctattgtgatgaggaaatcgaacctacgttcgtctttcagaact

SEQ ID NO: 11114 - DNA, 186 bp, Glycine max
ctagctacatacatccctctaatagctaagctcacttctcttgattgagtatctagaacttagctacacaccccctataatagctaagctcacccccatgtcaaaatacatgaaaatacaaaaaagtccctactacaaagactactcaaaatgccctgaaatataaggctaaaaccctatattact

SEQ ID NO: 11115 - DNA, 401 bp, Glycine max
  unsure at all n locations
atcactcctacatctctagcatgcattgtatgtcggtctcgtcctttgacacgggaagccggaaggtccatatcaccttcttaattgtacacatggggcactgcgcccccaaatgcgcgagtcagaagagataattntccgggctctcgtgtccgtaaaatgcattcatatcatgcatcgcataagcatctcttcataacatcataatggacatatcctgcatttgtccgttatcatattccagcctcacattttgcatgagtcatggcatcatcatgcatatgcgtacaacanactatgtgatctacaaaatagcataccatatgttttcatgtttgctcatccttgcgttttcctctacgaaacanaaacaaagaaggtggaagcgtgaaacttcacac

SEQ ID NO: 11116 - DNA, 464 bp, Glycine max
  unsure at all n locations
gcgggttatganccnttgnttagcgactactgnanaacnnnnaacacncaaccnngcggcnnnnnnncccaggaagagcaaggaggcttcttccattttcacttccnncnggagggcccaagtgggcctggttgctatttgcaccaccctctttactaaatgtaccgccccttctattattctgtaatactttatccgtaacgttacgaaactttgtgatttccataacgatagttattttcgtaccgcaaggtacgaatcctaaccgatatgtatttactctttttagctttcgataagtacgaaactcacgatgcgcataacaccttttcgactcgcccatacggaattcacgatcgccaacctgtgctttgattctggacgtctggactcattatgtgcatcaaggcgccaagatttcaagcgctaaccaaggtggtgtcttaagtagattcccggccaan

SEQ ID NO: 11117 - DNA, 391 bp, Glycine max
  unsure at all n locations
agcttagttatcacgagatcataaatnccaaaacatagggggagtatggaatgagtgaatgttctatcttgcatatattcaatcttgtatctcgatttcaggaattaaattgtcatcatcaaaaagggggagattgtatatacaaagactntgatgttttaatgatgctaaaggatcatgcgcttctcaagtttaattcaagaagatcatacgcttctcaaggttaattcaagacaagaatccaagacattcacgatatatgatcaagataatctctagagacttacgaagggaattccaagttgaaacaacaagaggttcggccaaagaatatgagttaaaatgtctttacaagagatttactctctggtaatcgattaccagagaatgt

SEQ ID NO: 11118 - DNA, 149 bp, Glycine max
  unsure at all n locations
atggcctgtttacgcctggaacatgggtatatagcatgctcttagcacgangaggcgagagatcccgggcgttcttacactcgatgctccttgaggagacttctaatgcacgctccttgcagtggaacggcatagtaggataactgcac

SEQ ID NO: 11119 - DNA, 158 bp, Glycine max
  unsure at all n locations
tctagccaaatggacttaccttgaatnatttcctntgttagcttcttttgagcctngnngccctttccttgggttgaagctcactacangccttaagtgaaaaaccatgatattaccatatccttaaggaattattgaactttggaattgtttttgga

SEQ ID NO: 11120 - DNA, 404 bp, Glycine max
  unsure at all n locations
agcttctctctcaattttctataaatagggggagaagtgaagtagaaaagggttcgaccccttggcactctctctcttcgatntgcttangaaaattgtttccgtgaaaaaatccaaaccgaggcgcttccgtaacgtttccgtgagtgatttcgcgaaggttttcgaccgttcttcgatgttgttcattcgttcttcatcgttcttcagtcttgaacgggtaagtacctcaaaccaagcttttcaattcattctatgtacccgtggtggtccacatttggtttcatgtatttttattcttgtttcattcactttntatacccccttttgacgtgctgaagccattntatttaaatcatttctcgcttaacctaaanataaaataaatttccaccgatcgtttg

SEQ ID NO: 11121 - DNA, 379 bp, Glycine max
  unsure at all n locations
aagtgtngctagctnctgatgcangacaannagcctaaaccctggaaatgagggaggagattgcccggaacaatttggttttctttcctaacaccctaaggccaaaggtgaataataaaatagttttttttggctttggcgagagattcatggctatgggccccaaggtttcaccaaggccttttccttaagaatggtatgcattaaaaaggctcagaagttagatgggtgctcttcttggacaaaaggttgctggaaatactactccctactacggaattctattccgctgattttgagattgcaccccgtagcagatgggagcgtctctgactcatggattgcagatatctcgggagagcgcacgcagagcgggtcn

SEQ ID NO: 11122 - DNA, 356 bp, Glycine max
  unsure at all n locations
agctagcatttggagcttctatggangccggatctttgagcttcaatgaggtcctttaatggtggttttccaccatggagatgcagcggaagataaaggataatatgtgagaggatgcgtcatccactanggaataagccatggaagaaggagcttcacctcctttatgagccttggataataagcttgcataggatgcttcaatggaggaaaagaatgagagagagaaagagagaggggggagcacaaaattgaatgaagaataagagagagaagttgaactttgagttgtgtctcacaggactctcattcatcaaacttacaacatgtgttacacatgcatctatttatagact

SEQ ID NO: 11123 - DNA, 377 bp, Glycine max
  unsure at all n locations
ctactgttgaccggaataagcgggcaggnctggtaaccaagagccgtttgattatacggggcanggagggaagtgctataaaactataaaatccttctatgagaaaagtggtccattttgtgtgatgaccaccattttgggttaacctttaccaacacactttcttgaaagattgatcaatcctatggttctactccgctatcttccccttctgattacttcaaaagtgactgtccaccatgcatgggagtcaaacattgaacatacgctcttctcctgcatgtgatggagcaaccacttccaggaccatgaagggggtgctctgtgtggtgatatatttcaacagaatattttttttagacccaatttcttggacn

SEQ ID NO: 11124 - DNA, 370 bp, Glycine max
  unsure at all n locations
agcttgagtcttttgttaatggcgacatttatagcatgaatagtggtgtgtgtaaccaacaagtcatcaactacttctgcctgagaggtaccctagaggtactggggtattgacgatgggagcttcccatatagtggcttcggatatttgaaataccagtgctcagatgaaccaatgtattgtatgaccactccgtataggaagatacttgaaccactatgatggtcgatcatggacaaacgaatggaagtattgctctaaaacatggttgacgacctccatctgtctatcgatctgnggatgataagcagtgctcatccatagcttcgtcccacataagcgaaagagttcccgccaataggcacttatg

SEQ ID NO: 11125 - DNA, 412 bp, Glycine max
  unsure at all n locations
ggcgtgactatgcattgcatgcatgacacnaacctgggcaataagtcctccccattaatctcaagcaggcatttnggttggcctatccnnggcccgggaggccggaggggcgctatacctcctaatggacacatggggccctaccccaatgcccagtaganaaagaagatttcggcctctttggcctaaatgcatcttatttgcacacataacatcttttctaacatatatgggcatatcctgcattgtcgtatcatttctagcctacattttgatgaatatggttcatatgctatgcgtcacaaacttttgattgcaaaatgctaccattggttcatgttgctcatctgctttctctcaaaacaaaaagggaacggaacttcactcatctagttatgtgttgcccacaact

SEQ ID NO: 11126 - DNA, 333 bp, Glycine max
  unsure at all n locations
gggannnnggtgtagctgtatcganncnaaannaccggggcnngacagganncgggggaggaggctatcttttgtggagcccaaggaggggtaggaaggcctccctaaaaaaaacaatccatttattggacaacacctcttggaaggaaccattcatgcccaaatggtaggtaccaaaggtgggccttacaccaaaaaaaaacttaaaggggggaaacctactaggcccggatctcctagaactggaaaaacatccctgcaagggaggatggaaacacctttctattgggagacatgtgccaaccagaagagattcttgtaaaaaagcacaaa

SEQ ID NO: 11127 - DNA, 350 bp, Glycine max
  unsure at all n locations
ttcattccaccgttgggaattttaagggtcaaagagaataaaacctttgatcctcaatacatggaagatatgtgtccgaggtcacaaggtccaagaagagttaagatcatggtgatgccagggttttatgttcaggatagggtcttgaggtgtaaagttctctgcacgtacaaatctgcggcctangtaagagttggaataagttttatatgtacattttcttttacttttagactcactcatcttaagtctgtaactagccaaatgtacgtgataattaataatagttcaaagtgatctaatctattgcatgttgcaatttgggtgctngtcattggatagataaagat

SEQ ID NO: 11128 - DNA, 322 bp, Glycine max
  unsure at all n locations
gaaaaanggggattcttgatgacctctgaactacccacctgtgtaggcccccataaaagaatttgttttacttaaaaaaaccacctgtacgatggtctttttacttccggggacgggggaaaaattaattgaccctcacaacaactgattccgggaacacgcccccgcagacatgcgaatcgatcttaatacatatctgtcacctatcgttcgattgacacagtatgcattttgggttgaaccgccgcgttgtttgggaaaattatattttttatgaattgtcacgtgattttaaattttaaatttgattaataaacgaaag

SEQ ID NO: 11129 - DNA, 209 bp, Glycine max
tgcttgctttctctggaagctcctaatagctcccacactatttggggtgggccattctcggatggccttgattaactcacggaccacttggaccccatttctaccaactacacaacctgagaagactatattatctacacaaaaagtacactactgtatattagcatacagggagtttttcctatcgactgacataacttgtctgacat

SEQ ID NO: 11130 - DNA, 449 bp, Glycine max
  unsure at all n locations
aaactagggtagcnatgnatnncnnnnaaatnagcnagagccnaatggagagagccngcggggaggcgggggngagtttncttttttgtnangcnagagcnaaacgggcacggcggccctattaacgcaacccaacctcctcgaggagcggccctggagagattccttaaaaggctggagcttagctactcttacctgtattagaggtggcctcacctccttggaagagaagcatgagcttaactacgcaccccctatgatagcttagctcaccccctgacaaagaactggagataacaaaaaaagggcttattccaagcgacgtacctgccccaaatacaggctaaaccctaatctctaaatgggccaaatctaggcttcacaagaaagcctttctaatattccagataacggccctcctaaccctgggcccaacaaccttaggcctg

SEQ ID NO: 11131 - DNA, 384 bp, Glycine max
  unsure at all n locations
ttctntcattttattttccaactcttgaaagtttttcaataaagtaatcctttctttggatattttatcattctcgaggaatagcttggtctcttttatcttaagtgtttcacaagaataacatacttgagtggactcatgcatagaaatttctgctttatcatgaaaggcctttttanattctttatgatcttttgatagctttttgaaatcttttcccaatttcttataatcttttgaaagaatggatgagtttgaaaagagttcatgataggcttgtttaaaagacttggggtcatcaaaatgtacctcatcgtcttggtctgatttagattctttagaggttgtgtcggtcatcagacatatgttggcttcctctacttc

SEQ ID NO: 11132 - DNA, 419 bp, Glycine max
  unsure at all n locations
cttgaggaggagtgtngaaaaccatacaaaagatngttgatcctattattattnacacnnnaagagggagataatctgtgattaaaaggaaccaaataatccttaattaatgattaataaaggaaataatctaatttaaccccatccgttgtggacttctgacccaccggtttaagcctataatccctctattattcctccttaattacagaagcaaatatggaaacggcactattctctctgggcattnttttaatattagtttatagatcttcttccgtagctaatgggtgcggagataagtaattactagatttggatttgagattctgcattggtgttggcccaccaaacaatatgtgtatagagcaaaatctcaatcttcattttttaacccattcggtttcggagttagtttt

SEQ ID NO: 11133 - DNA, 217 bp, Glycine max
  unsure at all n locations
tttcttcttttcactccanacatcttctcgaagatcccgacggtcagatcatggacgattgtcttgtgaagttgcaaaccaaatnctgagtgtattcaactgttaacgaaggctgtgcagcgcttttaccgatgcagcttcatgtacttttctctacaagcttgactaacaagcttctaacacactccagatatcttctcagagatcccaacggtca

SEQ ID NO: 11134 - DNA, 99 bp, Glycine max
  unsure at all n locations
tggatactacactctctaaacactatgtataccctgccagaaaagactanaactgtacagtgatttatctgtctatatgacgatcacaacttagtcaat

SEQ ID NO: 11135 - DNA, 255 bp, Glycine max
  unsure at all n locations
ttcttctatatcttgngggaaacaaccattcttatggtgttgaccagttaagaaatatgggagttcctattgaagaaagtataacaagagatggtagcatggtctccacgggtgtttctaatgaaacattagtagtttttaggcaacacatagatcatagtaatcatgaaatggttaatactttgacaaatcacatggcctcaattttaaatcctttattgagaactaccaatgaaagttatcaacttatgaatg

SEQ ID NO: 11136 - DNA, 253 bp, Glycine max
  unsure at all n locations
tactcaagcctgttacctccttcttcactacatcaagagggaccttgttgtttcttctctgnggctgnctaatgggtttagccccatcctctaaaagtatccgatgcatacatgtgaatgggctaataccaggaatgtccgccagggtccagcctatagccttcttatgcttcttgagaactgatgacaacttctcctcttgctcatcaacaagggaggcagatataattactggaaaacttttgctctcatc

SEQ ID NO: 11137 - DNA, 256 bp, Glycine max
  unsure at all n locations
agcttattttctgaaacatccacaagggtgaggcatgactacttttcactttcactattgagactatacaaagtggaaagaaaaacagacgcatatgaactcactngtgcagcatgctgctatgagcctcagtatgcatatatcttgtgctgcttcgaaattgaaagcatcatcatcaagtgaagtagtatccagaccaacagaagccatttcgcccattgttctctgaatctgcatgtaccatgattacaaattc

SEQ ID NO: 11138 - DNA, 229 bp, Glycine max
  unsure at all n locations
taactgaattacttggggatagagagttggcttcctgaattatcacgnncccaagagtcactatgaggcgaagaatatttatgtccagtaggaatgaagtaccaaaaaatccgtgcatgccctantgattgcatattatacagaaatcaatttgtngaatgcgttagtgcctcacatgtggggtatcacgatacaaagtcaggatgatgaagacattatgatgcacccc

SEQ ID NO: 11139 - DNA, 376 bp, Glycine max
  unsure at all n locations
agcttatgtctganatatttacaatagacctcctcagcctcagcagcaaaatcaaccacaacagatcaaatatgacctctccagcaccagatacaaccctggatggaggaatcaccctaatctcagatggtccagccctcagcaacaacaacagcagcctgctccttccttccaaaatgctgctggcccaagcagaccatacattcctccaccaatccaacaacagcaacagccccagaaatagccaacagttgaggcccctccacaaccttccctcgaagaacttgtgaggcaaatgactatgcagaacatgtagtttcagcaagagaccagagcctccattgaatcaacaacagtcccagaattctgacaagct

SEQ ID NO: 11140 - DNA, 210 bp, Glycine max
tggtggtactatagctgcactaaatagttgttgtggttatcttatgcagatgcaatgcagtagaagggggtaaagacaatatattactacaattatatgagattgagtaggtaatactaagaacagaatattagtagcatgaccgagaataaaatagccgctgtgtcaaataacataacaattgtctcaaatacaggaaaaagaaatact

SEQ ID NO: 11141 - DNA, 360 bp, Glycine max
  unsure at all n locations
agccttgttaagtgatcatgggggtgaattcaaaatgaggaattcgaaactttntgtgaagaaaatggtattaatcacaatttttctgcttcaagaactccttaacaaaatggagttgttttgagaggaaagatagatttctttaggaattaacaagaactatgctaaatgaaaaccacctacctaaatacttatgggtggatttcatttgtacaacttgttatgttctcaatacaatgattataagaccgattntganaatgacaccttatgaggtctacaaaggtagaagcctaaatacatcacatcaaanagtctttgggtgtaaatgctttgtgttaaacaatggtaaataatcac

SEQ ID NO: 11142 - DNA, 227 bp, Glycine max
tgctgattggttcaacattccaggtgtctttgacctcttcactttctaagatgttccttcccctcaaggcacccctgccaaactaggcacatctgtcataggattcaccctccatgactttgcagatataatcttccacaacaatgagaattacacgcagtcatggcacatggatggatctagcttctatgttgttgggtaggacatctatttttattatttattta

SEQ ID NO: 11143 - DNA, 375 bp, Glycine max
  unsure at all n locations
agcttctagtcaaatgtacttaccttgaattaattccttggatagcccttttgagccttgtttccctttccttgtttggaagctcactacaacccttaagtgaaaaaccatgatattaccatatccttaaggaattttggagctttggaattgttttgggaataaggtgtgggggggtttnntgtttcatttggacaactttgttttgttggctatgcttcatgatgtattttgggccatacttgatgtacattgtatattggttaaatgttggacatgctgaataaaatgttgtttctcanaggctaaagagtaaaaaaaaaaaaaaaaaaattcgaaaanaaaatcgaaaaaagaaaaagaaaagcaataaag

SEQ ID NO: 11144 - DNA, 458 bp, Glycine max
  unsure at all n locations
gaagagacctagaatnctgatacatnaacaccacagctctaaggctgctcaatggctccaggttgctgcatagaagggcaattgtcggatttgttgttcgccaaaaaaccttaaccattgacattttccacaaggattgaatttttaatccaaggcaacttggttaccaggttaccaaaggctttaatttaacttccaactctttaatttcaacttaataagaatggcataaccttattttcttccaggccctttcttgaatgacttgcaaccttcctttgttcctgtgaagttcttggcaaccattcttangctaatttgtgaatttcaagacattgcggaaaaccaaaaatattgatcacaatcgtaagtttcgtgaacaccgaaatcaaatgagcatcgtgcataatagtgaaaatcgaacattcgtaatcaaaagggatgatatgtatcgcagg

SEQ ID NO: 11145 - DNA, 410 bp, Glycine max
  unsure at all n locations
agctgttgttcaagatctctatttatctccgaaacccagctgagcaagcatatagtctaagaacgcccaacttatcgagttgtatgcttttctgaagtctactttaaattaaaaacaattccagtgaaatctttgggcccaatccaccacctcattcatgatcatcacgccatcaaacatttgcctactaggaatgtangaaaattgaacttctgatataacagatcccaagaccttcttcattcgtgtggacaacaacttagatatgattctgtgaagactccctantagtgataagggtaaaaaaatttgacatagactatggattcttcttctttggaattaaagcaatacatgaataaaccacagatttgggaagagaagcatntaggtaaaattcttgcacacat

SEQ ID NO: 11146 - DNA, 435 bp, Glycine max
  unsure at all n locations
gtcgtgactcggcgtagcancnncgtnaaacatnagaccggaacccaatnttanagggagagttgggactaggattaaattttcctttgtttaagttcaaaaagaagaagggcgaggtctctagaagtttagagaatttctggtgaagatattgcagacaccaacttggaaccagaacggtttgagagcctagataaattgtgagtggatgtgagaatctctaagtgaagagacattcttccaggtttccatccgtggggggctcataaattggccatggtttccacttaagaaacacttcgaaaatcttatatgggaatcacagccacaaggtttctcaaggagatttttagcttcagcaggtcctataatcacaggacagtggagaacaccctgtaccagtcacaagactgagtggccttcaacagccatcan

SEQ ID NO: 11147 - DNA, 59 bp, Glycine max
  unsure at all n locations
agcttcttttggaccttgaacaggcaactaactcctctntcaaaaccatgctatgtgct

SEQ ID NO: 11148 - DNA, 416 bp, Glycine max
  unsure at all n locations
gctgtacctgtgctatcaacatatagacactcagcttgcaactcatttggaatctcgacattcttcatcggatgtaccttttgctctctccgcgactcggcatgcggctgaaggcttctcgccatctgtaccaagtttgaaagttgtagggctccaccttaaatcgcacgcactctaggaaaaggttcttattttgcacacggcttacaattttgccaaaattggaaagtgctcttctctacctgcttanactacaaggcngcgaggtacatgggcgatcactgcgcatatgagactgaatgaccgcaaagtttaaactttaaaggtcgggaagatgcttttacactaatgcactccctaggacgtaggagatcacataactggtttcattatgtaagtggctgatgagatgctcc

SEQ ID NO: 11149 - DNA, 393 bp, Glycine max
  unsure at all n locations
aaccgacttcaaattcncctttagggagccgaataacaatccattggcgcgcgtttacaaccgcctgaactggaaaacccttgccgtaaccaacctaattgccctgtgaaacaatcccctttctccacatggccttataaccaagaaggccgccaccatatgcctttcccaccattggcccaccctgattggcaattggggcctgatccggaatttcttcctaacccatctggccgtatttcaaacggataatggtgacctttcatacaatctgtctgatgccgatagtaaacaagcccgaaaccgccacacccgtgacgcaaccctttgggcnntnnnnnntnnctcnnnncggttccttcnnnngttttccgcgacctcgattctttgtct

SEQ ID NO: 11150 - DNA, 371 bp, Glycine max
  unsure at all n locations
accttgctatcccatggaagctcctaatatctcccacactttttggggtgggccattcttggatggccttgattttctcaaggtccacttggaccccatttctaccaactacaaaacctaagaagactatattatctacacaaaaggtacacttctctatatttgcatagagggtgtttttcctaaggactgaaagaacttgcctgagatgtcctaagtgatcatctangctcctactgtacactaaaatatcatcaaaataaacaactacaaatctacctatgaaatccattaagacatgatgcataagcctcataaaggtgcttggtgtgttagtgagcccaaaaggcatcactagccattcatacaaa

SEQ ID NO: 11151 - DNA, 140 bp, Glycine max
gagaagctagagctaagctacacacagccctctcataactaagctcacctccttgagaagcgtacttaagaagattccttaagaggctagagcttagctacacatacctctataatagctaagctcacctccttgagatg

SEQ ID NO: 11152 - DNA, 397 bp, Glycine max
  unsure at all n locations
ttctnatgtgcatattncatnacgaacgttctcttgcccaagacattctattaaccgaaaaaaatgcacccatatacaatcaaggcagctttgttacctagattatttacacgtgcttccaaggtgtatttgttacttacatcacacacatctccttggctaaattcacatacatgcatactccgagcattttggggtaccaaaaattgcacatgtgcacatcttggtatttctaatacctatacatacacaaatatcatgatgaatcttgactatctacacaatanagtgctacatttcatgcctttttccaagttttcgctacctaaagccgcatgcaaattcaagcatattttcctttgttgactaaaaattgattcaaatatatatatatatt

SEQ ID NO: 11153 - DNA, 495 bp, Glycine max
  unsure at all n locations
nnaagaccggaatcnnngcgtangctatcancgtgnaactatagaatacgnaagcctggtaatgagcctncaaaacaaagataagggaaacatatttttanattggctnntcaagggatnaattcaagggaaagccatttggctagaggctaataagaccaaaatggcctaaatcatttccaaatatgcatgtgaattaggaagcatccagcagaatcaagccaaggctattgtgcaagcaatcattgggcaaaacacaccaaatgatatgatgatggcttaaattctcacaaaggtaaacttatcacttccaaattgagctttcaaaactatcataagcgacttttattntcaaaacaattactcattacttgaaacatatctataattcaaagaanaatatgcaaagttgtacaagcacacagaattgacctaaatattaaactagaaaacccacaaaacttacaacattaaccaatnaacacaacctacaag

SEQ ID NO: 11154 - DNA, 404 bp, Glycine max
  unsure at all n locations
ttcttctctcttattntgctataaataggggaagaagtgaagaagaaaagggttcagccccttatgcacttctctctctctcgaaattgctgacgaaaattatttccgtgaagaaaatccaagccgaggcgcttccgtaacgtttccgtgaggaattacgcgaagattctcgtccgttcttcaagattcatcgatcgttcttcgttttctttagtcttcaacgggtaagtacctcaaaccaagcttttcaattcattctatgtacccgtggaggtccacattgtgattcatgtatttttattcttgttatcatttatattctataccccctttagacgtgcttaagccatttatttaagtcatttctcgcctaatctaataataaaatatatctccatcaatcc

SEQ ID NO: 11155 - DNA, 432 bp, Glycine max
  unsure at all n locations
ctatccttatggctngcctccggattgcactccccgttctcccttgatagatctaagccaagcccctactttttgagggcaactaccgccttatgacaactatcccggacaagacgatggggaaggagataccccatcttggccccctgctcaacctcaaagatccgtcccccattgaactacccccaccgaacatagtctgccatatcccaacctcacccacacccgtaaaagaatcttgtcccttcgcggaaaatacggaaagattgaggcgcttgaagaanagttaatagccatccaaggcctttgcaattacccattctgggatttacaagattattgtctgtgcccaataacgtccttcgtcccagttcaaagattcgactttgataagtacaaaggaccacctgtcctaagggcatccttggattt

SEQ ID NO: 11156 - DNA, 406 bp, Glycine max
  unsure at all n locations
tcttcttgtgtcctcaaagattatacatatataggacccttgacaggactcctataatactgatacatggtgtgattaacaagcttcacacactctaggtacgagggatttcaatcatggaccatatgtatatatatacgcgacgcgacatacctgtcatgaaaggttcactccaccattccacgacctatatggaagcacattgttatggaaacacattgtgtgtgtgtgtgtttgttctaaggtgaagctgtacattctaatattattttatgcataattaactatgcatgcacgacgcacgcattaaagaaattgagtntattgaattctaaaactagtaaatttaagaatttaatctttatcccaataattttgttaaaaataatttggcatttactaatat

SEQ ID NO: 11157 - DNA, 441 bp, Glycine max
  unsure at all n locations
ggattttaactggatcatgacnncgtgaacatagacacnggcctangtatggtntagtgaggcggaggagagggattttnttttttnnggnncccaaaanaaaggatgggggtaatctttgaaactacaaatgctggattaggcattctgcaagcatgagtcaatatgagataggaaatttcattttgcgcaacctttgacgctgaatgtaatttttctatttacatttaaagaatcctctagggatacgggggacctatataaccctggaaaattgatactgtgatgagtctctgaaattggcgtgacggagtggctttggagccttgacgaatatgtgtcagggacggattcctaaactggggtgttattcatcatgaatcatggatttaagattggttctatacggggtggtgagctccaggaaatggtaatcttccg

SEQ ID NO: 11158 - DNA, 405 bp, Glycine max
  unsure at all n locations
ttctntatttaagacaaagaaatttaagatattcaagatggatgattaagacagtctatagagtcttagaaagggtatattaaatacgaagggaattccaattgaagtagcaaaaagtttggccaataattattaagttaaaaagtctttatcaacaaatttatctctggtaatcgattaccagaggatgtaatcgattaccagtggccaaaactaatttacaacagctattaaaatttgaattcaaaatttgcactgtgtaatcgattacacatatatggtaatcgattaccagcagtttctgaacgttttaattcaaattttaaagattgtaatcgattacatatatactgtaatcgattaccagagcagattttcagaaaatattctcaacaatcacatctt

SEQ ID NO: 11159 - DNA, 261 bp, Glycine max
  unsure at all n locations
ngagtcatcctcaactcactttggaggctgttttagttttattgtattangggttccagttttcaaaattaagttaaaggttaataattcgtactttctaaagtaagcattagaaattagaaaaaactgtctttatctattttaatcccagttgctgtagttgaataaataggttaaactatagtattccatgacatgttagatccgaaagcacatagtagaggtaaaaatacgtagtaaatgtgtatgtcaattgttttt

SEQ ID NO: 11160 - DNA, 156 bp, Glycine max
tgcaagcttcttttccaggctcatcttggtggtgaagctccgtcttccatggcttattccctactggatggcgcctcttctaacctcttctgctttgtcttacgctgcatctccatggtggaaaatcaccattaacaggatctattgaagctaaag

SEQ ID NO: 11161 - DNA, 573 bp, Glycine max
  unsure at all n locations
gggnnnannnnnnnaaatggttgaagcctagnnagtacgntnctncnannaacngcgacacnnatngaactactnaagcccccgaaactnnngagcgaggagggagagcacaattgttccactttgannatttctagnnggcncnncagagagtcttaaagaaaggggngnngggttgaatccaacaatattaccaaaccttttttcccctaaataaanaaatctaatcttacctttttactttaagttatgaaattccccttaatcaaccaatcttctttaaatatttaatttcanaatgaagccaacttgaatattgaatattaaagcanttattaattaaaggaagattaacgggaagagaaaattgcatactcaagtcttatacttggttcncgccacaccccttgtgcctacgtccagtcccaaagcaaccccgcttgagagttccactaccttgtaaattccttttcacattcctaaacacacaaggccaaccctccctctgtgtttaaagattcttacaacacaaaaactccagcctcttattccctgatagatagaaaacaaaan

SEQ ID NO: 11162 - DNA, 382 bp, Glycine max
  unsure at all n locations
agctnttctatctaatntttccagaaattaactcataggagaatttgacgccttattaatcctctcataaatatctatggggaaaaaaatccccaaagtcttaaacatgggtcaagccctaatgccttgtataagtattgatgctaaattatattgtgggcttctgaaatatatattcttatcaaataattaaaaaaatttgttaataattaatgttgacgaaatatactgcaattgagcatgtcagttatatttgtgagactcatttagtacaaattttaaaattggtaaattggagaaaaaagttactcgttataaaacaagtgaaatatttaaattctaaataataattatgtagtttaattcttataattgtgtacta

SEQ ID NO: 11163 - DNA, 481 bp, Glycine max
  unsure at all n locations
aggggcnnnnnnngaggtgtgtttgagatcatagcaatagcannncccatanaatatnnaatccncangcttagacattgnnggcactgagcatgtcctatgactgattggattttgnancagccgcaactttcaaggagtgatgaagacattaataaatcaataaatcagtcaaataaataagtgatgattatgtcataaatgttcatttaggtcaacgttaacctacagcagctatttacaaaccactcctgacactttttgttttctgacgcccaaaacttttaacagagcatacagatgaggagctcttgaaacacccgaaacaacgccgttgctacagaaaagcattaaacgactacctccagggagggaagattactcatccttgaaattaaatgaaccttgaaggatctctaagcgcaatatgggtattctggggggtacaaatgactaatgtccatggggatctcggatgatn

SEQ ID NO: 11164 - DNA, 477 bp, Glycine max
  unsure at all n locations
ngggtgttgactgaatcgatgctatgcannnacggacacttagaaactcagctcggnnaccccttcggactacgtgaagattnaccgttttgattcttcncnngggcngncncatgggnngagccgcattctctaaaagcaaccgatgcatacatgtgaatgggctaataccaggaatgttcagcagggtccagcctataacactcttatgcttcttgagaactgataacaacttctcctcttgctcatcaacaagggaggcagatataattactgcacaacgtttggtctcatctaaggaagcatactttataattgatggcagaggcttcaatttctggagtgagcggctcgataatggaacaaagagatggttcctaccctgtcctctaaagaaagtaaaggtttggactttctgaacatggtagtttatctgctctagaaatcaattcaaaggtaaacatccaaactttttcg

SEQ ID NO: 11165 - DNA, 214 bp, Glycine max
caatgtaattgattacactcttgatttaatcgattaagtgttcttgatcacttttgggaacacttttcagaatgatgtaatcgattactatatcctcgcaatcgattaaaccagaaactcgaaaaacaatcatgatctcaatttgagttgtgtaattgactatgaatatatgataatcgattaaactagagacatgatttctctacaagttatc

SEQ ID NO: 11166 - DNA, 248 bp, Glycine max
aaaaaaaaaaaaaataaagagaaagaaaaaaaaaaaaaaaaaaaaaaaaaaagaaaaaaaaaaaaaaaaaaaaaaaaagtaaaaaaaaaggagaaaaaaaaagaaaaaaaagaaaaaaaaaaaaaaaaagaaaaaaaagaaaaaaaaaaaaaagaaaaaaaagaaaaaaaaaagaaaaaaaaaaaaaaaaagaaaaaaaaaaaaagaaaaaaaagaagaaaaagaaaaaaaaaaaaaaaaaaaaaaaa

SEQ ID NO: 11167 - DNA, 151 bp, Glycine max
  unsure at all n locations
ataaaaaaattgacatatactntaattatgagtcttctcctcacttatatgatatggactcaactttttattttactcgatgtgaattcacctacacttgactcagaacatctctttgcatagaatgaggagaaatctattcaaaacatca

SEQ ID NO: 11168 - DNA, 272 bp, Glycine max
  unsure at all n locations
agctttattgtattatctgtggaaagcacctgtaccagatgatgaaagtgatgaccaaattgacggcgacagcgacgaagtctatttcattgaagcccttaggaaaagacgggaccgtgaggcgccatttggcagaggagattccgattgtggtgcctaggtacgccatcaagcctctagcgacaatggcattggaaagtacggaccanaggtgacgcggaggtaactaaagtcgccgccagcgacgggcatgtcgactacaaacttggtgt

SEQ ID NO: 11169 - DNA, 246 bp, Glycine max
  unsure at all n locations
tatatcgagacgctcgaaatngaatgttgaacctttgaacccattcaaaccacaataactttttactcggatgtctgattgagtcncgccatatatcgagatgccttgaaattgaatgtgaaacctttagacaattcaaaaccacatactttttactccgatgtctgattgagtcccgtaatatatcgagacgccttcaaatggaatgttgatggtctgagccaatctaaaccgacataacttttt

SEQ ID NO: 11170 - DNA, 480 bp, Glycine max
  unsure at all n locations
ggaagcctttccattgatnttcaactatcactacacacnagagcgcngctngnaaggacagatctaagcatacataattctttantatcatatgcatacangatggcttctatgtgttgtcgttccaaatcattcttatggcattatgcccgactaaatgtgtctctntttgaattggaatgggtgatgctgagcaattnttcatcttgaaactctctagtactntattgatatatgttttctagaacaagcctaatagtccttgtgatgtagctctgaatatttatattcctatcacatagctcggctcacccatatccttcatttcagaattactaaagagaaacttcttaatctcaccgaaataccaagataattngttgcacgcaaatatcataccatacagaataaagatattccttatttcactgccttgaatatatcattgtcaacatcgatcctttaatcaaagangcatgt

SEQ ID NO: 11171 - DNA, 285 bp, Glycine max
tttctttttgccaaaatcctgactcaccataaaccttgacccagggtgagaatgtcaatccttaccctcggaagcaaaaaaagaatagaggggaaatttccaatcaaagaaaaagagaacgaaaatttccaatgaaagcaaaaaaagaaaagaaagaaaattccccaatcaaagagtgggagaaagcaaaaaaagaaaagaacgaaaattccccaatcaaagagtgtgagaaagcacaaagaagagataggaatattcccaatcacagaatgggagagagtaaaa

SEQ ID NO: 11172 - DNA, 314 bp, Glycine max
  unsure at all n locations
ggaatacttacttgttggtgatgaataatttcgcttatcggaatcgaaaaatgcaaaagatagtgaccctagggctgcaaactcgtaaattccgtgggtattgcttttgaatggggggaaaagaagtttttgaatgcaaaaacgtcccccttcttcattttttatatattggtgcaggggttgctcgcccaagcaagctcagctcgcccaggcgagctaacctgcactattttttttttacaaaagggacgaatgatttaagaagcgactgtacacgggaatggctcgcgtgaggggaccanagcttttgatgc

SEQ ID NO: 11173 - DNA, 368 bp, Glycine max
tgtcttattgttggtaatcctaatattctactccaagcgattattctattttaagacactacactacaattgggtcaagtttttttaagagtcaccaatagttttgggcaacttttgttacagtcacgaatgtgataatgttaataaaaatgagctgataaattaactaacaacttataccgtttaagttgaatttaaagttgaaaactgaaaacttgaaagcttataaattaatttaatccgtctaattagaaatattttttaagattaactacgtaatatataatatattcttagtattggaatatatctttaaaaatttatcatttctaaaaatagaataatatttctttaaaaattatatctta

SEQ ID NO: 11174 - DNA, 405 bp, Glycine max
  unsure at all n locations
tgacgtgcgatttgaatcccatgatggataaacctgactttttattatctccatttggccacactttagttagatgtctataattaaaacttggtccattgatcttttatttattagtctatattataagattcaattttttactttttaaaaatactttntaattcaaagataattttaaattatataatttttgtccttaagaaaattgttttactattttttaaaagtaaaaaatataaccttttaaaaaaatattaaaatcattaaatgaccatttttttactttaaacagactagttcataacaattaatatcaaagtagtgtttagcttcgttctgccgtgtaaagttgaagcaaatgattggttgaaatattaccgtccaaagtaaataacggaatct

SEQ ID NO: 11175 - DNA, 393 bp, Glycine max
  unsure at all n locations
tacctttttaatttgaattaaaacgttcaataactgctggtaatcaattaccatatatgtgtaatcgattacacagtgcanattttgaattcaaattttaatagctgttgtaaatcatttttggccattggtaatcgattaccagagagtaaatctcttgaaaaagactttntaatttanatttcttggccaaaccttttgctacttcaattggaattcccttcctatntaatatacccttcctaagactctagagactgtcttgatcatccatcttgaatatctttaatttctttgtcttgcataaatctttgagaagcatgtgatccatgtgatcctttggcatcatcaaaacattcagcttgatcctttgtctacaatctcccccttttt

SEQ ID NO: 11176 - DNA, 352 bp, Glycine max
tgagatgaggaagtgttgaagggtgaaacttcttgcttttattgttgaccacagagtggtacctggagatatgtcgtgggggtcaggagaccttggggacgtcaggaggggtgctattgcccaaaaccaagcttgaccaatcccgacccaacccgggcatagtcggtcagtgagaacctgtgatgtacctaagcaggcgagctcctggcagtcaacagatgaaaggaacaaagaccaaaaagcaaggaggcttgtggtggctggccaactgtgaaacttgattgatatgtgagatatggtctctggtaatcgattaccaagggtgggtaatcgattacaaggcttaaaaatg

SEQ ID NO: 11177 - DNA, 327 bp, Glycine max
  unsure at all n locations
tgtcttgcttctntttctggtgttatgttttggtgtaattgattactgcctcgttttaatcgattacatgttatggtttatggcttcttttgcctttgtgttcttttttaatcgattaccttatgttttaatcaattataaaggcctcaggggagtttttctggcatatttaattgattatgcctgcattntaattgattactgtcataccctaatttcgtccggngattattatttgatgatatacaacctttgattggccgcttcgagatatttggcaccctttgttgcacaatatgtgaagtcccgagacgtgccgaaaatcaa

SEQ ID NO: 11178 - DNA, 382 bp, Glycine max
  unsure at all n locations
nttggaggaagcctcttaatgaagcttctagataaaactctttgatctgcctcgngaaaaacgctgcccagctttcgttaaccgttggatcttctcgaaatttggtttacaacttcacatgacaatttaccatgatttaaccgttgggatcgttgagaaactatctggagtgtgatagaagcgtccgttcccgagagcatctcttatttaagcatttcagcctttgctttcttgtagcttangaaaaatgtcatttcttcttctttctttcttccaaatccatttctaaagttacaagtactttctccatcacccacattcaccattagccaccacaaaccatcattgttctccatttgaaacccacaccgagaggaaccct

SEQ ID NO: 11179 - DNA, 346 bp, Glycine max
  unsure at all n locations
agctntgttaaaccaganaacttcagaaagcttttggtacaaagaagaagaagaagttcaaagagattcaaggcttgtaaaggattgattgaataagtgtaaaagtttattgaaaggcaaaacaaagccttgcttttaaagactcttcatgtctggtcaagccaaccatttaaaagagttataactttanaanaaacttaaaccaatttgaaaaatcaaaaacctttgaagaagtacatcttttgattattcagaaacaacactggtaatcgattacaaatcagtgtaatcgatacacaagggtttatgtgaaggatgtactcttcacattgatttgatttcacgt

SEQ ID NO: 11180 - DNA, 365 bp, Glycine max
  unsure at all n locations
ntttctctgtacacctacattcctatacacaaaatattttttctctatatccacacgcattgaacaactctttctctttataccaacatggtctatataaaacctctattccttttcaaagatttctttttcctttttcaatatacactcgttatttatacaaaaaatttctttatatacactcattgctcatatacaagaatttcttttcacacattgtttatatacaaaaaatctttgcacacatgtgttatatacaaaaactcttatcacacatttttttatatacaacaacccttttcacacattgtntatatacaaaaaatttcttttcttttctttatatacagatatgacattttgtt

SEQ ID NO: 11181 - DNA, 497 bp, Glycine max
  unsure at all n locations
tgctattaaannnnnnnnnnnnnnnnnccgccctttaactgangctgtatgnctgcgaannanaaacnanccgcngcnacnnggnngcangnaggtggcaaagaaggcatttatttttatggngancnacagaagaacggagagtatggactctagcaacagggcaaaatattgatcatggcaacctgagttactaagttgaccaatgcataaagttttccctcaagcttnttattttgagtagatgaagagaatctgtggcaccctatggactcctctaaggacaacagcatcatttcttgcactgaattgttgtgagtgggaagccatcttctcaatcaagattctagccacagcatgagtcatatcaccaagagctcaccactggaacataatcatactctctcatgttgctagacctatagaatattgagaagagttgctagaatctgtggtggggcacttgacacattgtgaatcttccacactcatacacg

SEQ ID NO: 11182 - DNA, 506 bp, Glycine max
  unsure at all n locations
tgggactnccnnnggggnnnnnnnggggcgtccccccgatttccncgaactncntgaatagaaaacaagctcctcaggacatcaacaacaataagttaaatnnggtttaattttttaatatataagaactnngatgtctagccgtgatttggctatataatatgaccattgacaattaataattcttttaatttgctaagattgactgaaccaataataaataatgtatatgacctatggggttttatatatttgatataatcatgttcctggctcatgatgggttaaaattttcaatgaatgtctttgtatgatagtcattgtgaatgtttattattgtacgcactttggttttttgtgatgccaanggggagagaaatanggattatatcaagactcacatanngtantaacttaatttcaagtgaagcttaaactcaaaaacaanggtgtagatatggacaattaagtgagtgatcgactaggaaaaaatatgtgcatgtgtn

SEQ ID NO: 11183 - DNA, 441 bp, Glycine max
  unsure at all n locations
nnnggatgacctangatntntatgnacatncannnggacncgggagcctcttagagnggaccgtggggcaggcaagcagggttctttctctcnaggaacacactctcacggcacgtgtggatccctttatacaccatacatccaaggtttcttcgggtttttccttttcctcaaaagaagagaaaaagttagttatgacttatgacgtataccagatgatttgtgttacagtcctagggggtggtggcaactctggtaggtctgatcgctaaggtccctccatgtgtatgagccatgcctgaaattctatttacttatactagcgcagaaacattctcccactatcatatgtggaagcatagatttcaacccgaaggttcaatggaatcggcgtcaccggcaatcccttgtcagactgatagtggttattgagactggctg

SEQ ID NO: 11184 - DNA, 483 bp, Glycine max
  unsure at all n locations
nnnttgcggcgaggatcgacgcgttacnccnnaaannnnagcttncctagaanaatccttaaagaggctggagctaagctacatttacttttctattagctaacctcacctcctggagatgagaagctgaacctaacctccacaccccctatattaaataacctcacccccttgacaaaaaccttgaaattcccaaaaaaggtccttattacaaaaactactcaaaattccccgaataccatggctaaaaccctatcttactaaaatggccaaattacaaggcccagacgaaggaaatacctattctaatatttacaaagaatagcggctcatacttagcccatggctcgaatctaccttaggctcatgagacnctanggcctccntggatctctagccatctacttggagcttctacccaatgccttgggngangattgatcattcctccccttgaaaggattgactcnnatctgnggtctt

SEQ ID NO: 11185 - DNA, 480 bp, Glycine max
  unsure at all n locations
nccccttaggggcccgtctatnctntcgagtgcancnccatngacaaggctngcggatcctatagagggacttgaaggcatgtattcttatatattctcgaatatcatgacttacaaaatgatttatcaaagaatcactaataaaaattgaaattgatgtttgattcttctagtccaaaaattagaacttgggactattttccatttaattgtcggactggctcctacgactttaattcaatanacagaatacatcatcgttttatattaagtaggtaaaatttaaggatgaaaatcgaacttgaattgaactaatattctttaagaataattacgacgaatgaagtttctatatgtcaaatgagtttcagttcagatctaaataaaagagtctgcangatgtttactttntaatctgaaatacacacacatcattattaacttcattcaaactcaacatttcacaccttatattatagt

SEQ ID NO: 11186 - DNA, 431 bp, Glycine max
  unsure at all n locations
taacacactctccactgttggtccttattttattgagaattataaaatcagaataatgactcatcatatgagtagttggacctgtaaaatttgtgatttttaagaaatttgagccaacaaaaaagagtgttcaagagaatgtgttagagacagtgttgctaccatttctctgtttaggaatggtgtttgtagttattagtgaaaatagaaatagaaaatattttccttatgtcaaacaggcttctgcattactatttttagtttttacaacattatgatagatcattatatattttttctttctctaaaacaaatgatttgtttattgtcttgnggtggtgtatataaaaactgatcaacacantttacttttctttttttgcctgttcattccaatgtacaaatgattggcttatgatgcaacaaaatct

SEQ ID NO: 11187 - DNA, 277 bp, Glycine max
  unsure at all n locations
ggcccacatgggcccaatgctagttacaccccactttgatgagtgcatccgccctccagaaatgtttaaatggggtcagatgggcccaatgctagttacaccccctagtttgttgagtgtagccccccagaatgttctagatgggcccagatgggcctaatgctagttgcaccattaagtgtgatgagtgcaaccccccttcagaatgttcttgatgagcccagatgggcccaatgctantgacacccccctactttaatgagtgcagccccctatt

SEQ ID NO: 11188 - DNA, 361 bp, Glycine max
  unsure at all n locations
aagcagnactccttgggcctgagatgctacaacaaattaccgaacaagtganattgattcgagagaaaatagaagcatcccaggataggcagaagagctattatgaccgaaggacaaagccattagattttctagaaggagaacatgtngtttttaaggtttctcctgtaactggagtcggaagagctctcaaatctaggaagctgacgcccaagtatctgggtccgtatcaaattntgaagaagggtgggcctgtagcttatcaaatcgctttacctccgagcttatcgaatttgcaccctatgtntcatgtctctcaactgaacgatacaacccggatccatcacatgtactcgcactg

SEQ ID NO: 11189 - DNA, 257 bp, Glycine max
  unsure at all n locations
aaaaaatcactaaaaaggattttaaggttcgatacctcagtttttctcaccaagtaaaaatgggtcattttaaggtccaacgccttaaaaggacatccttccaagtaaaaagaatcgcttgatttcccctttagaaagaactacgtangtctgatttcctcttcgatggagggtacgtangagcaagaagcccgcttttgtcgacctcaaaaataaaaaagaaataaaatttagatcacaatttccacattctaatt

SEQ ID NO: 11190 - DNA, 428 bp, Glycine max
  unsure at all n locations
atgcctaatcatttccaatgttatttttatctctactgagttttaaaagattggctaagattttgttaaaacataagcacttagacaatgaaggaaagctggagttgctgcacatgatgtccaacgttatgtcaaggaataagatcgggctacacaatgcacaaggcaagataaaatgtcaaatgaagaattgaagttgcaggatccacgatgtcggatacaatgtcctgacatcctgcccgaanatactggagttgttgcacaatgcataagtcaagataaaatgtcaaatgaagcattgaagctgcaggatccacgatgtcggatacgatgtcctgacatcttgcccganaatactggacacataaatctgttatatctttaacagattattgtgcagttagcaaaagattagatgatctatcttt

SEQ ID NO: 11191 - DNA, 295 bp, Glycine max
  unsure at all n locations
catggaagctcctaatatctcccacactttttagggtgagccattcttggatggccttgattntctcaaggtccacttggacctcatttctaccaactacaaaacctatgaaaactatattatctacacaaaaggtacacttctctatattttcatagagggtgtttttcctaatgactgaaagaactagcctgagatgtcctaagtgatcatctangctcctactgtacactaaaatatcatcaaaataaacaactacaaatctacctatgaaatcccttaagacatgatgcat

SEQ ID NO: 11192 - DNA, 495 bp, Glycine max
  unsure at all n locations
nncccgttggaactgaangatantctaacatanaaaccangcgacgcangtttggactcgacccgactatgtcggcagctctatattttgtctacagaccccatgtgcgtgcaggcagagtactggaaagtgaccccatcttcttgagaggcttcacatattcagatgctctgagtatggagtacacttaaagggagaacacaaggtgagagccctactgcaccgtgcgataatggacgcagtcgccatctggtcttctcaagtccctatgagagctccttaacacatgaaagctctggcagcactgccttcttgaccgtcttcaaccgaagagagacctgtctaatatatgttgaatcaatacattggatttcgccgatgaacctccgcagtgatgcataagaatagatcactcactgttgcatggttatatacagcgctacactcacgtgcagatgatgcgctgtgtacatcattgccctgacgaatggaact

SEQ ID NO: 11193 - DNA, 275 bp, Glycine max
  unsure at all n locations
ggtcttcattcttgtttttgcgagctgattttagccttagttttactttagttattagtcaattcaattaagaaagagagatcccaaagagaaacgtccgattgcttttttggtttattttactaaaagatatttttttattattatattattattttacctctttntggtttccaacgtggttacgacatgaccgaacggtcagatttcattntaacagaagttaacggatattacaattcaaatgatcggtggaaatttattttattttttga

SEQ ID NO: 11194 - DNA, 443 bp, Glycine max
  unsure at all n locations
tcaggaacacaaaatggaacttatgagactatttcaacatgtatgattatgancaaganaaagaaagaaattgcatttaaagcctcatcttctattcaagaagaaagtgacagagaagacttgaatgaaatataagaagatgatgattttagtttcttcgtaaagatattcaacaagtttctaaggaacaaaggaaatcaaagaagaacaaatttcaatccaaagaaaaaaggagaaaactctccttctgttccaaagtggtatgaatgtaatcaacctggacatctaagagttgattgccctagtttcaaaaaaagaatggagaagtctgacaagananaattcanagacaagaaagcatagaaagcttgcatcacttgngaagacaacgatatagattcatcgggagattcagaaaatgaagtcgtgaatctgagtctcat

SEQ ID NO: 11195 - DNA, 230 bp, Glycine max
  unsure at all n locations
agctttattcaccgccgnggggctttcatcgttgtcatcttctcatgaccatcgtgtcactgtcaatgtcgaagtgtgaactcctccaccacaagactctcatcattagaagctatgaacccatctcttgcattntcatgtcttctttgttgaattttgtgggatcagagttggtgtggttggtgatgacattggctttatggtgcggcggaaggagccgtaaggtttgt

SEQ ID NO: 11196 - DNA, 174 bp, Glycine max
  unsure at all n locations
taactactaagacacgatgcagagatttattgctgttatattaaccagagnnaagccagacgcatatgcgtgcgtcgacaagaacattatgaacagcacacaggaaacagactttgcagaaggtcagtacctgcataacatgtaatacatagggtcagatactctgcattgaca

SEQ ID NO: 11197 - DNA, 395 bp, Glycine max
  unsure at all n locations
ntgagacgcatgtganactntggcatcatcaaaacattcttctttattctttgtctacagacttcatatgaaacaatgcaatgtaatggaaagttgtacaatgttcatgacattctttccctattttctgattttgattttgatttaaattttttggaaaacacaggttgattgtccttttgaaaaaggtgataattcatgcaacctcatcctatcttttgcaaatctctctgggaactccctcagagtgtatgttctgtttgatttagtcacttgaccattttggagtgacggcaatggagtcgttttgatgtttaatcaatccattgaaattccaggatttgtcccccccccctttttttgtttaanaacatcgacgggtgagaaatttttat

SEQ ID NO: 11198 - DNA, 331 bp, Glycine max
  unsure at all n locations
ttcatccctatgagatgttgttgaagtattggcgatcaaaattgccattccttggattatagaattgaaccaagctcatgcttttacaaaaaggttcatcaagtcaagttgaaatatggaagtaaccgtcttgcaaaattggggcaaaagatgaatcgagtcacatcactgcttcgtctactgccaaacatatttangattatngatgtccttgttactttcagtttcaccttgacaaagatgtcatggaccatgttgaaaatctaaattgattcaaccccatatcttgcgtaaaattcgcaatacttcaactgtacatcattcgcatgca

SEQ ID NO: 11199 - DNA, 215 bp, Glycine max
ctaagcttgctaagttcggtcccagattccaatatacatacactcatttcttggttcaaagaaaccccataaatttccccaaatagatcaatcctttagagagtaagctataaacatgcacaaaatctgcaagcttcacaacacaaccctatctagctagcgctagcccctctcattggggcattggttgctacactcatgaacataaatacctg

SEQ ID NO: 11200 - DNA, 434 bp, Glycine max
  unsure at all n locations
gcttaagatttggataagggatgatgtttggttcacttattttattgttcgtgacccattgatgaaattctccctgttgtttatccttttagacacacaacaattggtatcaaagctgatggttcgacttggtaattggctcagatgagtaagatgactatgacaaatccatggacatggagatccctagtatcgaaagtcttcttgatgggtgagttcgtgcatggaggccangtagcangtcccgcaggtgttgtaatggtgcaaggtactagagcatattggcaacaatgactagacgagttanggcaatcacagttaagctctaatggaaaccattggatactcttgggtngaaaatgacttttgctcgaaggagagactaccatgtggaagagacttacacttaagggggagattgttaaaatacaagt

SEQ ID NO: 11201 - DNA, 352 bp, Glycine max
aggggggagatcaatctcccaattcaaatcaaacccaatgtgtgccaaataaccttccaagtaatggactaaaatcctacctacaactgctaataaggccggccttggattcattcggtgggggtggtcccgtcaacactgcaccagaagttaaaatttgtggtggaggacattggatatagtttcagagaataaacatacttgtaagttgtcatcttcatgcctatgagaggctgtaaagaacattggaacatctttgaacatagaagtgtgagcatgctacgtggagtctcccatgcaccggctcattatgcacttgatgtggtcagtatgtaggcacggattgaccaag

SEQ ID NO: 11202 - DNA, 492 bp, Glycine max
  unsure at all n locations
nnttttaccggaattaganagcngncntcnngaacatnaatactaagctaagagaatagtgatgataaaatggttttttattatgcactcatgtagcgccgcgagacctcgcgaagaagaattccttagcataacgatcctcccagtcacgatgtggttttcattcctggatctaacaatcaatttgagcgatccttcgaccttgcactgaaatcggtgtcgaatgataaaagcattccccanatgaaattanggtttgacaataggcaatgtggggttgttgtttaaatgacgcccatgttttagccttagtaagagtcaagggatcatggtggatgacgccacanagttcgtgcgggtttgtcagagtttgtctccatgctntcctggcgagtgcttcccttatccttcttaagttattggatctttaaagtggtggtgaatgcttntattcttcccatttatcttaacttaggataataatatgggaat

SEQ ID NO: 11203 - DNA, 376 bp, Glycine max
  unsure at all n locations
catgcctcgttgaaattcaaaggcacgacattgatgtaagtgatattagtaaaaactttataccattntattctaatgtttaaaaagggtacattccaactgcagggtcccatttaacatacgtgtggtgaaaatttatgcaagtcgcacatccaacagatgaaaggatccttctgtccttcatgaaattacttctataatattgttccctttggaaaactctcttgtctggctgaagagacaggcaatgattctccttanatttattntttttagttcctataataagtgattattttcttctaaattatatattgtaattctaacaaatccctgtccttagcattttttaattcattattaaattttaaaaatt

SEQ ID NO: 11204 - DNA, 208 bp, Glycine max
gatattgtgttgcgggagggaattcccattggattaactcaccatctttcatttgctagtttgatatgacatttgttcgtggatcacctatgatgtcttgctttcatgggtaatctatatcctttccgatggtataacccatgaaccaacaaagaaattgacttatatttgactcttttgacaatccatagaactagtcttgatctat

SEQ ID NO: 11205 - DNA, 428 bp, Glycine max
aactaagctttgaggggccctattggtgctgctgtattatgtaattccattgcaatcccccaaattaaggactgatcataacttgaaacccttatgctctcttagaaccctaaaacaaggtcaaggatatcaaaattaggctcaggggtttattcaaataaatcattattacttttggctaaacaagggtgcaagggataaattcatcacaaattggctttttggctgagtggcgaaaataaaaagaaacatgccttgatcatatccaccttatgcaaataatctaagagtctaagaatgatgcaaaattaggaatttaaaaacagacattctctcataattaagttcacacagctcaccgggacaagataaagttattggcttaccggaccatgatctcttatcatcaagcgtaccttttctctctt

SEQ ID NO: 11206 - DNA, 318 bp, Glycine max
  unsure at all n locations
ccttccttttatagtgcctaataaatggctcttctactagacttgacggcctaccaaactcatccaaatcgatgtcaaaagtgttaaaatggagaatattctagtgnaattggcagccactcaaacaactctgtctacttcactacaaactntggtaaccttctcctcttcagcactattgtcctcgattcggatgagtctggtaggtggctaacgctggcataagagcccattttcaaccacttttgaagctcattggtggatgtttacctctttgataggtctccgcttatagatgatgacgattattaagaatca

SEQ ID NO: 11207 - DNA, 367 bp, Glycine max
  unsure at all n locations
caaatttgatcatcctactaggatgactgagacaactggggcaaatgaagagggtgagaaagagggagaaacccatgctgtgactgccattcctatacggccaagtttcccaccaaaccgaacaatgtcattactcagtcaataacaaacctcctccttacccaccacccagttatccacaaaggccatccctaaatcaaccacaaagtctgtctaccgcacttccaatgacgaagaccacctttagcacaaaccaaaaaaaaaacaccaacaaaaagggaatttgcagcaaanagcctgtagggttcaccccaaattcccgtgtcatatgctaaacttgatcccatatctacttgataattcaatg

SEQ ID NO: 11208 - DNA, 299 bp, Glycine max
  unsure at all n locations
cttgaaagcaacctggttggattattctttaccatcatcaaaactatgtattcatacattcacattctccccatttttgatgatgacaatcattatcaagtgaattctttcgacatcatcaaaacctgcatgaatcatattctcctcctttttatgatgccaatcattatcaagcaaattctatttgacatcatcaanacctgcatgattcacattcttcccctttttgatgacgaaaatcatttgtaggttaggagtaacaaaaaatatctatctgtatagtttactcccccttgatt

SEQ ID NO: 11209 - DNA, 408 bp, Glycine max
  unsure at all n locations
aataaagagaataatgcttatgccattaaatgatccaacagatctatgtgcttctctacaaggaggtttctctagctttaaaaatcaacagcttgtacagtatgagaagactgttaaaaattcatgagaatgtgagggtattacgctatcctgatcattntgctgctcgtgtgttgcagatttaatttcacagggttcaattctaggtgttgaggtcaacgtttctagaaaatcatattctactcaactggttgtcatggaagatgagaatgggaaccaaaattctgcgccacctcaaaacgaagggtttctcatcccgaatatatttactttaactataccgcangttaatgaatagcttaatacgtagcttttgatttcgtgaatagnttggttgagttttcttgg

SEQ ID NO: 11210 - DNA, 227 bp, Glycine max
  unsure at all n locations
ttgggattttgtgacaaatggataaagtggatcaagcttgtttggaatctttaagagtctcggtgtcggtgaacaaaaatcctacacaagagnttagccctcanagaggtctctgaccagtgttaacggcttgacaagtgtaccanatgtccaagtagtaaagactcgaaaatctgagtggcgatntttatacggactgtatcttgtacttgtgttggattatttcc

SEQ ID NO: 11211 - DNA, 362 bp, Glycine max
  unsure at all n locations
aactcaagcttatgggaaggcccatttgcctgagagagctgtgtacttgtttcacagaatgnggggtgagtngcagtgcaaacaaaccgtgaaatcattcaattctgttctcaatgtgattggtcaagagggtctcttcaatcgtgcattggagttttacaatcatgttgttgcatccaagagtttgaacattcaccctaatgcactcacttttaatttggtcattaaggccatgtgtaggcttggttcggttgataaagcaattgatgcttttagagagattccactcaggaattgtgctccggataattatacctattcgacattgatgcatgggttgtgcaatgaagagagaattgatg

SEQ ID NO: 11212 - DNA, 242 bp, Glycine max
cctgagacatcttaagacatatatgtctttgtgactctaacatgcatgctagtatgattagcttggcaagccattattctcatttatgaaactctatcacattaaactaaatattctcaactcgccaggggataatactatcttgcactaactatgagatatattaactaggccactaacactatgtgtcatacttggatatgcccctaaaccatgtttctaataggatcttgaagttgcat

SEQ ID NO: 11213 - DNA, 351 bp, Glycine max
  unsure at all n locations
tggctatgatccccaacctttgttcctttctaatcctcataccccggtcaagtgaatctaggaaaaaggaatggattggctgaactcttttgtggtttcatcaaggcaccacaggtggaaaaactcattacagaagttcataagtccactgcttagagaactgtatatntgcctgtaactatttgcttcttatttgcccctttatatacatgtataactactggttgtttggcattctatatggccataaaagttgagtaaaagtataaaaatcttcataacacataattcttttgcattattaattttttattacagttgtgacctgaccgcattaaatcctataggttn

SEQ ID NO: 11214 - DNA, 333 bp, Glycine max
  unsure at all n locations
agaaactcaagcttgnatgtggacaacattaaggacatttatgatctgtattttttgnacctnagnagatgaatcattgtaagacttgatcgctatcatatttaccttttttttgggtactatacatagaggccaaagaaactgttttggtgtacaagagtctacgactttggttgaattttccaaattctcctaccactataccgatcctaggggatggttgaagaaactctttgagcacaaacttgaacacccagtttgcaacttagaccacctactttgcaacttacaaatattaattatgcttgtgaaactaaaaaaaaggaaaaaaaa

SEQ ID NO: 11215 - DNA, 126 bp, Glycine max
caaaaagctgtcttagttctatgtgtagtgacctcgcagtctttgctccaagcctagcacaactttgactccctaatacttgagttatatattggttggacaaaaagctgtcttaattctatgttt

SEQ ID NO: 11216 - DNA, 317 bp, Glycine max
  unsure at all n locations
accccattgagtgactttccatgaatcaatttttttagataaaatttccctcatatagaaagggcaaggacactctgtgcttttattcaagcaacaaatgacatacttggtcgatttgctttcaacaactttgaaactttgatgcaccttcataacatattggttgactgcattcttgaccgcatctttactatcaaaatctatgtcaacatataattctttgccaacattaaaactcaatggcatctncaaaccacaaatgttcttctcatcaagatgactccaggtgatattattataatgcaaagcatcattcc

SEQ ID NO: 11217 - DNA, 456 bp, Glycine max
  unsure at all n locations
tactcaagctggtcccaacgctntgttcaggctctcccaaaatctagatgtaaacctagtatctctatcagacactatgctagatggcacaccatgtaatatgacaatctcactaatatacagagaggtcaacttttccaaggaaaatatgatattaatgggaataaagtgagcagacttggtcagcctgtcaacaataacccagatagaatcaaaacctttgggggttctaggtagtcctacgacaaaatccatagaaatattgttccatttccactgggtatctccaagggttgtaacttccctgaaggtctctgatatcttagccttctgacagactaaacatgcatacacaaactcactaacctctctcttcatgttgggctaccaaaacatcatcttcagatcttgatacatcttggtagcaccaggatggatgctcaaactactcctatg

SEQ ID NO: 11218 - DNA, 377 bp, Glycine max
  unsure at all n locations
agcttaacattcaatttcgggactcaatcagacatcgtttgaattgctattagcttttcattcaatnntgagcatctcactatattacgggactcaatcagacatccgagtaaaaagttattgtcgtttgaattggctcataggttcaacattcaatttcgagcgtctcgatataatacgggactcaatcagacatccgagtaaaaagttattgtcgattgaatcggatcagagggtcaacattcaattttgagcgtctcgatatacgaaggaactcaatcacacatgcgagntaaaagctattggcgttcgaatatgctcagagcttcaatcttcaattacgagcgtccctttatattacgggactcaatcaatca

SEQ ID NO: 11219 - DNA, 308 bp, Glycine max
  unsure at all n locations
gcgagtctagcagagaaaaaggttataacgttctcggctttcttatgtgggttgcaagccaaagtgaatgttggtatagcagcaaagatgggttgaagaatttagcattgccttanagctaaaggaaaaaagcaaaatgaaattggattcgatccccttagcaaagtctcatgctcaaaacttgaagatgganaaacgtgattagaaaaaaagaacccacacaaagtgattagttatattcttcgagagagattagtcgcgtaaatcaatatatattttatatcaataacatgttcttaaaaaaaaac

SEQ ID NO: 11220 - DNA, 473 bp, Glycine max
  unsure at all n locations
ggtatgttacctttgaanactgcactatganactaagctttattgcaggcctctgaacatgtgccacgcgctccttttttgagatatatggggcaagggctggtcaccttggcttcctttcttcaaagtggtaaaaccaccccacatgtnggttaggattgaaaaaaaaaacctttaaggaccacaccctgtaagtggccttactccacaagtccttgtccattcacctaatttgacctcaaccttattccccacatgtggacctcatatctcaggcccatgtatcaccacaccaatangagtccattgttagcaaaatgaaatctttntctagtcttttatactgcactggacataatggtccangctttccagaaagttaatcttgcgggcagcatggtctcatgaataacttctaattcttcagcatgtgatataggcttgatctatctgagaatctggattgatcctcn

SEQ ID NO: 11221 - DNA, 275 bp, Glycine max
  unsure at all n locations
gagcattctcgcaaaacaacgtgacccggactagtttccctatgattttacctangcgcccgatgaggtttatcactgacatggtaccacattgcatatangattgagtcttagtgtatctattgcataacgcttgtgtattgattgatattgatngatctagtgatattgtgtnttgatccttgagtacatgagtgatgtgaaaatgaatgacatgtgtngtgttgtgatgtgatagttcgtgacacagtaatggaatgccgtgagctatgttt

SEQ ID NO: 11222 - DNA, 312 bp, Glycine max
  unsure at all n locations
agctggtttgaggcctggctacaaaaattcattggtttttctctatgattcagaggtttagattctcagagagcacaaatcccaaacttatcacaatggtctttttaatacacttaggttgctcactagctttttacttttatttgcttttgaccttgttacatcaacacactttattcttttctttctctttnttttttttaacatacaacttatttgttgtgtgtgctgatgctttctctttttctttgcatcccaattagttccactcccccaaatttggggtaaatttgccttgaactatatgctctc

SEQ ID NO: 11223 - DNA, 260 bp, Glycine max
  unsure at all n locations
acacacccctctcataactaagctcacctccttgagaaacttccttaagaagattcctaaagaatctagagcttagctacacatacctctctaatagctaagctcacctccttgagatgagaagctagagcttagctacacacccnctataatagctaagctcacccctatgacananaacatganaataaaanaaaaaagccttatntacaagacaactcanaatgccccgaaatacaaggctaagaccctatactact

SEQ ID NO: 11224 - DNA, 413 bp, Glycine max
  unsure at all n locations
tctctggtaatcgattacaagacttgtgtaatcgattacattctttaaaatttgaattaaaatgttctgtaactgttggtaatcgattaccatccatgtgtaatcgattacacattataaattntaaattcaaatttctaatgactgttgtaaatattttcagctgttggtaatcgattacaatcctcatgtaattgattacatgccttcaaaaatattcaaaattaatctaaaaatgtttcaagaagtgttttggccactggtaatcgattacatcctctggtaatcgattaccagagagtaaatctcttgtaaaaacattntggcttanattcattggccaaacctcttgttgttcaacttggaattcccttcctaaatcactagagatcttctagatgatgtatcttgaa

SEQ ID NO: 11225 - DNA, 457 bp, Glycine max
  unsure at all n locations
agatactcagcttgcaaatgtggtccaccaatggctagttatgagcgttgattaatttatgcagaaggtggcctggcaaggagtctagccttctccttcaagaggggttgaggcctctgcagcttaagagcctcagcctgcacaggaggatgcttctagtgacatctcagagccctctccacctgagcccttcattntttaggaggatgttgcagtacccgagccatctcctcaacctgagcctgagcctgagccatctgcaccagtgccggacttgcctatttctcaggatccaccatctgcaccagcactagacctgaacgagcatgcagaggatcattcataggatggttgacaggatctttattttcttacactttgaaaaatttatattattctgtcttcagtacattntatgtnntatgtttcaattttaaatttcagttcatagttatat

SEQ ID NO: 11226 - DNA, 378 bp, Glycine max
  unsure at all n locations
gaatctcatcctttaatcacattttctttttcgtaccaaaccaaaacccaattcgctaactttttacctcctttccaaaatattaattaataaaggaggggcacacnctatttangaataaattaaataaatcaaatcaaatctattgtccgaaagagcgccgttgagtttctatcctaaatcctacaatnnttcctttcataattctcactctctgcaatatttatttccttcaaagtcattggtaagttaaagacattttctttttttaattnttccccatcttagcactgctcattntattagtcttctacaattttctgcttgttatttttacccgaatctcactgccaataaaataatataattccatttatc

SEQ ID NO: 11227 - DNA, 363 bp, Glycine max
tgtctgtttcagaataaacataaaacatcctgtcactatcttttccagaacgagcaaccccaaaatcgaaaggtaatcttgggatttcagtccatttatttgacacagaatcatatatttctccagagtccagaggctcatcccaagatcccagacctccaacagctatcaacaaaaatcttttactgccctttgagcttgaatgctcacttttttgcctaaagaatttgtatgtctttcgactgggcagagacaaagcttcagtctcattaaaagcaggtctgcaatggcgtctcattgaaagcttgtggggatcctcatatacgtctgaaaccccaccaatccttgatcttggaaaacgtc

SEQ ID NO: 11228 - DNA, 299 bp, Glycine max
ttcttgtttatcagaatgaaattacatgtgtagagtgaaccgataatgatgatacctgttgcgcccaccaatatgtccaacatgatccaagcctagataatgaagtatctaaaataaatttagtgaaatgaacataattgaaattaaatcttcattataaagcataatgtaatttataacttagacaaaatacaccttttgtacatggtgaaactagttaacatacaattgagaatccttatactaaaatgaatcttaagtcttgactttcactgaaaaactaaagccaacaatttatt

SEQ ID NO: 11229 - DNA, 457 bp, Glycine max
  unsure at all n locations
tactaagcttataatatttgctttgtgcacggcagacaccttctttctgtanttttgtaagcatactcgaatgcatatgtagcaattcgctctgaacaaaactttgttattacctagtaaaatatgagtatcaacagcaaacataaacccatactgcatcaagacagtatcaaggtgataccttcatgacatatatacatcaaagatcacatggaaaagaagaaaaaaaactggatagaaattccaagcgaaaagaactttacataaaatgaattagccctcttgaaatcataaaatacaggaataccaaatatgttcactttcttttgctagcacgatagggaacgttntgctaacatatcaccagaaaacaatcattatttgcaaaagctctctaataaaaaataaaaacaagttatttatctatagcaagctgaatcattcaactggtaataca

SEQ ID NO: 11230 - DNA, 372 bp, Glycine max
  unsure at all n locations
atatatatatatatatatggatgaggtaatcaacacaatgttacggttgttagaaattaggactttgacttcgtgatctggtttcgtaacagaatcccctcatttttcacaagtactaccaatatattgtattgtcatgacttcatgacttngccccggtgcaacttagctcctacattatttgctgactgcagtatagggctaagtgatccctcaattaactaggctggtttcccagtttcacattttccatgtaattcgaagggttactatctcaataccatttgtttttattaactttcaactagatgtttggggcgattattccatattcccctaccaaaaaatcagaaacaatccctcgagattttg

SEQ ID NO: 11231 - DNA, 278 bp, Glycine max
  unsure at all n locations
tcaattaaggtctctaagtattaaatttgcaaatggtttctattgttncttaattttagtcaattgaatctttttcctcaattaggatttgtcaccgtttcaaatccacattatatttattattatttttaaattgagaaaataacaatccaggagaagatcatcttcccttattttggaatcacataggaattcaaatcaccccagcattcaacttcgtggttatccattctcacgccgcagaaagggttatcccctgcggatagagagactaatcg

SEQ ID NO: 11232 - DNA, 125 bp, Glycine max
cccccttgaagaaacatgaagatgcatgcagccatactatctcactcagtaaataataataaatagtgaacttgtaatgatatacgattctattgtcttactcagtaaatagtaagcatgacaca

SEQ ID NO: 11233 - DNA, 396 bp, Glycine max
  unsure at all n locations
gtttctgttttccaaaccttgttcttctgcagattacatttgtgtgctatatcttttcattctcttctacctttgccaanaagaattcaacaaggactaatcgcctgaattcttttgtgtctctcttctcccttttcccaaaagaacaaaggactaatcacctgaattcttttgtgtctcccttctcccttttcaaagaattcaaaaggacacagtctgagaattcttttgattcttccctttcccttaaaaaaaagatttcaaaggactaaccgcctgagatatcttttgtntcccctttacaaagattcattggactaaccgcctgagaactttgtcttaacacattggagggtacatcctttgtggtacaagtagagggtacatctacttggg

SEQ ID NO: 11234 - DNA, 154 bp, Glycine max
tcttgcaggtgaatatcctcttaaccatcttatggagttccatattgtgtgttccaccatgaagcctcttgatgtccaagatgagcatatctttctagaggatcttcctcattctctatacggagtggctaaagatcggctctactaccttgct

SEQ ID NO: 11235 - DNA, 490 bp, Glycine max
  unsure at all n locations
nnnnnggggactgatgtcagttantctctgacnanccnanncnanggnnnaactgngctgtatagatgtgcgtagaattgatttatatctatatgtgtngaaatgcgatcttcctcaagcaattgccatagtggcatgcatgctancatggtatgtattttacgggttctcctcattctcctgtacactatattcactaatggtcaattcattgttctcgttaagcaagctactcacgtcgtgattgacatanaaggatatnggcatggaattgcaacaagagcagcttagagttaccttgatgtaaagttnggttgacttaattctgaatcaaaaaatgagattgagatgcatacttaaattaatatatctgaatcacattagcaggatggtcatggaatagcaacagctacctcttccttggtttgcgtanaatttaaaggttagtctaattaatataatcngaatcattgaatgtactgacatgttg

SEQ ID NO: 11236 - DNA, 210 bp, Glycine max
ccattcacaaatcaccattggaataactttaggataataattttaaaaataaaaaccttccattatttgataggtggggttaaaatgaccttctaaaaaaattactttgtcagtacataacctttttctctatcttattagtgaaacaaacaaaaaataccatatgatgtaatggtatcatatcttatcctatcatatcatatcttgata

SEQ ID NO: 11237 - DNA, 504 bp, Glycine max
  unsure at all n locations
naaaaaanngggagaaattcgactacgactacgtgaaataanaaactagccttgatatagctgggcggacatgatttgagacttgtaggattcaatttgggcaaaattggatgagggaaagagtggttttcgaattctgcactttatgcagaattttgctgttgaaatgtgcagcanaaattttgtataagtgcagaanaaatgcttgtatatggctgattgtaaaaacggtagtacatatggggttccngacattttctagcagatcccaacggtcaaaatgtagacttatgtactagagacttccagtaaaattttcgagtcgatccaacggttaacgaattggaacaaaggaaatgttactggggtatttgtatgtgaaaagctgtgattatgagttgtgttttgggcagagttttctgcctttgccctgttntgcttggttntgttagtccatgatgaattggatgtgaaattcttggatgtcgtgggagcttgagaggg

SEQ ID NO: 11238 - DNA, 64 bp, Glycine max
gggtgctttcatccacgttggagcggtggtgaccgtgtgggtatctccttcctttttcctcgcg

SEQ ID NO: 11239 - DNA, 215 bp, Glycine max
gatcatgcgctaagcgggatctttaatcgctcaccgctagcttcactgcacataaaatacattgattctgctaaacgggctcagatcccggcttaacgaaaactgcaatttttctgaacggcagatctcgccaagcggtagatttaactcactaagctaagtatttatgtgctaaaaaaaaccaaacgactctttcgcttaacgcgaaccgcact

SEQ ID NO: 11240 - DNA, 448 bp, Glycine max
  unsure at all n locations
gagaaggtgaaaatagcacttttgccaattntcctatattaatctataattgagagaagttgattattaaacacacaaaacaaaagtataaattatctattacctatatttaacaaaaattacttataatattacaaaacaaccataaaatgggaaagtttgatacaaaatacacaggttttatacacaaaagttagtcgtattcatcgactaacaactcccccaaatttacagtttttcttatcctcaagcaaaagagaacaactcacttgtcctcaagtggtaaaacatgcagtgtttatgtataaaggtgtatgtatcaaaatttattgattgcatgatgagaaagatgaagcaatgtgtacctatcacttgttttcgcaaaatatgcagccttacaaagaggagaacanaatgtgaactatacagttggatgaagttaatcata

SEQ ID NO: 11241 - DNA, 353 bp, Glycine max
ccattgtcgccaagcgcaattccttacgaccttaattgaggtccatgacgctaagcgctagtcatggcagctaagcgagattcattgcggcaatatgagcgctaagagagtccctctcagctaagcgcatgctcctctgtacttaagatgcatcattttagctaagctggccagagccaggcttagcgagagttgcagcttttctaatctgcagacctcgctaagcggacttactctcgcgctaagctgagtttcagttaaaaaaaattattttcgaatttgaaacgtcggctaagcgcacgtgttcgctaagcgagcttggttgagaaaccaaacatctctcttgctcactt

SEQ ID NO: 11242 - DNA, 381 bp, Glycine max
  unsure at all n locations
tcaagaatcaagatcaagattcaagattcaagattcatgaattaagagaagacttaattaagataagtatgaaaaggatttttcaaaaactgagtagcacatggaattttcacaaaacatgtttaccaaagagtttttactctctggtaatcgattaccagattgttgtaatcgattaccagtagcaaaattgttttcaaaaaatttcaaattgaatttacaacgttccaattattttcaaaaagctgtaatcgattacaatgttttggtaatcgattaccagtgcctttgaacattgaaattcanattcaaatgtgaagagtcacatcatttcacttaaaagccttgtgtaatcgaatacatttaattggtaatcgatta

SEQ ID NO: 11243 - DNA, 227 bp, Glycine max
ggcttgcttgctttggttccaattgctggaacacagagctgccactctcctcaagaaaaggatgtagaatctgaaattctgataccaatgacagatgtcgtaccggatgtcacgacatcacgcttcagaacatgcagatgatatttgacagtttgaacagattaaacaagttaataacacaagagaattgttaacccagttcggtgcaacgtcacctacatctgggg

SEQ ID NO: 11244 - DNA, 447 bp, Glycine max
  unsure at all n locations
tgcttctacatgatcgactaccatatgtnntgtcaatgacttcatgtattaaatcaaatttgtgtggtatacctcttgcacaataagctntcaaggtacaaccaaaggaattggattgtccgttgtactaaggattcactaaaaggtcctggatgcaaccctttgcaaaaaccaaccatattcattctttcatttggctccaagactcgcactattgttgcattgaaatgagtcaaaagttctttcagggattcaactgtctactaaaggatgtcaaagagatcgactgccactgacaacttttccttgttggccacaaattaagtagtgaagagactcaacaattcattgaaatgagaaatagacctatcgactagtccactanaccaatccaacacgacacttttagtgctcctacatggaatttacagcanagagcatcattac

SEQ ID NO: 11245 - DNA, 244 bp, Glycine max
  unsure at all n locations
tgtttgcaagctntgtcatccataggcgtcaggatgtactgactatggtcattgggcgatcagaacaccctgattgtgtctgtgctgctggagctggtgtcacaatcaaacaacactttggactggctccaaggacctcccacatgtcttcgtccatggctcccgaagagttggagcaactgacgcanaaaatcatggaccagctagaggagtcaatcataagaaaagtgactcaacaactaat

SEQ ID NO: 11246 - DNA, 244 bp, Glycine max
  unsure at all n locations
tcatatgttgtctacgaatgtgggcatttgcaactttaatttaaacttgagggcctccaaattaagcatccgtgcgtgagcgttgcttaattacgaacctccctaatagatattcactccaccactttctcattttcaattggcacaatgacgaacttgttaatttctctaagctcacattcacattcccacaatattaatggagtgtntcaatatgagctttaattagaaagcttcccataat

SEQ ID NO: 11247 - DNA, 512 bp, Glycine max
  unsure at all n locations
aaaaatgaggaaccatttgangcatctctcnnttanaatacanaanccnnancgacttcnaannaaacagcaatacgcctgaggaggctgaggcttagttttgtnttngcaannccacnangcaggaggggcaagccaagaatgccagcggccaaagatgctcgcatanngagaagagcaaaaatgagtgatgtgtataattgaattccatcgaaaatatatttaaagagtcgctcaattgtggatgctcttacatgtaccttacaccagactcatgagagcgagattgacatataataacatctttgatattatgaactcaacgattcatcaactcttatgttatcactttctttttttctatctaagactttggtgtccaatattagattagacattacacccgtttaattcgagcttgatatgaccatcatacacataaactagaatctaanaattcccttacgacatctctaacatttagtgtgtgtcaaaacaccatatatgttccg

SEQ ID NO: 11248 - DNA, 346 bp, Glycine max
  unsure at all n locations
agcttacatctcgcgaggctgagagatcacctgaagatattgtgtgnatattcaatgnncnaagcnngcactctcgagcttggggtattgcccactcaaaagttctgtagataaacttgagatgcttattacaactcgatggaaccttcctanatatttggctanatcaagcatacttgacaattgccagttgatttggaattaagctagcaaaataatgtgctccaaggtctaaggttgcaagatcttgcaatgatgctatntgtatagggacatttccagaaagattattgttattgagagaaagatggaacaagtaggtcanattaccaaaatcttctggaat

SEQ ID NO: 11249 - DNA, 272 bp, Glycine max
  unsure at all n locations
taacacactaacactgaaaaagagagggggagaagaaaggaagatnttccctgacatggtctgacatttatgatgtggcattacgaaattgactattatttccatctgaatgttcatgcctcaggctatgcaaattgcttatatcattgtctggtgcaacaatggttgcttgctttctactgggggaactttattttaaatgttcatacacagttcacctgctaatcgtgcatctcatttgtaatttttaaatgagaatgctttctttattt

SEQ ID NO: 11250 - DNA, 419 bp, Glycine max
  unsure at all n locations
tcgaagccctctgtttaaggctgaggctccacacctttctttggatactatctgctgagtctgcttccttcaatcgactgtctgtggagcgcgcatacaagtatcgccctgttaaggtggtggaatctgaacttccgcggcagcagtgtgtggtttacttggatctgaagcgggaggagtgcaccaatntgttcccatctggccgagtatattcacaggcattccatttangtggacaaggggtgctcttatcagcacattgcaacatggaccaacagagctctttccattgctttggcctgtttctatgaatgcangataagggctcagttagctttgcccgtgactatgagtttgctgctatgtcaaggccaacagaggaatttgttagcaagtacaaaggcaattatgtattcact

SEQ ID NO: 11251 - DNA, 238 bp, Glycine max
ataatagcctaattttttttaattcaccaaaaataaataataaattttaataataataataataaaggtccgaactcttattccttcatttctccctaaacctttcttttcaatcacccaaccacaactctattacaagataactcctaatggttgtccactatctgcatgtttggattgaagttaaaaatattatatgcgcttttatacaaactacggataagataaataaaataaa

SEQ ID NO: 11252 - DNA, 424 bp, Glycine max
  unsure at all n locations
acacttagaaactcaagctntcctagccaccaagaatagatcaattgcatttctgtaacttctatatacattttccaaaatgaactcatcctgttgatgaaattccattttgagtgtgttgtaacaatgttgttcttcatgtcatgttcattgtttagatcttcatgtctgcaacattcttcttttcctttagttgttgattattttttatggcttgaattttttctcttcatctagtgagcatgttgacttcttcattacaatagacaaccaaggacactntaagtcttcttttgtgctttcaagtttatcatcctttatgagtgattcatggcatccctgagtttacttcaattgttgttattttcaaaaattgtctattctaaacacacttaagcaaactcatcaataggcataaaatcat

SEQ ID NO: 11253 - DNA, 262 bp, Glycine max
cttaccctaatttactatggggagcatctgtttgttgggatgagaccctcgcttaatcactttgaggtacttgacgcccatcattaggcaatccgtgaagttccgcgacatgtcgggagttgaaagaacgtgttaagacgcaatccataaagttctgtaacatttcggaagccacagaagggatgattgtgtaatccgtaaggtttcgtgacattacaaaaagaagacaagtatcgttacataacgttacggataaagaatc

SEQ ID NO: 11254 - DNA, 368 bp, Glycine max
  unsure at all n locations
ctggcgggacatcttgacttgctttgcaaactgactttatacactttattctgccttcntctattggcagattgggaatgcctctaacagcacctttgtcaatgattttcttcatgcctcttaagtgcagatgtccaaatctttgatgccatattctgacttcatcttctttggaggatagacatgtggaggagtagctggtttcttgaggtgtccataggtaacagttgtcctttgatctgctgcccttcattagaacttcactcttctcatttgtcaccaagcattctgactntgtgaagtttacattgaatccttcatcacacaactgactgatgctgatcacgtttgcagtcagtcccttcacc

SEQ ID NO: 11255 - DNA, 259 bp, Glycine max
atccttggcccccttagagattttgtaaagatgtctgctagttgatcattagaactaacgaattcagtaataacttccttagaaaggactttctctcggacaaaatgacaatcaattcaatatgtttaagtctctcatggaatatgggataaaagctatatataggactgtctgattatcacaacatagtttcatttgttgagtatttccaaacttcaactcttgaagtgtttaatcccatgagacacatgtgactaca

SEQ ID NO: 11256 - DNA, 360 bp, Glycine max
ttttgaagataacatcatggatcaatgtatataccagaaggtcagtgggagtaagatttgttttcttgtgttatacgtggatgacattttgcttatgactaatgataagggtttgctatatgaggtgaaacaattcttctcgaagaactttgatatgaaggatatgggagaaacatcttatgtcattggcattaagatccatagggaaagatctcgaggcattttgggtttgtcttaagagacttatatcaacaaagttctagagaggtttaacatgaaatattgttcaccaagtgtagctcctattatgaagggtgacaaacttgatttgagccaatgccttaaaaaatgattatgagt

SEQ ID NO: 11257 - DNA, 382 bp, Glycine max
  unsure at all n locations
ctgaagatcgaagaccgatgaagaccgaatgacgaacgtcgaagaacggttgaaacctttgcgaaattcctcacggagaaccgtacggaaacgtttcggaagcgcctcggcttacattttcttcacggaaacaatgcttccaagcaaattcgaaagagagagaagtgccaaaggggctgaaccccttccttcttcacttactccgctatttatagcanaataggggagggtggttgccgcccagctcgcccaggcgagctcagctcgccaggcgagccagtntgcttcctccagagcaacaagcctctggatgaatcttctggagggccaagtgggcctgggtgcctatttcacccccatttttactaagtacaccccctgc

SEQ ID NO: 11258 - DNA, 440 bp, Glycine max
  unsure at all n locations
ntganaatataatatcttgatttctaaaatacttattttctctccccctttgtaaacatcaaaaaggccaaagtgcgcaaaacatgaataatttaatcatacacaaagcataatttgtaaaacaaacataaaagattctgaaacatacataaagaaaaacatgaataaaaccaaattgaaatgcaaaccacttagtcatataacacaaaccataaatatcatgttcagtcatactaagcaaatattaaaagaaatactaagttttcaaatgtcataataatatagccaaatacacggctagaaaacaaaatactaataataatagtaatgtctaaactgatagtggtggtggaggtaaattaagggagtcacgaatgatggtgaaatcttcttcaacctttgtgatccttgagtncatttcgtcgaatcgcgtgtccact

SEQ ID NO: 11259 - DNA, 415 bp, Glycine max
  unsure at all n locations
ntgcacaatttgcctaatttccaaggcttatgttgttgtctatcacccttactatcatcaacttatgagccattgctatatataaataggttaagggagggacccattatcccattcctatcaagaagcacctcangagggcacaggagattgcagctcagtgcaaattgccctagatataacttgttgattatgtgctaaagttttttctgcatcttgggaacacaaactttaatgaacaaaaaggattgttcagatccatattagcaaaaataaagccacatttttagagtcttaagattgattttgcttggttaatggtatgctaaaccaaactaaagttcagattntcctatctcatcattagtatcaatagaagccttctatcaaacaacaaaactcatttagagtctta

SEQ ID NO: 11260 - DNA, 374 bp, Glycine max
  unsure at all n locations
cttgtttctcaangaaaagntngaaggggatttagaagatattttggcttttacatgcccaacttctttgagtggcatttgtattggttggtaacttggatgttgcattctaatacatttcatagctgttttacatcatgcatcattatagtgtgtgcgaaggaaaatttctaagttagaataatttcctcagaggcaaaaactctatgttttaatcgattacaaaattgttgtaatcgattacacaaagtggttgagcttaaagaagtaagtctcgtatagggtgaatccattctagtagtacgttaattgaatcactgttgtttgaacaatgatgattttttcaagaatctctgcttaattgatacttctcc

SEQ ID NO: 11261 - DNA, 443 bp, Glycine max
  unsure at all n locations
tacacaaatgcttgntgtctctntgctaggaaattcttgcttacttctttgacaaggctcatgaggttttctccaagtgtcatgcacatacaatgatgttagttggctgttgctatttgcgccaaagcaaaattgttactaaacgaataataatattcaattcattcttttcctcttgcaagtgtttgtttgtcttattagaggctcattctcgatcacactgtcttgcattttataaactatcaatcaacaccttgtaatagaaaaanaaagggactttttaaaggtgataacatcctgtgagagagagaatataaatataaagggtaataccatacaacataaagagagaaaaataaaanagtgttaatgagaatttttttttaagacatagagtatcttaaatcattactcttcaaattaaatgtattanaaatattaaa

SEQ ID NO: 11262 - DNA, 207 bp, Glycine max
agcttcttataaattagagcgagccataagtatccaatagtctcatggatctttaccggggagaccggaaattttcttcctttccttgctggcaagtgattggaggccttttttccttaccaggattgattaaccacctaaagaaaaaagaattgacgtaccttttccttgaaaagcccacttaaattattttttccatctactcta

SEQ ID NO: 11263 - DNA, 201 bp, Glycine max
accttgttttaggcctgcttccaaaaatccatgggttttcctctatgattcaaaggttaaaatcctcaaaaacccaaatcccaacctaatcacattggtcttttaattccacttaaggtggctcactactttttacctttaattgcctttgaacctggtacatcaacacaacttaatcctttcttttctcttttttttttt

SEQ ID NO: 11264 - DNA, 431 bp, Glycine max
  unsure at all n locations
gcttctgagaaaacttccttgagaagcttgtgtgagagaacttttcttgttattctagagcttagctacacacacccgtctcataactaagctcacctccttgagaaactttgcttaagaagattcctacagaatctagagcttagctacacatacctctctaatagctaagctcacctccttgagatgagaagctagagcttagctacacaccccctattatagctaagctcacccctatgacaaaagacatgaaaataagaaaaaaagtccttattacaaagacaactcaaaatggccccgaatacaaggctaaaaccctatactactagaatgggcaaaatacaaggcccagacgaagganatacctattctaatatntacaaagaatagcgggctcatacttagcccatgggctcgaaatctaccct

SEQ ID NO: 11265 - DNA, 359 bp, Glycine max
  unsure at all n locations
agctnttatctgattttgtaaccgcccaatggtgtttgaaatggtgtaatcaataactatatattggtaatcgattaccagtgtattctgaacgttgaaattcaaatccaattgtgaagagtcacatttttttcataaaattctttgtgtaatcgattacatggtttgggtaatcgattaccagtgacaagttttgaataaaatcaagagatgtaactcttccaaggttttcaagttttctcaaggtataacttttctatggttttcttgaccgactgaagatctataaaacagaccttgcttgctttcaataactttagatatcttttacacctttgaattcttgatcatcttttgac

SEQ ID NO: 11266 - DNA, 360 bp, Glycine max
  unsure at all n locations
caaggttcatcaacctccatttctccgagaatacgactcgaacgcaacgtgtgcttgtcacggagaagccccggcgcgttccattgagcatggtagggctctgaagcgaaggtgcaacgtctaattgatgcgggctggctganatntgaggagaatngcgtgtaaatcctgacattgacaagagatgccacacatggngcaattttgaaagctgttgtagggtgtcctaatgactcatcanggtttccaagtttatgccattattgtanaccacagctacaatgttaaatgaaatggataaagttgatatctgtgtccctcatcctctcacaaacgcatgtttgcttattcaactttcat

SEQ ID NO: 11267 - DNA, 242 bp, Glycine max
  unsure at all n locations
gaggctgttttttttttttgcncttatagaagaagaatataagaaggaatattgtaataagcttccaccataagctaatgttagtcaatgagagaaagctatttcattattccttcttattttctatgtcataagtgtgtatggaaaacttcttcaaacaaggcctaattaattttgttggtttaagaacagagaattccttagatgaacataagattcttcaagcccaagcaccataatga

SEQ ID NO: 11268 - DNA, 271 bp, Glycine max
  unsure at all n locations
ggactttaacaacacgagttctattttcattgcnagtgatgcctacccaagatgaacagactgaggtggatggattccacataaggtttcgacggtgggggacagcattagcaaaattaagataggcttgcttatctgaacttatatcagcaatagctagagggaaaaaaataactatgacaaaaagaacagaagccactgaagtacaacagaacttcatggagagttgtttactgaaaggaataagatatcgacaattaaatttggagta

SEQ ID NO: 11269 - DNA, 376 bp, Glycine max
cacttagaaactaagctcgacttgccgtaagcgagaggtgcactgagtgttcttctatttctttcaattcttcttcagggctgtttcttcaatttgtgtattaatatttctttaaaacactggaaatcttttttttttttgtttacttgtactaataagaaagatacaaagatgccaatgttttagctatctcattaaaaagaatagtgaagtgaagaaatgattctcattattaaccaaaaatagctatcaaattaacgcagattaggcaggtatcaataatatataatggtcattgcagaagagcatcatttgattaaaaaataatattctttaatgagataaagaaatatctaacaacttttgagaagtacgt

SEQ ID NO: 11270 - DNA, 265 bp, Glycine max
  unsure at all n locations
tcttgctattgcaagtaccagaatggtggttcctcagtatattgtttgggagcatggcgctatccttgctaatgggctttgtgtggaaaacggatgtgcaactgccatggtggggtatgctctttgcttttggttaggcttttattgtaacccttcctattggtgtcattcaagcaactaccaaccaggtaccatctccactattattntgatgcagagtgggaagcaatagaggtttaacattttaacactttttttttttttg

SEQ ID NO: 11271 - DNA, 459 bp, Glycine max
  unsure at all n locations
aaaactaagctgtgtgggccaagtctcttatagataaagatcttctattcattcctcatcacgcttccccccactaatccttgngatattcttctattntatcttcgaaatgagagttaaaaactacttccttanaatattaagatatgttaaaagagtttatctagtttaattaatgttattttatatacattgatccgagaattgagtcgggtcaaatatgattatttgtcaattatatcatatggggtaatattcttcttctattagtccaatggtttatatgcatgttggccaggtgtcgtgccctatgcagttggttatgtcttcctgatgggattggtctgacttgtgtgttggttgttntggaggccaaacacagacaatcacttctctttatcgtccgtgtcaccctttcattntgcttaatccctcatgcgtgtacccttcgtctctaag

SEQ ID NO: 11272 - DNA, 463 bp, Glycine max
  unsure at all n locations
cccactcaancggggacgttttncgangncannnccaatnnagctcgnccccgggatctccnaagcgaccggaggcaggtgtcctttctattagaaanannaactggccaaggaagcctatcaatattgagaatgtgataaataaaagtcttttaaacactattttgtcagtgcttctctaaaatatggttaaaatataaatattgtttaatccactgaggaattgctttaataaatcatttctcattatttttacattaaagtaaaaatgttgcgtatataaagtatacgggacggaattcggaaaaccattcaagggggtagaatttttgtttactctaactatttaaatatctaacaaatacatattaataatcatgactttatatcattatatattagttgtcacataagactaaaataattttattttaattatccagaatgaatacctgtcctctgt

SEQ ID NO: 11273 - DNA, 431 bp, Glycine max
  unsure at all n locations
gaaactaagctagtatcacagngctacccaagaggtttattgttactatactctaatccttgaagttggtccagtggtgggatgttcatctccttacgttttgtagctgccatgatcactacccactttgaaactctatacttccttacaaatcctactgctttatgaagcacactataagaagtataaacaacaccaagaggacaagagaacccacaaaaccctacccatattcgaaaaccaagatgcatggagaatgcaaattggtaatgtccacactgtcaatgatcaaattgattatatcatcacttgactaagacacatcatatatctacttcactgtctgaggaagcaaggactgagcatcgcgattctacaaaacaacatanagaagtagatataacttataaccacacattggttccatctta

SEQ ID NO: 11274 - DNA, 376 bp, Glycine max
  unsure at all n locations
ttctttatttaaacaaattttcattaaattaattaattagtaataaataatgtagatatgttttaattnttaaatgacatttctaatttactaaggcaataataatataacatttctgtggaagcanagctaccatgatgattcaccaaaatgttntgatgatgccaaagctcanagagttgtttcaagattaaagaatcaagcattcaagattccactcaaagattcaagaatcanatgaagaaatcaagaagcatcaagccaagtcaaagtatgtggtaaaaagtatttttcanaaaacatcaaatagcacactttntgttnntaaaaggattttctgaaatcttctaagtaccagaagtttactctctggtaa

SEQ ID NO: 11275 - DNA, 369 bp, Glycine max
cttcgattcattctatgtacccgtagtggtccatcattgtgtttcgtgcatttctattctcggtgtgtttactttttataccccctgttgacgtgcttaagccattttacttaagtcgtttctcgcttaacttaaaaataaaataaatttccaccgaacgtttgaattgtattacccattaacttcggttaaaataaattccgaccgttcggtcatgccgtaaccgcgttggaaatcaaaaagaggtaaaaataatataataataaaaaaaaacatcttttagtaaaataaagcggaaaatcaatcggacgttttctctttgggatatctcattcttaatcgaattgattaataactaaagtgaaacta

SEQ ID NO: 11276 - DNA, 313 bp, Glycine max
  unsure at all n locations
atcttttttcgcaaaaatcactaaagaccgttttaaggtccaacgccttatacggtcctctttgcttttatcgattaacatggaccgttcanaagcataaaatcaacatgtaactntactgcttttgcaagaactacgtangtctgattttcttatcgcaattgatgatacgtangagcaaaagccccgcttttgtcgaccaccccaagagatcattaatggtccaacgccttaaacgttctctactatcanaaagcaagagatcgttaatgttcaacgccttaacgttctttcctttcaaaataaaagatcg

SEQ ID NO: 11277 - DNA, 437 bp, Glycine max
  unsure at all n locations
tgcattgtgctaagcctaaagaactccctgttttgaaatattttgtatttgggctaagcgcgcaagggcagctggctaagcttgcatgtcgcgttaaacctaaaaacatctttgttttgtaatatctcaaattgggctaagcgtgcaggcacaggctaagcgagtcatgcattcccggtaagcctgtggtgctcgctaagcggattntgcagganatttcctcctgcaaaactctctaagccctatgtggcatgctaagcccaataatatctctgaagttgcaatttcatttttgggcttagcgcacaagtttgggcttagtgcgcaaaaaaaaaaatcaaaatttcttgtacttctattntggtatgtctcctacgcagcangcttagtgcgcacttacacgctaagccttagtgttcctcaatgtttgtattttt

SEQ ID NO: 11278 - DNA, 229 bp, Glycine max
  unsure at all n locations
attcttttcttttggtcctcctcatagttgttgcatgagaaaacatgctctattttcatctcccactccaagtaggcctccggatcattctttcctttanagggaggaatgttgagtttaataccatcaattcggttttgtctaagaacaccctcattccctcttctcctcctttcttcttcattatgatctctattcttcatttgatccaacctctcatggagcgcat

SEQ ID NO: 11279 - DNA, 349 bp, Glycine max
  unsure at all n locations
ntaacctcatcatctctcatagactttatgatttggtagctcttccaatccttgtgtccggactctcagccacttatgatagccgccaatgctcccattactgcttcccctaagctctctgtcctttcttcacaccgcatcacatgccttgtgaactccttagagtaccctcgcattggggtcactgaaaccccgtgtaatgaaaggcgtgatgctttcgtctaatggcactcctcttatggggtagccaagctgtcttatggcgaggacaggattataatttatacaaccccttgttcncattaagggaacatttggaaatccttcgcatgaagatagaatcctgatt

SEQ ID NO: 11280 - DNA, 323 bp, Glycine max
tgtcagggttgggtttggttcaaggataaaagggatgccccacattatttccatgacacaaatgcaaaaatgatgatttggaaattttatgcaaaactggtcatgcttccacctatgtggaccctcaatggtcaaattttaatggccatctctattttaaatcaacccaatgtttccaaatatgttctttatcaattgtgcatcatccgatccattttggcgtctgggaaatcttacacattcaccctcagtgatcacatttttcaaaactagtatgatcaggaattttcaaagaaagttggaagctctctttcaaagcatgt

SEQ ID NO: 11281 - DNA, 424 bp, Glycine max
  unsure at all n locations
tggttttctcgaccagacatgaagagtttattttagcaagaccttgactggcattcagagagcttcttgaacaactcttaagacacctttganacctttacaacctttacaattctctaagaattcattcacaatcatctntcttcttcttgctttgccaaaaagctntctaagttttttgtttccaaaccttattcttctgcaagtgaaaattctgcagaaaacaaaagtgtgctatatcttttcattctcttcttcctttgccaaaaagaattcaaccaggactaatcgcctgaattctttttgtgtctctcttctcctttttccanagtatagagggaccaaccgctgattctttgtgtctccttctcctttccagagatcaaggactatcgctgagaatcttngatcttccttttctaac

SEQ ID NO: 11282 - DNA, 441 bp, Glycine max
  unsure at all n locations
tactcaagcttagccctagaggggatgaaccttttcagtgttggagaggatcaataacatttcctatangttggacctcccagaagagtatggagtcagcatcacttttaacatttctgatntaattccttttgcaggtggagctgatattgaggaggtggaactaacagatntgaggtcaaatcctcttcaggggaaggggatgatgcaatccttcctangaagggaccagtcactagagccaagagcaagaggctccaagaggattgcgctagagctgttgaagaaggccctanggttctcatgaacctcanggtagatttcggagcccatgggccaaggttgagtccaattatctntgtgcatattagactaggatgtcattatattcgatccttgtgtttaggactccataatgtangtagggtatcctagaaatat

SEQ ID NO: 11283 - DNA, 316 bp, Glycine max
  unsure at all n locations
ttcttttattctatatatnctccgcgagtctagcagagaaaaaggttataacgttntcggctttcttatgtgggttgcaagccaaagtgaatgttggtatagcagcaaagatgggttgaagaatttagcattgccttanagctaaaggaaaaaagcaaaatgaaattggattcgatccccttagcaaagtctcatgctcaaaacttgaagatggaanaacgtgattagaaaaaaagaacccacacaaagtgattagttatattcttcgagagagattagtcgcgtaaatcaatatatattttatatcantaacatg

SEQ ID NO: 11284 - DNA, 374 bp, Glycine max
tgctcaatcagccccaactcttctctatgcttttgttttattctcactgcaacactataggattctttcaacctctcaagtgcaaggataagcagcttggtatcatgcttatatgataaaggtggaaagggaataggggagaacttcctatattccaaccaatgtacagttgttgtatagatagcaacagcttcttcaggagtaacatatggaccatctatcaaataattgagtggacgttcctgaaacacgcatcaatgatgacgaagtgacttcaattattaaaatgtctatagaactaattcaaacaacatttcgttcaaaatagtgagcctgcaaaggaatcatatcaatcatagagaacactgaacaca

SEQ ID NO: 11285 - DNA, 295 bp, Glycine max
caaacaacaataactttttactcgaatgtctgattgagacccgtaatatatctagatgctcgaaattgaataccgaagctctgagcaaattcaaacgacaataagtttttactcgtatgttcggttgagttccgtaatatattgaaacgctcgaaattgaagaccgaatctctgaacgaattcaaacgacaataactttttactcggatgtctgactgagtcccgtaatatatcgagacgctcgaattggaataccgaagctctgagataattcaaacgacattaactttttact

SEQ ID NO: 11286 - DNA, 357 bp, Glycine max
  unsure at all n locations
ncgctattgcatttcgagcgtctggacatataacgttattttatcatacatccgagttaaaagtgattgtcgattgaatttgctcagagtttccacattcaatttcgagcatctcgatatattacgggactgaatcagacatccgagtaanaagttattgtcgtttgaatatgctcagagcttcaacattcaatttcgagcgtctagatatattacgggactaaatcagacatccgagtaaaaagttattgtcgtttgaatttgctcagagcttcggtattctatttcgagcgtctcgatatattacgggactcaatctgacatccgagtaaaaatttattgtcgtttgaatttgct

SEQ ID NO: 11287 - DNA, 253 bp, Glycine max
caatacctttttacaggaatgtctgattgagtcctgtcatatatcgagacgctcgaaatggaatgttgaatctttgagccaatccaaaacgacaataactttttaactcggatgtctgattgtgtcccgtaatataacgagactctcaaaattgaatggtgaagctctgaactaattcaaacgaacaataacttttaactcggatgtctgattgagtcctgtcatacatcgagacgctcgaaattgaatgttg

SEQ ID NO: 11288 - DNA, 439 bp, Glycine max
actcaagcttaacattcaagtttgagcgtctcgtaatattactgtactttatcatacatccgagtaaaaatttattgtcgtttggattggctcagagattcaacattcaatttcgagcgtctccatatattacgggactcattcagacatccgagtaaaaagttattgtcgtttgaattagcttagagcttcaacaatcaatttcgagtgtctcgatatatcacgagactcaatcagacatccgagtaaaaagttattggtcgttgaattggctcagagcttccacattcaattttgagcgtctcaatatattacgggcctcaatcagacatccgagtaaaaagttattgtcgcttgaattggctcagagcttcaacattcaatttcgagcgtctcgatatgtgacgagagtcaatcagacatccgagtaaaaagtatt

SEQ ID NO: 11289 - DNA, 258 bp, Glycine max
  unsure at all n locations
tcttcttttattttatactcgagaagtattgagtgatatggatagctaactaaccattaattaattcctttcatctttttttgtttttaatttatctaattggttgtcatataaatattatgtcaatagtttatatgattatcacgtcaatactaatatgtcatgttaactagcggtcaatcttgactttggacggtgaaccaatgaanagattanaattatttattttaacaaataaaagaattaacatcacatatt

SEQ ID NO: 11290 - DNA, 388 bp, Glycine max
  unsure at all n locations
gcttcacagtcaagcactaagctgttgaataaattctcatttagccagtttggataaaattttgaataattacttatagtagaagaaaataaaatgaattgaacttcacttctctcgtaagttaaaatcaacttaggcacttggacttctataaaagctctctcatccgacttctccgaaaagctgagatatattatgttttctcttacatgctacaagggcatattaagaactttatctaaactgatccatggtatttaattaaattgtttactctaacacacccgtagtatcagtatgtcgaacagataataaaattgattntcctaaatcatgttacaaaagaagacaactctccaaaaatccatgataattgatggtagtaaaa

SEQ ID NO: 11291 - DNA, 394 bp, Glycine max
  unsure at all n locations
tntttacatgcatatganatatccatttatgcctttaatatcaatggaatggtttaacatgaattcttatgtccttcaatttatccattttaaaattttttggatcctattttgaatntaaatattttttaaaaaattatcggatattaatagtatttttcaatttctgacaatggttaccctcttcttgngccgaaaattgctgtcagccctntggcagaaggaaatcttcacatgttgtagtttgactaatgctcttgtcactgcatattgaaataaccttgccaaccgataccacttgaggctatcaacgcgtcaagttttgaagccggaaaggacacaaagttatcatccatacctatacatcatctcatacacttcatgttcaagttan

SEQ ID NO: 11292 - DNA, 461 bp, Glycine max
  unsure at all n locations
atacaagactcaagcttaagatgaatgagtgtatgatcaaaatggtgtttttatatatgcactcatgtgggtgccacgtcacctcaagaaggggacattacatgcatcaggagccagacagtcatgactcatgtgcacatgagaaaactagaaaactatgttgtattgattgatcatgttgcatatcaatgtagcatagagaaaaagttattaatagcaataattaaagaaaaatgtgtctatgtcgatattgctcgtgtgctctggcaataaggacggcttgaagtaagcaagatctcgtggaaatcatagaatctgaccccaaaacctcaatttttgtgagtgggacaaggaaacatgacaagacaaagctttcagtggatgaaacgtcgagttgcaataaagtagggaatagttntgtgcataatagtgactgaattgtacaataaagtggggaatag

SEQ ID NO: 11293 - DNA, 393 bp, Glycine max
  unsure at all n locations
agctcggacccgggatccttggaggcaccagatttatgcatcttattctttagagcgccaacgaactagtgggatgattagaacccatagagtgcacaagactacttgataaaaggcgaaatatgtacttacaaggatctagcacgcttaacaagtttctgttaatattgcttttaagactggtgtattgctgggaattgagatatgtgcgttcatgaatagactccacatacatactccgcacatatgtgaacaacgaatnatgtcttgacttggagttacattatcatatggcgtcactaaacaaagtggcacatatgactaaccttcctcatttaggaaatacagatatcaaacgcttataaatacaactaacataactatgataggaaa

SEQ ID NO: 11294 - DNA, 338 bp, Glycine max
  unsure at all n locations
ctcaagcttgttcaagaccgtcacagtccgatgcggccattgctattatctcctctcccagngaacatgcgagggttgcttatgccatctcccactcaatttcatttgggtcactctttcttctccccatctcataaccttctggtatgtgtatatatacacacaccaccatagttttctttatctcttgtatactctttacctgtttgataaattaatgtatgtatgtacgtactgatacccttttatataaatataaaagaattaattactgattaaagagctaaagataaagaggtgatgatatgttgattctctctcactctctctctatctaa

SEQ ID NO: 11295 - DNA, 189 bp, Glycine max
  unsure at all n locations
attttgttgttgnaacanacatggtgccctggagtgtgatgtttttaaaatagcttcgctgcgctcgatgcgatgacattttagtatgtgaatgcccattaattcgatgcatgactaacgagaaccgccctgacacctacgtaaactcataaccggaattgagttgaggtcaagatctaatctacttaa

SEQ ID NO: 11296 - DNA, 158 bp, Glycine max
ccatacaaaactcgcacagtagagatgtttgcggacaattgataccttctagagtacctggaaaaattgtgaggactacttagaacgtctactgtgaaaccttaccatgagtgtatagcgggcgacgatagctaagcataaagggatacgagagtgac

SEQ ID NO: 11297 - DNA, 430 bp, Glycine max
  unsure at all n locations
ttagtcaaacagaataatccanaaatgtcaaagaattgggttttgaaaaagcataataagactttntgtgattggtttaaagatacaatctttgcagatgaaaatgcttcagaaacattaagaaagctagtagatgggtctaaaagaaatgttataaattggcaaggatacaacataaaaaagtattcattntacacaaaagcacaagacgacaaaagtacaaagtagattagcagggtcaccctaaggactgaatctcaacacttcacaagtgtgcatgatgccaatccctgtgtagcttccatccattactttgggttcattgatgaaatttgggagcttaactatgtngaaattactgtttgtgttttcaaatgtaaatgggttgacaacaacaccagtgtgcgcaccaatgatattggatttacgt

SEQ ID NO: 11298 - DNA, 403 bp, Glycine max
  unsure at all n locations
tttttgnaagggacncncanaggagncgatagcagaagcaaactcaancccccaaaaccggctgggaagaggaagaaaagccccctactcatataatacatctccacatgagctttatctgacgaacgaacttaacatatcccattctactcaatgctatctgtcatgtgagacttttaactattnatatatgaatataagatattcggaatagcctattagataaaaacactctcttctatctctgtctctatattgatctctaataatcttttatgactacatgggaataaaagaaaaatcatatctaccttaatggtcattatatgtccatacgattaaaccttaaatatattatgcatctacattcattcatagtctgaaaaaatcattgtaattaacn

SEQ ID NO: 11299 - DNA, 464 bp, Glycine max
  unsure at all n locations
gatgagccantttgaggcgctcgtanagcgacctattactctcaactgataggtatgtgctgtctgtgtatgagacctanaatgtggctttaggtcttgtgtcctgagatgatgtaagggacccggaaaagctatggcacatttatcaactggcacagatatgtctgaaactcgcaatgttatggatgcttgtgggagcgtgggcctaacacttactatataagcattgggtgtgaccctgtggagatggccccataccgatcaaggctctgtttaatgacgagaggcatgagatatccggcggaccaacaccggagcctgtatcatcagtttcttaaaggagagaagagtgagtacttactctgacaataaaatgatctttgccacaatgtcttaaagcctgtcaaggcagcgtactgcaaatgaaaggctgattaaaccagtgaggccatgaaccacatacg

SEQ ID NO: 11300 - DNA, 239 bp, Glycine max
tgttttgatccagtgacattattacaacaacaatagtcctacatactacatgcccttatagtttacaagatgtgtcaactggatccaaaaccatagcagagaagaatgtaaataacatgtgaataaaaacctgaccaaccaaattgcaaatatgaatttgctggtgaagataggggtagtcactataagtgtaaaaccaagaaccggatcagaaatgtagaatgatctcctgtgatact

SEQ ID NO: 11301 - DNA, 497 bp, Glycine max
  unsure at all n locations
gtggggtaactgaacgtggananccatgatactttgattacgcacnctatnaatactaagccttttgggatgatgcngagatttatgaagctaggctnccttctcatgaaagattaccgctctacgatgcgatggttctttctgctctctcttttcagatgatgacaatatttctctgtgttagtttaacaccaagacatgtagacattatcatattctctcgcggctgaagtagtttaactcattgctttgaaaagcgcgagtatagtcttttcacgatgtcgattacatggttataagctgcctgctgagtacaattgacctgtcgtattgtctgaactgagtttatatgtgtgattataattgcgatcacgcagtcttgaatgcatacagagaatatgttatctaattatgagctgaggtctgactactaaacacttaagaataaagatataagttgttgaatgatagtgacaggatatgaatttataatgtag

SEQ ID NO: 11302 - DNA, 504 bp, Glycine max
  unsure at all n locations
gaggggcccgttgcctttaaatgagccatcgatanctnccagatctnanagtcccctgatgcatgcagctccttatagcaccaccttgaaccttgagctcacctacgcataccatctctaacatgcattctctctctctttagacactactcacatatggttgtttaaggaaaaacaccataactaaacgcgccacaatgcatccctatcgcaccaaatccaaatccaaaaccatgggtgatcaacaggagacacaggaacagatgacagtgcacatgtccgctcttaaagaacagatcgctttcatgatggaagccatgttaagaatgaagcatctcatggagaaaaacttggccaccgctgctgctgtcagttcggctgacgaatcacatccaactctcttgacaactgcgcaccatcctcgctcatatatagtagaaccgggaaagaacacactgcggcatgatggcgaccctgatctgggatacaaccgagcggattacn

SEQ ID NO: 11303 - DNA, 369 bp, Glycine max
  unsure at all n locations
gggaattgagcctgagaccatgactgtgacctgaaccncnnnagaagagngcagtttatgccgatagtttaccctttttttccccaacgtagggggggggaaaattccttaaaaagtgccgtaccagccccaacatagagactcctgcttagaacagaatccgacaaccatctcttatccgtttggggaccacctactttactaccccaattaagggctatcaagttcaccccctcctgagaggaatcctagactttgggggttaaacccacaatggctttgaaggacacagacttgcgaaactgtagggagctctgccagacctctatatcttggtgaaccagacacgctgtcttccacaagccctgn

SEQ ID NO: 11304 - DNA, 307 bp, Glycine max
  unsure at all n locations
tgagatgaggaagtgtngaatgtttaaacttcctgctcttattgttgaccacagagtggtacctggagatatgtcgcggnggtctggagaccttgcggacgtcaggtggngtgctattgcccaaaaccaagcttgaccaatcccgacccaacccgggcatagtcggtcagtgagaacctgtgatgtacctaaacaggcgagctcctcgcattcgacagataaaaggaacatagaccacaaagcatggaggcttgtggtggctggccagctatgaactttgattgatatgtgggttatggcctctggt

SEQ ID NO: 11305 - DNA, 387 bp, Glycine max
  unsure at all n locations
aacaaaagcaatcaactagtcaagagtccatcaatacaatntaaagggtaaaattaaaataaataaataaataaaaagttacaaacaagctatatggtggatgaaagtgtatataatgtaaatcaacttgtaactatgtttcaagtaatcaaaactacaaattttggtgttgtttagtgataattaacctcatcacggtaagcctcaacagggtgcttcccaaaatctttatggatggccttaaatatagcatcttcattctcatgaacaatgtctatgagagatgtgagctaggttttcctccatgttacactcttggttattgcagtttagaagatagcctaactcttcactgctcttcactcaccaccatatcatggaattgac

SEQ ID NO: 11306 - DNA, 264 bp, Glycine max
agagtttgatgaccatgtctattgatattcttggctccctctccaccctcagtctatctcacaagcttaatatttatgactgtatctgtatcagtatcactattttgggattaattttcattctacttacacctatctaacatgccatatcatattatcttttaatcgcgatgtggatctcgcatatgttccattcgttcaataagaacaaattttttgccatgcttctcacataatactgagagctagactttcaaatcctct

SEQ ID NO: 11307 - DNA, 275 bp, Glycine max
  unsure at all n locations
gaagaggcaggcttcctacctttatttgttgactacagagtggcacctgcagatatgtcgcgggggtcacgagaccttggggacgtcaagtggggtgctatttcccaaaaccaagcttgaccaatcccgacccaacccaggcataatcagtcagtgagaacctgtgacatacctaaacaggcgagctcctggcagtccacctatanaagaacanagaccacacagcaaggaagcttgtgtggtggctggccaactatggatcttgagtgatatct

SEQ ID NO: 11308 - DNA, 326 bp, Glycine max
  unsure at all n locations
ctaccctcacctccttgagaagctctcttgagaagctagagctcagctacacacacccctctaataactaagctcacctccttaagaagagaagctagagcttatctacacacccctataatagctaagctcacccccatgacanaatacatgataatacaaaanaatcctactacaaagactactcaaaatgccctgaaatacaaggctaacaccctatactgttagaatggccaaaatacaaggcccaatagaagaaaaaaaaacctattctaatatttacaaagaagagtggacccaaccttgacccatgggctcaaaaatct

SEQ ID NO: 11309 - DNA, 192 bp, Glycine max
  unsure at all n locations
ttgctntataattgctnggtctgggagacgaagggcaagtgtgcgcgatatgtgaagatgatgttccaagtacctcggatttggttcgaccatgccctcctgatttccagctgggaaattggcgagtggaggaacgccccggcatttacgcaacaagcataatgtaaacctttaccgctctaaaagctctat

SEQ ID NO: 11310 - DNA, 416 bp, Glycine max
  unsure at all n locations
gagagagaccagtctagagttgaaggcatgatattgtaagacaagttgaaggcttgtcaaaggtcaaagaggagtttgttcgaacaattgagcatgacggaagataacatgtgggccatcattgaccaacacanagagaagctaagtctagctgcaacccatgagcaaaggctagaagatgagtatgcaaaggtatcattcctgcaagcagaaaaggaagcaagagagagagtgattgattcattacacagagaagaaatgacgtggatggataggttcacttttaccttgaatgggagtcaagagcttccaatactgctagccaaagccaaggcgatggcggacgtgtacttggcccccgaggaagttcatgggctcctcattattgtagcacatgatcgatttgatggccacat

SEQ ID NO: 11311 - DNA, 398 bp, Glycine max
ctagataagaatcgctcaagttgtttcatctaaacctcttcttctagatcaccattcaggaacgtcggtttcacatccatttgatgcaactcacgatcaaaatgagctactaatgccacaattactcgaagagagtctttcttagatacacgggagaacgtctctctataatcgattccttctctttgagtgaatcctttaccaacaagtcattgcttatgtctctcaatgttgccttctaagactttctttgttttgaagacccatctacatctgatggctgttacaccaacaaccaactcaacgagatcccaaacttggttagatgccatagaatccatgtcatgcctcatagcgttataccagcaatctgattccttagaactcatggcttgtag

SEQ ID NO: 11312 - DNA, 293 bp, Glycine max
  unsure at all n locations
aaggagttgagtcttaaactccaaagaaaaaagactgtgtcgtcaagagaatcatgagtgcccatggcagagagtttgagcacagcaagtttactgaatactgcacatctgaaggatcactcatgagttctctggagccattacaccacaacaaaaatggcataggtgaaagtgaaaaacatgactttgcaagaagctgctaaggtcatgcctcatgccaaagaacttccctattatctctgggctgangccatgnacacagcatgcttcatccacaacagagtcacactggn

SEQ ID NO: 11313 - DNA, 250 bp, Glycine max
  unsure at all n locations
tttgctatcacgatttatttntcgctggcgaaaggatctaagagggtctgagaacacgaatatttgactatcctgctctgatgaatagaaagcctgcggaaaatggacagaataagaaagagggagaaacccatgctgtgcgtgccgttcctacatggcctagattaccgttagccaaactatatcaatacttggccaatatcagtccttctcatgaccctccaccctaccagcataaacacccaatcat

SEQ ID NO: 11314 - DNA, 443 bp, Glycine max
  unsure at all n locations
gagatgaaattgaagcctttgaaagcgactgatacatgtttgacacttgtagcacacaaagntgtgacagactcaccagggatatgttgtcctacncaaagttcttccgtgtgtactacagactcaatacatctttgatcgacttgctgccataacatattaccacctttgccaaactaagttcttcccaaatactcagccctcggtggcagacctcctatgaaattgacatcccgagattgacagccagattcccgtgggtgaatntcaaatctaacattttcgaatccaagtaataccaaactcataaaccatgtgggggcctttaatggaaggataaccttgcttgtccaaggatgtacggatgggttatactctggcctcttgctcagtgtgagtcaggttgacatttatttataccctagggccattaataataaaag

SEQ ID NO: 11315 - DNA, 426 bp, Glycine max
  unsure at all n locations
ttctggaaccctctgatgggcggatttcaactccccatttaattccacttaatactcagaactgtcttctctttcctgtgttttctctgttactctctctccctcaatcttctctttctccatctttctcttcatgaatcttctcctttnttccttttattctttctgtttcttccttcatgcaggcgattactagcgattccaacttcatgcacgcaagttgcagcctacgattcatactgaatatgagttgttatcgcaccacactcaccttcaggtattcccttctttctttatctttatctttctctatcactgcaacttacacacaggtttgaaaccttcaacatgaagagagagaaaaatctatagctatgacccgtgggacttttttccggtatttggcaatttaccactccttttttc

SEQ ID NO: 11316 - DNA, 435 bp, Glycine max
tctcccctattgtgctataaatttggggagaagtgaagaagaattggttcagcctcttatgcacttctctctctgtcaaaattgctgaggaaaattatttccgtgaagaaaatccaagccgaggcgcttccgtaacgtttccgtgagtaattacgcgaagattctcgaccgctcttcaagattcatctttcgttcttcattctcttcagtcttcaacgggtaagtacctcaaaccgagcttttcaattcattctatgtacccgtggtgggtcacattgtgtttcatgtatttttattctcagtttcatttgctttttatacccccttttgacgtgcttaagccatttatttaagtcatttgtcgctgaatctaagaataaaataaatttccaccgatcgtttgaattgtatcgatccgtaattttggttaaaatg

SEQ ID NO: 11317 - DNA, 311 bp, Glycine max
  unsure at all n locations
atcttgcagattaagtngatccgcgaccttcttacgaatcaacttgatctgcaaagaagcttatggatcaacttgattcgtaacaaagctgtggatcaagttgatccatgaagaaacctgatttaaaatgagtacaaatctggggagaatatatgctcttctggattgttgcaatattggatatgtgtccaccattataaaatggatgtgtctgaaatttggtgcatgcctatgatgtctacccgtcatatttatgaaattagtggatatgttggaaaaactactaatcataatgcttttaaaaaatatgg

SEQ ID NO: 11318 - DNA, 532 bp, Glycine max
  unsure at all n locations
aaacgtaannnactggatanccattcgtangncccnactgataccntagntaganaccactngtatnaccngacactctanaatgctcaagctggganggttttattatcacgagcgtcacgtgttcatgccacagttgatggccgtggctatacgagacatcttgcgatacaaagtcaggtgcacgatagctcacctgtgcttggtcttccatgctatatgtaacaaagagattgatctagcagtgtcccatgagctggagcttgaggacgcaattatactcggcccattggagatgtcttatcccgctgctttcataaacatgatgattcacttgatcgtgcatcaggtcacatagatcagatggtgcggtcctgtctatctacggaggatgtacccggcagagcgatacatgaagatcttgcgagggtatacagagactctatctcgcccggaagcatctgtcgtcgagaggtacagtcgcccaataagccatcggatggtgctcataatactgatagatgctgcagtn

SEQ ID NO: 11319 - DNA, 404 bp, Glycine max
  unsure at all n locations
agcttgtagtgttcacttccttttgttgttcgaagactatcaaagtcgactttatcatccagagacaagcaagtccgatggtatccgagacgatgatggtcgtccgtttctaatcatttggagntttttccagcctcttttgtcatccagagacagtcaagtcttttgctatttggaacacaatcaagtctgatggcatgcagagacaaatacatttgtctacttccctggtcgagagactcaatgtctgttgaccaaagctactggagtctcccctgctatcccaagacaagcgagtttgatagcatgcggaggtcatcacggttatccatttctttaatcgctttcaaagcaccaaggctnttgctgatgcacctgatgtcttttatgctctttcttttgac

SEQ ID NO: 11320 - DNA, 530 bp, Glycine max
  unsure at all n locations
agagagannanttttgaagcccctttggagnaacanatttgtagtccctcgttttgataccttcgtannnacccacacnatngaaactngagctnnaatggtatgcttagcctgcactacagtgttcttacgctgtgtatgagtggatgcacttagcatttatgaacccacttgtgtacttcactgactgatgagcctttctcaggatcacgagcttatttttgagcgcaaccaccgatggccacacagtccgcatactagataggtgttaagagcaaccacacaaagatttctgtaagggaaatgtacgacttcaccagagcgtccgcactagaaggtaagaagcacacactccaccgagctaatggtagaaaaggagttggagaaggacataacagaggcctgtacagatgattggacaaaattcgtggcataaacacatggatcggcgtagaaccaataatngagtcagcgtcgtatcacagctgcaggaagtccaaacgagggaaagaggtgcctgaaaaaaactg

SEQ ID NO: 11321 - DNA, 292 bp, Glycine max
  unsure at all n locations
agcttctttgttatacctcgatttgtcatctttccaggccgaggtcgaccgtgcattttttcgatccatttcggtgaataatatttttttgccgagatgggcaaaatgccagtttcggccgaataaatgggaatatgccagtttcggccgaaacgaagagtcggttgggctcgcacaaaaaaacctagccgacctacattgtaaatnttttatgcaacaccaaaacaagaaaacttcctgtgccgaaaanaaaaacattacatgacagcgagcgttgtgaaaaacaaaattg

SEQ ID NO: 11322 - DNA, 230 bp, Glycine max
cgaccgatatttcaccgacttgacaatcttttaaaaagccgctgtcgatatggcttttacgcagagtagtttcttgtttggtgagcataaaaagttacaatgtacttcggtgggttttcgcgcgaattcaccgacatttgttctgccagaaacatagcccacctctcaaaaaaatgattgtaaccgcttcatgctattcattcacgattgatagaaacccaataccgaca

SEQ ID NO: 11323 - DNA, 244 bp, Glycine max
agtgtctgaactgaacctgactgaacccataaaagcggggggtattttagagaaagtggttagtagaagaggcttagaaataaggatgacattcgagtaaacaaaaatgaacccggatatctattcatgggatattatgtggaagaaaatcctcagataagctactaaaaatactcttctgtaactaaaaaggtccgtgatgactccacatatcagatttgtgaaatctcaagctctaagaggc

SEQ ID NO: 11324 - DNA, 508 bp, Glycine max
  unsure at all n locations
agccacgagccnccttaggtcgatagantcgatagcaatggcacagccnnncgngatcctnnacagncaccctgcnagaatgcaggctaggagattttataccgattttnacattatnnccgacttaagccgtcctatgaggccacttagcctgcatatatgtcaagctttacaatattttttgcctctgtatcattgtatacataacgacatggaaactgctagctgtctttatctttctctcctcgcgtatcaagtatgcattccacatattgctctcactctatagtctgaaagcatgaagaaaatggtacgcgcacatccattgttgaacattagatactatgaaaccacatcactgcgatgagatattcacgctcgttctcaaagaaacgacattgaaaaatgactgatgtgttagcggcatccaaatcgtgaaaaccttcaaagacctagcttatgacgttgccacatctaaattgaaccctaataaacagggctactaacg

SEQ ID NO: 11325 - DNA, 589 bp, Glycine max
  unsure at all n locations
aagacgcncananttttgagttccattggagcgagcgactttgatatccattcgtttgaacccgatccgcaanaaccncannanannaggaggtgngagggangaagttttttcgtagggagacgcatcaatatcgtgtttattcattctatactcgacggcgtcccatctgcggctgtcacgccacgaccgcaacaaccatacgtgtcgcatgctcgccccagactacatcacaccagtagcttagtgaggagaagtcgcacgcggacgcgtaaacgctcgtgagagcgatcgtcaccgaaatgcagtgcgtcatactcaagcgaagtctctttgatgacgcgagcggatacatacgcctcccggagcgcgtgaacagcggaagaagcacaacacggtcgatgtccgctagtatagtgatatcggagcgaggagcgaccaacgcgagagaccacgcccaactgtgacgcgcgacaacacgcggaatacacaaaagggaccgagtgagtaaagaaactctatacactgttgtgagcgatagagagcaaggaggcgagcatccgtcgcttggagtacagttatgtcggcg

SEQ ID NO: 11326 - DNA, 402 bp, Glycine max
  unsure at all n locations
accttggaggatgccttgctcctttggtggttctgtgaaagagaggaaaagattaaccaacactaccttgcccctttggtcttcacgtgaggtatgaggagaatggggtttattctttcaagtgtactccatggaggatttcngatggatcttggcccccaagatatccgtcactccatgttcttgtgttgtcgcgtganaataaactatttggatggggctaactacctcacatgattccanaataatgtcaagtgattggccctgagaaagganatctgcttcttaataatggattctagaagctactccganagcgctntgtgtangtgaatgttcattttcccatatggttnncttttctccaattntttaacaaatatactcaagggaaatgaaata

SEQ ID NO: 11327 - DNA, 641 bp, Glycine max
  unsure at all n locations
acaggagcganannnttttgattccccttgntgagaccacnntttgataaccttcgaatnaccanccaannananaannaanaggcncnagagagtgacacgtanannggtctttctctgttatagccgcacncttcttattatatatcacganacacacctcgaaccgaacccgcaagacggagctccacgcacgcgcgcctccaccacaacgctatcgcaccgtgttgcggctcgcacccctctcgccatgaacctaacgagagctcctgagcactgttcactgctccgtatcggaacaacacgccaactctctcngcgcgctactcgctactggtaggtaccaacaccgtacgcgattctcttcgcgatcactctacactatgacacgcgcacgcagtcagaatcgcgtgngctcgcaacggtcggtccgctcgcagaccaccacggacctgtctccttacgcgtcggtttcgactacaacgcataccccatcgcaccactcgctccaggcgcaccgatcgatccgccgcatcgcacacccgtcttccacgacatcagagcacgcactggacgtcatcgccacgaactcctccgcccacgcgccccgactccgagacacgagcacgctagtaccgccc

SEQ ID NO: 11328 - DNA, 191 bp, Glycine max
acccaatgattatgatgatggatggctcaaattctcacagctgctaactcatcccttgcaaatagagctttcacaactatcatgacttgtacagaagaatctatgatctccagtcacaaaatgtcaagaactcttattttcaaaacaattacccatttcttgaacatatcctataatccaaaaagaaacat

SEQ ID NO: 11329 - DNA, 219 bp, Glycine max
ggttctgactgaacctgactgaacccttacgcggtgtgacttttatgcagtttccgtttcaattgcttttgcaccctatcgctttatacagagattaaaagaattttacaatcaagataagagggtcattaccagcggaaccgactggggaatgcgtctgcgacagcgcagcgattatcaaagttccacataactttccataattcagtcaacagagct

SEQ ID NO: 11330 - DNA, 296 bp, Glycine max
  unsure at all n locations
tttgctnnacgcttannttttcggcncaacctataaaggaagggcatggtcataacttagtcaaaggatactctatcctttatgagctatttcttttctaaagatactctatcctttatggtcataacttatttaaaggaagaaatggaagcaactactcatttggttcaacctatactagcagtgaagagcattcctatgagccccaagcaatattaattgaaatattaactactaagtagtttaccaagtgtttttatgattcattctaatatctcatgccacgtgggataaaa

SEQ ID NO: 11331 - DNA, 398 bp, Glycine max
  unsure at all n locations
cactctgaagattatgacaactttcgntgatctttttgtcatcgatattntagnagagaccaatctttcttcttcaaatgtcgctcatgatatttattgtaattatcttcaatgtatgtccaaaaagttaaccttttttggacccccacaatagaaatctttgaaatatttagccatgtgttggcaagccattcatatttctttgcggagaaacatgatctattgtgtctttcggatgcttcttctatgtcttcttcttcttcttcttcttcttcttcttcttcattgaccacaatattatccaactcaacttaggtgcaaaatggtggaatttgagactttgacgcanagtcagatggtgcgtcatgctctttcattacattggacatcatntacta

SEQ ID NO: 11332 - DNA, 407 bp, Glycine max
ggtttgctgcgattttgattcttcgagaataagaagggaacattataaataattatatcctccgatttaaaattaatctttgagttatctgcttacataatttataataacaatggttcaaattgtataattgttaattggaataattataattaatgattctatctaattgactaaatcattgctccatgtttaaatcttaaatgatggtatttatatatttatcttagtttaaattaatcttacgttccattatacaaatatatatacaattcttttttgaccaaattccagagctaagtcttgtttgtcactaactcactataattgaagataacatgatgaatgaaataaaaacatactatattcttaatacattggtgctttcaatcactcataacttttga

SEQ ID NO: 11333 - DNA, 173 bp, Glycine max
  unsure at all n locations
ggaattctgacctgctttctaacanagagagattgagctttttagtactcgctcaacataagagggggttattaggctttctaaaacaggggtaatcggagagaatggcgaagtgtgatcggaaggagaaaagcgtagacgccaaggaaagattggtcgggtggcagagttag

SEQ ID NO: 11334 - DNA, 523 bp, Glycine max
  unsure at all n locations
gcggttggccncccagtagcccctttganatcatagctatagcangnccncccngattnggnnnagaaccccctcaaacatagaagcnaggaagatatacagcgccatttangtttttcccacagacaggaacaagatgaggctgggattcattaccctctttgacctcgctctaaggatgaggacgactgcggttaatctttacagtgtcctccatggacgatcttctgctggaacttggcctccaacatatccgacactccatgcagctgtgcagtatccatgatcctaccaattcggatcgtctaaactccctcaacctcaacccgaaataacgccaatgatttgcccagagcacgcgaaaatccttcacaaaacttgcgtgtataactatctcagcaaagcctatgcctaaggaaatagttcattttcccactatggctacgtattcttcagatattataacatcattattcacggaaatcgaattgccgtaagtgacctggtccctaattattcaaag

SEQ ID NO: 11335 - DNA, 421 bp, Glycine max
  unsure at all n locations
aggggnncctgatgcttcgaagccattgataccctgactccagagatgntaaggaggaaagaagagagaggggggtctcgaattggagatattttagaaagagcggactttgaaggagctcatagacttcattctcaaagtcaacagtggaccatgttctattataactaggaccttcttgaaaactttttaaaaaactccctgaaagcttcttataaaactccctgagaagtgctttgagacacttcctgagaagttagtntgccacactcaccatctaaaactagctccctcctgagagctccttgaaagctgaggctactcacacccgcttaaaactagctcacttctgctagccttctgaagcagagctactaccaccctatatagctactcacccatgcaaaaactggattcaatg

SEQ ID NO: 11336 - DNA, 255 bp, Glycine max
  unsure at all n locations
ggaatttagaagatgcacgtaaaattccaaatgcttatgtgatactttatgaattgcttatatatttaaaacttataaatcgctatctattatgtcatatttattatttggaggttctacagcaattgaagaatcaacttttaccgatgagattgaatcanatgatgaaggtatattcacttttagttgttctagacaaatgtaatattattattcctatctaattgttcagatttttcaaatataggtggatct

SEQ ID NO: 11337 - DNA, 449 bp, Glycine max
  unsure at all n locations
tttggcatggatatagctcctatgttatggtaacacactanaattttgtgaatatttgcatgtcagtattttcatccttgtatgttctaaatgagatatataatctaagaatatgagtttagaatgtgcagaagcaaaaatatatggcttgaagaggttgacaaattattaattatgttcatatataacactatatctatcatgtttaaataggttcttgaactatatttattgtttaattaagtccctattggatctttgttggaccacaagttaaagaatcctatactagaattaatacactaataactaataatctggaaaaagttcaaaaacctgctgaataattaaactttgttaatcatatcgcattgtgtattatatttagactttactctcatttctcttctctataaatatctaataacagaggtgtacaagaacttggg

SEQ ID NO: 11338 - DNA, 269 bp, Glycine max
  unsure at all n locations
ggacnaggtgactttctgaacnctactgtgacctgaaccagnaagaaccggttttaaaagggttgaaggttgtgaaagggcttaggagtaaaaaaaggagtaggttatgaggaaatagggcaaagaaatgaaataggaggggaggcacctgggaaacgagaaccgtggccacctagagcacaggctgacggctggggatgaccagaccgagcacgagggaaccaccatgaggacaatgcttgcatatgtaccgtaccgagcgtgcaaac

SEQ ID NO: 11339 - DNA, 314 bp, Glycine max
gccacatttgaaccggctccttggaaaatcaatgctttagtcaatgatatggcctcacctatggagagaaactcaaagtcaggacatgagattcaatgagcaaagacaactccatggagtgagagggttcaaatcatcaatcatgatatcatctatactctaaggtggaaggggataaatggctgtataagagctcattaattcataaatgacttggtgcattcaaaacaaaaggaaaattgataaacattgccatcaatgggggatccactgctttggagggcccttgttagcactggggtactctgtatgac

SEQ ID NO: 11340 - DNA, 440 bp, Glycine max
  unsure at all n locations
agcggacanttttgagccttgnanagcgcttgatacatgttgatgcattgtanaacccgggganagatgagagaaggggtttttcttaatcanagagagttttcgggcgctttttcccttgaacgggcttcagaaaggtgtgtcttccaaatccagcctggtgacctagctttgattcatagagggggaactcgcttgaaaacgtacttaaaaaactgcctgtcaacttcccgtataaacttcttgaaagttttttgagatacaatctgacaacatgggtgtacaggctacccatctagaacaagctgcctcctgggaacctcctggatacaatgttgtcctccgccctgctgaaacttgatatctgttggaggctttttcaaaacttgcgtggtgacccccgtattaatagccatcccggccaaatctttttatcatgg

SEQ ID NO: 11341 - DNA, 298 bp, Glycine max
  unsure at all n locations
agctntatgcatttcagttntgccttcacgattgacgaggacaagatcttcctcactgttgcagaggctgttgcatattattctccanagctggttgaggacccttganaaatatatantaaattttntgttggtctacaaaaaaaaatgtggacccatatatagatgaaatgttgtangggaatagaaatagagaccagaagttttgagtntacttgagttagctagtgaatgatatatgaagaaaaaggtgtgaaggatgagaattcatatgacattggtcactacaaaaagctat

SEQ ID NO: 11342 - DNA, 516 bp, Glycine max
  unsure at all n locations
tgtttttnnnnnnttctggtncctttgnccttagtataccgcctaatacactatgccacaaacctnggatctctgccaagctggctcttctgccgcctctanacctttttcccgaagtatgcactatggggtgctcttgaatctgtgcccatcatctacttaaaatctctacccttattctgcaccagaatagccttaaataggctctgaattcgcaacggtgggccttacgccacccttccccctagcgcgggttaatggattcaggcttancgcccgtcgtgcgttgagcctggatgaagacacctgttgtgcttaacacactaatctcgtgcttagcatgcngccctgatgcttgatgccttgctagattcttctgtcgcactaagtgcactgaagctgcgcttatcggtggatgcgcgcctatcccactgatgagctaagctcaactgtcgcttttgcacttcatgacttagcctctntttcactganattgacatatttcanattaaatcn

SEQ ID NO: 11343 - DNA, 496 bp, Glycine max
  unsure at all n locations
aagctanaanttttgagaccttgggcaggtccgcctgatnccttcgtatnacccacncatatataataanatatcttcgacatgtgntgatgatagantttatgatagtgagaccatgcgattgagtantatagggagcagttagagagcgtagagagagatagacagacatggatagttccgactatctatcaataccttctgacatccgtcgatacagaagaatctgacccacttctggtagtaatctatgagcgatataccctacacttgtcatcaccaaaagttctatggtccaaacgagtgcgattcttctttatgatctcttcttactctgccaaaagaaccgaagacaacgcgctgggttattatgagcgcttttctcctctgccaaacgacaacaataactgctaaatctttgtgctacatgccctacaaagatctatgactaccgccgaaatctttgatcttcctccctcagcaaagattcaagacn

SEQ ID NO: 11344 - DNA, 432 bp, Glycine max
  unsure at all n locations
aggtgcnatgatccttganagcactgttactcctctcacatgnnnaccagaaagaactattngctctttataagatatnagatcaccctggcggaccttcaaccgataacgtaaatgttgtaaaaaaaaaacaatatgataaaatttcgctatgtatcatgcactgctttgtcttcgagagatccgtttttgccagaaagaccattattcatatctattttgtcttaagcactcgttttttattatttgatatcagtgtaattatcacattaggcttgagacctaaaatagctctacacagcttaatttttagacctattataaaattaatctttaatcaaaacttaatgacatttaaagttattactccttctcaataatatatcctgcaagagtaaaatcagatttttttacttatgcctacaataaacg

SEQ ID NO: 11345 - DNA, 377 bp, Glycine max
  unsure at all n locations
gctgccactctcctcaagaaaaggatgtagaatctgaaattctgataccaatgacagatgtcgtaccggatgtcacgacatcacgcttcagaacatgcagatgatatttgacagtatgaacagattaaacaagtaaataacacaggagaattgttaacccagttcggtgcaacgtcacctacatctggnggctaccaagccagggaggaaatccactanaatagtgttagttcgaagatctaacaaccactgtttacaaccttctcacctaaccactacccatgcaacctctacctaagagccactcttagatatgagaacacctctcactccctctcaatcactctcccgtggttaccaataaatcanagacacac

SEQ ID NO: 11346 - DNA, 512 bp, Glycine max
  unsure at all n locations
gagagaaaanttttgatccccttggnananccantnggtgnacctgcatantccncnccannaannnannaaaanaagtgttggtaangaccaacgtgttattaatgcaanagagtgttttgattacttacttgcacaataaagctctncacggagagcactctactggtattgtgattagtccgttgaactcatggataccactatagaggttctcggatgcaacaccttgtgtgaaaaccgcaccatattacattcctctcatattggctccaagactcgaactattagttgattgaaattgattaaaagttctttcatggatttaacagtctacttaatgatgtataaagatctactgccactacaacttatactgttggcccgattaatttgtgaaaataccaacaattattgaatgagaatagacctttgacagtccaataaacatcaacacgaactttgtgcccttctggaattacagacagacatcttacacagtcttatcattg

SEQ ID NO: 11347 - DNA, 160 bp, Glycine max
  unsure at all n locations
gaccatgggagncctcaagagcttccgttgttcaatttcgagcttctcgatatgtgatttgcctgaatcggacatccgtgtgaaaagttataccaattgaatttctcaagagcttccgttgttcagttttgaacgtctcgatatgtgatttgcctgaatc

SEQ ID NO: 11348 - DNA, 258 bp, Glycine max
tgtaccgagctttttctcgcagcatacttcttgcttgaacaacatgattgccttaatgttgaaagctgtatgatgtgatgaactttggaaaattttaaaattggaagacccagaaatggttttttacatgaagcttcttttaaagaaacaaatgtggtgataatgtttactaaaattgttggtggaagcaatatagagatatgggctttgggccaaaacttaaacatacaacatctatggccatatgaaagatggaaa

SEQ ID NO: 11349 - DNA, 353 bp, Glycine max
  unsure at all n locations
tatctntcacctttgtatttgttttttatgtgtattggtttggactgggaaactgaaaaaaggcgtggcctttgtctgattctgctttagttcgctactgtttatcaagcatcctctgtcgttttgtgtttctctttgttttggttgtatattgctttggactgagaacaaatgtcacatttatctaatcctcattttgttgtctactgtttattttccctcctttgtggttttgtgtttctgtccattttgattgatgtctaaaaattttttacctttgtatttggttccttttttattccctctatttttctccatcattcttttctggttactctntacctttttcttgg

SEQ ID NO: 11350 - DNA, 430 bp, Glycine max
  unsure at all n locations
tatatactactcaagctctgacttgagtcatcaagagattataaatatgagaccatggcatgagtntaatagaatccttcaacatcttaatcaataataaacaatcatctatctttcaatctatctttcaatatcttctttcatctctttctacagaattntctgatttatttctcttcatctttctaaaagttttttatcaacactntttcttccaagaaaagttctttgttcaaaaacttgtgttattcatctttttcattctcttcttcctttgccaaaagaacgaaggactaaccgcctgaattattttgtgtctctcttctccctttgccaaaagaacaaaagactaactgcctaaattcttttgtgtctcacttctcccttacaaaagattcaaaggactaaccgcctgagaatcttttgattc

SEQ ID NO: 11351 - DNA, 409 bp, Glycine max
  unsure at all n locations
ttattggagtcnncncaaggacgctcttgaacgcggtgagcttatgtgtaagaagcgcctccgcanctgagctctaactacacaacgaaatcctctctaagaagctgctcaaggcaaaagtgctcaagacagcttctacgggaagctacctacacgatgaatggaagcatgcgtaacacttgctgtactctcatgaatgagagtcttgtgagatacccatcaaacttcaacttctgtatctttgtcttccatccaaaccaggctccccctccctctttctctccctactgcgtgcctccatagaagatccgctttaagctatttatacgacgctcagacccggagcgcagctccctctccatggctgactcgtatggcaaggcccatctcgcactgctttccttgttcg

SEQ ID NO: 11352 - DNA, 247 bp, Glycine max
ggggtttgagctgaggctttctgttcgcctacaccgatgatgcatttaagaaagttttatggccacccagctctggattggccccaccgactaagacgatacctgaggacaattttttctggcaaaagaggggcaaagataatctagggactttctagggaaatatgcagacttctaaagaagtacaagccatctgataaataaatgcatgttcccaaaccaacctccaatacaaagtgccgctaag

SEQ ID NO: 11353 - DNA, 375 bp, Glycine max
  unsure at all n locations
tagcttatctatttctatacacagnngatcgngagacaatgactgatttattcaagattctctactttaatcaattacaatgagatataatcgattacttctctctctataagtgttttagaagagaacaagaacactctaatcgattgctttgagtatctaattgattatattgttcttgaagtgtttccagtttttggaagaacactctactcgaattaaaagataatctaatccattacttcattgaattaatcaattatcttgtagatttaatcgattacaggcgcgtataactattttctctataaataactacttatgttctctctaaccacacaacatgttgtgcttctaaatgagctaagatcacat

SEQ ID NO: 11354 - DNA, 466 bp, Glycine max
  unsure at all n locations
agagagaanttttgagaccctggagggcnntggttaccctgataacccccannananaaangnaaggtagagagganaggttttatgagataaatgggtttttttctcagttaaaggaacacggggggcattaaaggacaagttatacccttattttttgattcattaatggttttgaagaattcttatgcaaaggccgatcgtttgattttctaattgtgctacaaaacaaataataggattggagaacgactgattaaagagtttattaggtgtatgaagttcaccctgttatcgtcaaatggactgtgattgcaattttacctgggggtggattaaatataggaaaacacttgtatattgaaaataggaaataggtggtatccatatatacaacatattcaaacgaggttgtggtggatttaaagatttttgtgtgaagaactataactgaatgatctttatt

SEQ ID NO: 11355 - DNA, 317 bp, Glycine max
  unsure at all n locations
ttatacttctagttttatagtcctcgatgggccatcattntcttctattttctaaaccctttttgcaccattttaattactgattggtcttaattgtcaattaatcaagcatttttattatttgggctcatttagctaatttgatgtttttaatctaatttcaggaattaatgaaacattgngcttaatccggattttggttatggacttgaagagggcaaattaagcagcgcttaccttaattaatttctaattaagaaatttcncaattttattttatgttgttcagtgtttatttcgttttgggccagagtatt

SEQ ID NO: 11356 - DNA, 613 bp, Glycine max
  unsure at all n locations
agagataganncctagagnccccttgnangangcgacactgattaccctcgtatntaccacacatctgtataacacctcaagccttgcaatactgacgacacaccatcgcaccttggatgctttgatgttatagatagattttcgtgaacgagtgcgtctattatagaccatgccagtcagatggtttctgtccattccacgagaaaatttcgatagtccatctatatcgaacaactcataagaaatattaacatacgtgctgtcatacatcgcacattaccagagaccaagtaatactgtatgtcacaatattggcaccagttacgacaattcacacgagagtgaatttgttaattcattaaagctgattagttcaaatattctacactgcaccacattttgatttattacttacacttcgttttcaagattattgtgtctacagatcaaacctatatttatagaaatgtcaaatgtggcctgtttattatcgcagatgaacatcagacaccaactaacactacacagcatcattcatttgtggctatgacaggtcacatccagtgatgatgatgtatatatgacacaggacaacattgatatatgtatttg

SEQ ID NO: 11357 - DNA, 228 bp, Glycine max
gggaaatgactgaacctgacttgatctgaaccctttatgactagttagggggttttggtttggccgaataaggtattaacaaagtgtttagttgcaatggacatgatctaagtttccccgttcaagactcggagcggatacttcattccggcagacacgtaaaaagagctcgcctgcgacagaattcttcgtattctaaaatgatcgggattatcctcgagatttggg

SEQ ID NO: 11358 - DNA, 371 bp, Glycine max
  unsure at all n locations
ttcatgcaagctttgccttantttctaagagctcgacaatggcgggtgtcggaaaccgatcacgcaccgtgattgcatttaaagctctgtagtccatgcaaaagtgccatgaaccatcctgcttgcgaactaggagcacagacaagaaaggtcctttctagagcattgattcaacctgcgattcaatctcatgtttctggtaatgtggataacgataaggccgtacgttgactggcgcagctcgcggcaggaggtggatgtggtggtctgtatccaggccggtggcactgaataaaggggctgatataatgcaagaaaatgatcaatctaagatcggatccgtgggtggggagacatacccatctggggtg

SEQ ID NO: 11359 - DNA, 519 bp, Glycine max
  unsure at all n locations
aggatgtananannntttggagacccctttgcgagagtgcccattcnggttgnacccctgcagtnaacancnacnananaacanananagacccaaatgtgagtgtgtggananagttttttttagatgagaaagaaggatgtgtgtgtatatcctcgcgtgcaactgagagacancgcggaggtggaatttcgatggacattggattagacacttttatttttgagtactaataaggtgttggaaatatacctttgaatagccaatgcttatcatatttaatttcttgaagaatcgattagagtgagaataacgtgaataagaggtatttttatgtatgtgagatgtgcacccctaggttgattaaaaagggcatgattatgggaattatactcgggggggctgataaatagagaaaaactatcaatttataattgagaatgttgttagctgacgataaatatccaaaggagtttggtgcgttaaggaatattgaggagatatattggaaattttttt

SEQ ID NO: 11360 - DNA, 496 bp, Glycine max
  unsure at all n locations
aacgtcgnaaaactgatacctttgtcagggcacatgannactttgagcacccccgatgacgccgatcgaacattttataaccgacgtcatgctttattcgttgcaggattgaattgtatactcggtatgcgacatctngcgtgaagcaccaccgatatttttcatccgacattgcacaattctttatacaaaagctcgctggtcgataatggtctctttacggcagagtaagttgtcttggtttggtgttgcataaaaaagtgacaatgtacttcggatgggtttttcgtgcgagttaaccgacattttgttctgccacgaaacattagcccacctctgccaaaaaaatgttgcaacccgctttttgcatattgagtgaacgagagattaaagactcaatacccacaaccggtgcgaaatatcccaactgaattattcagccgcgttgcgcattgcttttaaaaaaccttcctggcagatatagtttttaccatcc

SEQ ID NO: 11361 - DNA, 401 bp, Glycine max
tctcacttttgtggtgcggcgggccaccctcacctattgagatcctacacgaacgttgaccaaagtacatccttatcacgatgctgactttcatgtgcagactgagtgggcttatatcctgaagcctactgaccacgactttcttgggaagtaatcaggctaatactgcccacggtggtgtgtccttatgccatcccgggttgataaccggacccaccataactcgggcgtcattatcgctgcattggacagacaatctgtcaaagagggagtgcccgaggaaaagtgaccacctagaagactgaaaacgagtgctaatagtcttctgggcctcacaaacgctggggatgtgcggctaccagtatcttctctccgacacagaccagagccctcactcaatt

SEQ ID NO: 11362 - DNA, 475 bp, Glycine max
  unsure at all n locations
acgtgttctatccttgagtcgatgatctctganaccccnataangagacgtgggatatgtcaagttatgacgggcacagcaattaattcgcgggcgtgcacgngaagacgggcacatacattagaaagaatttcacattgtctgcttcaccatgagacccccatatgtgccagatgatcacatatttctgaaggcttgtcctcattcattaaagggagtggcaaacgactggctgtattaccttgctccaaggccatcacgagctgggatgacctttacacagtattcttagagaaatttttccctgcttccaggaccacggacatcacgaatgatatcttatgtattagacaactcgatggagagaacctgcatgagtactaggagagaattatcaaactatgtgccagttgtctccaccatcatattgtagagcgacttctccccaaaatgatatgaagacactgattctggg

SEQ ID NO: 11363 - DNA, 150 bp, Glycine max
actaatccaccaacttgttcatcaggctcctcaaaccgagacttattcggggtcgtatggaatgatcacccagagtccaagatatatactgtctaagggttctcatgagacaccattaaagcctcggctgactcataaccatcttcagct

SEQ ID NO: 11364 - DNA, 347 bp, Glycine max
  unsure at all n locations
agggcatttgatctttgaacccctgatctgaatcgcancaangagaatagagggggatgttattgaagtaagctttacaagcgctcttccggaaactccaggtaatacccccaaagacctgctaaaaattggaataatatccacttcttctgcaaataagattgatgctccatttttttatgtacaaatatgcctagtggaatgaatctggacaccttggaccattctgacctttatctttcccactgtggagatcaaaacttatttcaattggatgcgggactcttaccgagttgcaccctatacatgtttgagggaatttatggtgaacctaagagcatttcttg

SEQ ID NO: 11365 - DNA, 345 bp, Glycine max
  unsure at all n locations
ccttgcccggagttttgttgacctgtccaataaccttgaattccctctactaaatattatggaggacctccctgctttcttcttacgacacctccttttaaccatccttttcttccggaagccctttcgccgaatatctttattgaagcgtgggggcttcaccatcttgttcctcacacttttctttcccttgacgttcgcggttgactgtangtcngagtgcaacacacacgctacggtacacactcatccgtgaattgtacttaccgacacactgactcgtggctctcttcttcctcgagtgatattcatggatggtgctatttgatggaagacatgttactc

SEQ ID NO: 11366 - DNA, 494 bp, Glycine max
  unsure at all n locations
nggcctcgataactgatngctgcgtanagcgcatgaatcnttcgaactcatcagaccggacacctcaccacctgaccttgacaggtnttgtgactctttctggccttaaccatgtggaatggattaccagggtgaagttggggaacctctggtcacttccaaggtctttggttggttgtcttgccaggaattggtttgtggaacctgtggtcgcttgcaaggtttgggttggggaaagtcgggtcactgctangtctgtttggggtgctcacattgcaatctggttggggtgctcaatcctgctcgcaggtctcattttgagtaaggtgattcaattgctaagtgtccctttgatgcctaatggatangtagctaggtgtctattgtaatacgtataacaccatggcacatgtacaatgttctggnttttctttattgtgtgtgtntgagcttgaggagcacttgctacacgatttntaaacaagttatagaan

SEQ ID NO: 11367 - DNA, 344 bp, Glycine max
  unsure at all n locations
tggtaagttgaggtctaagtggattggtccttttgttgttactaatgcttttccttatggtacagttgagatcaaaagcgattccacacacaagagcttcaaggtcaatggacaccgactcaagccattcctcacaaacccttctttagtggacgtagtggtggaagagacttccttactccaccctactcttcctccaccatgacttanggagttttccttttcctatctccttctttacttttattacatttgtccgattctatttgatgggttaattgcttttaatcttttaattgtgctacattgaagacaatgtgttgtttaaatatggngggggggga

SEQ ID NO: 11368 - DNA, 428 bp, Glycine max
  unsure at all n locations
cactatataatactatttctatccatatgagctctgtcataattaacttaagcagtaagtaatgatatgcaactaaaagagtgtaataacanatttgtatttacaagtggcaaaaattggattactttaatntaaatagtaatgacacatgtacctatagacatggattggtaagattgataaggaacttcatatcaactatgttgcaagcaatagaagtagcgttcattcattgataaaatatttagcctcggcttctttaaagtcatatcttgtataatatttaaaaagttaacgacattacatgatgaatacatgacaaccatatttgtttcttcttgtatacatgcggaactggataccagattntggctgatacatataataaatngacttaaattaaataaactcaggatattaagctcgat

SEQ ID NO: 11369 - DNA, 352 bp, Glycine max
tagcttctacttatgtggcagggcgggcttccttcaccttcttgtctccaacgcgaactttgaccattgttcttccttcccgcgatgcttcttttcatgtccgcctgagtgggcttatagcctaaaccatacttcccacgatttccttgggtatttatcaggctagttatgccgccgttgttttttcctaaacccatcccgggttcataaccgttccccaacataactcgggccatcattaccgctgcatcggacagacaaagctgcccaaagagggagtccacggaggaaatgctgaccacctcaaaagactggaaagcagtttctaacgattcttctgcggcttccacat

SEQ ID NO: 11370 - DNA, 424 bp, Glycine max
  unsure at all n locations
cacccagctcgcccaggcgagctaggttgcttcctcanaattaccagcctgctgaaggaaatctctgaagggccaaagtggccttgttggtaattggcaccccaattttaattaatacaacccccctggccttttttggtgattctttttttcgaaaagtaccggaacctacagatttcgcaacgatacttgtttcttttccgtatggtacgggacccttgcagattacataatcatcccctttttttacttacggaatgttacgaaacctcactaattgtgcacgatgctttctttgatttncgtgtgtacggaccttacngattggcatcaaactntctttcggtttcggcacatcacggaactcacaaattgcctatgatggtgccaagcacctanaatgacaaatacagttgatgcccca

SEQ ID NO: 11371 - DNA, 366 bp, Glycine max
agctttgagtttcttcattttcctttgcagatgcctctttgctagcataataaatatatacaattatgttcatccttttctcttagtagcttataatttatttggcgtaattttatcatctgctataagtcattttgcacaattaaatagaagacctattgtaaattaatgaagattcacgattttcttaatgatgtcagtatattaaaacgaatgttagcatttagtaaatgttatgtttggcttcattctacaatatattttttattctatcaactgttaaataaaggttctcacatcgaccatgagattcaacacatgtccatgtgggatataagcccaattcttaccacatggactaacatt

SEQ ID NO: 11372 - DNA, 308 bp, Glycine max
  unsure at all n locations
actgttgaaacaatggaacgtgaaatcattgaaaactttaaatcatttgctactggtaatcgattacaacaatctggtgatcaattactagagagntaaaactctttggtaaacatgttttgagaaanatccatgtgctactcagttnttgcanaaccttntcatacttatcttgattcttgaatcttgagtcttgaatcgtgctcttgattattcttgattcttgattcttgaaaacttgaaacttgaaacttctcttgaatctttctcttgattcttgaattctttggcatcatcaaaataacctt

SEQ ID NO: 11373 - DNA, 323 bp, Glycine max
tctttcttgaagactaactggatgcgtcggtcaacttggtaacccagctggccttgaatcacaaatctgtacctgtcgcaagggtttgtggtttgtgctcctctgctgaccaccatacagacctttgcccttccatgcagcaacctggagcaattgagcagactgaagcttatgctgcaaatatttacaatagacctcctcaacctcagcagcaaaatcaaccacagtagagcaattatgacctttccagcaacagatacaaccctggatggaggaatcaccctaacctcagatggtccagccctcagcaacaacaacagcag

SEQ ID NO: 11374 - DNA, 529 bp, Glycine max
  unsure at all n locations
agaggtgggnnnactggatanccnttcgtaggagcgnctttgtntccttcgcataacctgccactatanaatactcaagcctcatgatgatgaatcaagtntatttctgttgttctgataatgactatgatgatgcgaanatcccggagaatgattgcgagactgagtcaacctgttcaagatcaagtttagtttctagtgtcaagattagaaatcatgaagattctagaatctagagaggtttgatttcgagattcaagagaagatgaattcgagtttctagagaagatatcatgacgacttctcaagggaggtcttgaaaagattcttttccaacaacatacatagcgcaattctgtttttcaaaagagcttttctcgcaattatctaaggtaccaaagttgtactctctggtaatcgattaccagtttcctgtgattgatgaccagtggcatagtttgattgtcaaagctttcaactatatttgcgacgttgcaattgatttcaaaatggtggtatcgattacacg

SEQ ID NO: 11375 - DNA, 397 bp, Glycine max
  unsure at all n locations
ttatattcccctataatgagtcgnagaacaagggaatggccggctgattacaacggattgactgggaaaagcctggcgttgcccaacttagtcggcttgcagctcatccgcctttaatcagctggcgtaatatcgaagaggcacgcacgcgattgccgttgccaacaattgcgcatcctgaatggcgaatggcgcctgatggcagggtctcatcttacgcatctgtgcggaatatcacaccgcatatggtgcagtctcattaatatgttgtctgatgccggatagataaggcatccccgacacgcgacagcacacgctgacgcgaatttcttgagaagggtgggaattatactttgagagaacatgtctgctttaactttacaacaagtatacattg

SEQ ID NO: 11376 - DNA, 325 bp, Glycine max
  unsure at all n locations
agctntccgctaagagatctangagggacgtcgcggctaaagggaccagtgccactcccgagtttgatagccaccgtttcaggagtgctgattagcagcgttntgaggccatcaaaggatggtcgttccacagagagagacgcgtccagctcanggatgatgagtacancaaatttcaagaagagatagctcgccgacatttgacgtcgttggtcactcccattgcttaagtttgacccagatatagtcgtgggagtttatgnnncatgcttgcccacagaagaaggagtgcgggacatgcgatcatgggtgaggggtcagtgga

SEQ ID NO: 11377 - DNA, 446 bp, Glycine max
  unsure at all n locations
tcaagaaattatttgatgatgcctaggaatttcaaagatcattctagatgaatttcaaggatgaagaaagcaagatgtcaagcaaagcanagatctcaagataagaattaagatagactcttagaaaagtttttgaaaagcacaaatgattggccaagtgagtttctatcttaacaaaaacttttccacgcattntattctctggtaatcgattaccaaaggttgtaatcgattaccagtggccacaaagctttctagaaatgttttcaaagttttcaaagctgtattcgattaccaaaactacgtaatcgattaccaatgctttaaaatggttaaaaatgattntgtaagtgtgtaatcgattacacatcatatgtaatcgattaccagagcttttgaacgttggacatttgaattttgaataaaaataactgtgtaatcgatta

SEQ ID NO: 11378 - DNA, 420 bp, Glycine max
  unsure at all n locations
agctttgtattgtagaaagtgtaagacacccttatgttggttagagctcggagaagacctcaccttacgacctgaagcggtacaacaaaccaccgagaaggtaaagttgatccaagaaaggatgaggactgcttagagtaggtagaaaagttatcaagataagaggaggaaacacctggaattcgaggttggtgatcatgtattcttgagagtcactccgtggactcgggttggtcgagcattgaaatctcgaaaactcacacctcattntataggtcttttcctggaattcaaaatgacatctccttttagtagaatctgaaacacccctcagccctttatgttttgacaaggggtattgactccgaatgttgtcattaaccttatttctganaatctatactaaatatcctttaattt

SEQ ID NO: 11379 - DNA, 404 bp, Glycine max
  unsure at all n locations
gtaatcgattacaataactctgtaatcnaggttatatatagagntttttggggtaaagaaactnttcttcacccacactgtgatgatgcataatgaaaaacatatatcaaatgtactaagatgcaacacccaagataacaaccaatacaaatgtcactcaagggagttgagcatacaaaagccaaaacttcttcaaaaaatcttcaagcttttccttaagcttcaagatttagccttaggttgttcactatgtttctcatgttgctccccttatctctaacacatggaactaagggcgacctctagccttagtttcatattcagactgaaactgacgagaacctctccatgaatntgtggagtgactcatcttcgtcctgctgaatgtttgtgagtgcaactat

SEQ ID NO: 11380 - DNA, 356 bp, Glycine max
  unsure at all n locations
agcttgtaccttagtcatccataaacctatttggaacatgtgacattgtcataccctaattacatccggtgattattatttgatgatatacaacctttgattggccgcttcaagatacttggcaccctgtgttgcacaatatgtgaagtcccgagatgtgccgaaaatcaataagaagcacgcttacgcgatccgtgaanattccgtaatgtgacagaaatcgaaaggaagtgtctttcgcaatccgagagtgttcgtaacttcttcgaaagctaaaaaagagtaaatacataatccgtaatgattcgtaaccttgcggaaggaaaataagtatcggtacgaaattcgtaaagttt

SEQ ID NO: 11381 - DNA, 401 bp, Glycine max
  unsure at all n locations
ggtagaatggctagacatgatacatgtcagggtttggttnggttttatgataaaagggatgccccacattattggcatgacacaaatgcaaaaatgatgatttggaaactttatgcaaaactggtcatgcatgcgcttatgcggacgctcaagtgtcaaatttttatggtcaagtgatgctacggttcaagattcatttcctctattttaaatcaacccaatgtgtccaaaatatgttcttttatcaatttgtgcattcctccaagtccatttcgggcgtgcggagaaatttttacagcattcacccttcacgtgtagacacgtcntttcttcaaaaatcggatatgatcaatgaataatttttcaaagaaaagttggaaatcatctcttttcaaaagcat

SEQ ID NO: 11382 - DNA, 375 bp, Glycine max
agcttagagcatacacattcacttgctaatcatgaacaactcgctaagccacacttcaactctagaacttcagtagattaatcggcttagcaagccaccataggctaagcgagtaccaattactcgctaagcgcatcatgcacgcttaatggatcttgtaggacaaaataacctataaatcatgctaagccgggtcaacttgcgctcttcccaaaactctcttaagtttgcacttacccaaattgggcttagtgcacatttacgggctaagcgcgagttaaaaatattaaaataaaaataatgatgagggagtcaagaatgcgagaataccaaaggtcaccaccaatgcacactaagtgggaaaagcacctacta

SEQ ID NO: 11383 - DNA, 538 bp, Glycine max
  unsure at all n locations
gcgtacttnnnnnnnaaaaggggntttcagtcnatntccncacggtcnccctcnntacnctgncatccgtngnncnnnnnnnncnnnnngnnnnnnnnnnnntttnnnnnnnnnntnnnttttcccnnnnnnnnnntnnnnnnnnnggttnttgtttaaaanntntggggggcccncccccncnccncncccncnctnnnntnntccctcnngnnnnncctctctcccctgttcctccttgcccccccccccnnttccccctntccctntgtctctcnntggnnttgtgcctccccttgccccttcttcttctnnnttcttcctgcctttccttttgctctcggnttttcgcttgggttgttccctgtgttgctcctgtgggctcccttntctcttccccctgggcctgtgggccgcctctctccttcgtttcttcttcccgctgggcctgccgnggccctctccctgggttgtggggtgcctcctcctccccctgctggctgctgggggggccccttncgcccggggggtgcctccc

SEQ ID NO: 11384 - DNA, 274 bp, Glycine max
agcaaagaagtttttatgctgttgataagaacgatattcgtgccaacaataattttgccgttttaggaagtgattgataactttctttttataatgtaaagtactctataacttttttcttataaaaagaaaccgaggaggtcagattatttacggggggagatatattaatgtgtcaaagtgctctctaacataatagacttatcatctatactaatttctatcaatctttgcgagtaatccctgaatgtcaggaattctcgatgcttatgtc

SEQ ID NO: 11385 - DNA, 458 bp, Glycine max
  unsure at all n locations
gcatggactgaacgacgttcgatcnntgactgnngaaaacgccccngnannnaagnncttatatattataanggtttttagttggagattaanatattatattgggggaggttataatataaagggggtttgaaataattattaattgttgtatttaatattaattgagnttgttcattttataaaagatatgatagattgtaatgtatgtttttaaagtaatataattatatatgaaatgaattttatggaaaagatggtttgagcattatgaagaatatttctttcactaaaaatgtattttatttattaatgaataaatgaataaaatgttattatggtttggtatttagatggtgaagaaatattattatatattattgaataaattaaaaatagatgggacgataagaaaaatatattaaaactaatttaatattatttgataataattgaag

SEQ ID NO: 11386 - DNA, 518 bp, Glycine max
  unsure at all n locations
aggcgacgcgccccngttgaccgtttacttcgatgcnatagcaccaccncgcgagatccagcacagtacccgctgatagcgtgcaggctagcagtatttatgcaaccttcnanaataanttttcataacgatttatgaacataggagactgcttgccctaaggcacaatctggaaataaaaagaacgaacacgctccataagttgcttttataatgactcttaggactgtttgattgctgggaatggaaatatgagcattcatgaatagaatccagatacatacttaccacatatgtgaacaatgcattatgtcacagacttggagtaagaatatcatatcgcttcactgagcttagtaacctatatgacaagccttcctcaattaggaaatccagacgtcaggaccttatactttccgcgagcataactatgataggtacaaaatacgtatacatccgtactctactggaaaagaattacaaaagggtcatgggcgtatttttgcaaatgtcgtccg

SEQ ID NO: 11387 - DNA, 261 bp, Glycine max
ggggattgactgagcctgtctgtgactgagccccgagggaggctactttatgaacagttctactttccaaagggggcagtttcacacatacttggtggattaacccccctattttacctgtaccactgtgaaataggggagacagtccttattatagactaacgtaaactgaatacggagattagcgtcgtttttcattcctagagacgttccaaagctcgaagattttaaagggagtccttcccagagttagcatttttc

SEQ ID NO: 11388 - DNA, 346 bp, Glycine max
  unsure at all n locations
agcaggaggttctattaatctttctcaaggtntacgatctgtgaatctcaactctggaagttcttctaaaatggtatcaaagcctatccttgatccattcaaagagttacccaccatgttattcatgcaccaagcgcaaaagtgttggacttcatggggtgtattggataaaacccaagttccacattggctagagatacggccaagatagagtatataagtgatgtgaaaccatcatcctatgagcctaactttgacgtcgaagtaattcaatgctgcgcagtgcatctagtgtatatggaatgaaagtcaatttataccataataaataaaagaatctttcatg

SEQ ID NO: 11389 - DNA, 469 bp, Glycine max
  unsure at all n locations
aggggatttgagctgagtcattaacttgaaaccccattaccaagccccagatgtacaggcttaacgggaagaacaaagcttcatttatgctgagcgaccgcaacacgagggagagactattgcctctaacaaaatgcctccctcaaacaccctaagcaatcgatgtcttcataggcagcataaataaagatctaactgccggagacccagaataatcacgatccatatgactgcactctaacagaaagaatggagtgaaagtttaatgcgcccacaagtgaagaactcacagcacactagagagttggcgatgacaaccggtactcatttcagaacatacacaacacgcccaactagagaagtatagatcacccaatgataccgtaagttagagtaatattcctacggagcaatgaaaaactgcctgcccggcattatagtgatttaaggttatacatgctaacctccn

SEQ ID NO: 11390 - DNA, 398 bp, Glycine max
  unsure at all n locations
agcttggctctgtgccatcanaaccttctcattcttaagttcctcaacctttaaacagacatttcggtcaagtaagtgtttttctgaatcaaacagatcaaacttgatcttctgatcatctatgcccgtttccagtttaccctttctcatatccaccacacaatcggcggttaacatgaagggatggcccanaatcaagggaattttancgtcctcttcaatatccattacaacaaaatctacagggaaagtaaaatgttgcaccttaaccacaacatcttcaattatgccataaggccttgtaatagaccgatctacaagttgtagtgtcattctagttggcataatctccaactcttcaattctcctgcacatggagagaagcatcaaatgtatat

SEQ ID NO: 11391 - DNA, 338 bp, Glycine max
taaagctatacatacataaccatgtaagagaattaccaagtatgccatacaattatgatttactttgtgtggcatgtccaaagggaaaacaaatcaaaaactccttttcaagtaaaaacattatttccacctcaacacatctaaacttgttacatcttgatatgtgaggtctatctagaacaacatccataagtggaaagaagtatgatcttgtcatagtggacgactactctacatgttgaattagagtgcatgaagatttgaagactagtcttaggatcttttgattttaataattttgcattgccaaacatatttctaaagatatggaatattta

SEQ ID NO: 11392 - DNA, 518 bp, Glycine max
  unsure at all n locations
agcnncagcgagcgncgttagtncgatagatantgatagcacactacaggcgaccncgagcatcgtatccagagatcctgtagagagtgagctgcaggcagtgataacttctccgttttganatatgaccaacgcagcaaccctgagctcacattctagaacttcaataaatcactcggcttcgcaagccggctatgctcagcgagtaccaatcactcactaaacgcatcgtgcacactgagtggatctatgagagacaagttgatcttattgatctgctaaaccgagtcaacataggctctgtcccaatctctattaagctagcacctaccgaactaagtcttactgcacattgcccgctaaccgcgaacgaaaactagttaactttactagagatgaaggaactgatacgcttgaaaggccaatgacacatccatggccttctaagggacaacacctactaaagggactgtggtactagccaacggcttacaaaacattaggtagccaattggggg

SEQ ID NO: 11393 - DNA, 523 bp, Glycine max
  unsure at all n locations
nggggnanncnnnnnnccgacacgttttnccccntnctcacgccncccccccncatcnntcaacagnncgaaaanntgcgnnnncnnnnnnnnnnnnngnnnnnnnnnnnnnttnnnnnnnnnnnnntnngttgtgngnnnnngggggnntnnnnnnnnnngnnnnntgtnttnnntnnnnngtnggggnnngnnnnnnnnnnnnnnnnnnnnnnntnnnnnnnnnntnnnnnnnnnnnntngtnnnnntntnttntnnnttnttnttggtntnnttgttttttttttttttgtttttgtttttntggtttgttttttgtgtntggttggttgtggntttgttgttngttttttttttggtgtgtgtttttttgtttgtgtgtggttttttttggtgtggtggtttttttggttgggtttttttgtgttgggttttttttgtttttttttttgggtgggttgtgtttgtgtttgtgtgttgggggtttttgttttngtggttttttttttttgtggtgtngtt

SEQ ID NO: 11394 - DNA, 413 bp, Glycine max
tcttcttcagcatcttttcttggctagaaacatgctctctggcaagtttcccttggagttactcaactgctcctcaatccaacagttggacctttctgataacagctttgaaggagaacttccttccagcttggacaaactgcagaacctcacagatcttgtgctcaacaacaacagttttgttggatctttaccttctgaaattggcaacattagtagcttggaaagtcttttcctatttggtaacttcttcaaaggtaatattccgttggagattggaaggctgcacagattgagctccctttacctctatgacgaccagaattctggacccataccaatggagttaccaactgccaagcttagaagaagtgacttctttgaaatcactcacatggctcattccaaaacta

SEQ ID NO: 11395 - DNA, 370 bp, Glycine max
  unsure at all n locations
tctctaaatcaatgcattggtgtatcagttcactcacttgtattaacggctctnntgttctatttcaactactattttagtacgtgaatngcacccatcaaatctagtatataaattctattattaaaactaattattataaaaaaaatcttataagcattaattaaagtaaataaatattatcaaatgacctagctagataaagtttanataaatataacaattatcaatataatcggacaacataattaaaatttgaaaatgattatcagtcttaatatatttcgaggcttaatcaatgcagtcaagattccaaatatatanactaaaataaatacatatttactacagtattatatctttaaatttc

SEQ ID NO: 11396 - DNA, 297 bp, Glycine max
  unsure at all n locations
tttcttgtatgtgtttacatttcaagtgcatatatagctntagcccaacacttgttttgatccagtgacattattacaacaacaatagtcctacatactacatgcccttagagtttagaagatttgtcaactggatccaaaaccatagcagaaaagaatgtaaataacatgtgaataaaaacctgaccaaccaaattgcanatatgaatttgctggggaagaaaagggtagtcagtataagtgtataaccaacaaccggatcagaaatgtagaatgtctccctgtgatactgttgag

SEQ ID NO: 11397 - DNA, 403 bp, Glycine max
  unsure at all n locations
tgctgttgaacgttacatcaagacatattttcctgatgctgattttgatgncctttttgcttccttctcctggaagattcccgctctacgatccaatggtcctttctcctctctcttttcagatgttgactttttcttctctttttagtttaacaccaggacatgtcgccattntcattttcttttgtgggtgaggttttctcatttcttgctttaaaatgcgtgagtttcgttttttcacgatgttgatttcatggtaataagctccctgctgagttcaattgccctgtcgttttttctgaactgangttatatgtgtaattctaattgtgatcacgcagtcatgaatgcatacnagatataatttatttaattaggagctgatatctgactacaaaacact

SEQ ID NO: 11398 - DNA, 200 bp, Glycine max
ttgcttccatctttttccttatgcttgcagaaatccgagaagtaatttgtatccttgaattcgtgcttgttgtgttgaaatatggagttgtagaagatggcttgatgcctaagtagcgtcctgaagtaatggggcgcgcctcattgctccattgtctttatattcatgactacaagatctcccacgaagggctcattgaa

SEQ ID NO: 11399 - DNA, 488 bp, Glycine max
  unsure at all n locations
aggggtaatttgagacatanagancagttgatcctgttgaccgctgatnacacacnctttaaagaaagcagcagcgttgtgtgtggaaccacncgttttaatgggttttaccaaaccccggtgaagccgatgtgttcagaaatgctgcctgacatgctatattgcattcttattttcacgatgagcctataattgctcttgctacttgttcacatactcagctatagcctgcgcatccttatgcttgaacatagcactgttatgcatatgcaacaaatcaagaggagtccaagggattaatccctacgttatcttagatggtgaacaactatttgtgctatggacagcccgattataatcgaactcaacatgaggcaaacaggcttcccaagatttaagatttttcttgtagacaatcctaagcagtgtgcctaaagtcctattgactacctcagatggaccattaggtggtgggtgacaagtactcg

SEQ ID NO: 11400 - DNA, 243 bp, Glycine max
  unsure at all n locations
tatgcttgagattatgatttgtantncagtgaaacttcctgctgttattcgttgaccacaaagtggtacctggagatatgtcgcgggggtcaggagaccttggggacgtcatgtggggtgctattgcccaaaaccaagctagaccaatcccgacccaacccgcgcatagtcggtcagtgagaacctgtgatntacctaaacaagcgagctcctggcagtcaacagatggaaggaacaaagacc

SEQ ID NO: 11401 - DNA, 418 bp, Glycine max
  unsure at all n locations
aatcttanggaacccctatatacgccgctatcgctacctgctacacacgttatcccacttagaggtaaaggatggatttatcgcaattggggttataatgaacatgtgtagggatccttagaggatcaaattgaaatttattttgggatgtttattgtattgaaattctgcctttatgattataatcatgagattgttatgtttgatgggccaattgatgcccttatgtgaatcggttcaaaaagttgagtgctttcggtgttttcgtgtttttgaacctatgattttgattcctttgattatgatatgattatgtgaaatcgcttgacgggtctaatcatatcaacataacatattaatattatcactatgtgacatgtatatgatgcatgaagcgtgataacatgttgccttagga

SEQ ID NO: 11402 - DNA, 311 bp, Glycine max
agtaatgtaagcttgaattttaatcataaccagctatgagttatcgctgtgttggatacactcgatatagtgtatggcctgcttgctacctagattgatcaaatctttgcagcatcaaggtcgatattatggttagagaataccgatggtgttttacatactactatggtattgttccgtaataactaataaccctatatgagttgacatccttcaggaataattatcaaaagttacataacatattatcttgtgaacatattatatgagatgtaaatgtgcatattacaaacgtgagctgtatttatatt

SEQ ID NO: 11403 - DNA, 525 bp, Glycine max
  unsure at all n locations
aggacgtcnganccttgtatgaccnctttgnagtanccagcgttgagtccgcttgtttgataccgtttagcananacccacacnatttggttatnatttctcncanantttaataaaacgagaggaagggtatcttanagagtttgttagtccgagaccccacgcaataatggggctggtgtaataacatccgttcactcgacctgagatagtatgtaatacactaaattgttctgatgaaatatgggctggcctacatatacaggctttcatagtatataagaacccacaccgtgctcattgaacaggccaggatggaccttcttcatgaagtattcagcagtgtaattaggatcatgtcccatattcaatctatgatgtattgcatgacacgtgtgacagaatgacatgagcggttacacgatgtatgtgagagcatgaacgggacctgaagtgtatggccatataccgggactacgccatgagaaggacttgctcgaaaaaagtacccggaattgtcctacn

SEQ ID NO: 11404 - DNA, 377 bp, Glycine max
  unsure at all n locations
agcttcatggtgaatcaaaagtgattcgaagatgttttgatgataacaaaagatgatgacaaaggtgatgacaaaaagctcaaatgtcaatcaaaggatgagttcaagatattcaagaagaaatcaagagcaaattcaagactcaagaggaaaagttgaagaacacttcaagattcaagaagaaggatgaattcaagaatcaagattcaaggatcaagcttcaagaatcaagatcaagattcaagattcaagattcaagaatcaagagaagacttaatcaagataagtatgaaaaggattnttcanaaactaagtagcacatggattnttcacaaaaacatgtntaccanagagttnttactctctgtaattgatta

SEQ ID NO: 11405 - DNA, 435 bp, Glycine max
  unsure at all n locations
cggacttcctgtgttctgagaacctctcctttctcaagtgtactttaacccaatcacctggttcaagcacgactgtctttctgcttttgttggcttgccttgcatagctcgcatttttcttttcaagttgagccttcacttgctcttgcaacttcttcacatactcagctttagcctgtgcatccttatgcttaaacatagcaatgttaggcatagccaacaaatcaagaggagtcaaaggattaaatccatacattatcttaaatggtgaacaattagttgtgctatggacagcccgattataagcaaactcaacatgaggcaaacaggcttcccaagatttaagattnttctttaaaacaatcctaagcagtgtgcctaaagtcctattgactacctcagtttgaccattagtntgtgggtgacaagtagtag

SEQ ID NO: 11406 - DNA, 413 bp, Glycine max
  unsure at all n locations
ctcgccggacttaagcaccgcgctcagctgtcatttaatcataaaagggattgtaagttattatctcagttttccttaccaaataaatgggtcatttttaagggcccacgccttaaaatgatcacctttcaaggaaaaagaatcgcttgattcacccttaaggaaaaactacgtagggctgaattcctctttgatggagggtacgtaagagcaagaccccgcttttgtcgacctcaaaaataaaaagaattaaaagttaagataacacaatttcacaactcttaaaaataggttgttggtgtcctttgagacanaagtgagagggtgctaataccttctcaaacgtaaatacaactcccngaacttagaattttattttgaccgtgatatgccatcattttcttctattttct

SEQ ID NO: 11407 - DNA, 503 bp, Glycine max
  unsure at all n locations
agggtggaaactgatagcttgtatnaccacttaancnttgatagccctatccangctcatcttggtgtgaagctcttccttcatgtgttattcctagtggatgctgccgcctctaacctcttctccttggccttccgctgcatcttcattggtgggaaaataccattaaaaggaccctctttgaagcttcaaagatcccacccttcatagaggctccacaagcaaagcttccatcaagtggtaatcagaagcataaagcttcaagtaggtgctccttaaacctncattaattttttttctttaccttctcttccattgttgttcttcattttctccatgtatctcctcacatgtcttgttctaaatgtngttaacatgattctttagagtttccaacgattaaacttgctatagaaactagatttgattttctatgggtcaaatttcttgttcttgttcttgacaatgaatgtgttgagntaggttcctttgagtttgtcttg

SEQ ID NO: 11408 - DNA, 281 bp, Glycine max
gtttgatcagcgaactcataatggtgtacctgtcgagtaagactccttcttatctgcacaaccaaattattcaagcacagtcgataatatagaagatggaactatcacaattagtattccttcaaagaatgggaaagggcgtccatcctttaacttcaacaaagtctttggaccatctgcatcccacagttggtttggttctcagtttcagctatctccaacatcactataatttagtaaatattgaacaaatttcttctcttgtgttcaacggacgtctt

SEQ ID NO: 11409 - DNA, 423 bp, Glycine max
  unsure at all n locations
agagattgaaactgatgcctttgnanagccatctgatccttgtacaccncaattgaagaatatgcgagaagtaataaaaaaggtttttgatatgttctccatagtactccgtganagttaatcaacaggacctatgtaaccaccggcaagcaagaaacattgaattttacaacttctcacatacaacagaatgcagctactagacaaggttaccattgaaaactttacgagactcaccagttgcatacatagaagttggcttcactatccgaaccctgtcaaaaccccccctttgggagggaaatttttccccccccccaattttaccctaaaccaaaatttgagggggaaaccctgtctttttatctaaaagaaaacccacttcttttttgttacaaagcggtaacctcgactgaagatatg

SEQ ID NO: 11410 - DNA, 414 bp, Glycine max
ctttgtgattgcaaaagcggctcgatatgatcagatgattcatgattatcatgctcccgctttgacatgatgaccaccagcctgtcggttgaggacttcaacatattacaaatctatctgcatctagttcactactcctgaggattactatgagagctcttatgatacaagaagaaagatgatatcttgaatatatattcaaggagtctgcttcaagaatcataatcaagatcctagattcatgattctagactcacgagaagactttgtcaacatcgtatgcaaaggatgtatcgagaagtaatagcacatggatctgtccaaaagcatgttaaccaaaaagtcttactcgtctgtaatcgattccacattgctgtactcgcttaccaagagcataattgacttgaatcagtg

SEQ ID NO: 11411 - DNA, 339 bp, Glycine max
  unsure at all n locations
aggtganattgatccttgaagcgctgatcttaatcctcaataccangtgggaaggaagaaatgtacgcctaggctttttttttattgctgaaaatgcccagaaaaatcacccaggccccgatgtgcgtccttcggagaaccgggagttaaacgtctcaccctatgagcttacgccttcatgcaaggaaaactcaccaccttcggagatcaagaccgggagccctagactgggttataccatgtactactgaacacacttaagcgagcctaataaaagttgaattaatgtaaaaaatagcacgacgcgattgtttgcgcactccttaatatgcgccgtcg

SEQ ID NO: 11412 - DNA, 345 bp, Glycine max
  unsure at all n locations
acctttcatgtgttttttggtttccaaaccttatcctttcacagaaaccaaaagggggctatatcttttaattctcttctcccttggccaaaaaaaattcaacaaggactaatcgccctgaatctttttgtgtctctctttctccttttccaaaaaaacaaaggactaaccgccttgattcttttgtgtctcccttttcaaagaattcaaaaggacacagtctgagaatcttttgatcttctctttccttnaacaaagatttcnaggactcaccgctgagaatcttttgtttcccttcacaagtttcaaggactaaccgcctgagaactttgtcttaacacattg

SEQ ID NO: 11413 - DNA, 82 bp, Glycine max
ctcgacgacaaattcgtaccctacatcttattcactgtcgactccgatggtcaatgctttgctcgcttacgattacatgcac

SEQ ID NO: 11414 - DNA, 347 bp, Glycine max
  unsure at all n locations
agcttgcttgataagcttctattgtagctggatctttgagcttcaatgaggtccttcaatggtgatttttcactatggagatgcagcggaagataaaggagaagaggtgagaggagacgccatccactacggaataagccatggaagaaggagtttcgccaccaagaatgtgtcttggataagaagcttggagagaatgcttcaatggaggaagagaaagacagagagaaagagagaggggcgagcacgacattgaaggaggaaaaggtggagagaagttgaactttgagtagtgtttcacaagactctcattcatcanagttaccacaagtgttacacatgcttct

SEQ ID NO: 11415 - DNA, 289 bp, Glycine max
gtctactatcattgatatcatctctttctccatcatcgggggcaccacttgagctgccaaatccctccaccttttggcgtatcctgtgaaagatttgtgctctcttttacacatgttctgtagctacattctattcagagccatatcagaattgtaatgatactacctaacgaatgcaaccattaggtccttccaagaatggactcgggaagattccagattagtgtaccatgtgacggctgccccagtaagactttcctggaagaaatgcatcaacaattattcatct

SEQ ID NO: 11416 - DNA, 333 bp, Glycine max
ttatctttcttattataacttcgcggagaagctgcgttgagagaacttccttgagatgctagagcttatctacacgcacccatctaaaaactagagctcacctccttgagaaacttccttgagaagctagagcttagctacacacacccctctaataactaagctcacctgcttaggacgagaagctagagcttagctactcacccctattatagctaagctcaccctcatgacgtaatacatgacaatacgacaaatatcctactacagagactgctgaccatgccctgaaatgcgagactagcaccctatactgctagaatggccgacata

SEQ ID NO: 11417 - DNA, 342 bp, Glycine max
ctgaagatgtacgtgctaaagttgttgaatcataatagaataatttgttacaacgaataagtgttataatgctgggcgctctattggacaaaggagacttaaccaaattgagtgatatttaactttgctaagatagcgagtttcattgtatttgaccatatagtgtaaacactacttgagtgattagaacatattctctatcaaacatatattatttgtaaaagccataagtgacttagagacgaagaatacttgtgtcttaatctcaaagggagattaactgcaccgctaggagtgacctagagagctcttgatatagccataagtgacagagaatactat

SEQ ID NO: 11418 - DNA, 399 bp, Glycine max
tgcttctcgtttattatgcgcccgaatcggacatccatttgaatagtttagaccatttgaatttctcgagagcttccgttgttcaatttcgagcgtctcaacatattatgcgcccgaatcggacatccgtctaaaaagttatgccatttgaatttctcgagagcttccgttattatatttttagcatctcgatatgtgatgcactctaaaaagttatgccatttgaatttctcgaaagcttccgttgttcaatttttagcgcctagatatgtgatgcactctaaaaagttatgccatttgaatttgtcgagagcttccgtggttcaatttttagcatctggatatgtgatgcgtgtgaatcggacattcgactgagaagttatgaccatttgaatttct

SEQ ID NO: 11419 - DNA, 498 bp, Glycine max
  unsure at all n locations
aagagaaaatttgaagcccttgngagnggcctaatgatacctccgctgntaccncactctatannacactcaagctccctctaccgtannnaaaatattatcggccagtgtttttaaaattatttgcgcaatgtcggcagaaaaatatcaaggcgtggctatataacgaccgatgtcaagtattttttgttcaattcaacccctgaataattttggatattggccataagaaatggtccaatcggcgtatcaagtgaatgctgcgttttattttataactggtggaacgggcatttttctttgcgacattcactattatatttttatttagggcgggaaaatgttttttggcgacgaggcggagattttttatcgcagaaaagagacacacccgagtgtgcggacacaacctcgttgtgtccgccacaaaactcctccccctctttgttgttttgttttggaacccacacacaaaacctcttctaagaaaaaaatttc

SEQ ID NO: 11420 - DNA, 424 bp, Glycine max
  unsure at all n locations
ttagcttgatatttacaacacttatatgacagagaataagaatgaattttatttctagcttttggttctagaagcaataagcagcaggcatattctacacacacacaagaaaaagaatatggtagggtcataataactntgtttaatttatcatatactaatttcatgcgacgtctcggatgctgcatgacccattctattcttttgcataactaaacggaatcaacccttgcattatttttcactcanatatgaatgatggaaattaaagaatgttgattctgtaaactgggggcgtgtaactaacatctctgatagatgtgatagaccagcccagccaatatagaattacaagctggttgaatntgatgagaagttctaacattaattttttacaatggagtgtgctgatgcatcacaatga

SEQ ID NO: 11421 - DNA, 372 bp, Glycine max
  unsure at all n locations
cgcttgaatttgatccttgtaacccttgatacttganaccancnannaaaaggccgggggttgacnatttttttttgaagcacatttttggagggacggcgaaccaggggggagggcactcaaccaccaccaccctggccacgggtatttaattttaaacatctatgatatttactcccccttgttcgtcgtttgtacacaacttttttaaagaacctccttttgttgagtgcggccagatgtgatggtggtaaaaacgttgatccgaatgatgtgggtcctagatatgattctgcttgtagtcgacgctgagattcagttggtttcaggatcacaccgctatcttcctgatgtcgtaacatgtcttccccg

SEQ ID NO: 11422 - DNA, 377 bp, Glycine max
  unsure at all n locations
tttctntactgttttggtcttcaccgacgaaaggatcaaagtgggtatggaaaaaggcaaatctgatcatcctgcattgatgaatacgaaaattgnggcaaatgaaaaggatgagaatgagggagaaacctttgctatgactgccattcctacacggtcaaatttcctgtcagcccaacaatgtcattactcagccaataacagttcctctcacccaataatccacaaaggccatccccaatcatccacaaagcctgcccgctgcacatccagtgccaaaacaccaaccaaaatagaattntgtagcacaaagcctgtaggattcaccccaaattctagtgtcatatgccaacttgctcttatatctacttgataat

SEQ ID NO: 11423 - DNA, 381 bp, Glycine max
  unsure at all n locations
gaggaaatttgatacctgtaagcccttgatcccgtggtacgttctaaccccagctgagtgggacggnattttaacgccgatgatttttaagggttgtgcccaaaaaggtcggtccaaaattatggaacccgaggggtatggcaaatatcttgggcgccgaacgccccaggaaaaaaaggtcgaccttatggaactgtgaaaacctccgacatatatataaaggatggtgcccaaccaggaggttgggggggtgccccacgattattgaaaaatagtgggctacgtatatgccaaagggggttcccttcagctatataaccccaacgataaggcgtacaataccccaaggttagtggtggctctgaaccagggtaagaaacg

SEQ ID NO: 11424 - DNA, 520 bp, Glycine max
  unsure at all n locations
agcagcggcggccgactgagcttttgcanncactgatgctattgcaagaccnggcgaantcagctcggaccccgggatactctagagtcgagcgtgttgcatgcaagctttcttattatgacncctagagaagctagagctgagctgcacataccgctgtcatagctaatctcaccgtcttgagatgagaagctagagcttagctacacaccccatatagtagctatgctcacccctatgacaaaatacttgataatacttgaaggatgagtactacattgacttctttacaacgccagcattacataggctaaaccctctactactagaatggccattttcaatggccgtatgaaagaaanactggtctatctgtggacgaaaaacgggcgagtgcgtagccatgggctcgaaagtacccttatggcatgggaaccgtaaagactggcattcgactctgaaccaggtaattgagtatatatccaacgactgctgggtggattgctcctacggctcttgn

SEQ ID NO: 11425 - DNA, 229 bp, Glycine max
atatggagtttcatacaaactctaataaagactacatatactcactcaacttacctcacgctgataataataactacggctggaagacacaaaagatcaaactcatcctcacttactcatcaatgggtcacaagaactatgataccaggacgacaccctcctcttacctcaatgctgcgatattcaaaactacaaatggaagacacacatatcttactcgcgctcacct

SEQ ID NO: 11426 - DNA, 333 bp, Glycine max
  unsure at all n locations
agcttctagatgatttatgtctgcgaatccgacatgctgtgagaagttatgaccatttgaatatatcgagcgctgccgaagttcaatcacaagcagcatagatatgcgcatgtactcagattagacattagagcgaaatgccatgaccatntctaatagagctgagagctatccgatttttaatcatctagcgtctgagatgagttatgacacacgaatcgacacatctagagtgaacaagagctgaccattgcgaatttgtcgagagctacatatgtgaatctctcaacgtagagatgacttatgaatccgaatagaacatccgtgtgaaaa

SEQ ID NO: 11427 - DNA, 435 bp, Glycine max
  unsure at all n locations
tctatataagtctgaaccattgtatcaataaactcaagtngagttttattcagaaaattagagtttatctcttttatcttagtgagagtgattctcctaaattcttgagtgattcaagaacaccctggctgtatcaaaggactttcacaacctttgtgtgttgccctcgctggaaagagtgattctttccttcctatcatctccacccttgttctttcaaaccacaattccataatatccacctctgcccaaaattatctcgtgaccataactcccatttcacacactcaaattaagtgattcttgagcctaaattgaatttcaaaacgagacctttcacctcgttttggaatcacctcatttggagccctgtagcttccgttattgccatttctatatntctgtccagccaccacttaacctacgtgttaccat

SEQ ID NO: 11428 - DNA, 398 bp, Glycine max
  unsure at all n locations
agctnttatgttttagattgttatatcttgcccaactgattaaagcttctaatttgataaattcagtcttgaggatggagcaagatgttgagagtttgtctttcatgggcacacacacagactgcatgcgcaatatatattcatttatttttgttccttgtagctatctatcttttctttagagacactcctatgtgagacactttcagacactaaggatagcttccctactccacatagtgagagacttgataatcctttcttgttgaagaaagaagtgtgaaagcaatgacttccaagattattttgatgatgccaaagaatcaagagttaagcagaatctaaagattcaagagtcaagtgtcaagaacaatcaagatcaagattcaagactcaag

SEQ ID NO: 11429 - DNA, 526 bp, Glycine max
  unsure at all n locations
agagagaaaaattttgatccccttcgaananccgatttgagtccactgctgatccanctgtaanancgncnnngnntacagctgacatgtggaaagtactaccatagnccatgacctgttggtaatgcggatacattttcagcagatatatgcatatgctgaggcctttcatgcctgagcgggaaagaataaatcttatatggtctcgccttgactgtggatcaaccctgaattctctcttaatatctacacccgttcttcttggacagaaactgaaagagccatntgactgctaccactggctaccaatgatgccgatcatctactaaccaaaaattacatgatcgaaaaaaatattatatatatatatatatatcngccacggttacgaatgtatttagcatcgagcacgagcctccaagatattctaaatccacataaaagtatcgtaaaaggtgtaaagttgaaattaacattgatcggggaaatcttgaatgacttttatcttatctatcaatgataagcn

SEQ ID NO: 11430 - DNA, 448 bp, Glycine max
  unsure at all n locations
atctctaagtcacctgcagcatgcaagctgtcctttttgacanatactccttaccaaatagaatccatcttggccctttttccacaactctcgtanatgggagagaaaatgtcatctaaagcataccaagtcctaatattatcaaatnctaaaaattgagctccttaggagaaaaacaatgtgtgtctcctagagacggcatcagctaccacatttgtttttccatttttgtatttgataacatatggaaatntctctangtactctacccattntgcatgccttttgtttaactntctttgccctctaatgtacttaagtgattgatgatcactatgaatgacaaattcctcggaaacaaggtaatgttcccaagtntggagggctcttattaaagcatanagctctttatcatagatgggtagttgagagtgttcccaagtaatgt

SEQ ID NO: 11431 - DNA, 476 bp, Glycine max
  unsure at all n locations
agagtggccccttgatcctcttgaanancgacttataacatgatgctcgcatttgcatcatcatgtgcagcttctcgcgagatggcatagaaacatatttttcatggctctttcgagaggtgggaggaacctccttgtgaacctgganggcctggattctctttatttaatgaatcccttgccttcttgaaaataatgggagggggatgggagaaggaaaaagatgattgaagtcgccacttgaaggagatgatgagtcaaaagaaccctcccaccatangaagtcatggataaaaccttgacgtangaataaataatggaggataggagaaacaaagtgtatcggtgaaaacgactactattgtgataaaactcgtataattgtctcaaactcgtccattcatggtattaccgtatgacatagtattttctgttagtattaggagtagaacttaccttttcattctggtgctaaa

SEQ ID NO: 11432 - DNA, 385 bp, Glycine max
  unsure at all n locations
agcttgaatgttgtccttnaattgtgattttccaccatggagatgcagcggaagacaaaggagaagaggtaagaggcggcgccatggaagaaggagcttcaccaccaagatgagccttggaaacgaagcttggaaggatgcttcatggaggaaaagaagagggagagaaagagagagggggagcacgagatgaacgaagaaaaaggagagaagtgaacttgagtttgtctacaaactctcattctcaaagtacacaagtgtaacatgctttattatgactaagtacttcttgaaagcttttttaaaaacttcttgagaacttcttgaaaaactacttgagagctagacttactaccacaccctctcatactaactcacctcttga

SEQ ID NO: 11433 - DNA, 502 bp, Glycine max
  unsure at all n locations
agagatcgtaactgatactctcgnanagcacttgatcccttcgatctcgcatcttgtgtcttgaagaantctaagcaattcttgcatttgccagtgcctnatactttattactgngatatgtctcaagcttccagccacaaaatcaagcccaggctgcacacactggtgcatcaggcttctacaatagaagcatatggaatgttcctcatttggtccatttcaagctcatttataagacattgattcanattgaatccatcacctttcacaatatgtaccatgttgggtgaacaatccttcatccgacatatttctagaactntattaatataagccttttgagacaagctgaaaatcccttgagattgattctatggatctctatgccaatgaaatatgtttgatcacccaccatccttcattgtcaaaatctttaaaaaggaaatattttacttcatgtaccatcccaaaatcattgggtgcacgaagaatatcatcacn

SEQ ID NO: 11434 - DNA, 325 bp, Glycine max
atattccactaacgaccgacagaggatggatatgcttaattaatgtacctctaaaaggatgatgatctctccattgcgtaggctatagcgagacaacgcttaccatgcagcaaccgctcttaatttttaatacatatactagaatgttcccttattataataatcaaactgacttctattaacatataaataatatccgttagtgtgaccatccatactaacctaagaaactcattacacatactcattaaaatacaaaagcgcaaggatataatatgctgaatatatttgtatccacactcaaattgccatatcacgggtgaat

SEQ ID NO: 11435 - DNA, 412 bp, Glycine max
tatgcatgtgttttatgaagcatctccaagactcagaccaaggctatagtgcaagcaatcaatgaggcataacacaccagatgattatgatgatggatggctcatattctcacataggtaaactcatcactttcaaattgagctttcataactatcatgacatgtagaggagaatcaaagatttcaagtcacacaatgtctagaactattattttcaaaacaattaaccatttcttgcacatatactatgattcaaagaaaaacatgcagagctgtacatgcacacaaaactgaccctaaatattatacgtaaaatccgacaaaactaacaacattaacaaattatcacagcttacagattaacaaaaccaacattactatctaaacctatgaacactcccccccatactta

SEQ ID NO: 11436 - DNA, 400 bp, Glycine max
  unsure at all n locations
agaagtaattgagccttgaagtccatcgtaacttgataccaccaanaanaaagccaaagaagaagggctgtgtttcaagacaaagtttttaccgtatcatagaaaccagggatttgcgactaaattggcaaaccaccaatatttgtgttgggggcttaaatactagggagagctaaatcccattgggattttaaaatatcactgagagaaattttgatttcttccatcatgttataagtttattttaaaaatttgcatttttgactatccttttcataaaaacatgcgatcttctaaaatatataagcgcaaaatttctggcaccaccatctatttatcattaatctcccctttctaaaaaaaaaaacaaatttccaaccataaacccccccatctaaca

SEQ ID NO: 11437 - DNA, 524 bp, Glycine max
  unsure at all n locations
agcggcagcnnccgaagagccatagcacacactgatgcnatacacggccncgggatcgtctcagtcgatctgcaggcatgcaacgcgtggcatgtattcattaacctttgtatatcgccctcnacagacccaagacagatatacgattatgttcatcacatcctcttaatagcctataattcatatgacataattctatcatcggatttaaggcatcattcacaatttaatagatcacctcattgaaatcacttaagactcacgattctcttantctgctcactctattaaaacgaatgatatcgttgagcacacgtcatgaacggttacattctataactgatttggcatactatcagctcttatatagaggttctcacatcgacaacgagattcatacacatgtncatgtgggatgttagaccacttcataccatatggacgaacatttgttcgctcatctactaccacctatatcaaatacaatggcttcgccccaacacaatagttaataggcacaaccg

SEQ ID NO: 11438 - DNA, 512 bp, Glycine max
  unsure at all n locations
agcgaggantaatagaatnccnttcgaagangcgacttgatgacattgtagtcgcatanttnnatacanngccacattgggagagacgtccttgtgtcgagggccatggtaattgttagcaaagttattgtattagaaacaggatgttcgaaagcaattggaacgacgtacattcactagaaaactttctcaaatccactatgctactggaaatggattacgccaatatggggatgaaggactagagagaaaaaactatatgggaagcatgtttggagaaagatgcatgtgctacgaaacatatgcagaagcttcgcgtacttatcttgaggggtgagtgatgtgtctcgaatctggaggatgaatatacttgaatattgatacttgaatacttgtatacagggacattcacacgattattctctgtgatgatgaaatcgttgcgctcataaaataccgttggaaagcattgttcacacttatcttgagcgagccttctctggatactagan

SEQ ID NO: 11439 - DNA, 404 bp, Glycine max
  unsure at all n locations
ttatcttgctagttcaaagaagaaaggcaagcataggatggtcaactaagaaacattcctagaaccaagcctagacaaagtggtagccagtgtaactcccatcgaccgagaatggactgagattcgagacatcctanagaaaggctcactcccagaaatccaacaacgaccagaaagctcacaaggaatgccaactattatgtgataaagggaggagacctatacaacagaggctttatacacctttgttggaatgtttaacaaagtaccagtctgaatatgtaataaatgaaatgcatagagggatatgtggaatgcattcatgatccccatcgatgaacatctgagttcttagagccaactacacatggttgacactgagaagagactacacaccatatgtt

SEQ ID NO: 11440 - DNA, 223 bp, Glycine max
gtgatgactgagcatgactgatcgattactaccttatcaggttgatagactttgggttaatattacaaaagtatactttgtaactgctagaaagagatgaataatacgtttgacacataataaccctttatgatctaccatatctactagtataatagtcttcctgcttaacacatgggctagttatagattagctcttgatgatgcaattgtaaaccattga

SEQ ID NO: 11441 - DNA, 531 bp, Glycine max
  unsure at all n locations
tatagcttgagaaatanngatattgttgaaggggtnngaaacttccttgctggtgtattgtgtgaacacacagaagtgagtaccctcgcagcattcatgtcagcggggcgttccaggagaaccttgtgtgaccgtcagagtgaaagtggctattttgcccaataacccaagcttttgacgcaatcccgaacccacacccgggcattagtcgagtcatgtgaagaaccttgtgatagtactctatagcagagccgagcctctctggcacgtcatacatgattaaataggagaaacatagactcaccaatagccaagtgagagcttctgttggtggcttggacacgcttgttgaattnatgtcgtaatattgtaggatttggtggccctcnntggtaatccgattactcnagtggtgaggtctatcggattacaagaggcttaaaatttgaaagacagagagggctatggatcggtctcttggtcaatcgattaacccacaggggtgtaatctgaatactcacgctttgacag

SEQ ID NO: 11442 - DNA, 372 bp, Glycine max
  unsure at all n locations
aatgagaacttgngagtaatattctaaccttactggactcatttcantagctgtatctgcatactgatattgttctcagcatagatctttgtgtgtgtgtgtgtgtgtgtgtggttttgtctggacaaagtccttttgcttttttgatgaaactgtgtgtgtctctccgtggtactaaacaatttaccatatattctgaagttagggattgcgtctgctaaagttgaatttgaatggaatcagcaataatgcttcgaatcgaatcccctcataactagcaggtatgtggtttcatatggatgtaattatgcagtatatggtatgctgaatttttacgcaggatattcaaagagtttgtaactatgacccttc

SEQ ID NO: 11443 - DNA, 337 bp, Glycine max
  unsure at all n locations
tttcttcagacctanatctcacanaatctaggtatccaaaacccctcaatttaatggattttcaacgtttgagaagtgaaattgagaatggtgtaaatttggagaaaactctcacctcacacaagtctataacatcaattaaaacttgctcaaactggatttacacctaaaattccaccgaatcaaaatttgactcctcaacacccaattttaccctacaaatggctctttgttcactttggtcatttgttcttctctcttgcacagcccaagctttctcataagtcctaaatgaccattcaaactacgattaactcactttaacctccaaatacca

SEQ ID NO: 11444 - DNA, 249 bp, Glycine max
tcaatcatctgatcattgggatgcttgagaagatgtctggagtgtgctagacgcctcttaatgaagcttctagagaaaactacatgaaactgcctcggtagatacgctgcccagccttcgttaaccgttggatcttctcagaaattggtttgcaacttcacaagacactttaccatgatttaaccgttggtatctttgagaaaatatctggagtgtgctagaagcttccgttcccgacagcatctctta

SEQ ID NO: 11445 - DNA, 391 bp, Glycine max
  unsure at all n locations
agcttcacacttgatatttggagacacatgnaacagcgcctgggcaatgacactcatggtgctccgaacaaaggtggagtatggaggatttccttgagggtccgcgcttaagcaatcatgaaacccagctccaaactcgaaagtggaggacacatgaacaaccctaagcaataacattcatgtggctccggaacaggatgagaatggaggattgccttgagggtcctctcttatgcaatcatggaacacagctcccagctcaaaaatggaggacacatgaacagccctaagcaataacattcatgtggcttcagaaaaagacgacaatggacgattgccttgacggtcctctcttaagcaatcatggaacacagcctcaaggctcaaaatg

SEQ ID NO: 11446 - DNA, 519 bp, Glycine max
  unsure at all n locations
gagagacnantttgaagacctttgagagntacaanatgatgtcccngtcngatccttcgtaanacncaannnccnnaagatggaacanggngnatttttttggcaaaganagcatgagatttttttacgcatcttatctataggataacgccaagaggtatgtgagcatgcttctcatttggtatatcacacccaatgatctgttgttgattggtgtaatacgaaacgggtataacactttaaacattgctggataaaccatcgtgagacgttgagaagaaatactgatatctatttacagagtgttagaacttttatattctaacaattacccatttcttgaagctatactattattcaaagaaaaacatgcatagttctgcgtgctcaataaattgaaccaggatagtttatctgaaactcgacgaaacttacataagttattattttatcccgctgaataatggtgagaccatctaatcttgtatgagtgagtaaagtcaccctcattgttaaaan

SEQ ID NO: 11447 - DNA, 202 bp, Glycine max
  unsure at all n locations
tttgttgcaagcttatcgttatggnaggaaaactngaataaaatcctagttattccatctttcaataggaaagacgacttaatggttaacagaagagaagaagagagattgccggttcaaatttcttccatacaaagaagagaagaaggctaaattattaccaggtctttccatttctggaacgttagaaatgaaggacatg

SEQ ID NO: 11448 - DNA, 478 bp, Glycine max
  unsure at all n locations
cttgtttgtttataagnannnnnaaatgttattnnanagggttttttntgaagaannaaaaggggggataaggagggaagatatttaagaatangataagaagatttaatttgttgtaataaggttggatgtatattaatatgaaatggtaagagtagataagtatagtattaatgatatagaatatatagggtatggagtttaaggtttgaatatagatgatagaagaggattgataatggaatagatgttgagtgaatataatgngatgtatngtttgatatatagaggatgagaagtgatgaatataatattataatagggatagtgtgatgcgtatgatagaagataaaatgggataagaatgtattgtagtaatgagatgatagaaataaatgatttgataggaggtatgtatatgttgtataagtgagaacgattgatcgcaactgtaactagcatgttgatagtaatgtag

SEQ ID NO: 11449 - DNA, 428 bp, Glycine max
atgttgcaagcttatcttttgataatacagggcatccttgccttatataggcagaggacaaaacagacaaaataactgaataaacttccatatggatttaggtcacagcccaacagttactaatcagctaatttctcatccaatattgaaaccatgcaaatacatctaaaggaagtgcaattcagtgtcacattcataatgctcgaacgtaccccgaccaacctaataaatatttggaaagagtcaaccgtcagtccactgtaattgtgaagacaaagagaaagatagtggaacaagaaatatattacagatatagatcggtttatttagttacaagttagttattaatgtaattaattacaagctagatattcttgtaatcaattatgtaatacatcgctagcattagttatataaaagtcaatgta

SEQ ID NO: 11450 - DNA, 368 bp, Glycine max
  unsure at all n locations
cataaacaattatgatggcatgctttanaattcataaanatgtgtttcttatattaaatntctgtataaaataaaatatttgttttagaatctggtacgtaaaactagaattcttatcttttaggattttgcttttagtaggtcaatttggtttgatagacgttgattatgtctgtttgcttttttttctacatgtcggttttcaacattgcttttacccgttggttttttaacaccaatgctcttgctacacacgattaaaaccaactggatgcgtatcttaagagagaaacggaatcagatcagattttcctaccagtgcagtgggggcattttgtctctaaggataacgttcgcatgcttcaacc

SEQ ID NO: 11451 - DNA, 328 bp, Glycine max
  unsure at all n locations
agcttttgcattctggaatcattnatcctatcttcgatagcgaatgggtgagtcccgtccaggtagttccaaagaaaaccggtctcaccgtgataaagaatgagaaggatgagctgattcctactcgggtgtagaacagctggagagtatgcatcgactaaaggaggttgaactaggttacgcaaaatgacccatatccactgccattcattgaccacatgcttgaacgcctagcaggtaaatcttactactgcttccttgatggtctttcatgtcacatgcaaatcactattgctcctaaggaacacgagaagatcacattcacctg

SEQ ID NO: 11452 - DNA, 404 bp, Glycine max
  unsure at all n locations
tgaagcatgtgtcgttctgagagcttcagattagtttgtgagtgtttgtgagatcctacaggtgaaggagacatcctccccacttgtatatgtgcaatctttcatcttgttcttctctttgttgttaagaacgattcctggttatagaaagctaaatcctctattggatcttccctgtaggtacctgatgtaaatatactgttatctatttaatggtgttttgtgcattctctatgctatatgctattcactccagtatgctnttaccttgatcacgtagatgcatgctttgttagggtcattcaatagtggaaactggtctgattctaaagtacttgatagtatacggctaagttatcgtattatcacgaggaatcatggcgcgataatctagttgtgtatgt

SEQ ID NO: 11453 - DNA, 347 bp, Glycine max
  unsure at all n locations
agctagcatgcttatcgttcgcgtgtattatatccactccacaaggtttgaagtagaggagagcttcaaccctataacgcaacatggcggacaaaagtgggcagtaaactttgaatggttgtcattgtcaatgcgataggtattctgcgcttcactatccatgttcacacattattgcagcttgtggttacgtgagcatgaactactaccaatatatagatgttgcttatacanacgagcacatcttnagagcttactccgcacaatggtggcctcttgagaatgaagcggctattccttcttctgatgacacatggacacttatccctgacccaactacaattcgt

SEQ ID NO: 11454 - DNA, 534 bp, Glycine max
  unsure at all n locations
agggaattnnnnnaggccgaganccctttttnngcattgnantangctgcctgtatacaatagtagcacncgctgctcaaggcagttntctcaaagaagctnctcanagaaagtttctcaaganagcctcctcattggagccacctgttgtctattaatagaagcctgtgttacaactggttgtacctttgtgaattgagagtcctgtgatacacaactcaaaagttaacttgctcttcctcttttattcccttcattattgagctggcccccttctctctttctttttcttcattaaaacatcctcttcaagcttcttatccaaggcacattcttggtggtgaagctccttcttccatggcttattcccttgtggatggtgcctcctctatactcttctcctttgcttncactgcatctccatggtggtgaagctcaaagatccagcctncatagaaaggctcacangcaagcttcatcaagtggtatcagaagcacaaagcttcaagaggtgctcttaaaccgtcattattn

SEQ ID NO: 11455 - DNA, 314 bp, Glycine max
  unsure at all n locations
attcctaaatgaaatcttgccaattcaattcnatctagatatgaattttttcccataatcacatccctaaagctggttgatcactctacatgcatctaacaaagattgaaatagatcactactaaggattgatagaaaataaaatacatcttaatctactttttcactcacaatcaaattaattcattgatcatatggccaataaactcaaagataatacattcagaagaagagagatttggatttattttgtaatacaaaataactaagctttttacatgatgtcaactctattgagactaatacttattttt

SEQ ID NO: 11456 - DNA, 493 bp, Glycine max
  unsure at all n locations
aggcganaanactgaagccttcgnanaacgacctgataccttgatctcgtctaattacatngtgtctgttatattgaggaggttgtttgccatttagannaagttatcatncggtggtaaactaactttccaagatgttgccttcgcaggaatggccccgatgaaacttgcctcanagatgtccatgaaagacaatgcggccgacnggactagttccgctcccgagtatgacagtcaccgctttaggagcgctgtacaccagcaacgcttcgaggccatcaagggatgggcgtttctctgggagcgacgcgtccaactcagggacgacgagtatactgatttcaggaggatataaggtgcccgagtggacatcactggttacttccatggccaagttcgatcaaaatatgtcttgagtattatgccaatgcttgccaacanaagaaggcgtgcgtgacatgagatcctggtatgggtcactggatccgtttat

SEQ ID NO: 11457 - DNA, 397 bp, Glycine max
  unsure at all n locations
attcttaagtcacctgcagctgcagctagatgattggtctaacttacattggatancagtgggctgaangaggcaagttgatctcttgcttcataaatgccaaaaaaacaaaaagctggggaaataaagaggggaggatgaaggacaacccgtgctgtgactgccattcctttacaccaagtttccgaccacccacagtgtcttactcaccaataaccaccttctcttaccaccgccattatccacaaagggatccctaaacaacccaaagtgtactaccgcacttcaatgacaacatacctttacatgaccagacaccaccaaaaatgatttgagcgaaaacctgtaaattaccccatccatgtctatgctactgtccatatctactgaaattaat

SEQ ID NO: 11458 - DNA, 488 bp, Glycine max
  unsure at all n locations
ggataattttgatccttcgaaagcacttgatacttgtttatgccttgcatccaagatcaagaagcttcctagagatgtctgtccattagcgcttttctattaggtgtttctgcaaatcaaaatctgaaagcccatccgatttaaagaggtccctttggggtacataaaccacattgggttgtgcccttatcgtacttaattgatctctttaaactcctgtaaagtgagactccttaggctagctngataccttgcacacaagcaaacactagacataatatctgctcggcttatagctatgtaaagaagtgagccaatcatacctctatnacttgattcatccactgaattacctctttcatctaagtcaagattagtggatgttgcgactggtgttgatgcttcttttgcaatttcatactaaatttcttaaatagttttgtacaatattttgttgacataagaaggctccatcgtccatttgcttn

SEQ ID NO: 11459 - DNA, 301 bp, Glycine max
gggatatggggcctacaatcaatattcggtatatggacagcctagatattttattgagttgcgaatatttcttatggctcatatttctatcggggagtgtccagatatcacatcaatatgttggaatcaatagtaagaaatgaagatcgggcttataaataaatacttaaaacagttctatttcttctttgtatctaaactttatgtatctactattatttataattcgaacttcatatcattcatagtcggtgcatataagcaaattatatgtagtttgtttacaaaactaatcaactta

SEQ ID NO: 11460 - DNA, 516 bp, Glycine max
  unsure at all n locations
agagagagatttttgaatgccnttacgaanagcgactttgataccatagcagctccnccactatatgaaagatgagtcgcaccaagctgggcaccacactgnatattgcgagggagccagttttgtccaaggagttatatgtgcatctgagaaccaatgatgacgaccagattcaacccatcgtagaaacatgtaccttccatcttggcattaaagaagaacaagtcactcaagttaaccacccactttcaatggaagataagaacaacttacgacaagttatccgagagcatgctaacctatgtgcatgggccgcgaccgacgttgccagcatataaccaaccttcccattgttgggaatatacatatgcagagacaccaaactcatagatcagaagaagagatagatgggtgaagaaaggtgttatgtagtgcggaaagaggtcgcaatcttatggcgaccgatttatcagacggttgctacccacatggcttatatatagtacgggaaaaaaa

SEQ ID NO: 11461 - DNA, 387 bp, Glycine max
  unsure at all n locations
agcttccttatgaagattcctaaagaagctagagcttagctacacatacctctctaatagctaagctcacctccttgagatgagaagctagagcttagctacacaccccatatagtagctaagctcacccctatgacaaaatacatgagaatacaaaaaaaatccctactacaaagactactcaaaatgcctcgaaatacaaggctaaaaccctatactactagaatggccaaaatacaaggcccaaatgaaggaaaaacctattctaatatttacaaagataagcgggctcatacttagcccatgggctcgaaatctaccctaaagctcatgagaaccctangggccttccttggatctctgacccaatctacttggagtcttcta

SEQ ID NO: 11462 - DNA, 321 bp, Glycine max
gcacgttctctccttcagaggactacacgttctcaccttcagattactacacgtgctcgccttcagaggactacacgtcctccccttcataggactaaaagtcctccctttcagaggactacacgtccacgccttcagagttctacacatcttcgcgttcagagggctgcacgccctcatcttcagaggactacacgtcctggccttcagtgggctacacgtcctctccttcagaggactgcacgccctcacctttagaggactacacgtcctagcgttcagagggttaaacgccctcacctttaaaggactaaacgtcct

SEQ ID NO: 11463 - DNA, 397 bp, Glycine max
  unsure at all n locations
ttagcttatcgcttatcttcagagtgaatnnacgaaaattcctaatttttgtttatttgtgtaatgagcttgagcttgatgtacataagtcttattataagcttaattatcttcttgtctagttttataaatactcagaaactcttaattgtgcttagtgagaaattaaacttgtgcttagagagagcttagcctcttctttggtttttgattganaacaaaattgattcttatcaaagaagctagtcctttgtggtgaatcctccttcggcttatcgattcttcgtgaattgtggcatcattctgtttatcttcttcatcttatccattatttttgtttttctcttcttgagttcttggaaagtcaaaaatggtggttcttgaatttgcaactgga

SEQ ID NO: 11464 - DNA, 426 bp, Glycine max
  unsure at all n locations
ntggcacaatttgagccttactttgtatatgccactgatgggctttacattggtggcatacctcaaccaaacactgtggcgggccctcagtatcgcccactacctcaactacaacccttacaatttttggtgggaggactacctcctgccatggtggtgtcgcaacctacccttttgtgggcgagcgaggcaaggctcacgggtgcgtcttccatgggaggaanatgcgcggagttgccaccaacgtttattgaaaggaaaatgttagaaaaaaccaaaggagaccggtcataaagaatattccagattcgggagttatgtttatgcttgaggaaggtattagcacctctcacgtttgtcccaaaggacaacagccttagattagagttgtgtgaaatcatgtatccctaaatttttgtctctttt

SEQ ID NO: 11465 - DNA, 353 bp, Glycine max
  unsure at all n locations
tttcttgnnaattatcttataanaaatcaagaagaagcttgttcgcacatggatcgcgtgtatgatatccactccacaaggattgaagtacatgagaccttcaatcctattacgcagcgtggcagacaatagtgtgcaattaacttgaatggccattatatgggatgccaacaggattttgcactccattatccatgttcacacattattgcagcttgaggatacgtgagcatgaactactaccattatatagagaggggtacacaaaagaacacatcttaacagctgactctgcacaatggaggcctgatgggaatgaagcgactatgcctccttctaatgacgcatggaca

SEQ ID NO: 11466 - DNA, 276 bp, Glycine max
  unsure at all n locations
tcgtataacattattagcttgacacatacttctttcatgggtcctataagggataatggtgtatagcctatcaatgcttgcaccatggtacgactttaatctctgaccattaactacccatgatctgtctagagtcgatgaatgaggatcaaacaattccacaaccncatatggcctgacctctatgatagtaaatagtcctgaccatctacatttgagcttgcccagaaataattccagtctggagttaacatcaatacttgatggctcggtctg

SEQ ID NO: 11467 - DNA, 375 bp, Glycine max
  unsure at all n locations
ttatcttancactttcggatgctctggataaaagcttgaaggtaggagaaaatgagtagagggagagggaaagaacggaatgaaattttgagagagaaaagagggagaatgaggtctgaactttgaagtctaatttctcaaacataagagttgcaaaatacacatacaaagtctctatttatagcataagtgtcatacaaaattagaacgaaatntgaatttctattcaaattcacttgaattgaatgtgaatttatggagccaaatttggagccaacatttcactaattatgattagagaatttcatctatgggtcaacccacttattccagatcaaatccaagattctccactaactgtgcttacgtgtcatg

SEQ ID NO: 11468 - DNA, 522 bp, Glycine max
  unsure at all n locations
gagtcanttttgagccttagaanagccacctgatacattgtatctacccactctatagaaccactaagcttgtcaacaggatacgcataatctgagtatcggtactaacctattatatctactgtgcttatagcagaaaccaaggtccggagttccattacaatatattcacgattctcttaatcatcaactcaagtcataattctcggtggttgtttttttgaaacctagcacacatgcatacacttaacatgatattatgtctagactcaatgagatatatgaggaacactatcatatctctatattgggcaccttctttgatctctcatccattccaagatatgtggttggggattatctatatgcacacgaccctcacccctttaccatcaaaataataaaaagccgtggagaaacgtgctcgtacactcgataaacgtctccatatcaaagcgacccattctattctacccagtatactacccgacatggcgatagaaataagcgactgtacataag

SEQ ID NO: 11469 - DNA, 329 bp, Glycine max
  unsure at all n locations
tttcnngccattatatattctgtgaggangcccatatggcttaagctggatgattcttttcttccaagttcatggccttgccgtgaaacccgcaccacatttgaaagaattcacattgtctgtccaccatgaacccccagatgtccaaaggacacattttctgaggcttttctcttctttaagggagtgcaaacgactgctgattaccttgcccaagtccatccgactgggatgacttaaagatatcttaaaatttttcctgttcagacccacctcagaagatattagtttaacactcatgaaaagctgatgatctggagaattaaaac

SEQ ID NO: 11470 - DNA, 290 bp, Glycine max
tataatatctaagttcaccctcatgtccatatacgtgaaactatagaacaagtccctactaccaagactactcgaaatgccctgaaatacaaggctgagaccctatactactagaatggccaatatacaaggcccagaataaggaaaaacctattctaatatttacaaagataagcgggctcatacttagcccatgggctcgaaatctaccctaaagcttatgagaaccctatggcctttccttggatctatagcacaatctacttggagtcttatatccaacgctcttt

SEQ ID NO: 11471 - DNA, 235 bp, Glycine max
  unsure at all n locations
agctttanatgtggatagnatgcagagactttgctcatctttggaacctcttctcangaaaattgtgagctacttttgctttccttgtattaaatcctgcataatagtagactgtagaccctctgtttgagcaattcttcgcanaagcagtggcatganagtattatgtaatgacatttagttacagtctgtagtttaaaatttttattacaaaaagaaaggaaaagaatacgtg

SEQ ID NO: 11472 - DNA, 368 bp, Glycine max
  unsure at all n locations
ggtaggattatggagtacccatcacctgtggtactangtggcgttctggcgatggtgcacaacaagttttccacatccacaaacaacattcaaacagcacaagctatcacagccaagcaaaacagggcaaaggcagaatactctgctcaaacaccaaccaanatcatatctttntctcacttagagaccccagtaacaattccttcgatccaatatcgtaaccgttggatcgactccaaaattttactggaagtctatagtacataagcctacattttgaccggtgggatctactagaaaacatccagaactcattctgcactagactttccacaggcaaccacacacaagcaattttctgcacaaag

SEQ ID NO: 11473 - DNA, 239 bp, Glycine max
  unsure at all n locations
agcttgtgcgtatcaaatcactcccgcattttatctctagcatgcattctttctctctttacccactcctcacgtttggttttttagggaaaaacaccataactaaacgcgccacaaagcatccctatcgcaccagatccaaatccagaacgatgggtgatcaagatgagacacacgaacagatganagtcgacatgtcggctctgaaagaacagatggcttccatgatggaagccatg

SEQ ID NO: 11474 - DNA, 359 bp, Glycine max
  unsure at all n locations
ctcaagctngaagtgatatcgaattactcgacttaagttctcaacacanagtatattttacactagaataaaaaggtatggtcaaaagagtattctatataaaatatatctcgatacgagtcctcgaactatagagtatcaacattgctaagaacaagaaatcacgaacaaccatactatctatgcnattaaggcaaaacaccatactactaacatacccanaattattaagttcttataataagtatacaacgtacatataagaaataagaatttaatagttaataaggatgtattaaagaatcacaaacttcaactactacattcacgactacacacaanataaagtgagttaagta

SEQ ID NO: 11475 - DNA, 522 bp, Glycine max
  unsure at all n locations
aggtgcaattttgaagcccttagaagagacagattgagtcctttcctgatcacgcttgtannaccacacannnntnagaaatgaagcnngnnagtgtatctgagaaggaagacagagttatgcngagcagtttcacncccacacgcaagagagacacaacagcggagagcaagcacacgacgcaagcacancgcaanccggcggcccgaaacccaggaagacaacgaagcacaaggcgcaacgaccagaacagccaacgaagcacaagcaagcacaggcggaccaacgaaaacccacacgggccgaaagcccaggcccaacgagaggagcanacaacgccaccaggacacacgaacaacgggaccccacggaggacaaagaccccaaacgaacgacaaagcacaacaaaacacaaaggcaacnnccagcacgcgagacgaccnacacgggggacaagaaagcaagccggggagggcacgaacagaacccncagacccgaccgaaaagagaccagccagnacg

SEQ ID NO: 11476 - DNA, 467 bp, Glycine max
  unsure at all n locations
nntttttttctttttcttntatcnanattcattctnnatcaggncnnannnngngnnnnntntaaaccccntttaatattctncccnccannnnnnaaagantttttaaanttnagaaaacccccaccacncnccnnnccnnannnncannncnaaaaccaaaacaaaaaaaaaacaacaacccaaaacaccancataaatccacacacaacaccaactaaacaaaaataaaaaatataaatacctatttttccaattattatacaaactttatataattaattttttatctatcatatacaatcctctatattctttttctatatttaaataaatactcaactatataaatcattataatcatactactttcttatacaactattttatcaatatactatataaaaataaattatttcttaattatcaaaatattatatcatttctctaatacataatcctacatt

SEQ ID NO: 11477 - DNA, 338 bp, Glycine max
acaaaaacacttccaggcccaattattggtaaattcattgccaagttgggaatgattaacatctattcgccaacttgatggggtatcacgattaagcagatggagttagttacaagaagttatttgagtagactagtggttatggcaggtagatggttactacaagatatttgagtaattagttggttatgacagatagttagatactagacattatttgagtaaactagattggtactcaaggtagttattttctgtcttctgataaataaaccaactctgtaatactatgatgaatgaatactcaaatagttttcatctatctttcatttctgata

SEQ ID NO: 11478 - DNA, 566 bp, Glycine max
  unsure at all n locations
ntcntttcaagttcgttttccgaatntcccacnctctngnnnatnngccagnccgcnnacatgnccttgcacggcagcttccattacgtgtttatcacttccacncgaccnngangncagaagggagntgcttaatcatgtagtgactccatgcacctccactattaaaaaaatatgttttgtaacattcgtcaaatttaacatttgatttttatgaaaaatctatgataagtacaaagtatgggtgatattttttgaaaaataaaatgacttttgttaacattcgattntataanaatcgatgtttgtgtatatttctctttaacactagtttnttattataaaaaaaaaaaaaaaaatcaatggttatttttttacttcgttaacagttggtgtttgtaaaaatcgatatttgtgcattatctctctaacaattgnngttttgaataaaaacttgatgttatattttttggctcgttagccgatcaattntaattcagataaccgattgttaaagagattattacacaaaacatcggtgtatttannataagtcgatagttgtg

SEQ ID NO: 11479 - DNA, 274 bp, Glycine max
aaaatttattattataaacgagtaagtataaataattttagaaaaataaaattttaagatataagaggtgatattacactattaagaataggcaatttctttttttgaggatcaatatgaggggggttatggatatatctaccaagaatttgaatatttaaaaatggaggagaaaatttttgctgaaaattaaaagatataaataggaaaataaatctaaaaagataaaaatatcaatctattttaaaaactgagatatttatttatttattta

SEQ ID NO: 11480 - DNA, 531 bp, Glycine max
  unsure at all n locations
cgtatcccncnnnnnaaggggnnnnnnnnnnnggggatagtcattatccttanatttgacancntngagacnacagcnnaanacagactncagagcttggatccttggaaagatcccacctttctgttgtctaatattttgggcactggacacgaggccactatattgcaaagagagagagagagagtggggaactanaaacactttctacaccataatcttaagagaagtcaaatttgttagtgttgcctagtgcttcaaagtgacttttcgcgtacaaatcaaaaaaaacattacaacataagataaaaggaattaagaagatcaaaacaaaacaatttaaatcttcccttttgtgtggctatgacacgagtttctttattgagcctatggacttactttcttgtgattgtttcaatacttgaggatcgagtaactgttccattgctttcatatagcgagccaagtgctaaagcacttatcttttcatgactggaggctgaagtagcatcatccaatgattgatatttn

SEQ ID NO: 11481 - DNA, 429 bp, Glycine max
  unsure at all n locations
agcttgttgtttttaagattacatctatacaaaggaatttttgatggggcagcctccaagactccattaagattccttgggtgaggtgggacatagtctgcctacctaagagtaaaggtgggttagggatcaaagatttgattaaattcaacgaggctttgcttgctaaatgggggtgggagttggcaaataatcagaatcagttgtgggccacaattctattgtgtagatatggtggttggagggatttgatttctcatangaactgcagtttagactctccttggtggaaagacctcaaggttatcttcaagcagcagcaaagcaacacaatttgtaaaaatagctctattttgcccatangtaaggacggtccatggaatacaaaccaagtacttattggcttgcaacaaaaaaacactcattgga

SEQ ID NO: 11482 - DNA, 380 bp, Glycine max
  unsure at all n locations
gagtatcnggaatgaccttaagcaaactacnaancnngtttagtatttcgctatganngncacctacgccttcaattaaagatttagtttttctaagttccctattttttcgtttgcccttatcactaactttgaaaggtttgaataaaggtttttcaatggggacactcngcgaagctttctcaattgatttttgtttaagaactnaccttagtttaatggtttctcctaaaacttgtaagtattttgtggtataatttgcctgttccattaagcttttaatgtctctagaggttacttcctcgttgacatcttttgtcttgaatggaattgccatgacaagtttgtgttactgtctttatatttggtagttgatattg

SEQ ID NO: 11483 - DNA, 506 bp, Glycine max
  unsure at all n locations
agggatgtcctttgcatcgacantcggcaattattctggaaccctgcgagcctctanagaggccctccggcgcgcgcgcncgcgnatactatgcgagtacggaagacgaatctcaggggttctttgtagtcgattaccaacgatcgaccactatgcatatggtgcggactatgtgccatattaggctagctgatgcaccatcagatgtgcatgtatccttaaaagatggagctccccacgggggtaccagcaatgaaattgaagcgaggataagatgccactgctgtagcctatagagttgcaggagcagaaagatgtgaggtggtgatgctgctgatgagtgtactcanagtggtattgaagatctggatgttgagtgtgccaagagtgtgcttgatgaagatactgaaattgttacaactgctgaccttatgcactaactgcgtacgtgaaaacgatctgacactcattctttgagatacactgaaataatccggtgagatggn

SEQ ID NO: 11484 - DNA, 495 bp, Glycine max
  unsure at all n locations
aacccgaattagccagtcgntcnttcgatnncntngtananacacacnaatcnagaatnggccgccataaagaagacagagggctagtcaggcctttatcaacatttttctnccgacgccggcgagagggagaggggaccaacgcagtcatcgcaatgatgggacaacacgtgtaaaccttattacacattctgagaggatcgatgccatagggacatacccacgttcttctctatcataagccatcgaacatgactccttggaaatgcgatcaatccatgtggctatagcaagacttaaatgacgggagaataataaataatgataaacaatgtggaagcaacgagatgaccctgcaatataatcgagtacatcccatctttatcggtccatctaacgtaaatagacgtgaccctgataaaagaaatgtagccaataactctagcagtccttgtaggagcgcataatagaggttctaatgacgctgatagaacn

SEQ ID NO: 11485 - DNA, 334 bp, Glycine max
ccacgatcaacaaactactttccgcacctactatatgttgacttgaccaacgctgttattgtaatgctgcgacaatctttcaacaccttattgacacattctgataggttggttgtcatgtgaccatatctatctccacatgtatcacacaccatgctccatttttccttttaaatgcgatcaatccatcttgctatggctggactcatctgaccaaatatttctaaatcttcatcaaacacatgctctcaatgagtgtacactgcatcaaatatgttatcatcaaaagttgtacgtagacatcacactcacattaaattaatgtataaaatca

SEQ ID NO: 11486 - DNA, 499 bp, Glycine max
  unsure at all n locations
nccttaattcnccctcagccctcctccntcacgttctnngtcgnnnncnnaannnnngnnnnnantattananacatntttttaacctttaatncacaaaannanncnaaagangnnntcctaacttnnagagcaccaccaccaccaaatnntnnnataccaaacactcaaaccccttacaccaaaaatccatctataactacacanatactaaatcccaccaaacaatcccaccatatatacaaatgatgaagacggcttgcaatttacataattntatacccaaattatgttacaagagaacgtctttgaagaaataagtaagtcttctacaaaaaggaagcctcaagttgcctttgcaattgaagaaaaacaaacctcattaatttaaggcttaacatctaaaccgatccaattgttggtgttggtcaagcaaaaaaagcgctttggttgagagtcacgaaaaaatatatacaaatntcgaggtgaaactctgaag

SEQ ID NO: 11487 - DNA, 249 bp, Glycine max
attcctattttgactgctacaccatagaaagagacatctttctccctatctcttctattgcttcgcattaaatagcaagaggtgtccatatattgagcctaattttttatactcgctcatgcatgttgaatattttgacaacattaagttttttataatttatgaatgagccttattgaaggactgctgactgttaaaggtcatatataaatcactatcccagtattataatttataatactaatttga

SEQ ID NO: 11488 - DNA, 408 bp, Glycine max
  unsure at all n locations
agcatgacttacgcctattaatctttgttcggttttgaatgcaagagggcatgaatattatgacatgtttgagaggttttttattacaatttaaattggctgcctcatgaggaataccttgcacctatgtagcatggaaaatacctttcaatggtatgtatatatgtgaatatatatagcatggaaatgccttgcaaagtgtgtgaatatatggcatatatataccttgcaaagtgtgaatgtatagcaaataatgaatttcaaaaatctgtatatgtaagataggtagcgtaaaaaatgcctttcaaaatatgtatatttgtgggtaggtagcataaggagcctttcaaacaaaatgtacccatggcaaanatggcacgagaatgcttcccaaatgaatatatgatg

SEQ ID NO: 11489 - DNA, 398 bp, Glycine max
  unsure at all n locations
agctnttattaattgaattaanacgttcagaaactgctggtaatcgattaccatatatgtgtaatcgattacatagtgcnacatttgaattcaaattttaatagctgttgtaaattacttttggccactagtaatcgattacatcctctggtaatcgattaccagagagtaaatttgtttgagaaagactttttaacttaaatntcttggccaaaccttttgctacttcaattggaattcccttcctatttaatataccctttctaagactctagagactgtcttgatcatccatcttgaatatctttaatatctttgtcttgaataaagctatgagacgcatgtgaacctatggcatcatcataacattcagcttgatcctttgtctacaattactt

SEQ ID NO: 11490 - DNA, 444 bp, Glycine max
  unsure at all n locations
agaagcatgggancctgaggcatcaacataacttttcagcttgatccttagtctacaaatngaggcgtctggaaagaattattagtataagtgacccttcttataaaaaattccgagaaaaaaataagcatcctagttggacattttttttttcaaaaaacaatgtgccaccaaaactacacatagtgaatagttgggcatcactctctataccaatatttgatgttgtggtagcggtgtgcatgggaggttagctagttgcccgttataggtggttccttgaaaatctagagagagaaagagatagatcattaatcctatttaagtgcctcttaatctagcttatcttctaggataaaatattatgctagacanagaagatagggataagagatganataacatctttacatcctattgaccaactaacaataaattacgatc

SEQ ID NO: 11491 - DNA, 389 bp, Glycine max
  unsure at all n locations
agcttattgtttattatggangttatntacctatgcttgatgaagataggctcaagaaaacttggtaaagcttggaagaagagtggaaatggtgtctcctttcgtcttgaccagttgatgaagaagaggaagaatgagcgtgaatggtgagttttagagtttaaatgaacttatagaagaagcttaaagcatggtctattggattatggagttgatctatcctaatcactcaatnttgactcatgaatgacccttgctcagccatggagaacatgtacatcactatcgaatgtggtgtgcttcactcttgaaactcttacttatanaaagctaaagtagacttttgccacaaatgggtattctttgcctttatcaaaactagtaaattc

SEQ ID NO: 11492 - DNA, 218 bp, Glycine max
  unsure at all n locations
gtgactggagtcatcaagagattataaagatgtgattatgacttgagtntcaaatatcatccttagagaatcgggcatcaatcatctttgaatcatctatctttcaatcttttcaacatcatctctcaacatcttgcaatcaatcttgcaactctgtgtacagagatttctgattcatttctcttcatctttctaaaaggatgtgatcaacactgtct

SEQ ID NO: 11493 - DNA, 418 bp, Glycine max
  unsure at all n locations
agcttgtttgnggngcttctacggaggctggatctttgagcttcaatgaggtcctttaatggtgattttccatcatggagatgcagcggaagacaaaggaaaagaggtgagaggaggcgccatccactatggaataagccatgaaagaaggagctttcaccaccaagatgagccttggataagaagcttggagaggatgcttcaatggaggaaaagaaagagggagagaaagagagagggggtagcacaaagttgaaggaagaaaaagggagagaagttgaactntgagttgtgtctcacaagactctcattcatcanagttacaacaagtgttacacatgcttccatttatagactangtagcttccttgagaagctntcttgaganaaacttctcgagaagattctttgagaaaac

SEQ ID NO: 11494 - DNA, 206 bp, Glycine max
cctgcagaggactgtctaggatccgcggaaacgctgcttctacttcttgcctatcgatgtacaccaataacgggttgagatggccgactgatttacttcaggagtgactgctataaccgggcaccatgcgatataaatgatcacgcatctcttcacaattgatgcagatagggacatatccactatgatcgatcacattgaccatc

SEQ ID NO: 11495 - DNA, 407 bp, Glycine max
  unsure at all n locations
agcnngtaagtatttgtgactcatgagatccatggaaagtaagcatttcttcatttaaattgcgaacttataatttttccttttttgcttcttgtaacaaattaggtcagaggaaaaacttggtttcaaataataacaggacctaacatgggtgggaaatcaacatttatccgacaggtgcttatcttctgttccattttattgtaaaaattaatcatcatttgattgtcttataaattttattgtcagatctcatccttctacttttgttctggtgttaattatgaccatcaattntgggtgcccgaatattctttctgaagacattttagtcctcacaattcacatacttgcattcttgccacctgaggttggagatttggttaacagtttttattcctatatgt

SEQ ID NO: 11496 - DNA, 451 bp, Glycine max
  unsure at all n locations
cgatactcagctctatcggaagaatcgggaggttatgttttacccccactanaaagcctgatgaaaaaccacccgtgtgagtgatcgtaaaaagaatgctacaaagtgtgtatagattctacttcaactaaaatagcagccttatttgatcacgtgtgagattccagaggtaaaacaggtcaatcaagcggaaagtcacgaataagaacaaattcgtcgtataagccagcgcagatctgaaaacatcgcaaaccgaaaaaaaaatgcagaaacaaaggcaagaccgaaaacatccccanaattaaaaataaaaacaaggcaaagaaaaaacggagaggaggaaagcaaacaatgcaatctgtaacgaanatcagaaccccattgcctcgaaattcacaacgaacagacgcatccagctctcattattatgttatgctttaaaataataata

SEQ ID NO: 11497 - DNA, 228 bp, Glycine max
  unsure at all n locations
agcttgagatgangaagtgttgaagggtgaaacttcctgcttttattgttgaccacagagtggtacctggagatacgtcgcggnggtcaggagaccttgnggacgtcangtggggtgctattgcccaaaaccaagcttgaccaatcccgacccaacccgggcatagtcggtcagtgagaacctgcgatgtacctaagcaggcgagctcctggcagtcaacagataaaa

SEQ ID NO: 11498 - DNA, 194 bp, Glycine max
  unsure at all n locations
aactcaagctntnntcatcacctaaaatagccatttttaagtgttcaatgcctttaaatggncttttccgctggtattggttaaatgtagatttctaaaggcctaaaatcaatatgtaactttattacctatttcaaaaataaagagatcattaatgggccaatgccttaatgtttttctctcttttcaaaaaa

SEQ ID NO: 11499 - DNA, 313 bp, Glycine max
  unsure at all n locations
cataaacttaggttatgtatganagagactatgtttggtaaaaatagcttataagttagctaaaagcttataagctaattaatttaattgcaagtatttggtaagactaactgatatgttgacagataaatgtcaaaagacatagaacaagatagtcaattgtgcataggtttagtttacaaaaagtgaaatattttattttatgaattgaatcgataatataaaaatcatgcacggaaacaaattagaaattatgtcacatatatttagaaaaaacatagaatggttcatcaaataattgtanagttgatat

SEQ ID NO: 11500 - DNA, 483 bp, Glycine max
  unsure at all n locations
nggggnccggatangctttgctntttgannnctagacnancnnagacacataccattgattgatttcttatgaaaagttgtgntttttctctattcctcacaacgtaactctttagtgattgcttttatatagaatagcaaaatttgtaacttttgccaaactgcacaaatgatgtcgatgtcaaatttgcatagatcactagaaggggttcagagtactcattattgtaggggtcttttggggacttaagcatgttatggccataccatattgacatcttggacagcgctaatataactgatatatatttaccccttacgattttatggctggagaattgtgtgttcgtgagtatgtgttgttatctagaggtagagaatgcgtgcatgttatgatcttgaatcgatataactaaatcccctgatcaatcctgtggtgatgtggaacactttttctgacatatgttgtcattgctgcaaagg

SEQ ID NO: 11501 - DNA, 499 bp, Glycine max
  unsure at all n locations
aaaannaaggttggactgggatttgnanancttaaactangcacanaacaggcgtctccganacttattaagaggctncgatttcactctaaacatgttctcaaaaatcccaacggtcagatcatgtaaacttgtcttgtgaagttgcaaaccaaaattcccgaagatccaacggttaatgaagcttgggaagcgtttttaccgaggcagcttcatgtagctntttctagaagcttcattaagaagcgttctccagaagcttcctcgtggcgttcttgagaagctntctcaagaggcttctttgagaaactagatccttatctatccacacccctctattaaaataaataactttcttaanaataattacggatgaaaatatgcgcaaaataatcaaacatcanacataattactaataatatatagatatatatatcagggtgttacagttntcgggtatagatccctttaactatccctcatatgatgtttgaccan

SEQ ID NO: 11502 - DNA, 401 bp, Glycine max
  unsure at all n locations
agagatgantgaagggagaggaagagaagagtttgaaattttgtgctctaaaaaagctctgaaatctgaggtttattattcaaaggatcaaagtggaaaaaaggccacaccatgaccttttttatagcctaagtgtcacccaaaattggagggaaattgaaatttcaattcaaatttcactttgaatttgaaattgattttgtggaaccaaacttggagccaaaattcactaatatgattagtgaattttagtatgattcagcccactaatccaagattctccactaagtgtgcttaggtgtcatgagacatgtaaagcatgaaggacatgcacaaagtgtgactatatgatgtggcaatggngtgtagtaagcaaatggctcacctcccctctaaaattt

SEQ ID NO: 11503 - DNA, 396 bp, Glycine max
  unsure at all n locations
tatgcttcacagncgtgctatgcttgtgaatatgtttcttctcaataacaacacttaaaagctattactatagccttatacttctttgaaaatgctttgaaagatcttagagagatgtcaatcgaaaagaagccacattccatctcacaaggcatgccaaactagaagaaacaaacattagggcatgaatgtgataaaaaaatcatatatcataacatcttgggtgctgacgaaggtggggactgatcatcgatgcaaaagtgatgggggcacaaactaggaacgacttatagcacgcttctaatgggagagatacatgaatgaatcaaattcactcatgaatgagatagatctaaagactgtgtacgtatgagactatatgattgaagatgatct

SEQ ID NO: 11504 - DNA, 408 bp, Glycine max
  unsure at all n locations
aagttcggaacgggaagaaattaaggttgcctctttcacacaactaatactncatcgctcagggctataaagatgtgaacaaaagattagaacatangagaccaatgaacatccttagatgaaagaattactctaatacaatgtctntggacaaaacataaaacaatatatgtgcacaaaataggtaatcctttgttctaacaagtcatttgcaatttgtgctaaacttttatatccctacacttcgagtagatttcttgaaatctttctaaacaatcattgcttgtgaatgtcagaagtgacttgactgtcaagaagacttggattaanggttctgttgtggcacaagtgagataacaatacttgatgtacttagaagtgacatcaataatgtttattttgatattt

SEQ ID NO: 11505 - DNA, 465 bp, Glycine max
  unsure at all n locations
ccccagccccgttcangactntggcaatnaganagaccgcgagccctnaagcaacctgaggcggcaacnnctatattttgttncaacctatctttgcaggaaattcgcaaaacaaaagggcataactttcaatcctctccttgcaaaagaatcaacaggctaatcgctgaatctttttgtgtctctcttctcccttttccaaagtatagagggaccaccgcctgaatctttgggtctcctttctccctttccaagagattcaaaggactaatcgcttgagaattctttngattcttcccttttccttaaacaaaagaattcaaaggactaaccgcttgagatatctnttgcttccccttacanagattaaatagactaaccgcctgagaattctttgtcttaacacattggagggtacattctttgtggtacaagtagaaggtacatctactttgattgttgaan

SEQ ID NO: 11506 - DNA, 323 bp, Glycine max
  unsure at all n locations
agagaatagtctacgcttagcgcaacagccgccttattgctcttccaagagttcaaaaaccggaagagattggcgcttagcgcctcctggccagctaagcctagcttanaagctcaagttacaaaatggatctggggcttagcgtaggatagcgcgcttagtgctgatataatgaaatgtttacatagtaaaagtcgcgcttagcgcatcattcacgctaagcccacaggttaaagttcaattaccgcaaagatatatggctcaacacagtgatgtgcacttagttgaactattcaaccaaccaatcangggtctgagcgctt

SEQ ID NO: 11507 - DNA, 230 bp, Glycine max
tatgtccgggggcacgagaccttgggacgcatgtgtgggctattgccaaaccaacttgccaatcccgacccacccggcatattcggaagtgagaacctgtgattacctaacaggcgagctcctggcagctacagatacaggaaccagacccaaagcaggacgcttgggggctgccactgagaattctggtgaatagggtcgggccttggaatcataccaagggggaatca

SEQ ID NO: 11508 - DNA, 401 bp, Glycine max
  unsure at all n locations
gcatgctgaatcttaaggatcccctatagacgccgctttcgttactgtactacacacgtgagcccacttagaggtgaaggatggatntatcgcaattggggttagaatgaacatgtgtagggatccttagaggatcaaattgaaatttattttgggatgtttattggattgtaattctgcctttatgattataatcatgagattgttatgttagatgggccaattgatgcccttatgtgaattggttcaaaaagttgagtgctattggtgttctcgtgtatttgaacctatgattttgattcctttgattctgatatgattatgtgaaatagtttgaggcgtttaatcatatgaacataacatattaatattattactatgtgacatgtatatgatgcatg

SEQ ID NO: 11509 - DNA, 55 bp, Glycine max
  unsure at all n locations
ttccgagttctaatncctcttatagagacggggacgagggataactggacggtcc

SEQ ID NO: 11510 - DNA, 334 bp, Glycine max
  unsure at all n locations
agcttgnctccagtcatccataaacctatttggaacatgtgacattgtgcataccctatttcgtccggggattattatttgatgaatatacaaccttgattggccgcttcaagatacttggcaccctttgttgcacaatatgtgaagtcccgagatgtgccgaaaatcaaaaggaagcatgcttacgcgatccgtgaaaattccgtaatgtgacagacatcganaggaagtggttttcgcaatccgtgagttttcgtaacttcttcgaaagctaaaaaagagtaaatacataatccgtaaggattcgtaaccttgcggaaggaaaataagtatc

SEQ ID NO: 11511 - DNA, 190 bp, Glycine max
  unsure at all n locations
aggacgccccgcggnaggcggtgacacaaatgcaaaaatgatgacccggaaaccccatgcgaaactggttatgcatgcacttatgcggacgctcaagtgtggagattttatggtcatgtgatgcttgggtgcaagatgcaattcctctagtgtaacaaaacccggtgtgctcaggataagctcttatatc

SEQ ID NO: 11512 - DNA, 307 bp, Glycine max
  unsure at all n locations
aaaaggtttgactttttcaatgggtttaagttttctaaaagtatactcttctgaaggtcttcttgaccagacataaagagctataaagcaggctttgtttgcattttgaacaatcatttcaatcttgatacttntcaatcattcaaacatccttacaagccttgatcttttaacttttcttgtaccaaacttttgagttactggttttcaaccttgaaactgtctatcatccttcattctcttctctttgccaaagattcccaagactaccgctgatattttgatctctctctctctttcaaaaaag

SEQ ID NO: 11513 - DNA, 431 bp, Glycine max
  unsure at all n locations
agcttanttagtatctgcgaattggnngaaattgnnggagggtgaacccgtacagtaattttctagttntgcctctgctgacaatcacaacatatcaacaacgccatattcagtagcaactaaaggatgtctccctgtattactactgttatttcgccaatagaaaatataatgaaagaagaaatatgattaaactccgagtttaatgctataattttgtaatcagatgccagtgtaaaattactttggtgcataacctaatttctcttaaactattttcataagctatgcaaaaccaaagtaagcttgaaataatttatggagatatgataaactcttttcataagaagtgcttaatcccaatttatccatttaattcctaggtaaaaagctatggacaagagtatggaccatatatatatacttgaact

SEQ ID NO: 11514 - DNA, 659 bp, Glycine max
  unsure at all n locations
aaccccttacnggtggggggggggcttttngnnacnnnttcgnaccanancgatgacgtancattagnagccanctnagagccctatgtagcatgatagacgtgacagcatgtacactgacgagcaagcacccctactttactatgtctcttataacanactactctncnntatncncccagtgagagatcagtagagcgtcatgtcatgtcacatctacgttcatgcataagtcgagagacagtgagctatgcatcgtagctcgcatgcacatacaactcttggcgtgcatcaactatgagtgacttctctcctcaatatgtggttngaccccacgccatcagagatgtgtctcaatgacatatacataccctcgtcagtgtctagtacagacaagacatacacactctcacgagaagatcgttccactcccaccgcagcactaattgcgcacttcactcgatgagtgagcacttgcatctcctcaacttaggagtgatctccacaagaatcaggagtcctccaaagggatagggcgtccatcgttcaaccagcatatagcaagcactggtcaatagcgaggatattaaactcaatgtacttgagacaaagacatgctcactggactctccgtcattctgatcaatagacatagcaan

SEQ ID NO: 11515 - DNA, 425 bp, Glycine max
  unsure at all n locations
agctttttggatttaaacatgggaccaactcattgtatttcagaaaaaaaggaagtcgtatctagtcaaggtctgagagaccatacaagtttcctaacgatttctaattatgtgggccattaagtctatcatatgctgacaatagccgagaagcccatgaatctcttcgggggtggagtaggtgtctgccattgccttggccttggctaacaagcggngaagttcttgactcccgttcaaggtaagagcgaaccggtccatccacatggttgcctcttggtgtaaagagtcgatcacccttcctctagcctctttttccgcgtatacttgggcatactcatccgcgattctatgctcgtgggccgtggctagacctaactcttcttggtacttggcgatgatagctaacatgttggtcttcgtct

SEQ ID NO: 11516 - DNA, 449 bp, Glycine max
  unsure at all n locations
actcaagctataagacaaaattgctcaatctttttcattatgcatgttatttangaagcatgaacaagaatcaagccaaggctattgtgcaagcaatcaatggggcaaaacacaccaaatgattatgatgatggatggctcanattctcacaaaggtaaactcatcacttccaaattgagctttcaaaactatcatgacatgtagaggagaatcaaggatttcaagtcacanaatgtcaaaaactcttattttcaaaacaattacccatttcttgaacatatcctataattcacagaaaaacatgcatagtcgtacatgcacacaaaattgacccaaaatattaaactaaaaatccgacgaaactaacaacattaacaaattaacacaactaacaacttaacataaccaacaaaacttgcagaaccaaagaacactcccncgctatact

SEQ ID NO: 11517 - DNA, 413 bp, Glycine max
  unsure at all n locations
agctttaattttcaattacgagcgtctcgatatataacgggactcaatcagacatccgagtaaaaagtaattgtcgtttgaatttgctaagagctgcggtattcaatttcgagtgtctcgatatattacgggactctatcagacatccgagtaaaaatttattgtcgtttgaatttgctctgagcttcaacattcaatttcgagcatcccgatatattacgggactctatcacacatccgagtaaaaagttagtgtcatttgaatatgctctgagcgtcaacattcaatatcgagcgtcttgatatattacgggactcaatcagacatccgagtaanaagttatggtcgcttgaatttgtccagagatacaacattcaatttcgagcgtctcgatatattacgggactcaatc

SEQ ID NO: 11518 - DNA, 334 bp, Glycine max
  unsure at all n locations
aataacnntttttactttcggatggtcgngaaattgagtcacagtaataatgtcaaagacgcctcgaaatatgnnnataccgaagctctgagcnaaattcataacgaacaatacctatttgactcggatgtcggattgagtcacgtaatatctcgagacgctcgaaattgaataccgaagctctgagcgaattcatacgacaataactttttactcggatgtgcgattgagtcccgtaatatgacgagacactcggaattgaataccgaagctatgagcaaattcaatcgacaataacattttactcggatgtcggattgagtcacgtaatatg

SEQ ID NO: 11519 - DNA, 294 bp, Glycine max
  unsure at all n locations
tatggangctggatctttggcggcgatgaggtcctttaatggcgatcctccaccatggagatgcagcggaagacaaatgagaagagaagagaggaggcgccatccactatggaataagccatggaagaaggagcttcaccaccaagatgagccttggataagaagcttggagaggatgcttcaatggaggaaaagaaagacggagagaaacagagaggggggagcacgagatcgaccgaagaaaaatggagagaagttgcactctgagttgagtgtcacaagactctcattcat

SEQ ID NO: 11520 - DNA, 488 bp, Glycine max
  unsure at all n locations
ggggnnngggtgagctangacattgaatcttagactaagccncttagaagattctagagagctagagcttactacacatttctctctataccaaacttaacctcctgagaagagaggctgaacctaacttcacaccccctatgtaactaagcgtaaccccatgattaaaaacatggatattccaaanaagtgcctactaccaagaacaactcaaatggcccggaataccagggttaaaccctatactactagaatgggcacaaatccagggccagaccatggaaaaacctatatctatatttacaaaggataagcggctcatacttaagccattggctcgaaatctacccttaggctcatgagaaccctaagggccttcccttggatctctanctcaatctacttggaggcttctacccaatgcccctgctgggtnngatgcatcattccctcaccttggaaggatttgactcccatcccaagtcttt

SEQ ID NO: 11521 - DNA, 283 bp, Glycine max
ctctccagcaaaccagtatatatcatcaaatccaataatataaacagtataaagctcaccatgggtttatcaatagttgatcaatttttagatgatcgataaccagtgatcagctaccacagtccccgttaatatatttgtaatgagttcattcgttcaagcaccattaaagcaacttgtaacatctgtctagcttttctatcaggagtgcatctatcattctccatttccttgtaaataatgggaacctgaccataatattatcaatttatcagcatgaaat

SEQ ID NO: 11522 - DNA, 447 bp, Glycine max
  unsure at all n locations
tactataagtcaagtacaatataagtctcattttataatgttaatncagtaatataaacatgagaatgttaaacaaaatatattattaatatttttaataccgggtacattatgcagtttttttttttttttattgatactcagtcatattttggctcaagtgatccagagcacatgcaatttttgtcttactttctatcttatattattcccatttctttgcaacttgaggtgcatggctaaacctttttcattacgtagactaattctcgcataaattggactcctacatgtcaatccttgttcaaagtaattccgtaaggatattctagcgtatcattttaactcttttttaatatttcttcttaaaaaaaaagctcttttttatatgctaatatactaagaataaaatattacctcagcagacaccaaaatgggtaaatagtg

SEQ ID NO: 11523 - DNA, 490 bp, Glycine max
  unsure at all n locations
aaaaattagctgnncatcgatntcgncaatnataagnancngcganncttnagncgactgcggcatgcagccnnatagtcnatttagccggaaccccaagggagggggggttaacacacttcctttgaggctatagttaacccacctccccaagagttaccccccccccccccccaaggctatataggcttggaacatggtaagaggcccaaccacgaatctaggatagattttgggatcattgaattagggcttaaggtctatctcaattccacaaagctgactttaaaaattcatgttgtaaggtgacgattatccatgccttataagaactacattgtgttatatctcaagttgatgaggggtcttaatgcgcccatgacccacaaacaaccccttatgtgtaggantaaccgtttatggtggtacaaacgcaggtcacccaaaatggatttaggttatctcttcaccatttaaatttaagttacgg

SEQ ID NO: 11524 - DNA, 263 bp, Glycine max
  unsure at all n locations
nccatgccaatgcgaactgaatccaacgcaaacccataaccaanttctattaaattcaaaacgggacgtagttcaaagcttaaatcagcgttacctttcaaccaataagctaatccctgacttaatatgggaactcctctttaaaccttttaattatgctatttcagttatcatcagttaatgcaaaacttaaggactaaataaccaacaactgaacacaatgtgcaaacataataatctacacgttctcaaattaataaacc

SEQ ID NO: 11525 - DNA, 183 bp, Glycine max
atgatattgcgcccattccgataacttgagaacaggttcttgagcgggttgatggcatactatttttggaaagaccaaatagaaggacacaaaagttaaacttccatatggaagaagaggtcgatattatttgatcttctatattggaccgctctatatgtcagacattgtattgatcttatg

SEQ ID NO: 11526 - DNA, 500 bp, Glycine max
  unsure at all n locations
ccactcnagctgggcagggggttgnacanctgtaannatagagccagcagctnggacatngaggaactgaggagagcagaaccnacttttgttacttttataccnanangcgaganngaggacgatgtgatattttcttagtccacaacccctccccatagagcaatgagccgtcatatcatgacctgggtaatcgagtgaagaaatggggatccacctacgataaacggcgtgcatttgaaagatgacactagattgctcactcatgcggatgagaatgttgagcatatcatgaaagctgtaccgagccattcagcaccagcacagagaccaatagatgatgattcctgcacccgcagattccaatggtcgccgaaggatccaaggttgcactctctcgaataaggaaggactcgttcctttcacaacatacaactgtgaaacatgctatgcacgttagctatggacattctcggagagacagatattgaaaagatgct

SEQ ID NO: 11527 - DNA, 190 bp, Glycine max
gcaaagaaagaacagttcacttgctctcaagtgacaaacagagtggccaatcaaaagaaaatggtgcttggctcatcaaggatatcaaccatatgaactaaatatcatggaatgcttaaatcaatcacttctaacaagcatgcagcttttcacagataagatcacaagtgttagagtcataactgaaata

SEQ ID NO: 11528 - DNA, 326 bp, Glycine max
  unsure at all n locations
agctatcatacgcatgtccgatacangcgcatagcgtgtggagactctaganatctaacaaacgaagctctcgagagattcacatggtcataacttttcactcgcatgtccgatacaggcgcataacatatcgagacgcttgatattgaacaactgattttctcgagaaattcaaatggtcataacttttaactcgcatgtccgattcaagcgcataacatatcgagacgctcgacattgaacaacggatgttctcgagaaattcaaatggtcataactcttcactctcatgtgcgagtcaagcgaataacttatctagacactcg

SEQ ID NO: 11529 - DNA, 448 bp, Glycine max
  unsure at all n locations
cactatagaacctcaagcttcaccttctggtcctcctcatagttgttgcatgagttatacattctctattttcatctcccactccaagtaggcctccggatcattctttcctttacatggaggaatgttgagtttaataccatcaattcggttttgtctaggaacaccatcattccctcttctcctcctttcttcttcattatgatctctattctccatttgatccaacctctcatggagcgcatcatctcgttgtttcattaacctctccaaatgttgcatcaaagcttgcatttggaattgcgaaagccccactccatcattangattagtacctgacatctcaaacaaacaaatcaaacgtaacaagacaattatagtngctgtttgaatacctcacccactcaagtgtatcacacaattatggcttttctcttatgaaacactc

SEQ ID NO: 11530 - DNA, 204 bp, Glycine max
aatctcaaaattaatattaatgcctaccatgagtcaatgcaacacatctctacaatgtgctatgttgaattaccacaaaaatagatggaacattactatctcttactaacgctattatcactgtaacatattcagcacagaaaacatacttaatagtgcccctgcacatactagtgacctatcgacactgggtattatacgaaa

SEQ ID NO: 11531 - DNA, 478 bp, Glycine max
  unsure at all n locations
nggcaaggttttagcctagnannncntcgnantancnacnnantctgtagangtaccncctggnagaacaacgaagcgcattaacagtttcagcccatttatccggcagcgaggacagtggaancagagcggncacctaatccccacaccgaggccgcacagaaaccaatngggcaagaatagagtnacactcattaatatgatcagttacggagataccttcttccatcttgaggctgaacaaccggcgcatcaagtatactttgttgggtgatgacagagggctcggcatatacgataatgccatcattaagcctgcacggagattctcgctcccgaagtgaacgcgacgttttggctaatgccaagggatcacgccagagcctgtgatctatcagtccatcttcttgaaatgtctctggctaaccccgaatatgctgaacagcttcttctgaaaaacaaacaaggttagcatggc

SEQ ID NO: 11532 - DNA, 404 bp, Glycine max
  unsure at all n locations
agcttgtaattttattntccttgctagagatcaatcaagagccctcctacataaagggaaggctctcccaaaataattggaatntcctaatcctcctttatgtccatgatcacaaaatcagcttgaaaaatgaatttaccaactatgataagcaaattctccactattcctttcagataagtaatagttntatctacaagcacaagagaaatgttaatgggttgnggttcttgtaactcgaacttcttataaacaaaataaagcatcaaatcaatgcttgcaccaagatcacataaggctctatcgantttcagctcccatagtacanggaatgaaattccatgattgtgacttagaggcatttctttaaactatataagcattctcattgagccactgggaaa

SEQ ID NO: 11533 - DNA, 386 bp, Glycine max
  unsure at all n locations
tggacatcaccgcttggaggaaccctcaatcaacttgatcacttgtttacttatgtngatnntgagggccacatcacctttgattccttcggtcttacacttaagataatccatgacttatgtggctatcaaatcattgttgagtgtcataccctaatttcgtccgggaacctttgctcgatgacatgcgaccattctttggtccttgtgaggtgcttggcacccatcattaggcaatttatgaaattccaggacatgccgaaaaaccaaaaaaatattgatgcacaatccgtaagtttccgtgacacaccggagatcaaaaggaagcatcgttgcataattaagtgaggttccgtaacattccgtaagtcaaaaggggatggtta

SEQ ID NO: 11534 - DNA, 277 bp, Glycine max
  unsure at all n locations
gagcttgtgttatgatgccaactaaagngggcattcggtgagcaaatcggagcaccgttcaaccacttggagttttggaagatctacttgtcaaagttaatggtttcgttntccttgaagatttttacattttggatatggaagatgattcatctagatatggttctatattgatcctaaggagaccattcctcatgacagcccanaccanaattgatgtgcatatagggacacnttccatgtagtttggtgatgatgttgtgcagttcaacatctt

SEQ ID NO: 11535 - DNA, 310 bp, Glycine max
catggagatgcagcggaagacaaaggagaaaaggcgagaggaggcgccatccactaaggaataagccatggaagaaggagcttctccaccaagatgagccttggataagaagcttggagaggatgcttcaatggaggaaaagaatgagggagagaaagagagaggggggagcacgaaattgaatgaagaaaaacggagagaagttgaactttgaattgtgtctcacaagactctcattcattaaagttacaacaagtgttacacatgcttctatttatagactacgtagctttcttgagaagctttcttg

SEQ ID NO: 11536 - DNA, 385 bp, Glycine max
  unsure at all n locations
agcntgtttgaattagcacaggaancacagggggagggggactcttacataaaaagaaagcccggatcaaacgggatacaatgtgtcttccaaaagacaaggagggcatangcatcaagacatttaacatagcattgcttggtaaatggagatgggatcttattcggcatcatggggaattatgggcaaggattctggagtctaaatatggtgactggagatgcctggctgaaggaacaagaagcagcaaggatttctattggtggcaggacctaatggcaactcttaatcaatcacaacanggcactgcttttcaaaatgtaacatgttggagtgtacgatgtggtgattaagccacattctgggacgattgttggactgctga

SEQ ID NO: 11537 - DNA, 504 bp, Glycine max
  unsure at all n locations
aacccagggagctggcctcgacngtaactancttgcacatacaccaccaagctctaggattgtggngtacagagaccatgnagcactttgtggcttgtccaccatgttgcacaacaagggtcccgcggccacgaagcgaacatacactcaccatcctctgatgaccacctggaaccgagctcacgaactcggacgtcgcccataacctgatttctctcaacagcaggtccccagaagtactgccaagcttccacaacatccatacaaaacaacattcaaacagctatagctatcacggtcaaaccatcagagcaaaggcagaaaactcttgccaaaaacaacacaaccatatcacagctattctcacttaaagatcccacacgcaataaccctcgttccagggcattaaccgtccgatcgactctaacaatttactggacagccttaaaacataagcctacattgtgaccgttggcgacgacttacaaacatgcgcgacatatg

SEQ ID NO: 11538 - DNA, 275 bp, Glycine max
gttcattttatgctactaccccactatcacgtatgcccagagcctgacttattgtgcgaaattctctggatactctactcctcaagctgataagtgaaagaagtggcagtgaactcgatatagacaagaaagccaccacaagtatgctagcctttccacaaaaccagaatacgatggactgtaataagagattcccaacgttgctgactcggaattatactttcaatgtatcgaatatatctgacatttcatactatgaacataatatgtggcgc

SEQ ID NO: 11539 - DNA, 146 bp, Glycine max
  unsure at all n locations
gagatgtacatantaaggtgttatgtgaaaaagcactcgcagcaaaaatcaaaattgtgagaaaatcgcaacgttgtcattactgctcttagttgactcattgaaattacattggaatacacatgctcaccattgctaacttcaat

SEQ ID NO: 11540 - DNA, 411 bp, Glycine max
  unsure at all n locations
agcttgtataattcaccccaattccagtgtcctatgctgacttgctcccatatctacttgataattcaatggtagccataaccctagccaaggttcatcaacctccatttctccgagaatacgactcgaacgcaacgtgtgcttgtcacggagaagccccggngcgttccattgagcatggtagggctctgaagcgtaaggtgcaaggtctaattgatgcgggctggctgaaatntgaggagaattgcgtgtaaatcctgacattgacaagagatgccacacatggngcaattntgaaagctgttgttatgtgtccctaatgactcatcanggtttccngtttatgccattattgtaaaccacagctacaatggtaaatgaaatggataagntgatatctttgccctcatc

SEQ ID NO: 11541 - DNA, 414 bp, Glycine max
  unsure at all n locations
tggacttcctgtgttctgggaacctctcctttctcangtgtatccaaacccaancacctagttcaagcacgactttctttctgcttttgttggcttgccttgcatagctcacatttttcttttcaatttgagccttcacttgctcatgtagtttcttcacatactcagctttagcctgtgtgtccttatgcttaaacatagcaatgttaggcataggaaacaaatcaagaggagtcaaaggattaaatccatacactatctcanatggtgaacaattagttgtgctatggacaacccaattataggcaaactcagcatgaggcanacatgcttcccaagaattaagacttttctttaaaacagtcctaagcagtgtgcctaaagtcctattgactacctcagtttgaccattag

SEQ ID NO: 11542 - DNA, 334 bp, Glycine max
  unsure at all n locations
agttatccctaatatgatgcttttaaccatacacaaacttttgttagctgaacgttgacatggaaaacatgattgcctttcgagcttctgaatagctcttcttttggtagtccccattttgattgtgaaatctatatcatggaaagttttcattgtagatctatgcttcacacctatgttntgcttctgaatatgatgtcttaataaagaacactcacagcaaccatttatagctaagttcaatcacttatgaggggactctgtcgtcaaaaatataacttaacaatccaacttggacacattaactaggtccatcttggatatatcattggag

SEQ ID NO: 11543 - DNA, 382 bp, Glycine max
  unsure at all n locations
nnnnngggagatcagactcgancnctgaccacctgnatttgaaattcgcctgcgggggaaagaggttccattggccaatgaaaattggggttcttgacaactactctttattcataaacatcgcccaaaactggaaagaaaaaagcaaatggaaaccacctggtgcaaccttattagccgagatcctagcctacgaatgttttatgaaaatattcctataccagcctatttgccagaatcctccttagccgcttgaacacaaagccttcggatggggaagacctccaaatgacggatagaggcctttggtggtcaacctctgtccaccaactttgtctttctccataaatgagatatcatttcttgtatggaagaaggctgt

SEQ ID NO: 11544 - DNA, 286 bp, Glycine max
acatgtacttacaacgtgtatttgttatatacatcacacacgtctccttggctaaatttacatacatgcatactcaaagcactttggggtaccaaaaattgcacatgtgcacatcttggtatttctaatacctatacatacacaaacttcatgatgaatcttgactatctacacaataaggcgctacgtttcatgctcttttcaagttttttgctacctaaagtcgtatgcaaattccagtatatatttctttgctgactaaaattgtattaaaaggtatatattc

SEQ ID NO: 11545 - DNA, 480 bp, Glycine max
  unsure at all n locations
nnnnnnnngggatttctcngagtagnatcacttcacctatgagcactaccccttggacctatgagtaggaggacatgtgaatggattttatgtttacccctcctgganactcgagaaacacttgagattagtgaagaacactgtttccacgaagatgatccggaccgaggcgctcctgtcacgtttccgtgggtgatttcgcgaagattctccaccgttcttctgcggtcttcgaacgttcttcgtcgtgcttgggtcttcgaccgatacattcacgaaatcaacttccaattcattctatgacccttagtgtgctcgtttgcttcacgtgcttttatgtgatttatttacttttcgacacccttttgacgtgcttagtgattacttaagcattttctcgccaatcaagaatagataaatgtccccgatcatttagttgtatatccgccatntctgttaaatgagaccgaccgttcggct

SEQ ID NO: 11546 - DNA, 180 bp, Glycine max
  unsure at all n locations
taatcctcatctaattgatattcaactggttcattagcagacttcaactattcaacaatntatacgaagtcttcgaagaactaagactatctgtctcataaagaagaagcgaactgagtccattgtcgacatggacgatgaagttcagtatgaaacacctccatctgcaagactatctac

SEQ ID NO: 11547 - DNA, 339 bp, Glycine max
ctgcaaacatttatcgtagaccccctcagcagcgaaactttcaattgtcttaaaattatgacctcacaagacacagatataatccaggttggatgaatcatccaaatctgagatgggcaagtcctccacaacaacaacagtttagccctcctttccagaatgctgctggtccaagcaagccatatgttcctcctgcaatacagcatcagcaacaacagagacaacaagcaactgagacccctcctcaaccttccttagaagagatagtgaggcagatgaccatccacaatatgcaatctcagcaagagacaatagcctccattcatagtctgacaaatc

SEQ ID NO: 11548 - DNA, 491 bp, Glycine max
  unsure at all n locations
aanaagctgactagcttgtancntcnactattnngnaancacccggnganccataaagacggctgcagcggaangctccttaactaacacacaccaaaancngcgagggggagtttcgtactacaaaattcacacgaatgagtagcgatattttccatgttgatagagacgaaaaatatattagcctacgtaaaacactaacaatcaaagatgccaactagatagtttaaattgttattaaacactaagcggccattatcatcctaaaagatatatgatcatacaatttagtcgtagaaagattgacagacaaaaagggcctagtatagattccttcattggacaagtgaggccttctaacgactataacgctagtgatagacaaccttggaggactagttcagatacaagcatcgtaacttacggattggaaaacgttcatgatgtattgtgcgaagcaatctgggcctaaactgaagagaggatggaga

SEQ ID NO: 11549 - DNA, 360 bp, Glycine max
actaagcctggaacgtctctaataaagttcttgtgaaaagaaagaaagtaattgttgtgataagaatactcagattatgtcgaaagtgtgcatagaagacgtgaatgctggatataaacctcacaaccacttcactaagcttggttgggcaaatattgtagaatagttcaattagacaacacatttgagatatgaatataaacaatctagaaataggtgggattctttgaaaaaggaatggaaattatgggctaagcttattgggaaggacacaagtcttggctgggatgggggagaagaaaaccattactgctagtgatgaatggtgggaagtcaacattcacgtatgtattattcaac

SEQ ID NO: 11550 - DNA, 395 bp, Glycine max
  unsure at all n locations
ctaaagttccgcttcttcactcagctgttgtgtgttaattattaacttgttctttcctcttttttatctactccggtacagatgtattcgtggagctaaattaaatcctgaagatttagattgcatggtcttaagttctatctattctgaggtgatgatgatgaacaaacaagtttactgctataacatccagtcaggcagtgagcatgaggtactacaagagatattaagcactgttggatggccataaaagcaaaggcttttatctttttttttcttttcttggtntataattattctgcaacacaatatgtacatatatgtgttgtagatgctctggaaatgaccttctttgctctgaaaggtcctcttaaactatcgatttacactgatag

SEQ ID NO: 11551 - DNA, 386 bp, Glycine max
  unsure at all n locations
agctnccactatatcncatcaaaacaacattcaaacagcgcaagctatcacagccaaacaaaacacggcataggcagagaactctgccanaacaccaaccaaatcacagcttttctcacttaaagaccccagtaacaattctttcgatccaattcgttaaccgttggatcgactccaaaattctactggaggtctatagtacattatcctacattgtgaccgttgggatctactagcaaacatccagaacgcattttacattactctttccacaaccagcaaatacatggatttttctgcacttgtgcaaaattctgctgcacaatattacagcataatctgcacaaagagcatatttcgaaaaccacactttccctcaatctatc

SEQ ID NO: 11552 - DNA, 279 bp, Glycine max
  unsure at all n locations
atgaggtacaagtcctaaagtttatcttttattacctgagtagncgaagagaagctcgtgtccatagccatcaaactctgaaaagagtatgatgaactaacggatgtcaatatggccaccgatgaagccttggaatgagaaaccaagaaggcccgaaaggaagaacacgaccaaatcaaatctttgaggggctttatagggcagcaatagtgagctcaaactccgaagaggtgaaaggaatcatcacgggtcacaggcatgatctggaaggacgagcta

SEQ ID NO: 11553 - DNA, 259 bp, Glycine max
  unsure at all n locations
agcttctaatacntatgtccaaggctgngacttgcataagggcccatatggaggaggacaaaatggcgctactttgtctcagttttagagtgtatagttattctaaataatggtcgaatccatgtaaagttggctgaccaaatatatgntttgggttaatcaactaaaggggctttagcttggtttacctcaagttgtaataaaggccctgtcgcaacatgcccttttgcgggcgagcgaacgcgacgctcactggtgc

SEQ ID NO: 11554 - DNA, 313 bp, Glycine max
  unsure at all n locations
ntaagttgcttggatagcaacttgtttcgggcgcatttaagcttttctgtgatgaattctccatcagacttcttttggttgggatgtgtgctctaacacacaagattgcatggtcactagcagccatattctcaattaatttcatggcttcttaaggggtcttcaattntatttttcccctgcagaagcatctaaaagctgcttggattgtggccttaacccgtcaatgaaaatattgagctagattggttctaaaaatccatgagtaggcgtcattcttaaaaacccacgaaatctctcaaaacctcactct

SEQ ID NO: 11555 - DNA, 410 bp, Glycine max
  unsure at all n locations
agctttcatatgtggtatcagagcacaagagcttcaagtangtgctctttanacatccaattaatttcagctttaccttctcctccattgttgtttcttcatttttctccatgtatctcctcacatgtctagtgttgaatgttgttaacatgaaattttagaatttccaccgattaaacttgctatagaagctagatttgattttctatgattcanatttcttgttcttgttcttgaatcatgaattgtgttgagtttagattcctttgagttttgtattgttatttgttctggctgaaacctataccatataattcttacagaaacattaaagtataagaaaacctcacaaatctagagtgacatgttcatctattatagttttgtcgtagaagtcatgtctagtcatg

SEQ ID NO: 11556 - DNA, 388 bp, Glycine max
  unsure at all n locations
gcttaatttctttgcaagacaaaatgtgcatcggctactttttatgtgtatgcatgttaaatataaaaagaccattgatggacatccacctaatagcttaagcttttaggagagttgggctttgacataatattagtctctatgatcaagtggtactgagtgcgatatctgctacccccaattctgtccatgcatcaagcacaaatagttcttatgaggggacatgtgagatataaaaccattcattttccaaatggcataagattntacgagagatggcccttgatagaatacaacagaattatatgctttgttaatctttgaatatttcagcatcagcatatgttcaatgctataagacaccggatacatgtcttatcttggttgg

SEQ ID NO: 11557 - DNA, 280 bp, Glycine max
  unsure at all n locations
gatccttaagtcacctgcggcatgcaacttatattatttacatagnaaggataaagcaaatatgatttcagaattacctttacataaaaggagtccttgcctcgaatcaagtccctactcctattcttcctaatctcctatatcttggctgactgccatgctttatctcacttaccatcaccacaatccctccctcaacactctacctccctctaaggtaaaccttctgactgctaaccacctacattgtttcatgaccaacttgccttcttcccactct

SEQ ID NO: 11558 - DNA, 452 bp, Glycine max
  unsure at all n locations
atacacacnaagcttntatgagctcctatgggtgctttatgagaaattttaagattgtacccaatgtaggaagaagatgtgcttatcgttccatgggtcaaccaaataaaaattgtagtacggaggacgaaaagttcccctttgatcaccaataccaaacctcaaacttctatgatatggatctctattggagaacaagaagacaatagatagagagctccttgcaaatgaaatatgaattgagagggtgtacagaatgattaatggcctcacaattcccttttctactcctaggatatctctaagcacacccaccccttagcatacagcaaggtccatttgcttaggtctatactcaccaaaactcactaaacacacacaaacataagttatacatcatcacctacataattgatcttatgctttaacttaaattgatagatccatgatca

SEQ ID NO: 11559 - DNA, 433 bp, Glycine max
  unsure at all n locations
tcagatcacttcctacatctcatcttctacgcatcctatttcttttcttttacccacttccttcacgtttggttttttagggaaaacacccattaactaaacgcgcccgcagggaatccctatcgcaccaaaatccaaatctagaacgatgggtgatcaagaggagacacaggaacagatgaaagccgacatgtcggctctgaaaaaacaaatggcctccatgatggaggccatgttangtatgaagcagctcatggagaagaacgcggccactgccgccactgtcagttcngctgccgaagcagacccgactctcttggcaactacgcaccatccttccccanacatagtangacngggaannggacgcactgngcacgatggcagccctcacctgngatacaaccgagccgcttacccttatggattgccg

SEQ ID NO: 11560 - DNA, 358 bp, Glycine max
  unsure at all n locations
taagcttcattggagccggtgctgtgtatggaagataaggtgttgttgtgaaagggattgttttagttcatgggaaaactgcaattggaaggattgatgatgattctgtttgtgcaactctggattggtggcctcctcagaaatgtgactatggaaaatgcagttggggtcatgcttctctgctcaacctggtatttttcctttctttttgtcttctggttcctgaatccgtcaaaaagtttttttttcttttcagaataattagatgggttttgcttcttccttttattntttaatttataaatagcattctctgcatgatgacgcttttttttgcctctttagaatgatgctcgga

SEQ ID NO: 11561 - DNA, 414 bp, Glycine max
agcttatataacataattgcctcaatcatttccaaatatgcatgtgaattaggacgcatcaacactaatcaagccaaggctattgtgcaagcagtaaatggggcaaaacacaccaaatgattatgatgatggatggctcatattgtcacaaaggtaaactcatcactttcaaattgagctttcaaaactatcatgacatgtagagaagaatcaacgatttctagtcacaacatgtcaagaacttttattttcaaaacaattacccatttcttgaacatatgctataattcaaagaacaacatgtaaagtcgtacatgcacacaaaattgacccaaaatattaaactataaatctgacgaaactaacaacattaacaaattaacacaactaacaaattaacaaaaccaacaacac

SEQ ID NO: 11562 - DNA, 422 bp, Glycine max
  unsure at all n locations
tgggacctttcatttttatcagattgtgtatctagtcaaagtctgagagaccatacaagtttcctagcgatttctaattatgtgggccattaagtctatcatatgctgacaatagccgagaagcccatgaatttcttcgagggcggagtaggtgtctgccattgccttggccttggctaacaatcaaggaagttcttgactcccgttcacggtaagagcaaaccgatccatccacatggttgcctcttggtgtaaagagtcgatcacccttcctctagcctctttttccgcgtatacttgggcatactcgtccgcgaccctttgctcgtgggccgtggctagacctaactcttcttggtattnggcaatgatagctagcatgttggtctccgtctcgcataaacgctgagacaagctccttt

SEQ ID NO: 11563 - DNA, 402 bp, Glycine max
  unsure at all n locations
agcttccttattnatgattcctaaagaagctagagcttagctacacatacctctctaatagctaagctcacctccttatgatgagaagctagagcttagctacacaccccctataataactaagctcacccccatggcaaaatacctganaatacaaaanaaaatccctactacaaagactactcanaatacctcgaaatacaaggctaaaaccctatactactagaatggccaaaatacaaggcccaaacaaaggaatacctattctaatatttacaaagataagcgggctcatacttagcccatgggctcaaaatctaccctaaggctcatgagaaccctanggccttcccttggatctctgacccaatctacttggagtcttctatccaatgcccttgc

SEQ ID NO: 11564 - DNA, 345 bp, Glycine max
actcagcttatgatgaatcttgactatctactcaataatgtgctacattctatgctcttttcaagtttttgctacctaaagccgcatgccaattcaagtatattttcctttgctgactaaaattgtattcaaattaaagggtatacatttttttgtaatgtattttctttacataacatgcaacatatttatgtatatttttttgcgagacattgtgactaccaaaaattatatgcacatacatccaagtattttgctatcatacccaaagtgtaaattgccaaaggtattttgctacctattctaaacctacacattcatgacgagcaaaattcctaaacatct

SEQ ID NO: 11565 - DNA, 260 bp, Glycine max
actcttttttccactcataacaccatattctcactttctaaccctatgttaactctacccttcatccctagcagttttccataagcaatttcagcacataaacatcacaagcatcatcataaaaaccctaaacagaatgggtaagcttaactcatccaaacatggcaagttcaacatgctttcaacaatttcttcacaaataactatcatgaagcagaaacctagcaaaactacccatcatatctcccaaagccccatac

SEQ ID NO: 11566 - DNA, 301 bp, Glycine max
  unsure at all n locations
atcctgacnaccatataccttgacccagagtgtgaatgtttatccttaccctcggaagcaaaaaagaatagaaaggaaatttccaatcaaagataaagagaaggaaaatttccaatgaaagcaaaaaagaaaagaaggataattccccaatcaaagagtgggagaaagcaaaaagaaaagaaaggaaattcccaatcaaagaatgtgagaaagtaaaaaagggaaggaaagaaagttcttgaaggaaaaacagaaggaatatgcagagaggtctttggaccggacaatatctgaacaatac

SEQ ID NO: 11567 - DNA, 136 bp, Glycine max
aaagatcgcagcatgggattattatgcttgaacagctccacctgatgtctctacagtattacgtgccatagagatatgagatatcttgctccactcaatctttctggaatgagggagtgctcctgctatacacaaa

SEQ ID NO: 11568 - DNA, 265 bp, Glycine max
  unsure at all n locations
ctaaatagtaanttgaatgcatatttgaataataaagacaatatatatttaggtaataaaagttacgtaaagtattcatctacatattatatcatgtaggaaaaaatgtgttgatttttgaatttattaaatattttgaatagacatgttataataaaaaataattaactactaactaatcataatgattatattntgttattatggaaaggaaatatgaattggcgtacactagtgctaatatcttgggataaaatcgtttatg

SEQ ID NO: 11569 - DNA, 259 bp, Glycine max
gggaagccgttactgctaaactgaaccggcaacgcccaagggagggtattttctattgacagggacgaggtttctacagcaaggaattctgagcacgaaatgaaccctcaaatgaaaccgaaaaggattcatcacatgagaatgcaggagaaatctgagactagatgaaagcttccgcaattacaacaagcccagcacagagacggccactaaacttctgtcccaatcgccacactttttcccccacaacagaaagcac

SEQ ID NO: 11570 - DNA, 330 bp, Glycine max
  unsure at all n locations
agcntangtgctatactnctttacgaacgnacactggcgcgagacattcttataactaagacaaatgcacccatatacaatcaaggcaccttcgatacctagattatttgtatgtacttacaaggtgtatttgttacctacatcacacgcatctcctttgctaaatctacatacatgcatactcaaagcactctggctatcaaaaattgcatacgtgcacattctggtatttctaatacctgtacatacacaaacttcatgatgaatcttgactatctacacaataaggtgctacatttcatgctctattcaagcgtatatgctacctaa

SEQ ID NO: 11571 - DNA, 314 bp, Glycine max
aacgaccacgacttaatccaacaacatagatgctttatatctttgcgaaccttatcttacattcgacgttgtggaacattggacaactacacgcttgacacagtgcttgtacagagctcatctccacccgcagcacaaaacaaattagttggaaaaatgaagataaactgtgttaagctagacctataaacgtacaagaagatactgtcagtttgtttcactaactaaatcaaataacatgtttttgtagcttatatatatcattaagaaaccagtacgacagtacctgaaggaagggaattgtcttttaatcg

SEQ ID NO: 11572 - DNA, 351 bp, Glycine max
agcttttatattagttcaacttctcttcctattctgctgtaatttccacgccactctccattctctctctctctcattctcttctcgagcaagcttgtttgatctactcaaaagcctcttgacattctatctcccatttgaatgtatcagaatctttcagcttcaacaatggagaaaaagctttcaactttcctattgaattagctataaacctttgcgtgaaattgatcttcccaatccgactttgaagctccttcctattctgaggtggccttgcttccaacaatgctttaactttattttatctacctcaaatcctctttgatggacaagaacccaaaattttctact

SEQ ID NO: 11573 - DNA, 202 bp, Glycine max
  unsure at all n locations
gtatagagcacaagagcccaagtgtgtgcttcttaacctctattaaanacggctctagctactttccaacgacttccttcattgttctacatgtatatcctcacatgtattggtctaaatgtagataacacgattctctagaggcgccaccgattaaacgcgctatacaagctagatttgatactctatggcacacatatcg

SEQ ID NO: 11574 - DNA, 377 bp, Glycine max
  unsure at all n locations
agctngtnaatgcttaaatatttggcatgcctcatnaggccggcgccgatcggaataatttatttggaaacaaaagtattcaagttaacaatagtgtcaactttaagatcaaatcaacgttttataatatccacaataaaactaattgatgggatccatttaaagaaccaatttatatttcaccccctactaatttattagaaatgtcaaccgtgagtgtagcccanagctagcaactgttcacaaaagatctacatcccacttaggaaaaaaattcatctgagataggataaaaaaagacagaacaaatgacaagttatcttgcattgttgcctttgacaacaccgcatctactgttgatccacatgcatttgata

SEQ ID NO: 11575 - DNA, 497 bp, Glycine max
  unsure at all n locations
aggcgcggatggaacgttcttttcgttgacacctgnatanacctagaatatacaacacanaagcccctcgagtatnncatannnangagaggagtgcatagagagtctatgttgctttcgngccattttagtacgcggaggcttatgaacttttgtagcttaattatacttaatcctcgtactattgtgtacacgtaaatgtagtcttatataattgtggcttctaaaataggagtcttctataaaccgatgtctatttgactccatatagtctcggaaaatgtgtgatcagagccggatctttgctaaattgcacaacatttttaacttatcggccttgctctttgcctccgacctcataaatcaggcgagctttgtaagctgacaattatggagcaaatatctgatcgacattacctcatttttccgtctgaccgaacccgagctatggtggatatctgtgtacaaacgcatcctcgactacaggttgataggcg

SEQ ID NO: 11576 - DNA, 359 bp, Glycine max
  unsure at all n locations
agcttgtttcttatganaagctngaagaagttntgaagatgtgttggcttttacatgcctcaactccttgagtggcatttgtattggttgttatcttggttgtttcatcttagtacattntgatatttgtattgcatcatgcatcatcggggtttatgtgaagaatagcttctaagttagaacgtttattcagaggaaataactctctattataatcggttacatcctcatcgcaatccattacaacaagttgtctaaagcttaaagagttgagtctcatattaagttaatcgattatagtagtcttttaatcgaatacactgttgtntgagatagtgactgatatattcangagtctc

SEQ ID NO: 11577 - DNA, 260 bp, Glycine max
  unsure at all n locations
agcttgtagacaacacggaaagaaaactctaccttatgtgtctattgtttattcngattgttaaggcncgggatgcttcaaagcatgtttgatttttgtgggttggtggaatctggtgttgggtttcctttaaagtccttgcccctcgtatgcttttgatttgggaattcttgatgaaatcttgtatatgtttaattgatggttgatccatgtctttttggacttgtgttgagcattgggatggttttgaatcatttgtg

SEQ ID NO: 11578 - DNA, 421 bp, Glycine max
  unsure at all n locations
agctttgttttcctttgcttggatgttngaaatcctccagattagtgacttanaaaatgttcatacggngggttttggaggttcacgtgatataccctcttcttattcccaaatgagaggaggccttacttaaaaccttcccagcttcccttccattgctatctcatccatccaaacatatctagctcaatgagaagggatccaggctttcattaactatctagctgttatacaattgttatatgtttcaatgttttttgtgtatttctttccattatcttgcccccaactccacatgtttctcacttttaaatgaatgannacattttgttgagaatcacaatangatcaatntcatattttgtctttactatcatatcagaaatataagaactatatctgctataattgattgtattaa

SEQ ID NO: 11579 - DNA, 365 bp, Glycine max
  unsure at all n locations
ntgaagcactcacatagngttgaattcttggatgaagagttgttgtctattgagagaaacaagacatggagtctcacaaagctaccaatagtaaagaaagccatagcagtaaaatgggtctacaaaactaagttgaatcctagaggataagtaacagagttcaaagccagactgagtgcaaagggatttctgcagaagcaaggtctggattatgatgaagtatttgctcctattgctaggttggaaacagttagacttgtaatagcaatggctagctataattgctgggaagtacaccaaatggatgtaaaatctgcatctcttaatggctcactataagaagaaagttttgtcactcaaccact

SEQ ID NO: 11580 - DNA, 396 bp, Glycine max
  unsure at all n locations
agcttctatatatagctacatgcagctgcctcggtggagatgctgcccagccttgattaaccgttggatcttctcgaaaatttggccttaaacttcacaagacacttttccatgatctaaccgttgggatctttgagaagatgtctggagtgtgctagaagtctcttaataaagcttctggaggaagcctcttaatgaagcttctagagaaaactacatgaagctgcctcggtaaaaatgatgcccagccttcgttaaccgttggatcatctcgaaattntgtttgcaactttaaaagacactttttcatgatctgaccgttgggatctttgagactattgtctggagtgtgctagaagcttccgttcccgagagcatctcttatttaagcatttc

SEQ ID NO: 11581 - DNA, 468 bp, Glycine max
  unsure at all n locations
aggaaaaaacggttagtgtctagacatgatactgcaaacggccttcatactacctttaaggagcctaggattttttcaacttcctgaacaatattacctgggcttcccaattagggctattatgactaaaccttgtgctttttaaaacctaaaccaagtagaaatatcttggaaaatatgcctaaggggttttagaaaaacacaattatcatttttggctcacataaggggcacaggataaattattaatcaacgttggctttttggctaatgactganaattaaaagaaacacggccttgatcatttccacctcatttaaataaagcgtactaacttataatgatgccaaatttcgaaactgagaacagaacgtatttcaccaagtttacacaactcaacgggacaagacaaagctggcttgataaggtctcaaaatgatcaccatagcaacatggtttaaaaggtt

SEQ ID NO: 11582 - DNA, 270 bp, Glycine max
tctgtgggtcgttccttgtatgtacatgatgtaaatacttgtatatctatttaatgatgttttatgtgttctctgtgctatcagtacttcatttcagcatgcttttgccttgatcacgtagatgcatgctttgttaggatcattcaatagtggaaactggtcagattcttagaacttcataggacagggttagtttatcgtattatcaggaatcgtggtacggtaacctagttgtgtatatcgtttttttaatgcggttctcgtcaagtt

SEQ ID NO: 11583 - DNA, 514 bp, Glycine max
  unsure at all n locations
ngaaccggagggctagtccttgtacnatcgacacctttganacnaccgctncntccccaattntctatcaataggggggagaaagtgaagnagaattatggttcatncccctnatgtgcacttcctttctcgtctcgaaataactggaaggaaaaataacttcccgtgaaagaaaaatcccaacccganggcgccttgtgttaaccgtttcccgtaacgtttcttgngaagtgatttccgcgaaaagttttttgaccggttcttcgacngtcttcaattcattcttcatcggtcttcaagcttcacccggtaagtacctcanaccagctgttaattcattctatgtacccgtggtggtcccatattggttcatgtattttattctcgatttcattacttttataaccccattgacgtgctaagccaattatttaagcttttctcgcttatctagaataaaataaatttcccgatcgttgaattgatcatgcgtaattttggttaaatgaattcg

SEQ ID NO: 11584 - DNA, 241 bp, Glycine max
  unsure at all n locations
aattttcttcccatcagaccttggatgcaactgtgattgtatacccatattagctagatcttgacgggtattcaagccatccttcgtcttgccttgaatgttaaggagtgtcccaatcacactgtcacaaacatttttctccacatgcataacatcaatacaatgtctaacgtcaagatctcaccagtacggaagatcaaagaanatggacctcttcttccatatgcaactctgactttta

SEQ ID NO: 11585 - DNA, 368 bp, Glycine max
  unsure at all n locations
nncccgaggatggatggatcgacnctagattagccaagacttggtaggttttgagaaatggatttancttctgcaggacctatgctctaaggtgttgaagtgtgaaaaaaggttggtgctatggctaagccctttgggatggaaaaagcctaggacttagttcagggaaggatgctatgatctctaaggcagcagtctaagtggctcccactcatatcacactgaagttgtaggctactgttctatgaggttatcaagattgcaagctgctgccctgacagattacttaaaaaacatcagtgacaccaagcaaacacattgtcaatgagaagctgatcactcaggtactttctatttcactgcctatn

SEQ ID NO: 11586 - DNA, 452 bp, Glycine max
  unsure at all n locations
tgttacaaccaacattctgtcctaccaagccattgttggttctatcctaatgttangaagattcgataaattctatttagatagggaaactcagatgatagaaagggaagagagatattgcacanaaattgttgtaaataacagaatntacaatgaaggggttcaaaacaatctcaagctctctaaacctagaatatagagctccttataaaggagacaactattatctgtctaaccaaaaatagttacaacttataacaaaaaacaattatagttacaatacaacctatgttaatgaaccaccagactggatgctcccctttatatgactagatgctctaccagattacaggagattagatgaccaaaacaaaagacaagagtgttagactagacaaccaacactgttatccacctatctctatcgtccatcatccaacaatcaacaatct

SEQ ID NO: 11587 - DNA, 506 bp, Glycine max
  unsure at all n locations
aaaaatccgttagggcttgcatntctncantatngaaaancccngggctctnagncgacctgcatgcatgcgaggcagagctttataatctgctcacagaacaaagcgcaccgggcggggacgtagccgtaacaagagtcctaaagaagcccgagctcaactacacatacacttctatcccgaagcataccgtgttgagatgagagtgttgaacgttagatacacacccccattaatagcgtagctcacaccgatgactaatcacatgggaatgcagtcgagccgtccttactactgagactactcacactgacccgatagacgggcttggaccctatactactataatgggctaatacatagcccatatgaaggagcatcctattcttatatttacaaagagtaggaggctcatacatagctcatgggctccaactctactctattgctcatgagaacgctagggccgtcactcggattctagcccaatctacttggaggcttcg

SEQ ID NO: 11588 - DNA, 512 bp, Glycine max
  unsure at all n locations
aaaanccatgcttttnagctggaaaactgggggattgntatcnactgtcgacactttcgagccactnagagctgatgggtacacgatggatacgtaccacatgtggtcgcgctttttattgtttgtcctgagcaaacaggcgaactnctgagctacaggagggcgtctctgtagcacgggcatgtatgcaaacactcctagccgtaccttgattatgttatgatgggcgtaccttcgagtggccataacagagatactctatgaggcgaccaatccctgatactgatgcgtactacacactcaaggatgcgcctagaacgatgaaccgttgtccttcgcccaacatctgaagagagggatggacgaatcatatccacatatgttggcgtgaaggcgtcccaaaactcctacagggttggacatgattagaaggagagatggtccctcttgggggcgtaccggaagacaaaaagtggaccacgccaaatacgttatggcgggcgacaaggggg

SEQ ID NO: 11589 - DNA, 292 bp, Glycine max
agtaaaattacacaacgtgattattcatgcatccctgaattatcattggtgccttggcaaattatcacatcagaatgtataaaataaataattaacagttgtttcggcgatgtacgtcaaagttgtatacatagatatccaaatacacaagacacactttatcggttaaacttttactcatcatacatggtgaaagaaagtgaaatatttatttttacaaaaacttggatacaatgaaaaagagaccaaaatgtattatcacaatattctaacgagaaacgggagaactatc

SEQ ID NO: 11590 - DNA, 276 bp, Glycine max
  unsure at all n locations
cctgacgacacctagagaagctcctctgattgttttttcagctcctatatccacagagaacagagtgctcttagatccgtgcaacatcctctgaggaagctctactatgtctgcacccaaaagctttacctttgagactctcttccccagagcgcgcttgctaatcttcgacaggtttctgacatcaattatagccagcttgccgtcacttgatgcgganacaaggcatggaaactcaaacgcacgataattcacctcagctgagtgaggaacaga

SEQ ID NO: 11591 - DNA, 320 bp, Glycine max
  unsure at all n locations
naagctcattttttgttttctcaaaaccacaagtgccccggctaatcccgccaccaaaaacaccatttgttcccagagatatgggtctttagggatgacaacaggttgaggggtctctgatcatgcacaagttacaagagacaagcccaaaccagtgagggtatcgaagatggaaccagcatagcaacaagacattgctacttgagcaccctctggtccaccatttaaagccatcgttaagtttgtcatcaaatccccaagtgagttcccccaagccaggaactgttagctcaagattgaaggacttattccacatatgt

SEQ ID NO: 11592 - DNA, 184 bp, Glycine max
  unsure at all n locations
ctgaggcacaagagaatcgacagaatatccatgtcttatcngtccatatcagctccacccgnatgtgtataagccaccagaagatgaaacagaaattgtatgccgccaaccacaagcaaccatgaccatcttgtcacactgcaacattaaacaagcaagaattaggcaaggggaggagggagag

SEQ ID NO: 11593 - DNA, 358 bp, Glycine max
  unsure at all n locations
agcnngaaattgtaatcaaangagangcgctncataaggggagtttctctggataaacaagctcttagcagttcccatttccccactccatatctnttggttgtcaaagcagccggatggctcttagatttgtcaaattcagtagcaagttcttcaccaaggcttcttccaacatgaaatgatctatgtgcctctgagaactctctggatgtgacaaatctataaggctgatctttgtctgcccagaactgctcctgatccttccatgatgttacctataacataattaatggtccaaatacaatatataactctcttttaccagtgcagacagataaaattattgagatcaatcact

SEQ ID NO: 11594 - DNA, 601 bp, Glycine max
  unsure at all n locations
acacacgactggttggcctttgattagnatcatcntcganatangcancaangncnanngggannncgggccacagagcagagaggaggaatatantcattttcctggccnctttttattncaagcacggcgaagaggtaagattatgaaggatgcttatatagaacaacgtatgcagcattgctaattatgagcataaaagcatcttggtggcagtgattaggagcatgtaacataccttgacagagcgcaattatattggtgcgagagtggtaattcgccaagtgatagctaacgctctntgttcgtcgcaaaatcngaagagttggtcgtacatcccactgctgctacacaacgctactgcgacataagtgtggacaacgtcctcnnacntaggttacacatatgtagcgttacagtgcacagcgtataggctacacactccgcttgcacccacacgtcatgactttgacttaaggagatgcaatgcatccaagaaggtcacgcttattgcgatgctcaacactatgttagngcgctaaaaagtcatgacttctggttgtgtgctaactcgtgctaattcctatctgcttctaatttn

SEQ ID NO: 11595 - DNA, 419 bp, Glycine max
  unsure at all n locations
agctnttcttgcatgttcacaccatatttactatactgtgatcaactgatgcaatctatttgattgaaaagataatttatattactcttctaatgtagtcgacaactaaaaaaatataacagaaagtaatgcttaagccaatcaaatcaagtcattttgaatctcatcattactatcatgcatctcanagagaaggagaatcangcatcgtaatgcatagcacaacanaacattaaaagaaaacatgccttctaaagccaaccaaggtaaaaatgtatttatatttgtgaactttntcaaaattataacacatatataaaaacatggtggaacaatctgaccacatgcacaacacattccacacattatttctgaaaatgagtggtaagggaatataataaagcattgttattaaaact

SEQ ID NO: 11596 - DNA, 300 bp, Glycine max
  unsure at all n locations
actcaagcttatcttacctatctatctcccagatgtctgtgctatgattgtttttataaaaaacatgaagttctaattcaagatgttttctttgttgcatgggcataatgcaatcactctatgtctagcattgattntattaagatgtccctacctttgagttctactaaaaattatcctctctcaagcgactaatccctaaaactgatgcatataaaaccttcaatgtatttctactaaggattaccctttttcaagcgccaaacccctgaagatgatgcaaggatgaagcatataata

SEQ ID NO: 11597 - DNA, 308 bp, Glycine max
  unsure at all n locations
agctttggtcataatggataaggatagaagtccatgattggataatggaaaagttaagaggtggttaatattaacctcggcttctgattcaaaattggatccttttgatgcagggtctgccatcaaacagaggttgactttcttcatttgatgatgtctcccacgtgctcattaatactttcttgtcctttggttcgaagtacttcttcttataggctgatatatcanaaattggacattttgacttgaaatgtcctgggttcttgcactcatangatacgaatggagctttctctggctttctctat

SEQ ID NO: 11598 - DNA, 459 bp, Glycine max
  unsure at all n locations
cactattacaactactcaagccttagtgtcatacctnntttgacatttagtactaatcagacctattgttgcnctttatcattcaaaatagaatggctggacaccgcagtagaagctcattcctcattcaaaatttcaaagacaacacatgtgaatggtcannttgtggcattttaatcaaatggttggtgggcgcccatgttaaaacatgaaaaaatatagggatataagagcnaacatgatatgcaacatttacaaccagaatcaaaggatatggcctagaagccatccattgcaagcccttaacccaagcatttagacaatggattttcacataatttatctcacaaatattgccaagataacaacaaataaagcaccaaataccacaaggaagaagtagaaatagatagagatggcacttacttgagtgggatgaatggaaagcaataataattg

SEQ ID NO: 11599 - DNA, 415 bp, Glycine max
tgatgatatggccttcacgcgatgaaaggatcacattgagtcttttaagaggcatatttgatcatcatactttgataaatgccaaaaaaactagggcaagtgaagaggatgagaaggagggagaaacctatgctgtgactgccattcctatacagccaagtttcccaccaacccaacaatgtcattacttatccaataacaaaccttctccttacccaccacacagttatccacaaaggccatccctaaaatcaaccacaaagcctacctaccgcacttccaatgacaaacaccacctttagcgtaaaccataacaccaaccaagaaatgaattttgcaacaagaaagcctgtagaattcaccccaattccagtgtcctatgctgacttgctcccatatctacttgataattcaa

SEQ ID NO: 11600 - DNA, 361 bp, Glycine max
  unsure at all n locations
agcttgaattgatcaacggaagctctcgagaaaatcgagtggtcataaattntcacacagatgtccgattcggggaaataatatatcgagacgcacgaaattgaacaacggaagctctcgagaaatttgaatggtcataacatttcactcggatgttcgatccggggacataatttatcgagacgctcgaaattgaacaaccgaagctctcgacaaattagaatggtcgtaacttttcacgcgaatggtcgattcggggacataactcatctagacgctcganattgaacaacggaagctctcgagaaattngaaatggtcatacgtttcacaccgatgtccgattcgggaacataatata

SEQ ID NO: 11601 - DNA, 422 bp, Glycine max
  unsure at all n locations
aagctgaaccatntattttaaacacaagngagttttattcagaaattagagtttatctctttatcttagtgagagtgattctcctaaattcttgagtgattcaagaacaccctggctgtatcaaaggactttcacaacctttgtgtgttgtcctcgctgganagagtgattctttccttccaatcatctccacccttgttctttcaaaccacaattccagaaaatccacctctgcccaaaattatctcgtgaccataactcccattttacacactcacattaagtgattcttgagcctaaattgaatttcaaaacgagacctttcacctcgttgtggaatcacctcatttggagccctgtagcttccgttattgccatttctatatttctgtccagccaccacttaacctacgttttaccat

SEQ ID NO: 11602 - DNA, 439 bp, Glycine max
  unsure at all n locations
agcgatgcannagcttctactttttcaattnntgagcccgtctcgatatgatgacgaagacnntcaatcagacanntccgagtaaaaagttatttgtcgtgtttaatttggctcagaaggttcaaccattcaatgttcgagccgtcgtcgctataaattacgggacgtcatatctaacatccgagtaaaaagttattggcgtttgaattggctcatggcttcaacattcaatttcgagcgtctcgatatatgacgagactcaatcagacatccgcgtaaaaagttattgtcgtttgaattgtctcagaggttcaacattcaatttcgagcgtctcgttatgttacgggactcaatcacacgtccgagtaaaaagctattgtcgtttgaatttgctcagagattcacattcaatatcgagcgtctcgatatattatggga

SEQ ID NO: 11603 - DNA, 320 bp, Glycine max
  unsure at all n locations
tcaacatcagaccacttccagggtgttggatctacttcacatgtatatgatggggcctatgcaagttgaaagccttggatgaaagacgtatgcctatgttgttgtggatgatttctccagatatacctgggttaactttatcatagagaaatcagaaacctttgaagtattcaaagagttgagtctaagacttcacagagagaaagactgtgtgatcaagagaatcaagagtgaccatggcagagaatntgaanacagcaggttcactgaattctgcacatctgaaggcatcactcatgagttctctgcaggcattacac

SEQ ID NO: 11604 - DNA, 309 bp, Glycine max
  unsure at all n locations
acacaaatttcagcatgcggagagagccttgaattatcatgaacgtcatacatccatattaggaaatgaaaaaagttagagtatccacacataatcttcaatctactagagactacattntgatagtataatctccgactacaaaccattaaaatttcagaagaatgacatttatcanaaagtgtgtagtatagctttgatattacttcattagctatttagagaattggtattataattgtcaaaatgaaaaactactatatgttagagatagggggagcaacatgagataagcaacatgagcgacat

SEQ ID NO: 11605 - DNA, 482 bp, Glycine max
  unsure at all n locations
nggcccagagggataactacganatcgaancntggnacnacgcttgcntagcgttatgcgagacggagaccaacatgctagctanctttcgcctattcccaaattaagtanggctaacccacggccacgaacctaaaatcgccgatgagtatgcccaaatattccccgaaaaaaaaggttaaagaagggtgaacgactcttttcacccaaaaggcacccatgtgatggatcgggttggccttaccttggacaggaagtaagaactttccccgattgtaacccaggccaaggcgatggcagacacctactccgccccgaagagattatgggcttctcggctattgcagcatatgatagacttaatgcccacatattagaaatcgtaggaaactgatggtctctcagacttgactaatatgaactccttttgnaataaatgagttgtcccatgttctactccaaaagcttgtcaaatcaaatan

SEQ ID NO: 11606 - DNA, 471 bp, Glycine max
  unsure at all n locations
nnttcacgagtcagatctgcaataaacacccggacctaagcccccagagtgactcaattaataagaaaagaaggaagagttacaaaaatgaaatcccttataaggcttcaaangaggaatctcaagaaggccaccactgggcaaggatattggcatgggtcttcattanggaattatccaagacattgtatagttacaccactatgcctctttggaggatctcactcatcaagctatcaaggtggagcaacaattaacgaggaagcagatatacaagaagcccccctatgactcttcaacttggaaggataaggagacattcaagaacgagggaggatcttcattcaaatctcatgaacaatgtggtgccctcggtaaaaataattctaaccttgcacccacttcttcaaaaatgagatctattaaatgccttaagtgtctgggaaaaggtcatattgtcttccaatgtct

SEQ ID NO: 11607 - DNA, 452 bp, Glycine max
  unsure at all n locations
ngccccggatagatgggatgnnattagtacnncttcanattaagcnaggaccgctgcatnctactaatatatggaattgcccactgttttgcctttnaataacatttgctggaccacaccancgctggaggtggcaaggaacaatgtcttttcaaataacctggctgacattaacaaacattatatcttgcgctgacccggccaatgaacccaccgaatcattgcataaatgtatactactatatcaatgtcccgaacaaatgatttcaacacgtgacgacactatgatgctgggctagaaaatcaagtgtcgttgactctaaaaggaaaatagctgcttgttgcggacaacatcatgatatgtttaccggaacaatactatccatgtcgtttatcatcacttgttacatacctgatgaccaacatacactgtagtatttaacattgtttag

SEQ ID NO: 11608 - DNA, 171 bp, Glycine max
  unsure at all n locations
ataaaaattcttttactatggcaacatcaatgctgccttcctcaatgttggtcaattcttcatcccatcttcttctctctaattcttccttaaattcatcaaattcagtgtggtagattaccacatttctctctgacaacagcttcctangaacaataatgtcagtgtacc

SEQ ID NO: 11609 - DNA, 347 bp, Glycine max
  unsure at all n locations
cgactcatcttctccttcaagaggcgcctctggacatctttcttctatcnccattctgctnccatggatcttcaagaagcaaaggactcctttgatgaagaagatccaaggcctacgagctccacataggagctacatcagattcatgtgaattgttaatatagattcaaatgtcctccaattgtgtgtgacacttaagctataaatagaagccatgtgtgtgcatcttttcaaatgtgatcatttgagaattacaattcaaagttcagacctcatttgatgcatacaattgcatgcgtctttactacctcttcctcaacttatcttcctctaccttcaagctttta

SEQ ID NO: 11610 - DNA, 289 bp, Glycine max
ccacatgcccggcgctgtgagtggtattcgtattgactgtcgagatcttagtctttatctttccatatgtacatcatgcatcatcatgtagaggtaggaagactgcatctaaagttagaaactgatggaagcttgcttgagaagctcctatggacgctggatctttgaacttcaataaggtccttcaatgatgatattcagccatggagttgcatcgaaagatcaacgacatgaggtgagaggacgcgtcttctactacagaatcaccatggcacgagagcttcactac

SEQ ID NO: 11611 - DNA, 368 bp, Glycine max
  unsure at all n locations
tttctcaagcaaatactttatgttgtcatttaaagcccatgattaccatgtccccgtgtgtgatgatgacaaccacctgtacgttaggagcacaacaaagaacatatctatgtgcatatagattactcccgcttggtctacattgattgcttatatgagacaattgaagatttcatatntttcatatataanaagttgtctcatacaacaatacataattgttgttactattgtatcttctatctctctctctccctctttggcaacatcaaaaacaaatcctgaatagagaagagaaagatgttaccacttgttgcactgtatgagaatcaagtgataccaaaatgcattaaagcaatcattcaata

SEQ ID NO: 11612 - DNA, 514 bp, Glycine max
  unsure at all n locations
nnccacaagagtgacccttttcttgnacnnttttgannnccttgcacantacaccactcaagctctgatgatgtggcctgagcgcgatgaaaggaccactttgagtcttttacgacgcctatacgctcatgcgaccatgaggccagcacagagatctcacgcagaatgtatagatgagccagtggacgcatgacttgctgtgcgtgacacaacatacacagaccctgtcctatcgcacttctatgggatgtacttaaccccttactagcttccctacattaccacaaactttcctttcccttggatatgcgtaactccatctctaactctacataacagacttgccatgaccatgacatccttagatgcaacacatttcttcagctctgaaacatgatgtgcttcagtaaagcgtgttaaatgacccccatgccattgggacttgctgcactgctacaatatgacctcttattgatagagtgttacgcatcgcttaccaatgtcagtaaacttn

SEQ ID NO: 11613 - DNA, 387 bp, Glycine max
  unsure at all n locations
agctttcataatatgattgctanagaagctagagctgagctacacatacctctctaatagctaagctcacctccttatgatgagaagctagagcttagctacacaccccctataataactaagctcacccccatggcaaaatacctgaaaatacaaaaaaaaatccctactacaaagactactcaaaatacctcgaaatacaaggctaaaaccctatactactagaatggccaaaatacaaggcccaaacaaaggaatacctattctaatatttacaaagataagcgggctcatacttagcccatgggctcaaaatctaccctaaggctcatgagaaccctatggccttcccttggatctctgacccaatctacttggagtcttcta

SEQ ID NO: 11614 - DNA, 439 bp, Glycine max
  unsure at all n locations
tcatgatgaatcttgactatctacacaataaggtgttacattttatgctcttttcaagtnnnngctacctaaagccgcatgccaattcaagtatattttcctttgctgactaanattgtattcaaattaaagggtatacatttttttgtaatgtattttctttacataacatgcaacatatttatgtatanttttttgtgagacattntgactanccaaaattatatgcacatacatccaagtattttgctatcatacccaaagtgtaaattgccaaaggtattntgctacctattctaaacctacacattcatgacgagcaaaattcctaaacatctangcgtanggaaattattgtagcgtggcccatagctgattgctggccaaaaaaggtaactntacccaatatgcacctccttttgtgttctttttgcataaa

SEQ ID NO: 11615 - DNA, 387 bp, Glycine max
  unsure at all n locations
agcntanataaatatgtgtatnnacatataaaatcagggagctaatgagtaaaatntcaatgaaatcaacaaacagaaccatcacagtcaaattatgtcaacctgtttagaactgatcacaagaatgcaaaattattttttagaagaaaaagtaggtgctgggcagttaactagttaaccctttttaacatatccctatgcctgtcctttcaatagcaagtggcagaatgatgtaatcacatgatatattttacccaacaaaatggtgactgaattcattactacatattcaactgatcaagatataatagttaagttattcacattcatagaccacaagagatgtgaaaagataagtcataaagaagttcatgaaggactactagt

SEQ ID NO: 11616 - DNA, 359 bp, Glycine max
atagatattgaaaagagcaggcttacaggaattaacatctatagaagtgcccggacgcctcaacatcttgagaccttgtattgaaatttccaaagggtttttttatggttttcaatgatcaagttaagtttatgttcttttctaccatgcttttgttaagagctcttgtaaataccagtgaaattcaatctagaaatgttcaactcaatgtaaatacctttgatacgtgtgaaataagagacttgctttgatagagagtcaaatcatccgctgaaggtggttcagtaaagcaatttttggcaatggttccacaagcttctacatagcaccaatcagggatatcggttggtccaatcatc

SEQ ID NO: 11617 - DNA, 375 bp, Glycine max
agctttaatactaattgagcccgtacccgaatcaaatgagcattaaaaatgcagtatctaggaagtgatcttacgttgtctcccaacaagcaatggtcaaccaaacattcataacagatagtaataaaacagtaacgaatggggggggggggggtacctctctaatacctaaactcacctccttgagatgaaaagctagagcttagctacaccccccctataatagctaagctcacccccatgacaaaaaacatgaaaataacaaaaataagtccttattacaaagacaactcaaaatgccccgaaatacaatgcttaaaccattactactagattggccaaatacaatgcctgtacgaagaataacctattcta

SEQ ID NO: 11618 - DNA, 389 bp, Glycine max
  unsure at all n locations
acttctgtccaacaaaccataattacctgaatatatcctctataagncttctatttaaccaagtgccacagctcttatccatccaagatcataaccctagcccttgacatcatagtttccatactatcctattctaataaaccatgtaacggactcatgtgagatgtgtttaaagattcatataaacaaataccagtaaatgcatatgtgtgagcttatgagcatcttgttgaaaagttgaacaagcataagacatcataatataaatcaaacaagtagcatcataaatacgggcacacacatagaagagatcacataactgacctctgtcagtgagttaataaagctccactttacactatgttcaccttcacagggaagtaatatat

SEQ ID NO: 11619 - DNA, 294 bp, Glycine max
  unsure at all n locations
agctttgattggttagaaaagagcaacacacagtcatgggggaatcataaaanaaactatacctctcaaataaagtagatgtaccctagtggatgtaccctccactagaactgatccaaaagagatgtaccctctcttgttctcagtcaaacccaagtagatgtaccctctacttgtaccacaaaggatgtaccctccaatgtgttaagacaaagatctcaggcgattaaacctttgaaactttgtgaatggggatacaaaagaattctcacgcggctactcctttgaatcttt

SEQ ID NO: 11620 - DNA, 235 bp, Glycine max
  unsure at all n locations
ggaaaactgcaattggaaggattgatgatgattctgttngtgcaactctggattgagggcctcctcagaaatgcgactatggaaaatgcacttggggtcatgcttctctgctcaacctgagatttgtcctttgttttcgtcttctggttcctgaatccgtcgaacaggctttttttcttttcacaataattacacgggtatcgcttcctcctttcatttcttaatttataaatac

SEQ ID NO: 11621 - DNA, 356 bp, Glycine max
  unsure at all n locations
agctttattaaatataataatccaaaaatgtcanggaggggggtgttgaaaaagcataaaagactatttgtgattggtttaaagatacaatctttgcaaatgaaaatgcttcacaaacattaagaaagctagcagatgggcctaaaagaaatgttataacttggcaaggatacaacttanacaagtattcattttacacataagcacacgacgacaaaagtacaatgcagaacagtgaggtcaccctaagggctgaatctcaacacttcgcatgtgtgcatgacgccaatccctgtgtagcttgcatcccttactatgggttcattgatgagatatgggagcttaactatgtgaaa

SEQ ID NO: 11622 - DNA, 508 bp, Glycine max
  unsure at all n locations
aaacctactggtagtcctctannctaggnncanagcanantccanacatagaaacacaaccngcaggattatggggtacgcatcttatgtggtattangcggctttcggtcganggngcacaacaagggtcggagccactaagcgcgcataaacccaccatcccctgttgcccacctccaactgagctcacatactcccacgtagcccatatactggtttctcttaacaccgagtacccatcgatcctcccaaacgttcccaacatcagaagcaaacaacattccaacagcacaagctatcacaagccaagcaaaacatagcatatgcagaagactctgccaaaacacccaaccaattcacagctattcttactttaaagaccgcaagaaaaaattctctcgttccggtgcattaacccgtgggatcaacgtcaaaatattactgggaaggattaagtacatgaagtctcagtttggaccggtgaggatctctagcaaacatccgaag

SEQ ID NO: 11623 - DNA, 417 bp, Glycine max
  unsure at all n locations
agctttcattgttataacttcattgagaagcttctttgagagaacttccttgagaagctagagcttagctacacacacccctctcataactaagctcacctccttgagaagcttccttaagaagattccttaagaagctagagcttagctacacatacctctctaatagctaagctcacctccttgagatgagaagctagagcttagctacaccccccctataatagctaagctcacccccatgacaaanaacatgaaaataacaaaaaaaagtccttattacaaagacaactcanaatgccccgaaatacaaggctaanaccctatactactagaatggccaaaatacaaggcctggacgaaggaataacctattctaatatttacaaagataagcgggctcatacttagcccatg

SEQ ID NO: 11624 - DNA, 275 bp, Glycine max
aacgggctttgaatgatctgaaacgccataactcgctagtgtagccaatttgataagcatttgagggacggaactaaataacttcacagcaatttacagcactatacagtacagctcgttcctagcttatcataaaaaattgggcccttgactttagcaagctatttgcctgaggcttgaaccttttataatcacctaaggtataccagctacctgccacataacctcatggatctataaatgaagaggtcaatggggagagtgcctttgatttg

SEQ ID NO: 11625 - DNA, 332 bp, Glycine max
  unsure at all n locations
gtcgaagaacggtcgataccttcgcgaaattccttcacggaaaacgttatggaaacgtttcggaagcgcctcggcttagattttcttcacggaaacaatttttctaagaaaattcgaaagagagagaagtgcctaaggggctgaaccctnttccttctcacttcctcccctatttatagcaaaataggggagatggttgccgcccagctcgcccacgcgagccaggttgcttcctccagaagcaacagccttctggaggaatcttctggcccaagtgggcctggttgctatttgcaccctcatctntactaagtacaccccctgcctttttt

SEQ ID NO: 11626 - DNA, 499 bp, Glycine max
  unsure at all n locations
gggccggagagtgtactggacnttgatatcntcgnannaaacccagaggannatggngtacccatcacatgtggtactaaggggtgtttcaggctatggngcacttcaagnnncncacagncaccatgcgctcagtaacccaacaatcccttttggccaacctcctttgggctcacgtacttccaccgtagccatattcttgtttctctcaacacccggttcccatcaatcttccaaagctttccaacattcaaagcaaaacacattcaaacagcacaagctatcacagcccaacaatacagggcaaaggcgaatactctgctcaacacaccgaccaaaatcatagctcttctcacttaaagaccccagtaacaaattcctcgatccatatccgtaaccggtggatcgactctnaaattntactgcaagtctatgatacataagactacattgtgaccggtgggatctactaacagacatccagaactcattttgcatg

SEQ ID NO: 11627 - DNA, 482 bp, Glycine max
  unsure at all n locations
aaaaacaccgctagtngcttgatanntcngncnatttgagccagnaccccgggagaccctataagaggaccgcgagggtgcgcagccttaccatantaccccattaaacttacctatccatgggccgggtctgatccattcttcctactacactttttgctttcctttactgccccatccaaataatggcccacatgatctctaaagcatggttattagtgtcatgttcgtaacaatcaggacatcaggagaacagcgaaggtcatanaatttcacaatgttgtggccatgataaaggtacagaaccctcaatctgataagagggatgaccaacttcctaccagagcctttgaaagtcctttgagatgctgagtagtacttgctacccttggagatgggtattctaactttggagatgcacactagtacttgctctacanaaacttttacactcttatctgggaaggggtttattgctcaan

SEQ ID NO: 11628 - DNA, 238 bp, Glycine max
  unsure at all n locations
nccgtatgtgatgacctaatgcancantngcgacgccagggtttcttttgacccgaacgatctgcaacaacttacctggctcccctgtgtaccttggggcttgtctagatctccctcctgagaccctgcggcatggtaacatgcgatctagtcggctatgctagctgtatttgcggcgcttgagttctggggacggctactcctgaattaccccccattcattttttactgaaggtca

SEQ ID NO: 11629 - DNA, 325 bp, Glycine max
  unsure at all n locations
gataaaataaaattaaattggttgaaataaaatctggataaaataagattggataaaataaaatggctgctctcttcagtccaagcccaatttcggattcaagtccaattgcttataattntcctgagattaaattaagaacacataattagtcaagtaggcccaaatgataaaactacataattaatttgacaattaaggctaatcagtaattaaaatggtgacaaagagggttaagaaatacgagaccataatgacacatcaaatccccccacacttagccttttgcactccttgtgcaaatcaaaaagcagagcaatgaaca

SEQ ID NO: 11630 - DNA, 305 bp, Glycine max
tgacagggtaacaaatttagtgttttgatcaaaaacaatgttcatatttatgcacagcagagtcaaaagcaagaagaaagacgagtgcacataggcttttgtaatggttcaccccaaccttaagctacgtctagtcctcacccttaaagatgagatttcactaacacactcagttcacaactagaccagcaaccgttaggtttcaaaaacctgctagcttcccactcgacaattctagcctcgactagaccagctacactactgggtttcaccttagcgacccactgtttgactttagagacaaa

SEQ ID NO: 11631 - DNA, 305 bp, Glycine max
  unsure at all n locations
agatncctaaagaagctagagcttangctacacacttctctctttatactaaactcaccttcctgagatgaaaagctagaacttaactacaccccccctataatagctaagcttaccccatgaaaaaatacatgaaaatacaaaaaattccctaatacaaagactactcaaaatgcctcgaaatacaaggctaaaaccctatactactagaatggcaaaaaatacaaggcccaaacgaaggaaaaacctattctaatatttacaaaagatagcgggctcatacttaacccatgggctcgaaatct

SEQ ID NO: 11632 - DNA, 111 bp, Glycine max
ggtcattacataacagaaagtttagttgagcagtgacgaaaaacgcgcccaggacagaggagccacccaccgccacctacagccagcaaaaaacccgatgtcaataccgac

SEQ ID NO: 11633 - DNA, 259 bp, Glycine max
acttggatggatcaaccgcggtcaatgaagcgaatgttttcataccaagtgacaaaattgtatatgttaccattggattcaatgttcacaagtgtcattcatataagcctaagcaaaactgccaattcatgatcaatgcgatgatggcagccgaaaagacaaacgtgagttttgaatggtactagaacaaaccgtcttaaatgtggcagcatggtgcaagtctatctgcgagacatttattcgagagatgctttttggt

SEQ ID NO: 11634 - DNA, 441 bp, Glycine max
  unsure at all n locations
ctggcaaatgagaaaagagctatggatagnnnttatcatttctctaccactgtatcangaaaagaaacagatatatataagatatcacatgcaaaagaagaaaataatacacctttaaacgactgaaacaatntatataagaaaaataaatgggcaaaaaaacttcaaggaacttgattntagaaaaactagtgaattctaaagccatatgtttttacttaattctatttatctatcctccaatccagattgaagtacttgcacttcaagttctcttggtgtgttttcttgcaagttctttgtttaagtttctaacctattctcttaatcattanatgtatacttgataaatccatttggaagtccaaaacaccctctaaagtcttttttttctttttgangagagatatatagtcagattaattacaattgttgagagtt

SEQ ID NO: 11635 - DNA, 385 bp, Glycine max
  unsure at all n locations
agctntcactagatcatataagataaacgcattcaggcgggcgtgcagatatatcctcccaaacgtcaaattctccgcctatatattcaacctttccatcactggcacgtggagtgaatcttcctccatggtgcaatactaaagttatattgtcattcattctacacaatcagaaaccacaaacattgtcatatattaggaaataaaaaacctacctcanactcaaacataggcacatcacacaacaacatgcaatgtcatatataaaaacagagcatcatanacaaaaataatacagggtcataaacctccctacgaagcgcgaagacaatgcacatgagaccccttgaacatataaaaccccaaatcaaaccaccaaaacaat

SEQ ID NO: 11636 - DNA, 287 bp, Glycine max
  unsure at all n locations
tcaagcttccgttctcgagagcatngctaatttaagcatngctttctttgttttcgngtatcttaagaaaaacgtcattgcgtctcctttctttcttccaaagtcatttctaacgttccaaacactttctccatcacccacagccaccattagccaccacaaaccgccgttgttctccgttgcaaccccatactgagaggaacccttcgaccgaagcggaatcttccaacttgactcgcaggttcggtagagaacaaaaccctaatctgacctttcatttcctttga

SEQ ID NO: 11637 - DNA, 173 bp, Glycine max
  unsure at all n locations
gcatgcatcgaacgaccagcgngaagaggaatgttcaagacaggggggaaagaccgccaggaagaaggcccacgaaaacacacgcacggggcgcgcagagcgagcgggactcgggggccacaacgcagcgcggaagccccggcaagggggaagccagagaggggcacgcgacc

SEQ ID NO: 11638 - DNA, 222 bp, Glycine max
  unsure at all n locations
tatgtacccactatggtggctgganatgcaacaatagaaaaacctagagaagagtggactgaagatgaaagaagattagtgcagtacaatntaaaggctaaaaacatcattacttttgccctangaatagatgaatattttanggtttcanattgtaggaatgctaaggatatgtgggacactctacaagttacacatgaaggcacaactgatgttaacaat

SEQ ID NO: 11639 - DNA, 261 bp, Glycine max
  unsure at all n locations
gcaagctcctgagcttgaaattcgtagccaactgtttggcgttttgaacatgttctccatcttcagcgnaggagttggagcgtagctgatgattatgctcaaagggaaggtcatagaagtgtgacaacgtgggtaaacaacgtttcttcttcttgttcttacaagtcactttcattcttcaccgccacgtttatcttccaacgctactgattgtctgagattgttatggctactctattgtcttctaccaaataatctctt

SEQ ID NO: 11640 - DNA, 500 bp, Glycine max
  unsure at all n locations
caagctttgtttttcattgtttattgccggcnnacccaacaccgtgtgcgcgtcagctctcaaccattcgcanaccacanacccanatangnntcttgtcncnnacggaagtgaaccgtcncnnccggcaacctggaagaaaaaggagggaaagccctcgatcnnttccttgnnaggaaagaaattgagggccccgtggaagtgaaatttggggaactatcncnngttcgcagacattgaaacggatctnnntgcttagtacccgatgnnttgttattccnnccccaagttcaaagtggccggacccttcgacaagtataaagtggacgaacttgtcccaaaaacccatctcaagatgtactgccgtaagatgggcgcccactctaaggatgagaagctattaatacacttctttcaagatagcttggccggagccgcggtagtgtggtacactaatttggaagcttccatatccgtacttggaaggatctgattactgc

SEQ ID NO: 11641 - DNA, 349 bp, Glycine max
  unsure at all n locations
atagatactcagctgtaggaggctagctacaaattatattggtttttctattattaaaggttgtagatcctaagagagaacagatcctatacttatccaagtgatctttttaatacaattagcttgctcactagctcttcactttcattgcttttgaccttattacatcagcacacctttcctattattgttgtttgtatatacaacttatgtgttgcatgtgatgatgctntatctctttctttgcatcccaattagttgcactcccccaaatttggagtaaatattccttgaaccatatgctctcctagaatctaaacaaggtattcggagagaattatttgagttc

SEQ ID NO: 11642 - DNA, 317 bp, Glycine max
agcttagctgatttggtcttcgctggcgaaaggatcagggtgggtatggaaagaggcaaatatgattatcctgctttgatgaatgcgaaaactgtggcaaatgaaaagggtgagaatgaatgagaaacccatgctgcgactgccgttcctacatggaaactcccccgccagctcaacaacatcattactcatccaatatcagcccttctcattacccaccacccagtcatccataaaggccatccctaaatcaaccacaaagcctgtctaccacactttcacagacgaacaccacctctagcacataccctaagcac

SEQ ID NO: 11643 - DNA, 502 bp, Glycine max
  unsure at all n locations
ggggcccncnnnaaggggnnnnanaccgggtagctagtgctacgcntactaaccatagnannacgcccanatagaaactcngcnnagagaggagctnnaaggaggtatttatgttatagagggtttggtgggcacgaggnngaaggagaaaaggagagagagaagntgaactttgaagggtgcctnacaaatttcacattcatcanagttttgacaagcgttacacatgcttctatgtataccctaggtactaaatacatgaaagcttccttgagaggtatagcttatcttcacacacccctcttttaggtaactcacctccttaatttaagaccttagaggctagctccgcacacccctctataagctagctcacccctatgcccaaatgcttgaaatccaaacaggcgctgtacccagactctcgaatgcgccacaggagaaaacccattccaatatttctataccaggggccaaccttgcccttggctatagatttccc

SEQ ID NO: 11644 - DNA, 422 bp, Glycine max
  unsure at all n locations
agctttatttgtgcgggttcgggagacaaaggtcaagcgttcgcgatatgcgaggatgatattccgagtactttggatttggtacgaccatgctctcctgatttccagctggganattggcgagtggaggaacgccccggcatttacgcaacaagcataatgtaaacctttacggttttttaaagctctatagttgggcctaggctntagagttttcattntgttaaggctntgtgtcctttgtgtttgaatntataatacgaggatctttcttcatctgttcctggtctctacccattctcattcatttgcatgtntacttctttntctaaaacggcagattcgatgacgagtccnccgaaggtactaatacctgggacccgtctatcaacttcgagcaagaaatgaatcaaacggaagat

SEQ ID NO: 11645 - DNA, 430 bp, Glycine max
  unsure at all n locations
tcatcctcaaatccctctagttggtctcggcttaatacanactctcctcctatgttgagactaacttaaacaaagcttcatcctcagatccctcttgttggactagacttagcttaaatagcttacaaaattttagcctaacttagcctaatctttgtcctcagatctctcttgttggactagacttacaccaaacagcattattataacagcatacttataaccaaaacttaatccacagattcctcttgtaagactaagtttcaattcttcgtcattcaagttctaatgcaacaatacatttcccaatgttaaaatcacctaactaggcacatanatggttgatcagaccaagagcatacaaaatttaagcactgaagaagcatttgacacaagaaacangaatcattagatatgaagatattacatc

SEQ ID NO: 11646 - DNA, 531 bp, Glycine max
  unsure at all n locations
aggaaacgctctacnactgaacgaaataacaaaagccntaaatacaaattcanacaatnacanaggggagggagcgggntatgcatcaatanccannccaatacaacacatctccccggcagacgatagagngagactagcaagcaagcaacgcccatattctatgtacaataataaagctactagatgagaaagtggccctcagaanatcttaaaagctccgataccactcgttgggacagcggcctcagaaatactaagaaagaggaggctgaataagatttacaaacaatcctgaataaaactccagatagatcttaaccccggcctaagatccttttaaatgaattctaataataattcaatagacttactgaaagaaaaataagcagcaaaaaaaaagagttgaggaaagaaagccaaccagcttaaccggttggcaaaccaatgctacgccaaccccaaaaaccgctggaacacaaaccgacaaatcctacaaaaccgaaccaacaagacacctccctgggccaa

SEQ ID NO: 11647 - DNA, 256 bp, Glycine max
tccacatccacaaatcgggcataaacccaccatccactgttgcccacctccaactgagctcacgtacttccacgtagcccatatcctcgtttctctcaacaccgggtccccatcaattctgccaagcttcctcaacatccaagtaatacaacattcaaacagcacaaactatcacagcctagcaaaacagggcaaaggcagaaaatttcggccaaaacaccaacccaaatcacagcttttcacataccaatacccc

SEQ ID NO: 11648 - DNA, 212 bp, Glycine max
agcttaacttttattttgaactctaatatatcagatagagaagcgccaaaacactttatataacacctacaccatcggcatcatcccatcttggagttaaggcacaagtctaagatgcttcctataaccgacggaagaagctaatggtgaaaaacaaatcatttgcttagtcattgatgaattattatatagctcctcataagggtaaaaaa

SEQ ID NO: 11649 - DNA, 174 bp, Glycine max
tctctgcctatgtcttatctgattgtgatcgcttgtctaatggtggtctttattcgatgcgcttcggcattcagtgtgattaactttcttcttcacatacgttgtagtcctaaatgatagattgatggcatcaagccaatcgtgcttggaccaacgttgaaagatttcaaactt

SEQ ID NO: 11650 - DNA, 211 bp, Glycine max
agcttgcattagttgttttttttcggagagacagccactatactttgtgaacaggattgagaacagaacgactaacaaggtgtttagcattcgacagtctggattcggtgaagatgtgtggattcatttgcaaccactgtcgaccgccaacttttcttgggaagatccatatgggaataagtttttacatgcttaacttaccgatgatgat

SEQ ID NO: 11651 - DNA, 359 bp, Glycine max
  unsure at all n locations
accaatcctacattaaattaaatggacttttctgtagagagggcaaggggtcataaaatacaagaatttaaatcagacaagttacgcttggctctgtgcttactaatggtaggcaagtcctttgcattctcaagaaatttgaaacctccaaagctacagcttgtactcacctacagttcagatagatgcacaaggttacaacaattcacatcatcaaggataaattactaacatcttttntttttatctgcaaattactaacattgttaaagagatcaactataagtacatagtgagacaaaaagtgccaacatattattaaaaaaaaatgcataatgtgaaaaaagtttcacttatta

SEQ ID NO: 11652 - DNA, 350 bp, Glycine max
agctactgttcatatggaatcttctattaagatcaagaagacttatgttaactactagtataatgtaccacatgatcaaataattaattagcggcatatatatttgatatgcacgctgctgccttcatcaatttaacagcacaacattatttagaggtgaccggtgtggcagtttcttaataaagcgtgtatatacaacatgcgaatcaaacatgtataatctcaatggacgtggcattcataatgcagtagaatccattcaagaaaggtacaatagcagataagtgaaatagctttatatctttacatccaaatacaagaatgtgatatctgtactcgggtcatgtgta

SEQ ID NO: 11653 - DNA, 413 bp, Glycine max
  unsure at all n locations
cccagatgtatccatgatattcggccatagntactcccctancnctcccttatacacactttgcctttcctcattttctaattggggcgagatgaatccagacactttctttgtctgagagaattatgttcaagggacagcgagccatatagttgcttttcttattgtatgctgcacttgcatgaatgcactccttataaactgtgtgtacatttgcaatagtcatcataatctaccatggactaaaaatgagaactatctggcaatcactgcctgttagcccttttattttcttctcttttcttcagttattccatccaatttactaattggtaatgttttaaactccaggtctccctgtggagacacctcttgacttttggagaaataacctccaacacctagatgcttcc

SEQ ID NO: 11654 - DNA, 279 bp, Glycine max
  unsure at all n locations
agcngcattcaattcaattacactccactcactctgctggcgatcgctctctctgtatattgagacatacgatatccatattaaagcctctcaccctcatctaatgaacataactttgctctccgatatacgactgcgcgcattctccatcttgaggctgcacgccctcaccttcagacggctagccaccccttccatttaacggctactctgctgtcctattgtgggctgcacattctcaccatacgagaatttaatgtcctctgcccttaatgctta

SEQ ID NO: 11655 - DNA, 253 bp, Glycine max
  unsure at all n locations
aattagttacctgattaaaataatcactctctctctttgngtatcactcttttcctcgggtgtatcactcttctttntcatattcctttgtggagcctcactattttctttctcttgttctctcttttctctcattctgatttggtcatcacacacttctctaggggatagaggtttaagagtaaacgaggaagaattgactattcgtctgtagggctcttctttgttacggttcaacaaacgttgcatttgt

SEQ ID NO: 11656 - DNA, 316 bp, Glycine max
agcgcatcttctttttttcagatgatgtaaacgagtttggggctgcctcatgcacttctctaatgactatagcatcatttctggcgctaaactgttgggagttggaagccatcttctcaattaaatttctagctgtagcaggaatcatgtctccaagggcttcaccactggcagcatctatcatacttctctccatgttactgagtccttcataaaaatattggagaacaagctgctccgaaatctggtggtgagggcaactggcacatagtctattaaatctctcccagtattcgtgtaggctctctccactgag

SEQ ID NO: 11657 - DNA, 139 bp, Glycine max
atcttgctttatggttaatgctgtctctagaacatctccattggatctaatgatgaaatatgtgcattctcgggtgaaaaagaggctaagttttgaattgcaaaatgtagcacttgggctaagctcaacagttgggcta

SEQ ID NO: 11658 - DNA, 334 bp, Glycine max
agcttatatctcaccttcagctgtccctccgatctcagcgtcatcataaactcatgaagcgatacttctgcccatttgccattctggaacgcattggcagcgttgcttaccgtttgcaactacctgaagggtctcgtatccaccccgtcttccattgttccttactacgccctcatcacagacctcttgacctcccaacctcttcccttccggcggatacttcctccccacaccctatacttgagccactagccatccttgactctcgaatggacttctctgtggaccccccaactcgtttcgttcttgcacaatgggttggtcttactacgga

SEQ ID NO: 11659 - DNA, 383 bp, Glycine max
  unsure at all n locations
acttgatgttttttgctaataattaaacatagttttatttgtatagacgaacctgtataactttatgtctataatctgaatttgttgttaggcttgtgcttaatgtgttagtttttttattttctgattgtgtttttcgtaaaatttgatatgtgttttacacaatatcttcttcacacaacaatgtttgtttgattgcaaaaatgtttgttagaaattactaanatcataatccaacctcccttccttgtgatatttgcctttacaacatgacatgcaattaccactaaagagaagaaagtaaggaatccanataatgattaaattggtgcattttatatatgaaaaggtgggcaccttttgtttcatctgtggacttatgg

SEQ ID NO: 11660 - DNA, 402 bp, Glycine max
agcttgtgtgatgttgcgcgtactgatgggtaccatgaggtgtttgctggggtttgacccatgcgggtgttgaagagatggcatgggcatctccttccttcctttttgcccctgttgccccgattcttttggcgtttacgtttgtggaggaaacgtaatcaaactttcctctcttcaatccaacctcgattctttccctgtcaaacaccagatccgcaaagctggacggcatgtaacccactagcttctcatagtagaacactggcagagtgtctaccatcatggtgatcatctctctctcaaccatgggaggagctacttgtgccgccaaatccctccatcgctgcgcatattctttaaaggttcaccctctttcttgaacatattctgcagttgagtacg

SEQ ID NO: 11661 - DNA, 488 bp, Glycine max
cgccaggtatccatgacatcagcgacttgagaaactcagctttgatttcatacaagaaagcgtaaaaatgagggcattatgataggaatttccctttaggccagcggctgatttttggggctgcaccatggtttggcacaataccttgagcatgcatatatgaattcttttcaatatatatatatatatatatatatatatatatatatatatatatatatatatatgtgtgatagccatcgtttcaggagcactgagcaccagcaacgtttcgagaccatcaaaagatggtcgttccacacagaaagacgcgtccagctcatggacaatgagtacacagaattttaagaagacataactcgccgacattggacatcactggtcactccgatggctaagtttgacccagatatagatctggagttatatgctaatgcttgccccatagaagagggagtgcgggacatgcggtcatgggtaaagggcac

SEQ ID NO: 11662 - DNA, 417 bp, Glycine max
agcttggttaggatgcttcaatggaggaaaagaaagagggagagaaagagagaggggggagcacaaaattgaaggaagaaaaagggagagaagttgaactttgagttgtgtctcacaagactctcattcatcaaagttacaataagtgttacacatgtttctatttatagactaggtagtttccttgagaagctttcttgagaaaacttccttgagaagcttctttgagaaaacttccttgataaggtagagcttatctacacatacccttctcataactaagctcacctccttaagaagcttccttaagaagattcttagagaagctagagcttagctacacacacacctctctaatagctaaagtcacctccttgagatgagaagttagaagctagctacacacccgctataata

SEQ ID NO: 11663 - DNA, 350 bp, Glycine max
tatccaggctcatcttggtggtgaagctccttctttctggcttattccctagtggatggcgcctcctctcacctcttctcctttgtcttccgctgcatctccatggtggaaaatcaccattaaaggacctcattgaagctcatagatccagcctccatagaagccccacaagcaagcttccatcagcagggttcctccccttttgcatgccctacttctgaacagtttggggctgaagtccatggcctagagactggcccgatgcccatgcaggggaagagcctgcatgatcccccggtgaggcagatgagtcccatatggatgaatagatgactgacctgctcggtttc

SEQ ID NO: 11664 - DNA, 178 bp, Glycine max
cagccacatttgatttcgattctcaataacatgctactctcctgtgcgattgtctcactctgtattggaaacgttcaccatgcagatgcgacactctacacaggatctgatgacaaaggctgcgcactccgatatgcgattgtgtccatagtatatcgcgacgctcgaaatatcaacc

SEQ ID NO: 11665 - DNA, 307 bp, Glycine max
cagaaaattagagtgcatgtgttttatcttagtgagagtgattctcctaaattcttgagtgattcaagaacaccttggctgtatcaaaagactttcacaacctctgtgtgttgccctcgctggagagagagatactttccttcctttcatcatcacccttgttctttcaaaccacaattccagaaaatccacctctgcccagaattatctcgtggccataactcccattttgcgcactcaagttaagtgattcttcagcctaatttgaatatcaaaacgagacctttcacctcgttctggaatcacc

SEQ ID NO: 11666 - DNA, 367 bp, Glycine max
  unsure at all n locations
tcaatctncttctntntgtnnnacaaattttaatgcataaactaaagtagtaactcttggtcttgttttaaggtttatttaactttttaacaatttcaagttaaatttttaatgaaaaatattttacagagaaattgagcatatatacgagttacaagatacataaggaaatattatgattaccttaaggtaaaaatatttatatcatcggtatcttttggttaccatgatggaatcaattaatattacaagactatatatataaatattgctatacacgtataagtaaatgttcttacttactacagtagactctatttgaaacagtaattcgatagcattaattgatatcgagagtgttcttaca

SEQ ID NO: 11667 - DNA, 421 bp, Glycine max
  unsure at all n locations
ctcaagctttgcatgtaaacatctctatcttgaataaatattcattaatttgttgaagaattngaaatctaccagtaccgaaaaagaaacatgaatgattcttatcatcatagttacattgatattattactaaatgctgttgcctaaataatntgtttctcaaagtctctagattntggtatctgatattataataggcttcttattaactgaaatggtatatctttcgttgaatttaatcagtatttgtgggctgtttatgatcttattattcgttggctggttattgtggtactaaagcacttcgtacttttgtgtctaggaatagtccattgtatccactgcaacatatctgtcatctgcggatgttttttttcatgtttgtgatgtgctggagatgataatgtatatgttctactt

SEQ ID NO: 11668 - DNA, 395 bp, Glycine max
  unsure at all n locations
tcaagcttgtgtatgaaacagatgtgattaatctaaaattacatctctactgagaagaactttcctttcagatggtgaccagatcctatagcctttcaccccatcactataacccatgaacagaccctttcttgatctaggtaccaactttccttcattgacatgataataagcattgcagccaaatactcttaggtttgagtagttctctgttntgccattccagatttcaataggggttttaagtcctatagcagtagagggtgttctattgatcagaaaacaggctgtattgatagctcttccccanaaacttctgttgagaccagcattagacaataggcatcttgttctttccaggagtgttctgttcattctttcaggaactccatctt

SEQ ID NO: 11669 - DNA, 207 bp, Glycine max
  unsure at all n locations
ctaaactagaagtcttaataattagttactggtactcttaccaatcattatgcatgcaaggttggaaaacatcttttatgatattttacttttcaccttaattcaccaaactgaaagtgaaaccaanagcatgaagcaaaagcttgctttgttgcagaacatcaaagtctaaaaaagataacanacttttttacctctcccctggat

SEQ ID NO: 11670 - DNA, 355 bp, Glycine max
  unsure at all n locations
agcttcattcaatatcccactngccataaaccttgaaccagggtgagaatatcaatccttgctctcgggagaaaacacanaaagaaggaaaatccccaatgaaagaaagggagaaagcaaaaaaggaaagaaaattcccaattaanaaagggagaganaagcgaaaaaaagagaggaagaagaaaggaaatctccgatcaaagatcgcatganaacataagaaatatacagaagtgtctttggaccaaaaaatatatgaacaatacagaattgtcaccaagataacattgccaaccaaaaaaccctgtgcgtcagtggcttgttcgcctcgcgccaaacaaaaacagaaaagaaa

SEQ ID NO: 11671 - DNA, 308 bp, Glycine max
  unsure at all n locations
ccggggtgaggtgtgcctgtctcaaatgtcaaaacagaatctcaaactattatgctcannatcaccaataacaaaatgctcgggatactcaaaaggtactaaatgatgtctaactaatctatganatgtactatctatctcangatcaaagggttgcaagtcagatggattgcctctagtcatacactaaattcagcatgcacaattagttgccttcttatgcaagtaacagtgtaggtttgaactacagctaccattaaatgatatccaaatgacttgaaattntgtgagcaacattataaaatgat

SEQ ID NO: 11672 - DNA, 403 bp, Glycine max
  unsure at all n locations
ccccattttattggnaccacancacaagagccccgaggcggggcgcgaaaaacanacaccaacncncagccaaaccgacnacaccaagggagaaccggcagacaaacacaggaaaaggcccacaggacgagagccgaacagggccaacacgaaggaacagaaccaccaccgagagaaccgccgaagagaccacacccgagancccaggaaacacaaaacgggaccccgaacgagaaccaagagagaggcagaggncagaacccgangagnnccgaaaggcaanacgcacgggcagaaacccaacccaaaacaccgaacccaaccccaaaggaagaaaaaccgaaaaagccaagggacccgccacaaccacgcccagaaaagaccaaggaaagaaggaaaccgg

SEQ ID NO: 11673 - DNA, 539 bp, Glycine max
  unsure at all n locations
ngccataggctaagnngctttaacnnntgctgnncaatangnnancnaangncnnagnngcncnngcangacaanagtntgcatatggctacnnactttttgtttngctntgttannaatataaaaaaacggagtggatggatcatccaacntaataagactcaagcttcttaagatgagtngggccttagacattattagttagtctccaatgatccaagtggtaactgagatttgatattttgctactcctcaattctgtccatgcatcaagcacaaatagtgcttatgaagggacatgtgagaaataacacctattcttttccagatgagcctagattgtaggagacgttggcctttgatgactagaacagaattatgtggcttgttagtctgtagatatttcaacatccacatattttcaaagctagaagacaccggatacatgatttattttggtttgcgtgtgtatagagggatctagaattctgagagctgggacaaatatttgagtattatcctcaaagggaccatggagt

SEQ ID NO: 11674 - DNA, 384 bp, Glycine max
  unsure at all n locations
agcagagtttacttttttatctactatnngngnnagggggatgatacaattcagttcatgacagctggaccttgtgccgctctttgaaccacaagataggacgcttgtcaggagctgctctgaatgacaaactatntgttgtcggtggtggcaatggagttgacagcttatcagatgttgagatgcttgagttacatattgggccggggatccctacgcactcaatgctagacaaggttaaatgggacaatcgaatgatcaatatttcaggtcttgactgagattagaaaggatgattatgggttaatgcccaatgacacagtacattatgtgatttttacgcttagctgctaagatgtcacttggattaatatttacaacatt

SEQ ID NO: 11675 - DNA, 329 bp, Glycine max
  unsure at all n locations
gggatggcctcaaatatggggggcaattttggttggtttccttgctggatggggttggattgagggtttgtatgagatggccctaagcctgtaatgcatttntggagcactggggcatgccacattgccccattctctttgctataatgcctaaacgtgcgcccaccaagtgttcngtgaaatgcctcaatggcatttgcgcatgattttgatagggaaacaacctatgggacgatttggtgtgcgcgtgtttgctgtctttggagcatgtattcagtntcgtaatggctagaaagattgcccacatacaccctaagcctatgaaccga

SEQ ID NO: 11676 - DNA, 425 bp, Glycine max
  unsure at all n locations
agccagtgtgtatatcgactatcaaggacaaaaaggaatcttcgagtgacgtgacgaggaatccgcggggtagctcactatatgtaatgggagtttattataaaatttaccattttaacaccatagttaggattaaggaacctagctatgaggatatctgcctgtccttgtgcatgctgatttttcttcaaagaaaattacgttttaactaatgggatgcgatatatatattgcgatgaatgatattgttttggctgttngaaggctgtgcgtgatgaaatgatattgttgagtntgtttgaatatgcgttgatgttgctattgaagattataattgatatgtgatgataatgatgattatgatgatattgatttgaaatgacatnggtaataaagaccatgtcaacatgaattgttattattga

SEQ ID NO: 11677 - DNA, 273 bp, Glycine max
  unsure at all n locations
cattttaaactggctcaaactgaattaacccctaattttccaccgaatcaaattttgactcctcaaacacccaatttgccctagaaatggctctnggttcactttggtcattngtttttctctctagctcagcctaacctttctcacatgtcctanatgacatttcaagctagtattaactcactttaacctccatttaccacagaaatcagacttagtcttcaactctcaaggtctcacttcttttccactcataacatcacattctcactt

SEQ ID NO: 11678 - DNA, 191 bp, Glycine max
  unsure at all n locations
agccacgatttctttattctcaccngncanaaaccncgagccagggggagaagagcaaacaccgctctcgggagaaaacacacaaagaaggaaaatccccaacgaaagaaagggaaaaagcaacaaacgaaagagaacccccacacaaaaaacggagagaacgcgaaagacaacagacgaagaagaaagga

SEQ ID NO: 11679 - DNA, 156 bp, Glycine max
tttctctcctgaaccgaaggctttacttgtaggctggtaaaacccttgaaaatcagtattagctggtcacagtttaacagcaaaagttaacacagaatcttctacggacctcaaataatgttcctagcaaccataaatatatacaagaaataatta

SEQ ID NO: 11680 - DNA, 392 bp, Glycine max
  unsure at all n locations
agcttttatatattgaaaaanaaagctccaagagcttggtattaaaggctaagctcattcttagttcataatggattcaccagaggaataatggacaccacactatttagaaaggctaagataggaaatctgttgattgctcaaatctatgtagatgacataatctttggtgcaaccacagaaaggatgtgcaaggagtttcctgagctaatgaaaggtgaatttgagatgagtatgatgggtgagctaaaattcttcctangtcttcaaaacattcaaaaagatgatgggatattcatccatcaagagaacacanaaaacctatttaaaaggtttagaatggatgaagctagacctatggctacccctatgcacccttccacaatcattga

SEQ ID NO: 11681 - DNA, 381 bp, Glycine max
  unsure at all n locations
gtccatctatggattgaaacaagcctcccgccagtggtatttataaattcatgaggtcatttcttcattcagctttgaagagaatgtcatggatcactgtatataccagaaggtcagtgngagtaagacttgtttccttgtattatacgtagatgatattctacttgcgactaatgataaggttatgctatatgaggtgaaaaaatttctctcacagaactttcatataaaggatatgggagaggcatcttatgtcatacgcataaagatccatagagaaagatctctatacattttaggcttgtctcaagaaatctatatcaacaaagttntagagagatttaatatganagattgtcaccaagtgtagcttcctttgtg

SEQ ID NO: 11682 - DNA, 409 bp, Glycine max
agcttaatactctctaactgaaagtattggtgtgggcccttgtcaaacacaaagatatatccagatgtgtatccaagtagattccactcatatctctagattgtctcaaagaaaattgcaagacacggctataatacaacacatgatggctatatacaactcaagctattttagatatggctttgatacggatagagccactttctgaattcttatattgtataacaatgtatgatgtaactatacggtttttaaaataaataaaaaagttccaaacaaaaacaaaatgcaactaatttcctcttctcagaacatagacaaaaacatgacacacccttcttctctgaccatgacaacttcttttcacagttttggatgttcttttagtgagggtgtctatttttctagt

SEQ ID NO: 11683 - DNA, 167 bp, Glycine max
  unsure at all n locations
tactcctattattntgttctaattataaaatacttgatgatccagtgtgcttgtccgtaacatacgcgaccccacttctatatttcgaagagaccaagatagatcaactgaactgtgagtggcgcgaacaagtatttttggcaccgtagcagacgaacttagatcat

SEQ ID NO: 11684 - DNA, 392 bp, Glycine max
agctttgattcaacatatctccccctttcggttttgataatgccaaatccgtatgatatgtgctgatgtttttcttctcatagtacatgtttcacaaacacgtgtcgcaacgtgcccttttgcgggcgagctaacgcgaggttcaccggtgcgctttccaaaggatgaaagatgcgcggagtcttcaccaacgtttatctgtggaaaacgtcggataaaccgaacgaaaccagtcaaaatgaaaattctaagttcgggagttgtatttacgcttgaggaaggtattaacacctctcacgtttgtctcaaaggacaacagcctattttttagaattgtggaaattgtgttaccttaactctatttctttctatatttttgaggtcgacaaaag

SEQ ID NO: 11685 - DNA, 458 bp, Glycine max
  unsure at all n locations
tactcaagcttgtccctctgttccctataaatagggggaggagggattattaaaatcgttcaaccctcctggtatctgacgatcacttgaaattagtaagacaaatcgtttccatgaagaaaatctaagccgaagcgccttccgtactcgtccgagacgtttccatcggtgatttcgtgaagattttccaccatcgttcgttcgttctttgttgttcttcggtctttaactggtgagttcccgaaatcgaacttttcaattcattctatgtaccattggcagtctccatttgtttcacgtacttttattttcatttcatgtacatttcgtacccccttttgacgtgctttagtcatttatttaagtcattcttctcgcctaatcaaaanataaaataaatttctaccgatcatttgaattgtaacatctggtaatttctgttaaaatgaaatctgact

SEQ ID NO: 11686 - DNA, 409 bp, Glycine max
atcttggattggttgtgttggcgaatgcagttattgcgactatcccttcatataacatgcaagcaatgttgtttcctcagtatatctgtgactatattgataaaactgactgtagttttatttggaagggtttctacgggaaagggattcatatggtgggttggaagaagattacgaggtataggaagaaaagacgtttgggggttagaaaaacgtgtttctaagtcggatattttgcactttttaagacggttttgagtcatcataaattgcggaaggctctacgacaacggttccataaccgtcttagtatgtataggattctaagacggttatgtcaacaaccgtcttagaatgtatagcatactaagacagtactctaggtataaccgacttaatatgtatagga

SEQ ID NO: 11687 - DNA, 447 bp, Glycine max
  unsure at all n locations
ccacccaaatcatagggagcatagacattgttattcatcatcctctgattattactaatacatgtcccttcaagcattaaaaaacttctacctttctccctcctatccacctcanaaatggagttattccacaaacataataggccaccagcagcctgcacagaaagaacataatcccaatgggcagtcgagtccccccaaatggcctagcaaatacttttattaaatttctcccttttggtttcttggatacagacaaggtccactntgtgctttacaatgagccttctaacagcagcccacttgattcccctccccagacctctagagttataggagagaatgatcataattgntgaaatttaattcccttatnctgtgccatcatattatccttattctccatatccagcaacagccccttaaccttgttatcatcttccccat

SEQ ID NO: 11688 - DNA, 413 bp, Glycine max
tcaagcttggttactgcttaagaagtgaacagatttatcaatataatcttagaatgatagcataattttcaaaggtatgcttagaaaactagatggtgcacaggtatgcttggaaatacagcttggaaaattagatggtgcaaaggtatgctcatgtaatatgtctacaacgagatattgtttaatttgtgaaagttgttaacttgggtatctaattttcttcatttctcttcatcagtttgatttgtcattttatatcataaataatatacctcctttttccatgcagagtattgcaatagaattgcagagcgagcaacagttgggataattagctatgtctattggaaattaaaggtgtcctctatgtgatgtgaatcttcagctgtatttatttaacctatactatgttc

SEQ ID NO: 11689 - DNA, 120 bp, Glycine max
cacctattttgaatctcttatgatgtacctacatataagaaacagtcccactctcccaattttacacaatcatattcatacatcatttgggcaatttcaccgagcacttggtgagcacat

SEQ ID NO: 11690 - DNA, 404 bp, Glycine max
  unsure at all n locations
gctgcacgcattctattcttgcttgtttctcggccgagagcaggataacgcggatctggataactgagaacatctatatctctctcctcacaacacggtagcaaattccattgcagaacatacactaatatgggcgtgcaaacgcgatgttcaactgggcggagaatgattggacagacaaacgtggcgggaacaggaacgcttatgtgcgatgaccaggtgctgaaactggagacacacgcgaggagacagtggatggatgagaaattggtggtagccattcngaaggtggtacagctatgcgctgacgtcgaccaccgccgcatacaagggacagcgtacgggggacttgacggaggcgtatatattctacgacacacaccgagtctgcgctctcacctccg

SEQ ID NO: 11691 - DNA, 95 bp, Glycine max
tcacataaaactatatgctcaatacagcttggaaggtggtcacttggcaaaaaaagtgccatatacttcaatatatataaacacatataaacata

SEQ ID NO: 11692 - DNA, 337 bp, Glycine max
  unsure at all n locations
agcttattatctgttatagatgacatattgattaacattaccaattntgactcccaaatttaattcctattttgactgctagaccaaagaaagatacatttttctccctatctcttctattgcttcgtattaaattgcaagatgtttccatatattggtcctaattttttatactcgctcatgcatgttgaatattttgacaacattaggttttttataatttatgaatgatccttattgaaggactgctgtctgttaaaggtcatatataaatcactatcccagttttataatttataatactaatttgagaacaaacctttntctacttaaaaat

SEQ ID NO: 11693 - DNA, 486 bp, Glycine max
  unsure at all n locations
ncctttgtcagtttagtactctcgacctctaaatctagctttatccatcacagactgattacccttgaatttatgttttgttttgaatgtgaaaaagcgtgaatattatgaccttgttgaaaaggtttttatttaaatttaaattggcttgcttcatgaggattacttggcccctagtagcatggaaataccttttcatggtatgtatatatgtgaatatatatagcatggaaatgccttgcaaagtgtgtgaatatatggcataaatataccttgcaaagtgtgaatgtatagcaaataatgaatttcaaaaatctgtatatgtaagataggtagncgtaaaaatgcctttcanaatatgtatatttgtgggtaggtagcataaggagcctttcanacaaaatgtacccatggcanaaatggcacgagaatggcttccnnaatgatatatgatgtggaattcgctctcaagtgtagatagatgcn

SEQ ID NO: 11694 - DNA, 405 bp, Glycine max
  unsure at all n locations
agcttccctgcatgnggtcttgtacacgtaggtttctatgagttcctgtgcttcgaaagccacgtctcggatttccgacacccacatgcgaacgcggtcgttgccttcttgttttgcatctgcgtccctcagaaagctctgcatccaccccaattcgttcttcaaattctccacttgctctcttacccctgccagctgtgaaacagacaccgccgccactgctgcttgttccaccagcagccccgtcagcttggtaacgaccgttgacacagcaacctcggccatcctatgttgacttcttctcttctctgcttctcccaacaagactagagactagatcctctgcagatgggggggtttctgttccactatatcgtgtgtggtgatgagaagcttcctttaatc

SEQ ID NO: 11695 - DNA, 329 bp, Glycine max
  unsure at all n locations
cacacccttatacctcattgcctcgctcacgccctctcaatctcatcatcgcctgcagaaccttctctccttgcaatactctccaccttcacttcattcctcaagctacactcactgcttccgaagctcataccccgagagtattcgttgcaattgcaaacaccccacgcctctctattttcacgagctnntattactacaggatgtctgctacanaaatagtttttgctttgcggcatttgcgatcacttcagttcaatgaattaatccagagacaccttttgtttgttttttttactttgcattttcatattaccgtaggccttttg

SEQ ID NO: 11696 - DNA, 546 bp, Glycine max
  unsure at all n locations
agaccgtcagcttcgtatgnacttgcannaancananaananatacgnngccgagagcaatnagaggggaacgggcacgcggagacaagaccaaanctanactttacatcgtgtcacgacacggaacacaancacaggagcggagggaggggacagatgctaaaaaccacaacatgcacggaaaacccgcctcacgacgacgcgcgaaggagagacgctgggacgtcgagaaagtcgacgacagcgaaacgcgcacagaaactgaaggaaccggccccaaggacgtaactgcaacgcactgacaccgggaagcggcaggaacccggcccaacggcgaagcaggagaccggccgacaatgcgagaaacgggcacgcacaaccccagtagcacgcgaacacgcggacacaaagtgagggaggtcatgacatggagacacaggagcgcagcgccggccgcggcaccanagaagaccaaacaccagcaagggggggggacgcgacgccaaacgcggagggggaggagaaacgacgggcaaccacccagcg

SEQ ID NO: 11697 - DNA, 565 bp, Glycine max
  unsure at all n locations
accgaatcggcgcgtgcagcaaccgagcggnacaacactcgcgacaacnanncccaccacaaacccccccccccaggccagccagnactagacaatccaannccncnanannnnnngnnnggngggnnnngnggggnggnnnnggaggaggngagagagattttttanttatggagagnggggnaaangngagagggggggagagagtatngnnaaaaaaaaaaaannaaanggggggggaggaaagtagatggagggtatggggagaatagggggagaaaaaggggaggaanaagaagtagagagaaagaaaagtgaaggtgaagggaggtaaagggaagagaggaggatgaggaaagaggggatnntaggataaaagagagaaaataggaagggggaggggtgaggtaaggggaaggaaaatgagggagaaggaggtatataaggaggatgaaggagaaaggaggaaaaatgaaagagaaatgggaagagaggaggagaaaaaagaatattaatggggaggaaaatggagaaaaaggggagaaagaagagagagngagaagag

SEQ ID NO: 11698 - DNA, 431 bp, Glycine max
  unsure at all n locations
naaaagcgtaggacgttatncactcaancnaatnnaagcaccgagcggagggatacagtggacctgaacggaagcgagcaaatttcgcttacagagcaaccnccacagggcaggacgaggcgaaaggacactcaaccaaccaccccagggcaaaagcgacaaacgaacgacaaaagagtcgaaccgacgccggtgagcaagcgccaaacaagacacgaaccgcacgcgggaaggagaagccaggaaagaagccggaacggagaaccacgaggacgggaagaaaaagcgcaagaagggggacaaagggcaccgaagcagaaacacaaaacgacactgggcaacagaggaaccccaaacggaagcgcgaacacagaaaggggaggagaggcacaaacgaaaaggagggaagaaacaacgaaaaagcgagccac

SEQ ID NO: 11699 - DNA, 394 bp, Glycine max
  unsure at all n locations
ccgccacgcggaaaacccggaacgcgcccatacacacccccncncncaaaaggacatctacgacccccnnnaaannnnnggnannngggagggngaaaagagggttttaggggaaaaaaanaagaaagggaggagagaaaaaaaanannaaggnnggnnaaaaagaaagaaaaaaaaaagaaggnnaagnnagnagagnaaaataggaaganagnggagaaaaaaagaaaaggaagggaggaccaaagaaaggaaaaaaggaaaaagaaggagaggaaggagaagagaaaagaaaagagagaagagggaagggggaaaaaaaagaaaaagagaagaagnggatgagggtggaagaagaaagggnggggaagaaggaacagaagagagaaaagcg

SEQ ID NO: 11700 - DNA, 498 bp, Glycine max
  unsure at all n locations
ttttaaaaagggcttannganngcatgncaatnnnaatnggacgagnggatanagtagagctgaccgcgcagccagccaagcatttatcntttttctagggcaggctnnctagagcgaatgagctgaactgtnagcaaaaactacaactctgtctacctccgacgaacaatttattgacacacgaatgggcgttataggctgaaccatacataacactaccttctgatggagggtatcatgctccttcttgcttatgagaatccgacggaacgcccaacggttctctgacgggctcagactatctggagccatcagtacatggtgcgacatacactgcataggctcgacaanaatgagagcactgtcgaagatgattaacaactcaaaagacaggtaagcacaaccagatactcctaagatgcaatacataggggataagaaatgctgcacaccaacaaatattctgaactgaacgactagcatatacccgtacccag

SEQ ID NO: 11701 - DNA, 463 bp, Glycine max
  unsure at all n locations
ggcgtgcatgaaacgtgncgangctgagacactataganacncagctccaactaatgagaggcattaccaaacttcgaattataacttgtccttatataacaggcagcggctggtcggcacacctaacaaacaatcttttcaacactaatggaccttgaattgacccaaggctgtaacgggattgtagggacaaaccttcataacctggggggacatacagagacgccggctgcatgtggcatatggacgtgcttctctatcaaagccatggccattgttctttgaatgcgatcatccatgtagtatggctggctcagccacgacattgtctaaatttgataaaaatgtgcttgaaggagcgttgctgcatacatatttatgaaaacgtggatagtgatatgaaagtanataaccgaccatcatatgacatctaccattcttaacattcttttggttgctttg

SEQ ID NO: 11702 - DNA, 102 bp, Glycine max
agcttcttttatacctgacggcccaggatgagatgccgggcccttcctgaaaaaatgagctggagattgcccgctgtacttctattgctgcgctgtgattct

SEQ ID NO: 11703 - DNA, 501 bp, Glycine max
  unsure at all n locations
nccttatgaaggttgcaagnttntctgcgacacnaanaatacgccgccctgaacttcatcaggactagagatcaatcttgcaatttgttgttttgtggcaatcgggaaatcgcatgaatgtcagaacgaggcagctaagtaccttaattgaagtatgatggctatgccattgcttatatgggtatccccattgtagctaacccgatacctatcgaggtatgggatcctatgaatatataattcgagagaaaagcctcccgatggaagcaatacacatattcttctgcggaagagtgactgttattaatgcagtcctaacaattattcctatttactatgtctctatatgtacggtacccatagcaataatagataaactggttaccatttagcaaaaatatgtatcgggcggacgagctgtacacatgaagatcatgtggcgtcaatggtatacagtggagtctaccaaatagaaatgccgccctagcgtaaatgaactcg

SEQ ID NO: 11704 - DNA, 412 bp, Glycine max
  unsure at all n locations
agcttcagtcgtactcctatcngcangangtgtnngggatgatgtatcctcacttcactactataatcataacattgcggattgtttttaatagaagctacgaacaacagtttccatatcgcactattatatctgatatgatatgtctattcacgaaaattgattgagagctcaaaaactagtaacatcgaataataataggtcacttaatattctttattacaacatgtgatatgtttattctaaaatataaaaaaaacactaatacttttaaattattatattatttaaatttgaacatttctttaaaataatgctagcatatcggatgagtataaaatataaattatcaactagcatgtcggaagagtataaaatataaataataatgatagtatgtatcatgagtagt

SEQ ID NO: 11705 - DNA, 418 bp, Glycine max
  unsure at all n locations
tctctatattattaaaactaaagatcatttgatttccagatgtagcacattgtattgtatgcattataatcaaagttntgtgatggcagacggtaaactgcaatgatgtgattattangaatgataagaatcaattttacacctgttgcactatagtttcataaaatntagtaaactgtaccaattattntcgtggaaaacatgaaatttcttganataattaacatatttttatgacatatataattgaaaataaataaatatatctaacgaatctagctagcagtgtatagtagagaattgaacctgatagctacgctgatgtgcatgtggctctatccgagttgaaaatactatcatgataaacttgtacaaaagccacaagttatccataacgggacaaacttacctcgtctat

SEQ ID NO: 11706 - DNA, 394 bp, Glycine max
  unsure at all n locations
agctttcttgcatggtggtcttgtacacgtaggtttctatgagttcctctgcttcgaaagccacgtctcggatttccgacacccacatgcgaacgcggtcgttgccttcttgttttgcatctgcgtccctcagaaagctctgcatccaccccaattcgttcttcatattctccacttgctctcttacccctgccagctgtgaaacagacaccgccgccactgctgcttgttccaccagcagccccgtcagcttggtaacgaccgttgacacagcaacctcggccatcctatggttgcttcttctcttctctgcttctcccaacaagactagagactagatcctctgcaaatggnggggtttctgttccaccttttcgtgtgtggtgatgagaag

SEQ ID NO: 11707 - DNA, 446 bp, Glycine max
  unsure at all n locations
tcaccgtccatcctctcttaccactgtacaatcttctattatatacacaaacaccaacaccgacacaatgcttcgtttccacacccttatacctcattgcctcgctcacgcnctctcaatctcatcatcgcctccagaaccttctctccttccaatactctccaccttcacttcattcctcaagctacactcactgcttccgaagctcaaccccggtgagttttcgttgcaattgcaaacaccccacgcctctctattttcacgagctttaattactacaggatgtctgctacaaaaattagtttttgctttgtgggcatttgcgattcacttcagtttcaatgaatntaatcaaaagaccacctttnntttttttttttttacttttgcattnttcaatattactgctagtcacttttgggagaccggatatgagaatggtaatg

SEQ ID NO: 11708 - DNA, 403 bp, Glycine max
  unsure at all n locations
agcttgnttttaatccaacctctcatggtagaagcagacacatagaaacaaggtttcactatcttagggatcaagtgaacaaagagaaactaaaagtggagtactgctgcacatttgatcaacttgctaatattttaaccaaacccctcataggggagaagtttaaaatgttaagggatagaattggcttgatgaacttaggagatcagaattaagggagggtgtganagcttaattctgtttttgagtggtgtagatttaattgtacattggatataagagagtaacagaattttaaaattctgttataagtgcctagcctaagtgtgaagggttgtactctgtttgcttgataaaaggacatacatgcatctaataatgaggatatcattcatcatttctc

SEQ ID NO: 11709 - DNA, 447 bp, Glycine max
ctgcattgtgcagagtttataaaaagcttggctgcattgcacattaattaaagttagtcttaaaagctactaatgaaaaatacaagtccatggttgatgaagcatgacatgagacagcttcatggcaaagtgaaagctaagtgtgctgtttgttgtccaaacagacagcttcatgacatgagacagcttcaagaaaaaataactagtctacttcccactcagttctactactagtcaacacttactttgtttgctgtccaaattcttaggtgattaaaataataattaccatcttgtagaatgttatgttaataataaatactaattggactgcaatattagagttggacaaatacctcaatgaactttcgaaaaccatggcctagaggagattcatgatacaaatcatgaatgcacccgatagaaagcatcaatattcggaaaatg

SEQ ID NO: 11710 - DNA, 414 bp, Glycine max
agcttcttttatgtggtagggcgggcttccttcaccttcttgtctcaactgcgagctttgactaccgctcttccttcccgcgatgcttctttttatatctgcctgagtggggttatagcctaacccatacttcccacgatttcctttggcatttatcaggctagttatgtcgccattgtctttgcctaaacccattccgggttcgtaaccgttccccaacataacttgggccatcattactgctgcatcggacaggcaaggctgcccagagaaggagtccacggaggaaatgcttaccacctcaaaagactggaaagcggtttctaatgactcctctgcggcctccacataaggcatagaggatgggcagctcaccaagatgtcttcctcgcctgatacaatgaccagatgccc

SEQ ID NO: 11711 - DNA, 403 bp, Glycine max
ctcctttcccttattatttgatatttttagtccaaaaaagagcaaacaatctaatcaaagagcaaacaatctaatcactttgctctcacttgaattgatgctacatttaaccttcttacaaactgatgaaaattattatcaaggttgagatagaaattccccgatccttattatatgatggtgtaagtgagccaagtctcacataggtgtcgaactgtcgatgaatcctaacttacccatttaatattatacatactctctcaccacactcaatgcatatattcttatctacatctttagacagtaaacactctaagaacctaccatattaaaaaaaaaacaatagtaattgcacagtttaatcaaaacaataaatatactcacaataaacaacagttgacat

SEQ ID NO: 11712 - DNA, 400 bp, Glycine max
  unsure at all n locations
atcttcgttatatattacgggactcaatcggacatccgaagtaaaagttattgccgttggacttttcttagagcttccgttntcaattttgaccgtctcgatatcctacgggacacaattggacatccgagtgaaatgttattgtcattagaatatgctgagagcttcaattttcaattacgagcatcttcatatattacgggactcaatcggacatccgagttaaaagttattgtcgttagacttttcttacagcttccgctttcaattttcgagcgtctcgatatattacagggctcaataagacatccgagttaaaagttatagtcgatagacttttcttagagcttccgttttcaattacgagcgtctcgatatattacagggctcgatcagacat

SEQ ID NO: 11713 - DNA, 241 bp, Glycine max
  unsure at all n locations
cctaaatactgagcggaatgacccccantttgctactacttttttagcctgtttagagctataaggacttaaaagcacaatcttactcatgtatgctgaatataacttatgacaacttaaaacacactcttactgatgcaggccttattaactgatgacgacctaaagacaatcttatcatgcatggcgtgataactataacgactaaacacactctgctagcaggcgagataactgtgaa

SEQ ID NO: 11714 - DNA, 414 bp, Glycine max
  unsure at all n locations
atcttacttggagcatgcatagcgaacacttgctggttcaccctttctcatgacttctcagggatacaaggactgagacaatgcacgcngtctgctatcgtatggccccatctgctatcgctcatcactaatgctgctatccctatgacatactctgcccgattgtgtaccattccattcggaaggcgaatgacgatgatgtggagaacgccaaggcatataaagtccttgcggaaatagacattgcgagccatcttgaccatcgcgccgatgactacgagcctgatagttcgctgtgtcggctagtgtatccaataacacaggtggcctacacggcaagaccgagtatatgatccacacgcaagtagtttcacctaaactatgcatattgacgtatgaaacactgatgaaccg

SEQ ID NO: 11715 - DNA, 437 bp, Glycine max
  unsure at all n locations
ctcgtgaaggtctagtaaggacacggcgtgctaaggttctgattcacccccgacatacgacagatagcggtttatgagcatatactacactctctcattctaagccatacatgggatggtcgaaagattgtgaatcgactcatgcatctgacgtactattagtataaccgacttcatgatgatacatggcaccggctcggggcaccgctggatgctctgctgtccactaaccatacacaggtacctctcgatttatatgcgtatgcttgcgcatcataggatggcgtgcgtgacatgagactctgngtgatgggcgcctggattctgttacacgcatacgctatgcaccaactactgtgatatctgacggcttaggaatacgggaactactgcgaataggccatatgacgaccgactgatgggaacatatgatgctn

SEQ ID NO: 11716 - DNA, 312 bp, Glycine max
atgagctggagattgctcaacgttgattctcttactgcgctgtgatctcacccatatggaaaaaattgcactgttggcgggcacatggctctctattttggctaaatacgagcgtgggttcaactaaatcaaatgatgagtggcggccgactatttggcggaaaaagaatgcaaacatctctaatcaagaacattttgatggaacgagtaggattgatgatctattatcttcacggagtggacatggctcactcaacatgattcctcgttcacgttctcttatgtgcactggtccagcaacattagcgcatg

SEQ ID NO: 11717 - DNA, 454 bp, Glycine max
  unsure at all n locations
cgcgagcatggacgtagacnatcgcanancncngaanattngncaanngacctgcctccnggannaangaccagtttgccaaaagtttgtttngttgcaatcggaaattcggatcattggcggaggaggcactaatacttattgtatatgtngctatgccatcctattggtatcccattgcgctaaccgaacgtaggagtttggatcctataatagaaattgagaaaaattaccagaggaacaaaaacctatcctcggggaaattctcttttatgctcctaacatattctatttactttctctttttcagggtacccatgaaaataattgataaactgggaaccatgtagcgaagatttctatggggccggnggagcggaccaaaggaagatcgcatgggtcaaatggaaacagtgtgctaccaaagataatggtggctcgcataatgactccn

SEQ ID NO: 11718 - DNA, 417 bp, Glycine max
  unsure at all n locations
agctnctatcattatatctcgganagcaatcaagatgtgaggcatgtcagtgttggaaaccccaatagaacggaagaactcgagtttatgcaaaagggtatactctgcatcctcaagaagcaccaaaggtcgtttcttcgcaagttttgcaacctgcattatgtcaaacccatagctgctgagcatatcaataacagcgtctgggccatctgggtttgtaaaaatgaccctgtcggagacgaccttggcttttcatggcggcaccccacatgagttgatgaggtatgacacagtataggtgtcacctttgtggcggcttccatctgattcagaatcagaagagctggctgaagtgaatgaatagaagaaaacacttgaagcagtgtgtttgagttgcgacagagaacccaatgtgat

SEQ ID NO: 11719 - DNA, 275 bp, Glycine max
tctgctttgctggtctatcaattactactttttgaagtctgcctctagtgtcaacccttcccacttgcaaggaattctttcctttcttcattcaatgctttgaattacagctcctgcacttataaaagaatagatctcttcaacaataagtctctttaatgacagtactcttagcaaaacacaactttaccaactgaccctctatcatagtgcatcaaatttcaagttagaatcattattactaaccaatgttccactgatctatctcatgcttt

SEQ ID NO: 11720 - DNA, 316 bp, Glycine max
agcttgagttgttgaagtgttgaagggtgaaacttcctgctcttattgttgaccacagagtggtacctggagatatgtcgcgggggtcaggagaccttggggacgtcatgtggggtgctattgccacaaaaccaagcttgaccaatcccgacccaacccgggcatagtcggtcagtgagaacatgtgacgtacctaagcacgcgagctcctggcagtcgacagataaaaggaaaacaagaccacatagcaatgaggcttgtggtggctggccagctgtgaatcttgtgtaatatgtggattgaggcctctggtaat

SEQ ID NO: 11721 - DNA, 358 bp, Glycine max
tggtcctgccttccggcaagcctcctttccatgtccgcctgagtggcctaataccctaaaccatacttcccacaatttccttgggtatttatcaagctagttatgccgccgttagtttttcctaaacccatcccgggttcataaccgttccccaacataactcgggccatcattaccgctgcatcggacagacaaggctgcccaaagagggagtccacggaggaaatgcttgaccacctcaaagactggaaagcagtttctgacgattcttctgcggcttccacataaggcatggaggatgggcagcttaccaagatatcttcctcgcctgacacgatgaccaagtgcccctccacta

SEQ ID NO: 11722 - DNA, 398 bp, Glycine max
  unsure at all n locations
agctntcatcatgttggatacttggttcacagacgaaagcaataaggttgacttcaagatggtttatgctatgaagaatgtgagaattatgaagtgtctgacttggaatggttctcacaatagggattcaaatttcccaacttgctagaagcacagggtctgtcaaagtttgtgtagatgacgggaaccttttgcccataatttgtaaaagttttctacacatgtgctaaagcagatatggaaggagacttgtactctactgtcaatggtgtacagatggtcattgatgctgaagtttggagagcagtagcaagaatagacatatgtggagtccgcaagtttgaggaatttgcagatggctacaacaaaatgtagacatatagaggtatgctccttga

SEQ ID NO: 11723 - DNA, 181 bp, Glycine max
  unsure at all n locations
taaatttttggcttcagcaggggtcatgtctccaaaggctctgatcgaggtcgtacgcgaatcaaataaacattaaaatgtagtaactangaagtgatcctaggtcatttcccaacgagcagtgataaaccaaaagttcataacagatagtaggaaatagtaacaaattgggggggggggg

SEQ ID NO: 11724 - DNA, 419 bp, Glycine max
  unsure at all n locations
agctagtataattcaccctttttccagtgtcctatgctgacttgctcccatatctacttgataattcaatggtagccataaccctagccaaggttcatcaacctccatttctccgagaatacgactcgaacgcaacgtgtgcttgtcacggagaagccccggcgcgttccattgagcatggtagggctctgaagcgtaaggtgcaaggtctaattgatgcgggctggctgaaatttgaggagaattgcgtgtaaatcctgacattgacaagagatgccacacatggggcaattttgaaagctgttgttaggtgtccctaatgactcatcanggttatccaagttatgccattattgtaaaccacagctacaatgttaaatgaaatggataaagttgatatctttgtccctcatcctctc

SEQ ID NO: 11725 - DNA, 514 bp, Glycine max
  unsure at all n locations
agagagggntgancnttgnanccctgtanantctcgatactanacaaaggcatccttgtgctcagaaacttatacttctcaagagtttcccaactctaacacccagnnccaacaccgaattctttttgcgtttgaatggcttgacactaacttacccacacattttactttccaattgaacgcctccactgcttcatgtaagttccttcacaatactcaacatttaccctggtgggtccttaatgctttaaacattagcaatgttagggcatanggaaacaaatcaagaagagtcaaaggattaattccatacactatctcaaatggtgaacaattagttgtgctatggacaacccaattataggcaaactcagcatgaggcaaacatgcttcccagaattaagacttttcttaaaacaggtctaagcagtgtgcctaaagtcctattgactaccctcaattgaccattagttgtgggtggcaagtagtagaaaacaaccatttagtaccaatg

SEQ ID NO: 11726 - DNA, 128 bp, Glycine max
ttaatacgactaactgttgtgctaaaaagtattgtaaatatgatgcgactgcttgcattaacagtacttattatagcattgtaagaacttgtggtcaattaaagcaataagtgcttactagcccacat

SEQ ID NO: 11727 - DNA, 379 bp, Glycine max
  unsure at all n locations
gaagatggactcaagttggtcaaactgaagggtgttgttatgcaggtaancaatatctggtacctggtctagtttcttgtctcacttcaacttatcttgcgaaataacttctgttctttatccaggatgccgccaatgctgctataagtgctatggttagtgtgataagactggactcagagaaagtccaacaatagtgtgatgcagccaatcacgaagttcctgaagctgagaaggttcaaattgccaattacctgtgcccagtaaggttcttgtgaatctaccatttataagcttaagcaaaatctgtttctagattatatataaccagtagcttgtttggaatgcttgtcttttgatagggaaactatgctgtctc

SEQ ID NO: 11728 - DNA, 51 bp, Glycine max
tgccttaaaaaaattacgcccagccctgccactcatcgcagtagctgttgg

SEQ ID NO: 11729 - DNA, 405 bp, Glycine max
gcttcttataagctgaaccattttatcaataaacacaagttgagttttattcagaaaattagagtttatctcttttatcttagtgagagtgattctcctaaattcttgagtgattcaagaacaccctggctgtatcaaaggactttcacaacctttgtgtgttgccctcgctggaaagagtgattctttccttcctttcatcttcacccttgttctttcaaaccacaattccagaaaatccacctctgcccagaattatctcgtggccataactcccgttttacgcactcaaattaagtgattcttgagcctaaattgaatgtcaaaacgagaactttgacctcgttttggaatcacctcatttggagccctgtagcttcagttattgccatttctatatttctg

SEQ ID NO: 11730 - DNA, 434 bp, Glycine max
  unsure at all n locations
ntacagcagattntagtaatgacccactaacttagaattattttaacttaatgccattaacctanggaattaaaacaaacttaatggctgagtgtaactgaaattgtggcaaccaaaagtcacccccaacagccaacaagtcagccaccaattggtctcccaaaaggctgatgcctaggttgccaattgggcccttattacaacttgaactaaacctaactaaagcccttttagttgattaacccanaacatatttgtggtcagccaactttacaaggattgggccattatttagacaaactaaacactctaaaattgagacaaagtggtgtcatttagtcctcctccatttgggccatgatacaactcacaaccttggacttttctccttgaaacttgggcttgtattcaaatagtatggacagcacttgttg

SEQ ID NO: 11731 - DNA, 413 bp, Glycine max
  unsure at all n locations
agcttgtatgatttgcaagatcatcgtccttgacaactccttgaaaattattgccatcaatccaaagagatgacaatttagagagtgatccaagactttcanatggatttccactgaatttattaatagagagatagagatattntaaatctatctcccttgagttgcggagatttcccagaaaagtcggaattattccgtcaagttgattatatgacaaatcaagttcaacgagagaagtcaaatttcccagggcatcagaaatagtcccatgcaagttgttgtcccctatgttgaggagcttgagacgatgaagaccgtataagcaatcaggtatagaagatgagaatgaatttccagacaagtcaagatcttgaagaagtgtgatgtttcgaataccaccaggaatggga

SEQ ID NO: 11732 - DNA, 448 bp, Glycine max
  unsure at all n locations
tcctaggctcattggagagtctgagatacttggaccttatcttaagtgggttcatgggattaatccctcatcaactaagaaacctctcanacctgcagcaccttaatcttggatacaattatgctcttcagatagataaccttaattggatatcaaggctatcttccttggagtaccttgatttgagtggttcagaccttcataaacaaggtaactggcttcaagtactgagtgaacttccatctctttcagaactacactnggagagctgtcaaattgataacttaggaccaccaaaaggaaaaatcaacttcacacatctccaagtccttgatctttcaattaacaatctcaatcagcaaatcccttcatggctatttaatctcagcacagctcttgtccaacttgatttacacagtaaccttttacagggagaaaatccacaaat

SEQ ID NO: 11733 - DNA, 420 bp, Glycine max
  unsure at all n locations
agcttgattgtgtgtatcccaccattttttcatagtagaacactggtaatgtgtctactatcattgttatcatttctttctccatcattgagggaaccacttgggctgccagatccctccatctttgagcgtattctttgaaagattcgtgccctctcttgcatatgctctgtagttgcatcctatccggagccatatcagaattgtaccgatactgcctaacgaaggcaaccattangtccttccaagaatggactcgggaaggttccaaattagtataccatgtgacagctgccccaataagactntcttagaagaaatgtatcagcagtttctcatcttttgcatatgcccncatcttccgacaatacatctttagatggttcttggggcaagtagtccccctgtacttgtcaaagt

SEQ ID NO: 11734 - DNA, 382 bp, Glycine max
  unsure at all n locations
tatctttgggtttgttagccacgctcaacaaagtactttcgacacctaatgtacgttgatttcaccaatgctgttatgggaatgttgcgacaatcctttaaaaccttattgatacattctgagaggttcgttgtcatgtggccatatcgacgtccttctctatcgtaagtcatcgtccatttttcctttgaaatgcgatcaatccatgttgctatggctggactcagttcacgaaatttttctaaattttgatcaaaaatgtgtttgcaaggagtgtaggctgcataaaattagttatgaataacaattntaagtataaatgaaagttaaataaacgtgaccatcaaatatgaaatcttacccaatttcttcaacatttctt

SEQ ID NO: 11735 - DNA, 414 bp, Glycine max
taattcttcattcaagccctattagcaaagcagtggtgaatgattcttcaacatccaaaatctctcttgttaaaagtactgaagaaaaattatgtccctaccagtgttgttaaaaagtggttatggtgacaccatggcagtatggcattgcgggttttcgaataaatgccatcaaatagcggtagtgttgtgggtttcgtatggaggccgccatagccatagaggtcgttgtcaaatggaggttatggcggaagagtgcttttttgttttttttttttaaccttcgcaacacgtcgtgttaggctgacctgacccaaccctacccaaatttcgcatgcaaaaggagacgaggagcgcaagcacaaagccacgaatagcaacaggcttactccagcgacagcaaagcttcagtgc

SEQ ID NO: 11736 - DNA, 215 bp, Glycine max
cacttatattcccaaacttattctaataacaatttccatctttattatgacattacttcttaaacttcttaaaactttcttaaacttttgagaaaactccttaaactaaccttactccaccccttatactactattcttaactcttgaatttaaaaccactactccatattttatactactactcttaataaactaactactcccccttatacta

SEQ ID NO: 11737 - DNA, 271 bp, Glycine max
  unsure at all n locations
agcttngtctaagcgagtntgtcacgctaagcccaaggcaatttagttttcatatttttgttgcaatttcttctctggtttagaatagggcttagcaagcctgtctcgctaagccattaatgttacagtggtcaatcctggtaagctcttactgggcgttagcttagttagtgtgtcgtgctaagcgagccatgctcgctaagcgcaattagctctctattggagaataaggcttagcgagccatgctcgcttagccattgtggtatttca

SEQ ID NO: 11738 - DNA, 316 bp, Glycine max
  unsure at all n locations
ggctttttcaaaaattttgtcctctggatgggcctaagggttccaacccaataaaaaatatccttgtgggtttatggaaattgctatttctctaaaataatttcaccacctttattgtggaaatccttgagagatgaggtaattttgaggcccactttgacatacaagccaattgctttgttttgcaggtttggtgttgcaatgcgtgattttcttatttnttgggcttttgtgttgtcactttgaatggttttaccattatttaaatnnaagagagagagagagagagagagaatccttctgttatttataaaat

SEQ ID NO: 11739 - DNA, 404 bp, Glycine max
agcttgtattattattttgagcaactacaaatgatcttgatgagatttcggtgtcgcaaattccgcattacttcacattctacactaaagctccttgatcccaattcaaggtccaaattaaataatttgactgcaacaaccatcctatttggaagtatacctttgaacacagagccaaaactacccttaccaagcaaattactctcatcacatccattggttgcccgtgaaagttcattgcatgaaattgtactagatgctaatacagtagatgaactgacttcagcaggatcaccaccaccatgcctttttcttcgactacttttcagaaggaacacacataaaacaaccaatatggttgacaacattacaggcaatatgcattcgatgaaaacatatgtgca

SEQ ID NO: 11740 - DNA, 178 bp, Glycine max
cacccaaaaaaaaaacaaaaaacactaaaaccctacaaaaaactccatctaccaactccccacccaaaaaaaaccatcctaaaacacctaaaaaacaaaaacaaactacaccaaccctataaaactccctataaaaaccaaactaccccacccttaactaccaccccctaaaaaaaaa

SEQ ID NO: 11741 - DNA, 381 bp, Glycine max
  unsure at all n locations
agcttaatatgtttgttcacaccatatnnactatactgtgatcaactgatgcaatctatttgattgaaaagataatttatattactcttctaatgtagtcgacaactaaaaaaaatataacagaaagtaatgcttaagccaatcaaatcaagtcatttcgaatctcatcattactatcatgcatctcacagagaaggagaatcacgcatcgtaatgcatagcacaacaaaacattaaaagaaaacatgccttgtaaagccaaccaacgtgagaatgtatctatatttgtgaactttntcaaaatcatcacacatatataaaaacatgggggaacaatctgaccacatgcgcaacacattccacacattatttctgaaaatg

SEQ ID NO: 11742 - DNA, 69 bp, Glycine max
tttctaccacatcttactgtgcctctatttatcaacttttccctactaccctcacttaattataattac

SEQ ID NO: 11743 - DNA, 402 bp, Glycine max
  unsure at all n locations
gaanccgngccaggtggcgctcacggcaacatatgctaatatcttctagagatgctatgttttcctctgcataacaccatggctgtagaggaattgtctggactggaactattgtgatcaatatcatgtcccctaacaaaacatacagtcctcatatctaaattcacctgcatgactacctattccagctttgataagagcgtttatgatacgtaaggacaatgtcgatgtgaacgtattgcatagttatctacaatcactaaagcataataataacctgctatgctcatgcctggccaatgacgcattgagtctagctgcacgcgctctgtactccttaggtgggcaccatgcttttaactctaaagagacgccaatttctttacgacttcgagcgtggcg

SEQ ID NO: 11744 - DNA, 199 bp, Glycine max
  unsure at all n locations
agatgtccaaatcttgatgccatattctgacttcatcttctntggaagatagacatgtggaggagtaactgggtcttgaggtgccatagcagcaggtgtctttgactgctgccttattaaacttactctttcatttgtaccaacatgctgacttggaagtgacattgaaccttctcacaacactgactgagctgatcag

SEQ ID NO: 11745 - DNA, 422 bp, Glycine max
  unsure at all n locations
agcttgtgtacttgttgattaacccaactgaaaccacttggcaaaggcatgtccaccatatgcttcacaatttttcctttgctcaaaagtagtaattgacatcaaatgctggaaattntgaatatatgaaaatcttaagttttaccacatcaaactctcgggcaatcaatgatgttcatgcaaattatggtttccgcaaccacacactccaatattccaaatggacacaaccatgtcacgcaatggtttccttgagaaacaccaattggtgttttgattatgacttcattgactatgtacgaaatttcttttggccagccattattggccttcaaaaataggtcttatntgatttattacaacacatcaaggttgacatatggttttagcccccctcccacttaatatagaagttaaatact

SEQ ID NO: 11746 - DNA, 320 bp, Glycine max
  unsure at all n locations
catttggaacaagtcgtgcccacttccaccaaaatattcttatncttattattattattaaaagaaaatttcacactcttccttcataagccaccactcccatttatatacatctatcctaaagccatatacaattttcctcaatacatatatatacactcgttcatatataattctctctgatcttattatttcctttcaagtctcttaatttctctatatttcaaaaactcaaacccttaaatgaacgacttgttctccggctccttctcccgcaccaatgaccaagtctcgccggaccaccaccatgtgatcgagat

SEQ ID NO: 11747 - DNA, 403 bp, Glycine max
aggcgagtgaacatctttcatatgattttgactgacaattatcgttctcatgttcttatgaataatggcttaacgaagcctagtctcagctaagccaataattgcacagtggtcaatcctggtaagctattactgccgtcaagcgcgtatactgtgtcgtgctaagcgagccatgctcgctaaacactattagctctctattgtagaataaggcttaacgagccacgctcacttaagcactgtggaatgtcagataatacaatgtgacgtcattagccacacactatgactttcgtagacaagctaaatacatactgtattatttttaaagcacgcacaccaatgccgcattacttccagccaaagtccttgtggcaatatgtctcctgtactagccaacaaa

SEQ ID NO: 11748 - DNA, 481 bp, Glycine max
  unsure at all n locations
gcttagggaacttgangctgcccttaaatacgcccgngacgaacnggggccttataaggagaagcttngttaagtatatccgctcaccgaagggcgctgggacgcctaaagccnataaaaaacaccactgctggggttggaatgaaactacacccctttaacaccatatatgatcatcctcgacggttctgtggcatttcgccataaggatgtcatttctatgcccagctctgcacacttaccccttgacatgcgatgcaaacatggtgcggtggcgcgacgtagtctcccaaaattgtgcttactgggatcccactggaattggcaggacaattgcttcatataaatagagagagaaagagagagagagatatcagtcatgtatattatagagattcacggattatcttcatattctaaatgcccaagccaagcgtagtggctgtatgatagacattttgagaaggctagcgaacttctg

SEQ ID NO: 11749 - DNA, 321 bp, Glycine max
  unsure at all n locations
agcttgaattcatgtaatccactatcttctcatagtagaactttcgcaacttatcctttgacgggagggtgaggcgaaataaaaaggagcgtcttccaaaaaggaaaatgcgtgggagtcgccaccaatgtttatccaacgaaaacgttaaaaacaccaaaaacgggtttgcggatttcgaacataacggttcaggagcngtttacacatggggaaggtattagcaccctgcgtgcccatcacatgggactacaacctataatggagtgtgcaaagacatgacttctatattatccattatgcctttatatttactatttt

SEQ ID NO: 11750 - DNA, 464 bp, Glycine max
  unsure at all n locations
cccaattcgtgtaaagccccntntctcgaacgtnatcgnnanaacccacnanacaagccanattnccttttagnttcactggngaaccaancatgcagtctctcataatgatcattgataatcaccccccaaatcttaaaatacatttaaaagaccccanaacaaggactactttatnaaaacaaanngaacactcaaatanttngattttttgatgcaaattgngcaggatcacccattgataagcgttccacttcaagatattgtgtgtcttttggaggaaatcttttctcacggaagagtaagaaacaaaatgttgtttcaaggtctattgcacaagctgaatatanagctatagttgtaaccacatgtgagctcattttgataaacatcttcacaattaagtttgaaatctcaacaattaactatgttgtatatcangnccctactatactctaattatg

SEQ ID NO: 11751 - DNA, 411 bp, Glycine max
agctttcttggggctatttcctgcgaaaacaaacatttggaagttagttttacaagatgatgcttattttaccacaaaaatgacatgctaatccctttggtttagaacaaactcatgtaatctatttatgcacacgcgcatgtgtagaaaatatcctactatttatgtcaacatacaaggacacccaacacattctaattgccatacatctatgtgcatctagaaaagagcacacattctcatgctcaatgcgttgcgtcaaactttacacctaattatatcctaaatatttgctatttacaaactacttacacatatttgaaatatatatcatacaaattgtattgtttcactcacatttatttatatgcatattggaatgtgtcataccctaatttcgtccggggacct

SEQ ID NO: 11752 - DNA, 322 bp, Glycine max
  unsure at all n locations
tatccacaaaaattgcttgaatccgttcaaaggtccatctccttaatggtctctntcacttttggcggttaaaatgaacatttgagaagtctaactgtgtaatcgattactagaaacctgtaatcgattaccagtgaaaaatttcagaaaaagatttttgaaaagacacatctcttcaaatcattttgaanaggaacgaagggcctatatatatgtgtntgttttcanaatgcaagagagagatattccaagagaaattcattgtcaaatgctctctcaacaactcttgggcaaacacttgcaaatctattgagagttcatc

SEQ ID NO: 11753 - DNA, 324 bp, Glycine max
agtttctttcacatgataataataccattccagagttgctatgtgcccactaatttaattacattgaattagagctagacttacacactaatattacttcaatcagtacaacatccattaaccaaggcccaattttgtaggtgtataacaatgccaattatgtacagaagtcaagtaattaaattccctgtacataacggcattcatgagtgacatgaggctcgtttgtgtgatattgtctttgaaaattattatatcttttgttcatctgttttccattatatatgattgctccatttttggctgcctagctggctagctttt

SEQ ID NO: 11754 - DNA, 369 bp, Glycine max
cctgtccgatgcagcaataatgatggcccgagttaagttggggaacggctacgaacccggaatggggttatgcaaagacaacggcggcataactagcctgataaatgccaaaggagatcatgggaagtatggtttaggctataagcccactcaagcggatatgaatagaagcaccgcgggaaggaaaagcagcggccaaagctcgcagttgagacaagaaagtgaaggaagcccaccctgccacataagcagaagctctataagcacatgattgggagacgaatgtcaagtggtcgcgatatacgaagatgatgttccgagtacataggattaggcacgaccatgcccccctgatctccagctgggaaa

SEQ ID NO: 11755 - DNA, 400 bp, Glycine max
  unsure at all n locations
agtcttatttgtgttttgtaatacaaanggnaccgctgggattgagctctataaagaataaagttaggaccaatcgaaaatatgcatgactgagatcacattgcatataatatacatgtagcttatgcatatcgacctatgtcattcagattctgttgcgtctgtttgatcaatcattatggattcaggtattcctaacactctacttgataatctaacgtagtcgcgtccctgtagggcattggattccataaagatctcctgagattctaacataaagacgttatagcctctctataaattaaatatttgctcaaccaaatgattgaatgaaccttcgtaattaaaaccacattacaatacgcttcagcacaccaggcgagatagcttgctttgatgg

SEQ ID NO: 11756 - DNA, 94 bp, Glycine max
tgaaccccccataattatccggcctctattttttgaatactgccagtctaccgtctcctaccttgtgaactacatatatataaatatataattc

SEQ ID NO: 11757 - DNA, 408 bp, Glycine max
atctatattatgctcgagtcattcatccctatgagatgttgttgaagtattggcgatcagaattgccattccttggattataaggttgaaccaagctcatgcttttacaaaaaggttcatcaagtcaagttgaaatatggaagtaaccatcttgcaaaattggggcaaaagatgaatcgagtcacatcactgcttcgtctactgccaaacatatttaggattgttgatgtccttgttacttctagtttcaccttgacaaagatgtcatggaccatgttgaaaatctaaattgattcaaccccatatcctgcgtaaaaattcgcaatacttcaactgtacatcattcgcatgcatccatgcttttctttggttgcattgctcattgcattctttccttgaaaataaaat

SEQ ID NO: 11758 - DNA, 500 bp, Glycine max
  unsure at all n locations
nggcttaggacccgtttgcancnancnncttangnataaccacccacgcgagaaagagggacattatgaaccggaccattttattanattgtgacangacacacacaacgtgggagatgtgtagatgtaaattccacactccaccaccnntttngtacacaaaccgactaatagctggaagggcttatgtactatctacggcccacaagatacacgtgtcatgctacgtggcacattcagacacacgtcaaccctccatgtcatacctaccacaagagcacgaacgtctaacccttaatagctgagctctcaatcgacaggatatatctaaaatgccattattcgaaaatatagtcgttcctttaactcctggcaggtatcgaattatcctaaagttacacatgattactcatgcacaatcatatggaacaatattagtaaactaggtcctatgacctgtacaatatatagaaacttttttatctactgcctatctcttg

SEQ ID NO: 11759 - DNA, 294 bp, Glycine max
tagtttgattcacgcagagactaatttcgtcttctgcgaccttcgtcaatcgcggccgacaagcccgttgacacatggagatttacgtcatcttccgcgctcacaagatctgtcatactgacttttgagtcacgctgacgggcgtaaatacctgagtggtgattcgtataaactttttgctgtctgtaagacgaaaagcctgataacacgcagagactaacgtcgtcttctgcgaccttcgtcagatcgcggccgacaagccggtgacacatggagatttacggtgtctttcgg

SEQ ID NO: 11760 - DNA, 292 bp, Glycine max
  unsure at all n locations
cttacgtcttacttaatgcanaaagnttatactgttaacctttcgggtatttccgctcgtcagcgtgactcagaagtcagtatgacacatcttgtgagcgcggaagatgacgtacatctccacgtgtcaacgggcttgtctgccgcgattgacgaatgtcgcacaagacgacgttagtctctgcgtgttatcacgcttgtcctcttacagaatgcaaaaagtctatacggataaccactcgggtatttccgcccgtcatcgtgactcgcaagttagtatgacagatcttttg

SEQ ID NO: 11761 - DNA, 393 bp, Glycine max
  unsure at all n locations
agctntcttctctgccagttaacaaggtatgagctctaccttagtttgttgctcttcttattaagttcttaatcagtgcggtggcattgtccgaaggttcttatcanattattgggtcattttgtccacttggctaaccatataaaagtatcaataagaattgtaaagtggggtttcattttgttgtggcagttgattgtgctttacgtggttttcaagcttgacgagagttacacgccgagcaaagtttccatccttgccggtgatggttttcacaacttgaaggtaaatttttattttattggtttgggtttgattgggatgattatgcttgccggtgatgcttaattattttattggtttgggtttgattgggatgattatttgggaaca

SEQ ID NO: 11762 - DNA, 440 bp, Glycine max
  unsure at all n locations
atatatattgtgctttgattaccgtgccaacatgtttgtttggtttaaactaatgtgccagcattatgtttgataggtaccctaaacccaattcattngatgtttctttnttatatgtatgttctctgacgacaaggtgacaatgtgcctttatanttttgttaaaaaatttattggtccagggtgttcttctgtgggatatggagcaacacaagaccttgacccatttttagcggacactgatggcaggggccttanattcaataacttttcctggaacaaaggtatgaaacgtgagatctangaccacaaacatatgtacatactaaaatntgttggcacagtcacctaattactactttctagtttctactttccatgttaacaatattataaaattatgttcaaccacacacactagttcttcgttatttgtccta

SEQ ID NO: 11763 - DNA, 362 bp, Glycine max
agcttgatttgttgaagtgttgaagggtgaaacttcctgcttttattgttgaccacagagtggtacctggagatatgtcgcgggggtcaggagaccttggggacgtcaggtggggtgctattgcccaaaaccaagcttgaccaatcccgacccaacccgggcatagtcggtcagtgagaacctgtgatgtacctaagcaggcgagctcctggcagtcaacagataaaaggaacaaagaccacaaagcaaggaggcttgtggtggctggccagctgtgaaacttgattgatatgtgagatatggtctctggtaatcgattaccaagggtgggtaatcgattacaaggcttaaaagtgaagaca

SEQ ID NO: 11764 - DNA, 366 bp, Glycine max
  unsure at all n locations
ttccccttccttttgcctagtcgatcactcacttaatcctccattttctccccctttgtttttgagtttaagcttcacttgaaattaagttatttaattatacgagttcttgatntaatccctatnntctctccccttttggcatcaacaaaaagccaaagtgtgtaagaaatataaaaccatatataaatgactaatcatacaagagaatagaaaacaatcaaacaagataacttaaccattcatcanactagaaagataatacttcatagaatgtcatataatccagaaagtcatccataataaccaaatanaactacttatgcagaaagggaaaaatactagtagtgtttttttaacaacata

SEQ ID NO: 11765 - DNA, 236 bp, Glycine max
agctaccgtctgttcatttgctccaagcttgcgcatggaagggcaaatgtctgtatggaggtcagcacacgagcacataccacagacccttgcaacaggtacagattactggctcaaggccagctgggttaccaaattaaccaatacatccaatgcgcctatcaaactctttagtgtcagatgatgtagctgactctggatctacctcatgcactcctgtaatgactatagcatca

SEQ ID NO: 11766 - DNA, 532 bp, Glycine max
  unsure at all n locations
agccgatccctatccgtangcanntctancccanttagactaaccctcggngcaccacccctaaggggtatgcttcttcaaaccttctagtttatttgaaagtncgacacaatgcttatgacgggagtatcttgttaattcaacattctggcaaagaactatttgntaagcattcatttgtaggtggtggagctcttggcattcttgtaactacaatcaacgggagtattctattaaattgaaaatctgctgataattgacaagttctgaaacggatacttcactggtcaaatatctggccaccccttagagtggccccctccaacatggaccaaattaatctgttaattcgaaatactggctttcttcaatggtgggtagtagggtgtgttgctgcctttatgatagaggcgtctattactacgtcactattacccttggccgcttcctccagggaagggagcggtagcgtcacccttggttgttatcatcacacatcctaatgcttcaagagaactaatccctgtactcc

SEQ ID NO: 11767 - DNA, 309 bp, Glycine max
  unsure at all n locations
agcanacttanttattgtttgctggcgaacgggacggaacgggcatgattcacattctcccccattcttatgatgacgatcattatcaagtgaattcgttcctacgtcatcaaaacctacatgtgtcacattctgcccctgcttgatgatggcaaccatctgtaagtcaggagtaaagaaaatatctatctgatgagctcattgcccctggacttcgggatgattgcttatgtgagacagtggaagatagcatatatttcatatataagacggagggcataaaccctcacaaggaaatctgtgactatc

SEQ ID NO: 11768 - DNA, 266 bp, Glycine max
  unsure at all n locations
aaattaaaacctatttttcaagcaaaaattttgtttccatctcaagaccatttgaactattacatattgatntgtttgcttcaactagaacaacctttatcactagaaggacataacgtctagtagttgtggacaactactcaagatggacataggttatggtccttgctcaaagaatgagtcctttgaagtcttctttaaattctgtaaaaaggattctatatgaaaaaggagtatgcattacttcaatcagaagtgatcatagt

SEQ ID NO: 11769 - DNA, 403 bp, Glycine max
  unsure at all n locations
agctagattccgtgtgtcttctccactattctaatgacaatgaaagatggccaaattgagcataaggatgcacaagctaaagttgagtatgtgaaaagattgcatgagcaagtgaaggctcacattgcagagaacaatgatagctatgccaagcaagccaacaagaacaagaagaaagtggtacttgaaccaagtgattgggtttgggtacacatgaagaaggagacgttctctaaacaaaggaagtccaaacttcaacctacaagagatggacttttccaagtactagtgaggatcaatgacaatgcttacaagaacgatattcaaggtgagtatggaggtgatttcttcaattaatgttgctgacttgagtccattctntgcaggtggtgattctgaagat

SEQ ID NO: 11770 - DNA, 346 bp, Glycine max
  unsure at all n locations
aaaggatggaaaacgaagaaaagtgaagttgaggcactgccgaatcgcacctgaggatcattccctacatcacttctcttgctagccttgtaccctatgcaacaaccagttagttcttcttcctttcttttctttcttaatagtcgaatgtaatccatgtacccttatgggtcctctctgatattatgtatgtattcaccttctcccctttatcgttggtaatttcattttatttgtaaggtttaattctagccgaccaccagtgtcgtgaaatcgtttcttttcttttggagactagaactagtaacaaanaaaatgaatcaattcatacctaactctcttatca

SEQ ID NO: 11771 - DNA, 333 bp, Glycine max
  unsure at all n locations
agctntgtttcatttatggagaggttaatgaaacaacgagatgatgcgctccatgagaggttggatcaaatggagaatagagatcataatgaagacaaaaggaggacaagagggaatgatggtgttcctagacaaaaccgaattgatggtattaaactcaacattcctccatttaaaggaaagaatgatccggaggcctacttggagtgggagatgaaaatagagcatgttttctcatgccacatctatgatgaggaccacaaggtgaagcttgccgccacggagttttccgactatgctcttgtgtggtggaacaagctacaaaatgagaga

SEQ ID NO: 11772 - DNA, 382 bp, Glycine max
  unsure at all n locations
ggagtagcattgcagatgtcgaaattgaacaacacggagaaacaagggacttttgaatccaagttttttaccgctcacaatcaaacggggatttgacacggaactcctccaatcaaacggcttacgttgatcaatgttgatcagccatgatttcgaacctcaaattgacaaagatctctcgaaatcaatggtatacttttctcgatgttgattagtgcatatatattagacctggaattgacatgaacttcacaaatcaaacgcatactttactcaatgttgacacccatattatcgaaccacaaatgataagaagcttcagaatctatgcataatttactcaatgcgatacgtcaaataatgaacctgaatgaccgaactn

SEQ ID NO: 11773 - DNA, 476 bp, Glycine max
  unsure at all n locations
agaatttatttcttttgcacttgcaaatcaatcaagctccggcgatgcgatctatgatcgcctgctgcatgcagcttgatggttaagacagagcgaaccacgtgcgcgtgtcgcaaccgcagaccgggccctatgaaacagcccgccgaccaagacacgngaacgacaacacgccggggcgcctnccaccatgccaaacgtgacaaatccattgacctacccatgcatagatcgagttggaaaatgatgtcgcagtaatactgcgccaatcagacatgtatcttccgactgaatgatctgacatcacgattcactggagcgcgcatgtggtcacacaaatcaaaagttgaggtacttgcgatatacggaggatgtacccggcttaccgatgggtgaaaatcttatcacggcttacaagtaactatgtgcgcagaaacatctctggaacaggtccttggagagaatcataactactt

SEQ ID NO: 11774 - DNA, 281 bp, Glycine max
cttgagaagctagagctaagctacacaccccccttatgatctaagcttacttccttgagaagctggcttgagaaacatcctagagaagctttcttgagaagcttcttgagaagattcttagagaagctacaacttatctacacacccctctaatagctaatctcacctccttgagatgagaaactagaacttagctacacacaccccctgatataggtaggttcacccccatgccaaagtacatgaatatacaaaaaataagttcttactgcacagactac

SEQ ID NO: 11775 - DNA, 310 bp, Glycine max
agctttgtttgatttttctaagctcccattgtgcaggttaatgtacttcctacaggtaactgcactcccccttaattctttggctctccattgatgtgttttaatgccttaggtgttcaatttttgccaatttcatgagacaatgtatgcttgaatttatgcttgattgtctgaatatgaaggttgcgcgggatggccttaagcctaatgtgggttctgaaatggttgggcacatcacattacccccatcacctttatttcctcatacctaatgtgcgcccaccaagtgctcggagaaatgcctcaatgg

SEQ ID NO: 11776 - DNA, 389 bp, Glycine max
  unsure at all n locations
cgctatgctgcanacatttacaatagacctcctcaacctcagttgcaatatcaatcacagcagaacaatnatgacctctccagcaacagataccaatcccgatggaggaatcaccctaatctcagatggtctagcnctcaacaacaacaacaacagcctgctccttccttccaaaatgctgctggcccaagcagaccatacattcgttcaccaatccaacaacagcaacagccccagaaacaacannacagtaaagctcctccgtaaccttccctcgaagaacttttgangcaaatgactatgcanaacatgcagtntcaaaaagagaccagagcctccattcagagcttnaactaatagatgggggacattgctacacagttaaatca

SEQ ID NO: 11777 - DNA, 418 bp, Glycine max
atcttgttattggttgagaaatgagcggaacactactgggaaggtaacgagcatctattatacttggatgagtgtacatgtcatcatgttaatgttcataagattgttaaaacaagtatttcttatacaggcaactgcaagtattcaaccacaactatggcaaccttctagtggaatactgatgactaatgatataagtgatactaacccagaagatgctgtgtcatgtgttgcactgtcaaagaatgattcatatgttatgtctgcttcagggggaaaaatctctctattcaatatgatgacatttaaggtatgtggctttcattctggatgttcttatattctaataatgtaagacattattacgtaggtcatgtagctaattctttatatagaaagaatctatgtactggttatt

SEQ ID NO: 11778 - DNA, 440 bp, Glycine max
  unsure at all n locations
ttagcactcttcttttgttagtcaaactttattgtttnaatctctcctcatctaaatcaaccaactcatctgacatcattttccaataatggtcgattggaatgtccatttgtttttgtaccctggctgattgcaaatgtatttcgaccggaagtacagcatcatgcccataagtcagtcgaaatggggtagtattagttgattccttangagaatttctacatgcccatagaacttgatctaacgtnttattccaatttcttggcttttgggcaatgtgttctttaatcaagttaattacaatcttattggctgcttcaacttgaccatttgcttgcgcgtaatatggtgttgaggttaataatcgaaagccaatattttgggcaaattcttgcatttttcgtccaataaaaactgaaccttgatcagtggtaattgtt

SEQ ID NO: 11779 - DNA, 419 bp, Glycine max
  unsure at all n locations
agcttgatatgatgttaagcttgtttccttggcgggtaatgtgtctgctgaaattccagatgatgacattctggaatctcttaagactttgtctgttgaggagcagaggaagagtcctgaacaggccaccatgatggagatagatggtaagccaatgcctaaagtagttgtgcttgaatttttactacctcactctacaattgaggtaaaaagagttgagcttgatgaacttaaaaggatatagtctacaacagagcatggacctacacttatgtctctgtatgttgctaaaagataagtagagtttcaaactggcattgttactgaagatatggagcttgaggatattccaagttatgaagaggctatgctntaatttgacattgaagcatctctcaatgttcacggcgatgatatgg

SEQ ID NO: 11780 - DNA, 430 bp, Glycine max
aatgaatataagacacatcttcttcaatcttggtgattcttgactccatctaatggaagtgcatgtccacttgtaattccaaagtgtcaaacctttcaccaacaaaggtttgaagaccatcacacctgtccaaaatctttgaaagaagagatgaatcttctccatcatgtccttcttcaccaatatgtcgagcaccctttttcaaccaagagccatcatgctctttttgataaccaaaggatgcaatgactgaagcgcctataaggaaagatctcttgagtggaacatatggttcagaatcaagagggatgttaaagtgttgaaggaaaagagtgactagatgaggatatggcaaaggagcattcaatcgcaatgccttatgcctgcgatatctaacaagaagtgcccaatcaatttgtagacctttatg

SEQ ID NO: 11781 - DNA, 465 bp, Glycine max
  unsure at all n locations
ngggggtgagccatgatatcttggcaatncatccagcccgggcgtgggatcagtagagtgaccggtgcgctgcaagttatttctcttttctgtcgagggccggactcgcgtggcactgcagaacgcgatcaccacgaatgtagatgaaagacaaagacatttctctctggaacatgacattgcatggaccacagataagagaatactagtagcactattgacttgtaccgatcgagttagcactcacattattaatcctggaggacattcggcatgaattatcaatcaccactgcaaattcctcgtacacttctgataagagtgtctacataggaataacgagcgagtgcgtgcatatatagattgagattaaattaaagctgaaaaaaaaacatattctattaaaacaattcatatctatgtgcatagtaatacttcttctcaattagatagatatctataaca

SEQ ID NO: 11782 - DNA, 341 bp, Glycine max
  unsure at all n locations
gagacagtagaggagattttagtattcgtgtttcatagtggtatactataatcgcacatatatctataagattgatgatgggtagcacttcatcaagtgacacctctattcttacacacgaggaagttcacagtccaagtaaccatttggtattcccaatgagaataagttgaaaatatcagcatccaatgtagagagctcatctgaagaactccggaaatcttccatgggtgcaagagctacaagatctgcaagagtatgaagttcactaggtgctttcagagacaatggttaaattanggattntaacttctgtatttcaattntggtttctatatcac

SEQ ID NO: 11783 - DNA, 160 bp, Glycine max
  unsure at all n locations
ttgcttggccatacaataagtctcacgttcgactgctcataatcatatcattgccattcatgcgcttatatattgtaattctagcgtagcagactaactcttaaatgtacacaacaccaacataaaagatatctcccaacaatgacgtccattgcttacn

SEQ ID NO: 11784 - DNA, 417 bp, Glycine max
  unsure at all n locations
ttattctnctttaacatanggaancnncgatnaagtncaagaagacttatgttaactactagtataatgtagcacatgatcaaataattaattagcggcatatataattaatatgcacgctgctgccttcatcaatttaacagcaaaacattatttagaggttaccggtgtggcagtttcttaataaagtgtatatttacaacatgcaaatcaaacatgtatattttcaatgtacgtggcatttaaaatgcaatagaatccattcaagaaaggtacaatagcagagaagtgaaatagctatatatctttagatccaaattcaagaatgtgatatctgtactcgggtcatgtgtaagagaaaaatccagaagcgactccagtcagattcccaagaacaccacgtggtgcctccatatt

SEQ ID NO: 11785 - DNA, 440 bp, Glycine max
  unsure at all n locations
tatcactccccctcattacacaacttttccctttccttcttaagctnatttnggttgctgatgaagtacaaaacacgtttcattgatctgagaagaagtaatgttcaaagggaacagcagagccaatagagtttgcttttcttcattgttatgctgcaacttgcaatgtaatgcactccttagtaaaactagtgtgttaacatttgtcaatagttcatcataatcataacaatggagctaaaaaatgagaagctagtctggtaaattcactgccatgtatagtccctttatatttttcttcatctttttcattcagtttattccgatcacaattttactcagatntggaaatggttntgaaaactcacaggttctccaatgatgganaacacactcttgaacctctttgggagaagatagacgctcacaaacaccatgag

SEQ ID NO: 11786 - DNA, 417 bp, Glycine max
  unsure at all n locations
agcttagcttcattagatcttattaatgtctcgtcttgagataactgagaaacaaaatgatgtgtattgctagggactaccttgaacctgatagccagcctttttcctaatacatgatcaagagttntaggtatatctgttggatcaaagactccttcctatgtaattgcgaatatgacaccattaacatagcactacaattatgtgtaccacaggaatattctcacattatggcaaatataatatgcttcacctcatcaataattctctatttaatatcaattgcagtctcatctatcaaagcataacattcccaatcccaaagtataaaaatggcagattcacgtggctgagtcactctgacatctacacganacctatgacaaaatntcttttattaacaactatacacaatga

SEQ ID NO: 11787 - DNA, 255 bp, Glycine max
  unsure at all n locations
ttttgacctaacttctttggtcttttgttcaaaagataaaggcaaaatatgaacatttctacanacacactantggacactaattaatgtcaaaatattttgtttgatgctgcttaattacaatgtnttgcaactnttcacgtgcccctgctgagatggaagagatacccattggttgcagcaatgtgcatggtttctacatgggcatttgcattgccaatttcattttttcatcacatgcangttctattctat

SEQ ID NO: 11788 - DNA, 406 bp, Glycine max
agctttcttgaaattcaaatggtctaaacttttaacacggaggtccgattcgggcgcataatttatcgagacactcgaaattgaacaatgcaagctctcgagaaattcaaatggtcataacttttcaatcggaagtccgattcaggcgcataatatatcgagacactcgaaattgaacaacggaagctctcgagaatttcaaatggtcataacttttcactcggaggtccgattcaggcgcataatatatcgagacgctcgaaattgaacaactcaagctctcgagaaattcaaatggtcataacttttcacacggaggtcagattcaagcgcataatatatcgagacactcgaaattgaacaatgcgagctctcgagagattcacatggtcataacgtttcaatc

SEQ ID NO: 11789 - DNA, 448 bp, Glycine max
  unsure at all n locations
gcctgtttagtcttattntctggacacaaganacncaccgggtccaagtgactggaagataagactncaacttggttgcttttattgccatcctaaccggcggcgggttctattaatttctggggaagtctgtcattgcatgcacattctggtttcgcaggactgaacatttggcttcttcctcctaatgaagagcattatgctatcagccattggacgattctgcgcgctgccgctgggttcctgtcaatgagcatgcttggagatgcatctctgcttgccacctctttgcttgtgtgagatcttggcttcgtttttgagatacagcgcacttgtttttcttggtcatttttgatagctccgatgtggcgtctaagctgaggtgatatgaaatgacatctgctcttgagttgaaatgtggttttgtcttatgccggaatatcatgcg

SEQ ID NO: 11790 - DNA, 131 bp, Glycine max
  unsure at all n locations
agaaaaaaaaaaggaaaaaaagaaaagaagggaaggaaagaaaaaaagaaagagaaaaaggaaaagggaaaaaagaaaagagagaagaagagaagaaaagganagaaagaagggagaaaagaaaaaagaaa

SEQ ID NO: 11791 - DNA, 369 bp, Glycine max
agcttgccttgttatgagtccacggacgaaatgcttaccacctcaaaagactggaaagcggtttctaatgactcctctgcggcctccacataaggcatagaggatgggcagctcaccaagatgtcttcctcgcctgatacgatgaccagatgcccttccactatgaatttcaacttttggtggagtgtagagggaacaactcccattgagtggatccatggccgccccaacagacagctgtaggggggggttaatatccattatttggaaggtaacttgacaggtgtgagggcctatctgtaccaggagatcgatctgccccctaacctctcggcgggtgccgtctaacgcacgaaccaccattgaact

SEQ ID NO: 11792 - DNA, 249 bp, Glycine max
  unsure at all n locations
aaccaaagggaattatcttcaaatggatctaaaggagcttattgaacttcttaatcatcagaaagaagaaaaatatgatctttggagagatccgttcaaagcacacanagattatgaagacctcaatatgagtaaacataatctttgtggaaggtgaagaacataagaaatatgtgagtttcttgaataatgagcttctgaagtatcaagaacttaagggtcaacctcaagatgttgtanaacttcatg

SEQ ID NO: 11793 - DNA, 330 bp, Glycine max
  unsure at all n locations
tgggtcgagggctggagaacaccgcctatattgatcttttcacccncatttggagttgttttctcattaccttccgaaatgtcacaagactttacagatcgcgcgacaataggctactagtagctctacatgtctgggccaaatgcgcatgccgacacacaattatccctggatgacatacggcatgatagttgcccctctctacgcatcttttattggagataaaagggaagtaaagatacgacactaatttcgtttgagccgaatttccacccgaccgaccattagctcaatcagcgaaacctgttaaaagaaagagcatcaatgaca

SEQ ID NO: 11794 - DNA, 303 bp, Glycine max
cctgcctcccctaatcttctcacagccaagtggagcccttcttcaagcacaactttgtagacaatgccctatttcactctttccaagaacataagctgaagccttaagaagctcatccaaatcgaaggccacttgagcatctaatgggacaagatcatattgttcatcatgatcggatagggtctcagattcatccttcctgaagcataagcactccttcctcaatctccttcccttgtcaaaacccctttccttctgatcctgagtaaaacccgcaacccttgagtagcagtaagagaacag

SEQ ID NO: 11795 - DNA, 152 bp, Glycine max
  unsure at all n locations
aacaatgcatatccaataatcaagcctgacagctcatcaactaaagcatagcgttcacacgcccgtatataaaaatagggcaaaaccgaccggataatgcacgctaccgacataaaaacggaactcgtcataccaccaaacacgagagaacn

SEQ ID NO: 11796 - DNA, 369 bp, Glycine max
  unsure at all n locations
atcttgctctaanattacattgatgnttgatttatggggagggaggtatatgccattttttgctttaagagtaatgtcccactaaaactaacttttcaaatgtttgccttcgcaggaatgcaccgangaagctngcctcaaagaggtccangaaggacaaggcgggccgaagaactagttccgccccggagtacgacagtcaccgctttaggagcgttgtacaccagcagcgtttcgaagccatcaagggatggtcgtttctccgggagcgacgcgtncagctcanggacgacgagtatactgatttccaggaggaaatanggcgccggcggtgggcaccactggttactcccatggccaagtttgatc

SEQ ID NO: 11797 - DNA, 373 bp, Glycine max
  unsure at all n locations
tncttcacgttttcctctatacctaaaacttcaaaccttctattctcactcaattcttcaccanatcacgtncccgtaagcccaatctttcttcttttcactcctctttcactttcaaccgatcaaaatccagaaaacttcatcanatggcagaccctcaaagaagagaaaggatcantctcaccgctaccgctgctgcccatcgccgtcacggcccattccgagcacccacagcacctattcctccttctttgtcatctccaagatcatcaacactgttttcatccgatgatcaacgtctacggtacctttctcagttttcttctagaataatcttagaccctaaatacctagacgtagagtctttaatgat

SEQ ID NO: 11798 - DNA, 381 bp, Glycine max
  unsure at all n locations
agcttgatcctgactcgttnacgtataggactgcgagtctgtgccttgttgaccttgcggaaattaaagaggcatgtgcatgtcataatangatcattgagatgtcttgcattccttcagttgcagcttatagtagcctcactaaagggctttgccaaattggagagattgacgaagccatgttgcttgttcgcgattgcttgggcaatgttagtgatggaccattggagtttaagtatagtcttaccatcattcatgcatgtaaatcaaatgttgctgagaaggtgattgatgtattaaatgagatgatagaacaaggttgctctctagataatgtcacttattggtcaatcatctctggcatgtgtaagcatggaacaa

SEQ ID NO: 11799 - DNA, 430 bp, Glycine max
  unsure at all n locations
gctctctttgatctcagcggactaagtcaatctttttctatccactaaccatcattaaacagagacatgtcttctacatattatgattcattgtatctgttcacctacccgtgagagggcagcaaggttggtaacaaatttattaatttgatgttgtatttgcacttatattatttgtttaagctcactgaattacgtgtgcttatattgaaattgaaccaagactcctcgtttatttatgtgaaagatgtcacactgggaagaattgtgcatgtggaatcaattatgaaggaactcacgaagctnttatggttactgctctatcacaataaacaatgttagctatcttatggcgtgctagattgcttgcttatcatttgattatgacctgtccagtttggtccggatcaatagcccaagtgtactgtgc

SEQ ID NO: 11800 - DNA, 412 bp, Glycine max
agctttgttaaatgttttgtatacaaaagttagtcgtatgaagcgactaacacacctcatgcattatagcctcagaaccaacgacatgcagtgtaaacaatggagaatcttcctaagatatctagacaaagtgatgttgtgaaactcagagctgacaataataggcaatgcatgtcttttaaggtttaggaaggctatgtaaacgagggagactatgcccaaattttcctacaatttttagacaaatgtatgttgtgaaactagaagtagaacataataggtaatgcatgtcttttaattctagtgagagcatatgctatcgcctctagtgttttggaaaatctaaccatcttattcttgtgaaacttgtcttaaattgaatttgacacaaaatgacacacctttgacgttg

SEQ ID NO: 11801 - DNA, 260 bp, Glycine max
tgccacccactcgcaggcgagcaggtgcttcttttaactacacctctggagaattttggaggccaatggacctgttgtattgcccccatttactaatacaccctgctttttgtgatctttttcgaagtacgaacttacattcgaacatactgttctttcgaatgttaggacctgcaatacataatctcatttttgactacgaatgacggacctcctatatgcacgatgcttcattgattccggtgtacgaccttacgatg

SEQ ID NO: 11802 - DNA, 64 bp, Glycine max
gcaagtatcatcagatgactaggctacattagatgattataacttattcaagcttatcaacatg

SEQ ID NO: 11803 - DNA, 393 bp, Glycine max
  unsure at all n locations
agcagcgttanatttatattaaaagctccaagagcttggtattaaaggctaagctcattcttacttcataatggatgcaccacaggaataatggacaccacactatttataaaggcttacataggaaatctgttgattgctcaagatctatgtagatgacataatgtctggtgcgaccacagaactgatgtgcaccgagatntctgcactaatcaaaggtgaatctgagatgagtatgatgggtgagctaaaattcttgctaggtcttccaaacattcaaaaagatgatgggatattcctccatcaatagaacacataaaacctatataanaggcttagaatggatgaagctagacctatggctacccctatgcaccacttcacaatcattga

SEQ ID NO: 11804 - DNA, 450 bp, Glycine max
  unsure at all n locations
ntgcggatttggtcttcgccgggtaaaggatcatatcggttttgaaaagaggcaaatttatcattctgcttagacgaaaatgacaaaactgggggcataaggatgaagggtgaggaatgataggagaanaccccattgccctgcgactttgtcgtgtccttanataggannnatccctaccagctcaacaaaacatcatttacttcagccaatagtcgaaacctttctcatttccccaccacccaaattatccataaaggccatccctatatcaaccacanagcctgtctaccacacaaccaatgctanacaccacctttagcacgaaccanaacaccaaccataaaggaatttgcagcaaaagcctgtatattcccccanatccggtgtatatgctaactgctctatattattcatattcatggagcctaaccctgctagttctaactn

SEQ ID NO: 11805 - DNA, 401 bp, Glycine max
tcatgtctttattttcaattacgagcgtctcgatatattacgggactcaatcggacaaccgagtaaaaagttattgtcgtttgaatttgcttactgctgctgaattcaattacgagcgtctcgatatactacgggacacaatcggacacccgagtaagaagctattgccgtttgaatatgctcagagctgctattttaaattacgagcgtctcgatatattacgggactcaatcggacatccgagtaataagctattgtcgtttgaatctgctcagtgcttctgtgctcaatttcgagcgtctagacatactactggacacaatcggacacccgagtcaaaagttattgtcgtttgaatacgctcagagcttctattttcaattacgagcgtctcgatata

SEQ ID NO: 11806 - DNA, 430 bp, Glycine max
  unsure at all n locations
gtgagaaanatcaaacgacaataaatatttactcggatgttcgattgagtcccgtaatatatggagacgctcgtaattgaaaacaaaagctctgagcaaattcaaacgacaataacttttgactcgggtgtccgattgtgtctcgtagtatatcgacacgctcgtaattgaaaagggaagctctaagaaaaatcaaacgacaataacttttaactcgggtgtccgattgtgtctcgtagtatatcgagacgctcgaaattgaaaattgaagctctgagaaaaatcaaacgacaataactttttactcgaatgtccgattgagtcccataatatatcgagacgctcgtaattgaaacagaagctctgagcaaattcaaacgacaataactntntactcgggtgtccgattgagtctcttagtatatcgaga

SEQ ID NO: 11807 - DNA, 418 bp, Glycine max
  unsure at all n locations
agctntgtttagtttgaatataaaagctccaagagcttggtattaaaggctaagctcattcttagttcataatggattcaccagaggaataatggacaccacactatttagaaaggctaagataggaaatctgttgattgctcaaatctatgtagatgacataatctttggtgcaaccacagaaaggatgtgcaaggagtttcctgagctaatgaaaggtgaatttgagatgagtatgatgggtgagctaaaattcttcctaggtcttcaaaacattcaaaaagatgatgggatattcatccatcaagagaacacaaaanacctatttaaaaggtttagaatggatgaagctagacctatggctacccctatgcacccttccacaatcattgataaggattagaaaggtaataaactc

SEQ ID NO: 11808 - DNA, 133 bp, Glycine max
cactatgataggtatgctttgagtgaaaaattctctcaagaactttctataaggatatggagagcatttatgtctagcataagatcctagaaaagatctcaacatttagcttgctcagaatctatatcacaag

SEQ ID NO: 11809 - DNA, 418 bp, Glycine max
  unsure at all n locations
agnctatgtttatttatatatttctctaatcaatcatgctcttgtgttctatgttgtaacctaaattactaaacctcgatccctcgtcagaccgaatcaatccaagctttgtccttagatccctcttgttggactaagcccaattgagatccctcttaggtatagacaaactttaactgagtttcatctgcagatccctcttgtaagactagactcagctcaagcagcttacgaaagtttagcctaatttaccctaagcttcattcgcagatccctcttgtaagactagacctagactaaacaacattattgtgacaacataattaataccaaaacttaatccgcagatccttcttgtaagattaagtttcgatcctgcttcaatcaagttctaatgcaacagtacatttcccaatgc

SEQ ID NO: 11810 - DNA, 434 bp, Glycine max
  unsure at all n locations
ccctatgtatcctaagaactacacaataactcacccaccacaattagtagaccattaaccaaaatttattaattatgccatcacccagggaatgaaaaaaaacttattgctaagtgaacttgaattgggcaacccaagggcacccccaacaacccacaagtcagccaccatntggtctcccaaaagctgatgcctaagttgccaattggcccttattcaacttgaactaacctactaagctctttagttgataacccaaacatattctggtcgccaacttttaaggattgngccttatttaacagctaancactcaaaattggacaaagtggtgccattttcctcctccatttggccatgtacaactcacaacttggacttttccatgaacttggcttgatcaatatatgacagacttgtgaaactcctggttt

SEQ ID NO: 11811 - DNA, 264 bp, Glycine max
gcaagattagtgttcatgtttcagccacaaaagtggccaagagtggtgcacagctttctctatagcacatatagccgccatgacttctgcaacaatagcattgtgtaaacttgaaatcacagatcaacaaagaagccaccataaccagcaagaccagggtttcgcttacgatagaactgacaaatcatcatatgctaatgaaaagtatttaataaaatcatgagtggaaacagctaaagaatatataattacatacataaacat

SEQ ID NO: 11812 - DNA, 400 bp, Glycine max
  unsure at all n locations
taaatcccggataagggggtccaaccaaacacctggccaacccctcattgcacctgcaccatactcaccttcacatgttgataaacccactatggattgcttcttagaactccacgatattggtgttgcaccatacatgaatatgtaacctatagtactctntatgtcanttttgtctcatccccaatccgcatcagtatatcccactaattcttctaagttactgttgtctatatttggaaatagatatccagtattgatggtcctttttatgaaccttagaatcctcttagcagctaggagatgaggaattctgggtcttttcgtatatctacttaccagtccaatagcaanatccaaatcaggtcttgaatgacacaagtacctgagagaaccaaca

SEQ ID NO: 11813 - DNA, 377 bp, Glycine max
agcttgttttggttataattgagcaacacacagtcatctaataagcataaaaaaaactataagtataaaataaagtagatgtaccctagtggatgtaccctccactagaactgatccaaaagagatgtaccctctcttgttctcagtcaaacccaagtagatgtaccctctacttgtaccacaaaggatgtaccctccaatgtgttaagacaaagatctcaggcgattaaacctttgaaactttgtgaatggggatacaaaagaattctcaggcggttactcctttgaaatcttttgtataatggaaagggaagaatcaaaagaattctcagactgtgtagctgtgaattcttcgacaagggagaacggagacacaa

SEQ ID NO: 11814 - DNA, 285 bp, Glycine max
  unsure at all n locations
aagtcagtagccagattgaatgctcgacatgatnttgtttcgaacaaaccagaattgtacataattgatgtgtatgaagatgtgtaaaaggcatacatttgcttttccttgtaagtcatggcacaagctatgagactatgtgcacgtatgccacttgtatctgttcataagctctgttcgttggttatttctactctgacctttagtgacatgttcaaactntcatcggattgtgcggttacaaattttgttgctagtagtagtcgatatggcacccctgaggac

SEQ ID NO: 11815 - DNA, 415 bp, Glycine max
  unsure at all n locations
taaccttctttataaacgggacattggtgcacaatacacaatgtccggtacaccacaaccaaatggtgtatcacaaaggcacaatagaactttaatggatatgattaggagtatgttaatcaattagactgtatccgtatctttgtggatgtatgccttgaaaactgtcatgtatttgttgaatagggttcctagtaaggcagttccaaagacatcttttgaactgtggacaaataggacacctagtataaggcacttgcatgtttggggttgtcaggcacaaataaagatttataatccgcaagaaagaaaattggatgcaagaacaatcagtggatatttcattggttatcaagaaaagtcaaaggagtatatngtttattgtcctaaccatagtatgagaatcgtcaaaact

SEQ ID NO: 11816 - DNA, 351 bp, Glycine max
  unsure at all n locations
cagtcccttaggcacttctctctctttcgaatttgcttacaaaaattgtttccgtgaagaaaatccaagccgaggcgcttccaaaactttttcgtaacgtttccgtgaggaatttcgcgaatgtttcgaccgttcttcgacgttcttcattcgttcttcatcgttcttcgatcttcaacgggtaagtacctcgaaccaagcttttcgattcattctatgtacctttggtggtccacattgtgtgttcgagatatttattctcgtttcagttactctttatacccccttttgacgtgcttaagtcatttctcgcttaacctanaaataaaataaatttccaccgatcgttga

SEQ ID NO: 11817 - DNA, 384 bp, Glycine max
cgaggcatgtgttgcccaaacatgacggaatcatgcttgagacccttgtatgaaggctacaactctgagcttgaatagagaccatcaatggtgagctgaacccatggactatcgtcgttacataaactataagacgtgctaagaggcagcttccacatgagtattctccactgaaggagagagcataccacctaaagagggcctgggatctaaaacttagacaggattctctcatcgctgaagaagatgatgagatataccttccgactttgatgacactacggagatataaccggctctgatggaggaatccaagcttttcgatcaccctatgcatcctgcgtgattcacatgtttggattataaacgttcttacgtgacacg

SEQ ID NO: 11818 - DNA, 343 bp, Glycine max
  unsure at all n locations
gtgaattcattctatgcacccttaggggtccatncttgttttgaatgttnncttctncatctcgcgtacgtttcggtatgcttttacttcatcttaaaatgagtttttgacccgattgtgtaaacccgaaacctcacttgaatgaatgataaaatgaactccaactgatcatttgtgttgtaatgttcttgaatcattgttaaaataaaatccaaccgatcattcacgttgtaacctcgatgaatcaaaaataagtaagttccaaccggaaatttactctgaaagttctcttttagatgagttgagaaataactaagtgaaactaaagctaacatcaactcac

SEQ ID NO: 11819 - DNA, 237 bp, Glycine max
  unsure at all n locations
agcttatattatatatttgtccattaaaaaacgcattggatattaaaaagtgtaacaaatattctttcttcgacaaataaaaatatacccgttaaaaataataacatatcttatcttacacatgttcacttattcttaacagagacatcatttctgttatcatccaagtttgattaattntttatcactacattacgaagttaaaaatataatttataaacatatttcgaatacata

SEQ ID NO: 11820 - DNA, 326 bp, Glycine max
  unsure at all n locations
tttatcaagtgacaatatgaaaggttttatttaattttactcaaatgataacgaggagatgtgtatgtatgtatatagtcaaatgccaattaatgcccgcaaatttaaactgtgtaagcccgtccatctaaggaagaaagagacatcatntgtattcatggagacaactcaacggattctctaacctccaagcctcttcgagaaagaaaaactgttttcttatagctctatatataaggacgaagagatgttgaaactcattgctagacaggaaattacgatataaatgatatagatcaagaaactgtattgcacatatatatctt

SEQ ID NO: 11821 - DNA, 422 bp, Glycine max
agctttttttaaaaaaatatcaatttacgaagggtgtcacctaagggctttgaaatcacgttgtgcttagaaaatcagttctcaaaacttggatatagtagcatagaagtgatttatagaaaacaactagttatataaaagcaataaagaaaacacaaaggctttgtactgattcatcccaacccttgggctatgtctagttcttcttcaaaccttgaagggttccactaatcaattctttaattacaaccaagtatttatgtgccacttctgactacaactagtactctctaggtcattcttgacactacacttaatctctcccagagattaagaccctagtattatttgtcactaagccattcttggctttcacaaacaatatatgcttgatagacaatatattgtaatcactcaaagag

SEQ ID NO: 11822 - DNA, 431 bp, Glycine max
  unsure at all n locations
atatagccaagcctctcttatcttgcttggacctgtatgttntgggtgggcttaattcgcgagtccaaatctatttctaacttttatagttaggggaatctagaaaaaaatttagaacctgatgttatgtttaccacttaagactctcatttcccaagcaaactattaagacttgagaggaattctcatccactctcttcctattttccaggtgaccatctttgaagtgggagaaaattttgccttatcaagagttagggaatctattttccatgtgaccatagttgaagtaggggacacttttcccttataaaggattacaagatggcagttatcatcttctaagcaatttccaatatctctccttctacttactctttaattgattggccttttatttgggatattggtgtatctgtggaaaagtgaat

SEQ ID NO: 11823 - DNA, 423 bp, Glycine max
  unsure at all n locations
agcttgntttaaattgttcatcacgtcaagttgaaatatggaagtaaccatcctgcaaaattggggcaaaagatgaatcgagtcacatcactgcttcgtctactgccaaacatatttaggattatcgatgtccttgttacttccagtttcaccttgacaaagatgtcatggaccatgttgagaatctaaattgattcaaccccatatcctgcgtaaaaatacgcaatacttcgactgtacatcattcgcatgcatacatgcttttcattggttgcattgctcattgcattctttccttgaaaaataaaataacataaaatgaacttatctgagagaataggaaacgctctacagcgcccttaccgaactcgtgctggagctagagtaatgggtgaagttcacgagatacaagagaagatgaag

SEQ ID NO: 11824 - DNA, 429 bp, Glycine max
  unsure at all n locations
gcatatgatntatatgctccagcttgagggggagtgttggatatccttggatataatctatatgaggtagctttgttagtaagcttgttcagaagggcagcagtgacttgtcactgtcactgcccttctctctccatcttgtactctatatatatggcttttttgaaatgaataaaagtgtgagagacaggacggaatttctccttcagtttcaagtaattctaatatgcgctccaatgacggctttcacgggagagttgatccttgacaggcactatattctactgggaaagcaaattaaattataaaaatatatgtatttctcatcagtatatggaacactgcaatgtgtgaaaaatttgaacaaattctacactgcagtgggtgaaaattttgaacacaatctatcatctctggctatatactctc

SEQ ID NO: 11825 - DNA, 399 bp, Glycine max
  unsure at all n locations
agcttgttatctcattagtngaggaacatggagcgcttccttgttcttccttgacaccaaccaaacttaagttccttatctgcttcagctntcccaaatctcttattaactctattccatcgtcaactnttattataaattgtaagcctaaactgtaatgtttagaactttgcgtccttaatatattatagaacatgaattttcagggttcactatgaaccatttaatttgttgctaggaagaagatcaaccaatttgcttatgtgaaatgaagtgcatgccatgtagtgggtatatattatttaattgttttgaaaaatacccttttcattccaaaatgattgatgttttaaagaaattcatattgaccaatggttttttcaatgagatattaaaaac

SEQ ID NO: 11826 - DNA, 451 bp, Glycine max
  unsure at all n locations
tgacagacctacaattctcacaccggtcgaggttattacctcctgacatgagacaatctccctcgacatgagacaatctccttcgacactagacaacctctttcgcccacaagccgactcagagcttgaggggcttatgtactatctagggtccacaagatacacgtgtcatgctacgtggcactccaagacacacgtcaaccctccatgtcagccctagcacaagagcacgaacgtctagcccttagtagctgagctctcagtcgacagggtatctctaatatcctattatttgaatatattggcatccctttatctcttggcaggtattcaattatctaaaagttacacattatcagtaaggcacaatcatctacgaacaattatctctaagctggtacatgttatctgtaacattatctagaagctatctntatctactgactattat

SEQ ID NO: 11827 - DNA, 108 bp, Glycine max
  unsure at all n locations
agtcttgtttcacctacatagcatacgttttttatggttgatcaacctangttgtggttgcaaatttgagaatctctcccatacccaaatatgaaccaagtagtaaaa

SEQ ID NO: 11828 - DNA, 498 bp, Glycine max
  unsure at all n locations
cgccgctgcatgaacgatntgcttagcannncggcgacacttnagaatactcacgctggtgatattntaactatatatgtgtgtgtcttcgttaatttctacctgttaaaaaatgtgataatcccttcctcatgtgtggttaatgttggaatcattgaaggaacttaaccctggggttggtgaaaccaattgcttaggtgaatacttttaaaaacccttgtgatggaagaactcgagacacatattttgataggatgtacattggaacaagagttttattttatttgcatgacgtatcaaacatgtcattttactttattttgataacttgaacagtctttgtttaaagtcataaatatttctaaaaaattntattttgtaacagtgaagcgaatgtgagcattacccacgtcgactgatntacgattnntattgaataaattgatttaattagattcccgcattatatatgtntntttgttcatttatatgtatgtg

SEQ ID NO: 11829 - DNA, 408 bp, Glycine max
  unsure at all n locations
atcttccttttacacgccctcgcctttgtagggctacacgccctcacctttagaagactacaagtcctcgccttatgaangctacgcaccctcgccttcagaagactacacgtactcaccttcaaaggactgcacgtcctcacctttatagggcggcacgccctcaccttcggagggctgcacaccccttcgcttttagagggctacgcgtcctcactttcagtgggctccacatccgcaccataagagaatttaaggtcctctgcccttaatgcttaatcgagacttgtgctctcggttaatgggccagtcgtttcctgttatcagttcctgngccaccctctgatattggagggcgccaactatgcgagcacagccagagagggaggctatcacgcagctactatg

SEQ ID NO: 11830 - DNA, 428 bp, Glycine max
  unsure at all n locations
tgctctanattacattgatgtctgtatttatgggaggatgttgtatgtcatttttgttttaagaatagtatcccactggtaaaactaattttccaaatgttggccttcgcaggaaatggccccgaggaaacttgcctcaaagaggtccaggaaggacaaggcancagaaagaactagttccgctccggagtatgatagtcaccgctttangagcgcngtacaccagcagcgcttcgaaccatcaaggagtggtcgtttctccgggagcgacgcgtncagctcanggacgacgagtatactgatttccaggaggaaatannggcgccgcggtgggcaccactggttactcccatggccaagtttgatccagaaatagtccttgagttntatgccaatgcttgccaacagaggaaggcgtgcgtgacatg

SEQ ID NO: 11831 - DNA, 559 bp, Glycine max
  unsure at all n locations
ccacgcgcactcagaggcaccgaaacagaggaaacgggacacaacaaccacaaactcacatccccacacacaggcgggggngtgagccntgcancccacccgaancaactcggacccggggagcctctagaacaacctgcatgcatgcaagctacatttgatgaancaagccgcaccaagacagggggagaatgacagagacgcagacaaaaagcccaaagaacgatggtaagatcaaacccagaacagaaccaagaaccgagagaagctcgacaccaagacgcaagaaaagacgaactcaacgcccaagagaagaaagcaagaagaccccacaagggaagcaccgaaaagaatggacaaaaaacaaacacagcacaacactgagggtcaagagaaggagcacaaaacaggcaaagagaccagagggcatactctctgggaaacgacaaccaagaacacaaagcgacgccagaaaaccaccgactgaaattacaacggtccaatcgaaaccaatagagtggaaccgaacacaagaacaaaggaagcgacgaccagcgcn

SEQ ID NO: 11832 - DNA, 496 bp, Glycine max
  unsure at all n locations
acatgctttgnttgannctttgtaggacgtacacatagaatactaaccttctaagcgcggtctgggannnaaaaagccacgcggaaccgagttantatgtttatcacgcacacagacccanacacctgggggtggtgttataacaattacaaactctgcacctcacaaatgagaaagttgatgagaggaggaacgccccggcatttacgcaacgagcataatgtaaacctttaccgatgtaaaagctctataattgggcctaagctctacagtattaccttttgttaacgcagtaccaactcaggtacatcaacgatgctacaatgctgtttgttaagtaagatgcaacagataacacacgctaaatcgaatgagtgtaccccacttattaaaatggagatccattgacagacctccgaaggactaaaacctggaacacgcatactcgtagactaattcgagaatccaccgtaataaaggaacacagtgtgagccg

SEQ ID NO: 11833 - DNA, 371 bp, Glycine max
  unsure at all n locations
cacgcgacaagcagaggaagggaaacgcacaaaccgacaataaccaaccaggggggtgagctggaccccaaanaanngcggggcccaaacccgcgcaacaccctttaaccccaccacacaaggggcgggaacagaccacaagacggaccgaacaacacaaaaaagcgacccaaaaaaccgagagaacagagacccaccagggctaaaaaccaaaacaccgacgggacgcaaggaaacaaggacaacaccgaccgccacggaggaaaaaacaaagaccgcaaaaaacgagggccacgcacaacaacaaagagggacacccgccggcaaaaaaacagaacgaaacaagaaacagaagaccacagcaggaaccg

SEQ ID NO: 11834 - DNA, 381 bp, Glycine max
  unsure at all n locations
ctcagctctaacttatacagaataagctctgataccacttgtttataagtggcctcagatatcttaagaaggcggggttgaattaagatattgcaacttcatttcccaattaaaatttctatttaactttctattcaagttataaattcccttaataatgaatttcttaaatgttgattcaaatagaacaatttgaatatgaatatngaccactaatatataaaggagtttaagggaagagacaatgcatactcagaattatactggttcggccacacccttgtgcctacgtacagtccgcaagcaactatcttgtaaattccttttacaagttctaaacacacaaagacaaccctctctttgtgttagaatttttcacag

SEQ ID NO: 11835 - DNA, 395 bp, Glycine max
  unsure at all n locations
agctntgtttcttgaagaagttgtctttttacatgcccaactctttgagtggcatttgtattgattgttgcatcttagtctctatcttttcatttgtacatcatgcatcatcatgtataggcagaaagattgtttctagttagaaacttcttcaatgcataaaactctttgttttaatcgattgcaaagttgatagtaatcaattgcacaagtgtttgtagcttgcagagagattctagtttcagtttaatcaattactagttaaccataatcgattagatagttcagtttagactgtgtctggtttttcatgagtctctgctttaatcgattactaggtgatcataatcgattactttgttcttaaaggtgttcctagaagtgatcaataacac

SEQ ID NO: 11836 - DNA, 196 bp, Glycine max
cccccaaccaaaaaaaaaaaaaaaaaacagaccggctacccccccaaagggaaaacaaaatattacaaaaggggaaaaacaacaaaaacaccacccaccaacacaaacccacaaaacaaaaacaaaccaaaaaaaaacaaacacaaaccacaaccaacacaacaaaaaaacacaaacacaacacacccacaaccac

SEQ ID NO: 11837 - DNA, 607 bp, Glycine max
  unsure at all n locations
actgcacacactcgcanagtcacagcatacctacgcacagagagccgaatatgagagccgatatcacacggccgtcgcacaacaacaaacacatcaactcacaacccacacgaganagggagtgantttgaagcctttgcacatccacggcgaanacnagcncagnacccggagcaccncnagagacgacccgcaggcangcaagccccattgtttgccacgnccncaagacaacgccccagagagatgagcggccnactgagagccaactcctgcagcggatacaagaccatcaaccgccccctaaataaaccacgcagcataaggataacagtatgagaatgtaggacaaccggctccatggctgctgctgcaggagccgggccggacgacgaacggacgccaacgagacatgcccttgttccagacgccatcagcacgatagggacccgaacaactgccaacagcaagctgacagacagaaaacaaccgctcaccgagacagagaccacccaccagacgctgaccacaataccaccgccgaccacaaggaacaggctcagctccatataagccgcgcatagcggcaataaacacaaccgaaccg

SEQ ID NO: 11838 - DNA, 310 bp, Glycine max
  unsure at all n locations
tgttttnttggctagacaccnnntagaacacggggaaggtatgaatgtcagaatttttttttcgaaccgccgggggggtcgatgattcaccactcgtggcgatgaaacctcggaagggagcgtatcggatactgcaatgtttggcctggtatagaagaactttggtgaacttaactaggaagacgcgaaggtagctgtcgtaggagaacgcttcgaacggaaggggattggatggaagaagtagggggtcgtgaacggagaaaaagtgcaacggacggatagcggttagaacgcaaatcgggaagaaccg

SEQ ID NO: 11839 - DNA, 404 bp, Glycine max
agcttgctttctcatggaagctcctaatatctcccacactttttggggtgggccattcttggatggccttgattttctcagggaccacttggaccccatttctaccaactactaaacctaagaaaactatattatctacacaaaaggtacacttctctatatttgcatagagggtgtttttcctaatgactgaaagaacttgtctgagatgtcctaagtgatcatctagcctcctactatacactaaaatatcatcaaaataaacaactacaaatctacctacgaaatcccttaagacatgatgcataagcctcataaaggtgcttgatgcattagtgagcccaataggcatctctagccattcatacaaaccagacttggtcttgaaagcacttatacactca

SEQ ID NO: 11840 - DNA, 812 bp, Glycine max
  unsure at all n locations
agcagagagcctggggnnnttggantttgantttcgaccatancgnnacnngncanncnnnncnnnnnnnntnngngngnnnnannannnnnacnngngacgcagaannagnagnnaaccanaanancgacnagnngctnccgcannnaacgcanccgagcacatttttgtggttgcngattttacgtcgncgacanangcnncacagacccgancaaggcggggaaggcgggagagctgtgtatctcgacatgaanagcatcatcnacgctacactcgcatcacacgtcgatcgggaaaatanactcgacagacgcgccgngtgccgatcacactagaagcgacagcgtacgcgagagtacactgngagtcgcnacagctatacgtgatcggacggacacgacgaggacnagacacgacgcagtgacgggtancnacgcgacagacgaatgcacagacgatgccgancgtacgagcacatcatccngaggtaccgacgtcgcaccgacacgcgtgactcgactgacagcncgcgagacatcggcgtgcgacacgcgccaggaggaggtcgctgaccgcgagaaaggacgtgccgtngcgctaggacagactaggcgacacagcgacatagcactcgcagcgggtgagcgacgatacacacgcgcacgacggagcacgcgagaggcctgcgacatcagcggtcaacgcgcaggatcagtgaggcagccaagtcgcgcacgaatgcacgacacgcacaaacggcgcgtacgcagagagcgcaccgatcggcagcactgagcgtgcagagagcc

SEQ ID NO: 11841 - DNA, 506 bp, Glycine max
  unsure at all n locations
cgccgccacacgaggagagaacagggggcagaggcaaacgcgaacacaaaagcaacacaccaacaaacacaaaagcgaattgaacctgtaaaccacgnaaagacgnccgcgagancacaaagccccaggagcaccacgttaggagagcggacgaacacaaaggggagagggcggaaggcaacaccacgcaaggagccacgccaaatagccacgaaaccagcgcacgcgaaaacacgagaacaaaagacaagactccgcccacaacaggttagaagcgaacaagaacacgggaaccgagcacgcggagaacaaatcaaagacaccgagcctgacgcgaatccaagcgcggagaagaacacaccaagcaaaaaaaagaaaagcaaacaccacccagaacaacgaacaaccaaagaagggcaaaacaaccaccccgaggcaacgacagaaaaaactgccaaacggcgagaaaaaccaaacaaagcacgaaaagaccgaggccacaagcn

SEQ ID NO: 11842 - DNA, 494 bp, Glycine max
  unsure at all n locations
gggggtcttaatgancctctcgtattacgtccancctagaatactcaagctntataagcgcgggtctgggagacaaaggtcaagtggtcgcgttatgcgaagatgatgttccgagtacattggatttggtacgaccatgccctcctgatttccagctgggaaattggcgagtggaggaacgccccggcatttacgcaacgagcataatgtaaacctttacggttttaaaagctctatagttgggcctaggctttagagtttttccttttgttaaggctttgtgtcttttgtttttgaatttataatacaaggatctttcttcatctgttcctacgtctctacccgttctcattcatttgcatgttcacttctttttctgaaacggcagatccaatgacgagtcccccgaaggtactaatacctgngacccgcttatcaacttcgagcaagaaaagaatcaaacggaagatgaaggaaacgaggatgtgagactn

SEQ ID NO: 11843 - DNA, 556 bp, Glycine max
  unsure at all n locations
cgcccgacacaccgncgagcacgcgtaacgtcgacgaaatcagccanaaacgaacacacagactacgaacccatacacctaaanccncacaaggacagcgcgcgtgtatccattgagaacaccannannannaanaaaaccccgcgagacacanaagagacccgccgagcaacacnnacgttattatgcagacaaatccacaacaanaaagaagaggcaccagagccacacgagacacacgcgagcaaacgcgagcggagaccgaaacacagaacaccgaaacggacgagcgccagtgcgccaacacgcacgagaacaagagcacaacgacggcaacgcacaaaggtgagaaacgagccacaccacgccaaaagaaaacgccgagaacaagaaagcacacgcacagagaaacaccagagcagggaacaaccagacgcgcccaaaccgaacagccaaaaaccgggacgacaccagagcaagggaagaccaaccccggcgcgaacgaaacaacgcccagagacgagcacacaccgggacggaacgccacgaaccggcg

SEQ ID NO: 11844 - DNA, 327 bp, Glycine max
  unsure at all n locations
ggcgtgagactacgagatgaanccgaataagcaacgcccaanaaaaaangacanacaacattaatgttgacaaccaacaaggggggggggaaagagaaccccccccccaaagcgggaagaggagacaaaaagacgcaaggaagaagaaagaaggaggaagaaagaggagagagcaaaagaaggaaccaaggaagggggcgggagagaacgagaggaaggacgaagagagcggacgaaacggagagaggagccgggaagcaacgcgaaaaagaccgaggaacaaagggaagggacgcaggcagagaaaaagggaaaaaaagaggaacg

SEQ ID NO: 11845 - DNA, 549 bp, Glycine max
  unsure at all n locations
cccacgcaccgcaacaagagaagtcgaaagcagcagggcgaacgcaaaaccacacaacacacccaaaagaagcggctgggaccttgaacccaaaaaagaaaaaccacagggcaagaaagggaggaaaagaagaaaaaattgtagaaaccaaacaccaaacaaccccagagggagcaaccaggccacaacgacaccccaccaacgcgaggaacganaccagacaaagaacacaaccaacacgaaaaagaaacgacaacacagaacaagacaccgcaccaacgnagggcgacacgaacgcaagacaagcacacacggcaacacaagaaggcaagcggacacaggagagacaaagcaccacagcccacnccagcaacacaacgaacagaacgacgcagcangaaccgacaggacacaacccacgcaaagcagacccaacaaccagcgcaaagacaggcganacggcgagcagaccacacgaccgaacacacagccacaccggccaaacgcagacccacgaaaaccacaggacgacaccgaacacaacgcacg

SEQ ID NO: 11846 - DNA, 185 bp, Glycine max
  unsure at all n locations
ccagacaaaagaaacaaccaaccacaaggttaccacccnaacaggaaaaaaaaatttccacgggggagaacgaaaaaaaaaaagagaaaaaaaacaaaaaacacaaaaaaaaaccaaaaacacccaaaaacccaagaaaacacaaacaccacacacaaacaaaagccagaaaacaacgaaagacc

SEQ ID NO: 11847 - DNA, 492 bp, Glycine max
  unsure at all n locations
accacccgaacacgaaagaacacccaaacaaaaaacgacaccaaaacgcaacaccaaacacagggcgaacttgaccgtgacccacaacngaccaccgggggccaacgcaaaccacgcacaaaccttattttacacaaccaaaccacgggagggaaaccaaaagacaacacacccaaacccagcaaacaacccccaaaaaaccacgaagcaaaaaacaaaacaacgaacgncaaacacagacgaaacgagaagcaaaaacaacgcgacacacacagacaaaaaaacaaacacagacagacagaccaaagccaacacaaccaggacacaccagacgaggncaaagaccacaacaaaaaaccacccaaccacaaccgaaaaccacaaaaaggaccaaaaccagaacaacgcaaaagacaacacagagagcacaacacaaaccccaaagaaacaaaaaaaaacacacgaacgcaacagaaacaaaccaaagacgcc

SEQ ID NO: 11848 - DNA, 418 bp, Glycine max
  unsure at all n locations
agttntttgctagcctgagtcnnncnnntnttaanaacaacgcggcgtngacatgatgacatcacgacctttattgtttctcacgccccaacgagggggggggtgtatctccatactccccaacccacatgcggtcgcggagaggacccaccactcactctccgacatgagtcacaaaccgaaagcatgagacgcgacaaccggatagctacggagagagacacctgctcaagggtccatacggcaaggtgacgggttacgctctggcgcgggaatagaggcgtgagaacatatgcgacgtcccccccgatatctattctgaagaactggacgtacacggacggatctcacccgtttgagagaggaccggaaatgcccgtgcgggctaatcgtactcggcagtcgaccgaccaccacg

SEQ ID NO: 11849 - DNA, 539 bp, Glycine max
  unsure at all n locations
ggcggaaacgagcagagaggaaagcgaagaaaggacgaagaaggcggagaagaacaagagataaaccanacaagagagaaattggagcctcgaaaacacncanannnaaaagncccggggggaaagagagacagaaggagaaagaagagtttaaaagaangagagaaaacggaagggagagggggagagagaaacaaaagcacaaaaacggaacgagagaggagcgacagagacaggaagcaaacaaggaagataagcgaggggaaagcaggagaagaagaaacgaaagaggaggaagaacgaaagacgaaaaacggacagaaggaggagggaggaagaaggaaaaagagaggaaaaggagcgggagaaaagaaagacagagaaacgaaagagagggacagggaacgaggggagaagaggaaagggaaaagagaangaaggaaggagagagatagaaagagcgagggaggagaaagggaaacgagagggaaaggaacgagcaaacgaaaacagaaggagagagagaagaggaagaaaag

SEQ ID NO: 11850 - DNA, 501 bp, Glycine max
  unsure at all n locations
ngcgcgcggaattgatgagnttangtacganctgcgaanananaatactcaacgctatgctgcagacatctacaatagacctcctcaaccttagcttcgtaatcagccacaacaaaacaattatgacctctccagcaacaggtacaatcccgggtggaggaatcatcccaaccttagatggtcgaatccttcacaacaacagcaacaacaacaatagccttattttcaaaatgctgctggcccaagcagacatacgttactccaccaatccagcagcagcaacaacaacaacaaccccagaaacaacatacagttgaggctcctccgcaaccttcccttgaagaacttgtgagacaaatgactatgcaaaacatgcagtttcaacaagagaccagagccttcattcagagcttaactaattagatgggacaattggctacatagttaaatcaacaacagtcctagaattctgacagattaccttctcaatctgtccagaat

SEQ ID NO: 11851 - DNA, 563 bp, Glycine max
  unsure at all n locations
ccacacgcgaccaccaaaacaacaaagccagaacagacacacaacacagaacaaaccaaaccacancncccagggccgcagttttgacccctgagaacaccccgaanagnnaaagcccccgagagcaagaaaaaaancaacgacaacaaaaacgttttttatcacaccacccaccaaaaaagacgggccgggacggaaaaaaagaaaccacccacanaaccaccgacccacagaagaagaacaacgcaaaaacaaaacagccaacgaaaacacaccaaaacacgacacccccggacagcaaacacgcgacgaccgcacaacaggaaaccaacaaccgacaaaccaccacagcgaaaaccaaacgcaaagcaaacaagcngaacacccagcacacaaaagacaacaaagacgacacaaacaaccaaaacaacacgacaccaaacgacaaacaccacacacccacagcaagaacaaaccaaaaaacaagccaaaacgcaaccccaagaaacccaacaacgacgacagagcacaaagaaaggcaaaccaaccccaaaaccaaaacg

SEQ ID NO: 11852 - DNA, 540 bp, Glycine max
  unsure at all n locations
ggggcggaacgaggcgacgacgactgcannctcnggaaatnagccaacggcccananganaagaaanancgagcaaccacacaannatanatagttattgaacaaggaaaacacaagcggggagggagaggagaacggaaggaaccccaccaccccacacaaacgaaagaagaagaggaagagacggangcgcacgangacggcacacacgaagacacgcagggcgacaaaaagcagcaaagcaggccagacacacaaagcacgnnaggcgacaccagaaaaacggacacaagcggcgaacncccagccagaancgaagagcgaacagcagaggcgagcaaacggagaanaaaacaagaagagaacgcacaacggcagcggaacaggacgagggccacacaacacgaaggggnacccagaaaccgcgaacgaaaagcaggcaaaagaaccgacggcgaccacgggccggaaccaggacaaccggaaggcgcgcagcgggacggagcgcacggaaacaaaagcgagcaaaggaagcaaacg

SEQ ID NO: 11853 - DNA, 408 bp, Glycine max
  unsure at all n locations
ccaccaaaaccgcggaaaagacaacgaaacacaacgcgaaaacaccctaaacaaaaaggggcggantgaccccgagcaccaaacanaacccaagagacgaagggacaaggaaaacaacttgtgaccaaacaaaccaacggggggggaaagcacacaacacaccacaaaggccaagaaaaaacacgcagacaaaaaaacaaaagagaaaagagagacaagaagccgagcaaccaaaacaaaacaaccgagcaacacccacaaccaacaaacgcgacaacagaagaacaccacaagagacaacgaaacggaacacaaacacaagaaaaaaaaggcaagacaacagaacacacaccaacaacagaacacagccgcagcaaaaaagaagagacacaacaagcaacaaaaaag

SEQ ID NO: 11854 - DNA, 178 bp, Glycine max
  unsure at all n locations
tgccttanataggcacagaagggacaaggcatgttatggggttagttgcgctccggagtatgatgagtagcggctttattgagcgcaagtacactcatccacagcgtttgcacttcatcaggagggtgggtccgctactaagcggagcctcagcgtacgtcctcagaggagacacgag

SEQ ID NO: 11855 - DNA, 408 bp, Glycine max
  unsure at all n locations
agctntccgtantggtcttcgctagcgaaatgatcgaagtgggtctgaaaagaggtatatctgaccatcctgctttgatgaattcgaaaactggggcaaatgaagagggtgagaatgaaggagaaacccatgctgcaattgtcattcctatacggccaagtttcccaccaacccaacaatgtcattactcagccaataacaacccttctccttacccaccacccagttatccacaaaggtcatccctaaatcaaccataaaaacccacctaccacacttccaatcacgaacaccacctttagcacgaaccanaacaccaacgaaggaaggaattttgcagcgaanaagcctatagaattcaccctaattctgatgtcgtatgctaacttgctcccatatctactcgac

SEQ ID NO: 11856 - DNA, 363 bp, Glycine max
  unsure at all n locations
atgaagctgtctcggtacaaacgctcccttgcattctataaccgnnggatcttctcagggagtggtttgcagcttcagaagacacttgtccacgatctgaccattgagatctttgagaagatgtttggagtgtgggcgacgtttcagatcccgagagcattgctcacttgagcgtatcacctttgctttcatgtagcttaggaaaaatgtcatttcttatcctttctttcttccaaaaccattgtcaatgttccaagctttgtctccatcacccatagccaccattagccaccacataccgccgttgttctccgttaaataccccacaccgagagcaacccttcaaccgaagcggaatcttcc

SEQ ID NO: 11857 - DNA, 380 bp, Glycine max
  unsure at all n locations
agcttatgattctcattcctgngaattcttggattggatgcttaagtccattggcttcccagcccagttctatacttggatcatggaatgtgtttcttccacttcatttagtgtggcagtcaatggatctatttatggtcacttcaaagggcagcggggtcttagacaaggggatcctctatccccttatctgtttgtgctttgtttggagtacttttccagagatatgagcagtctcaaggatgatgccaattctaaatttcatcccaactgtgcaggtattcagctatctcatttggtttttgcagatgatattatgcttctatctagaggagatatcctttctgtgtcaactatgtctgccaagcttcagcacttct

SEQ ID NO: 11858 - DNA, 368 bp, Glycine max
  unsure at all n locations
attctatagattaaacagctaatttctcanattatatcgatcacgttggagtgactcaatagtggatactctaattcgtcctattataattgcagtcgtaagttattctatgcataccaagaaaaattatatggatgaaaatgaataataattntacaaatttaatcttatcattattaatttatgtgtaattntggtttctcttatcattaatattataagaaatatgagtgaaaaaaattattacattaaaaagctaaaatgataattattttgaaataaattttctttctcacatgatgcttgttatgagatggagggagtattattttgtgtgctaatagtacatatcactttaatataacaca

SEQ ID NO: 11859 - DNA, 403 bp, Glycine max
  unsure at all n locations
agcttgagtacntttgtanggctccaaggctttccatcagctctgataaatctgccatatactcagccggtattaggcctcatgagctttctcatattcaacagcttactggatttagcttgggtgacttgccttgtatatacttgggtgttccccttttatcatgtagattaaatgcatgtcattatgctcccttgctttccaagattacttgcctgattcagggatggagcaccaagtctttatcttatgcaggtaagttagagttgatcagagcagttattcaaggaattgtgaatttctggatggagatttttcctttgccgcaatctgttctggaccaaatcaacgttttgtgccgtaatcttctgtggagcaaagcggatattggaaaaaacaagcc

SEQ ID NO: 11860 - DNA, 321 bp, Glycine max
ctatccactatatatgagaaatacactgcagcagtaagttgttgtgctcaaaggctctggatgacacaacagctagaagactttggagtaatcctttatcacattcctttaatcgattaccatacttgcttttgtggtgttatggcttaaggttctctcttcattataatcgattacatgttaggcttacagctttctctggcattgtgttctgttgtaatcgatgactgcctcattttaatcaattacatgctatggtttatggattcttctggctatgtgttcgtatttaatcgattacaaatgcctttacggaggggg

SEQ ID NO: 11861 - DNA, 403 bp, Glycine max
  unsure at all n locations
agctngttcatttattatgtcttcaaaagaactaggcgatatacatgctcaagaatttcacgatgctcatgttcttttacaatcgatcctttcgtaaagaacaacctgtatggatgcttgcacaacttatatatggcccaatattagttcttacctcatggatttgaacaatatgagttgtcctctctttgagttgattcttccatttgtcaaatgcaaaatgataactgcagctctgatcttgtgtccctaagaagatgagcaaaaaaaaaaaaagccatacgggctccaattgtgtacataatatttaatcaatttgagttgataatttaatgaatgtaggattaccttctcatccattaaaagcatctccaataaacctcctcctggagtcttttgtatg

SEQ ID NO: 11862 - DNA, 294 bp, Glycine max
gaaccactgagacttgctacttgagtgatatctgtagtcagatatcatcttacattataactatacactgagaagttagatacacttagatctgatctgctttaaatgtaaccaaataaaaactaactttatacagcagtatacaacatactaagaatctctttgtttatttaacataagaaaagagattacgctactactacgtgatcatgagctctataacggtcagttattccagatttggtgtttaatacttcaaattatatagtgtgaatgtgtataatctctctctct

SEQ ID NO: 11863 - DNA, 406 bp, Glycine max
  unsure at all n locations
agctntattcttatgttgtaccatgttgctcatgttgctccctttatctctagcattatctcttggcaatcttaatgcacaaatgtatatgaaagatcaatccactacctactctcctggtctgcatatctctagggccaccaatgttaagatagttgctgacaaggtatatccaggtttaccagtctaggatactgccaaaaagaaaggattctagttctactacaacgaggagatgccttcgaggaaaatgaaaatggaaatagtcaatcaccctcggaattggggctccctattcagtgggaaaaaggcttctctgtgctcttgatgcttatgatgtcaggaccttctggaaccagatcctatggatggacactcagatagcctccacttctagctatgatgg

SEQ ID NO: 11864 - DNA, 494 bp, Glycine max
  unsure at all n locations
gaacgctgttttttttttttcttttttncnnnncnnttagttaagcnnacngccggngaacaagacgggnnacactgcaccacgagttcatttatttctanccaagagccaaagcgagggagcgcgaagagagaagacgccccacacccacaaaagaagagngaaccagacaaaacggcgagncagaacgaccccacgagggacacgagaacgaagaacaaacagagcgccacgacaggagacaacacacacacgcaggagacaacccacaacgaggggcgagaacacagacgccgcacaacgaccagaagacccacccacggaaacaacaacaggagacccaaagaccggaaagacacgaaggcggacaccgagccagagagcccaggcaccacaagagccaaagcgggagcaggagacaaggcagacaaacgcgacgccaagcgagaagccanaagccaagacaggagaggcaccgaccagaaagaagcgcn

SEQ ID NO: 11865 - DNA, 408 bp, Glycine max
  unsure at all n locations
agcttactcccactattacccacaccacccaccaaacctatcaatgttaagaaaatgacatcggcagaaatgcagttgagaagagaaaggggcctatgctttacttgtgatgacaagttttcccctagtcatcattgtcctaataagaaatattttgttctacagtgggaagaagaggatgaacctgcattacaaccaggtccaccagacgaggttgagacagttggtgaccccagtttgtaagatcatcatttgtcttataatgctttaaaaggctcatcaggtcttggaacaatgaagtttcaaggatcaataaatggattgggagtgcagattctactagatagtgtgagttcanataacttcctccagcctagactagctcaatgcctgaagttacctatagaa

SEQ ID NO: 11866 - DNA, 309 bp, Glycine max
  unsure at all n locations
acttgatatggcctacccaagcttaaaataataataacaatatttgcttttattntttgtcattgttacttatttatgaatatggtttcagtgaccatgattgaatctacttatgagttgccaagtataaaattaatcccattgaatcaattatattttctggtcaccttcttctgattcttaggagctaatgattacattcttccagacccacctattgtctaatgaattgaagacaggacccagatatgataataaatatggattatgtgaaatgctgactcacttttggtttacaatccattctat

SEQ ID NO: 11867 - DNA, 391 bp, Glycine max
  unsure at all n locations
agctnngtanaaccaaccaatcagaatgctagacgaaatatagatgggaatagaggtaacaatggcggtaatgacggaccgaggcagaaccgggttgagggagtaaagctcaatgttcctcccttcaaaggtagaagtgatccagatgcctacctggactgggaaatgaagactgagcacgtatttgcctgcaatgactacactgatgcgcagaaagtcaagctagcagcagctgaattctccgactatgcccttgtttggtggcataaataccaaagagaaatgttgagagaggaacggcgagaggtagatacatggactgagatgaaaagggtgatgagaaaaaggtatgtgcccactagctataacagaaccatgcgacagaaactcc

SEQ ID NO: 11868 - DNA, 493 bp, Glycine max
  unsure at all n locations
nnncctccttggtttagaccttcnnagancnnantcatangaaaccaaccnncacagcncttngaccttggcttggnnagcnnncacttttttctttattaaanggagcaangcctggtggcgagaagatggacatgtaccttcctcatggatcctccatttgagccttccaccaatttgctttcaaatgaaaccttctccaatgtgtcagccaaggcagtgcccccgattatgctgaagttatatacataggctgcctcatcaattgcatcaactctgtgcagcacatactttgttttggcacctgcatatgcacccattaattcatctaaataaaatcatgactaatttcattaattttgactatgtattataattaacggtttaaataattggccgcatagtattattgcgaattcatcaggtcgttgatattgcaatacagtacagacaaatatgactgatgcaatcccagataacacaccttgatgcg

SEQ ID NO: 11869 - DNA, 259 bp, Glycine max
  unsure at all n locations
ccccacaaaccaaaaaaaaaaagaaacacatcnaccccgccaccgacccaaaaaccggannaaaaagaaaaagttgaaaaaaaaaaagggagaaaaacccaangagaagaaacgaaaaaaagagaaaggagagagaagaaagaagaaaaccaaaccaccaccacaaaaacaaacacagacgaacaccaaaaaagaaaccaagcagaccaacaacaacaaaacacacaacaaacaaaagaaccaaacaacacaaccacac

SEQ ID NO: 11870 - DNA, 374 bp, Glycine max
  unsure at all n locations
tcggacattcgtgtgaaagttatgatcattcgaatnnttcaagagcttccgttgntcaatttctagcgtgtcgacatattatgcgccagaatagaacatccgtgtganaagttaagaccatttgaatttctcaagaacttccgttgttcaatttcgagcttcttgacatattatgtgcccgaatcggatatccgtgtgaaaagttatgaccatttgaatttcgcgagagtttccgatgtttaatttcgagcgtatcgatatattataagcctaaatcggacatccgtgtgaaaagttatgaccatttgaatttctcgagaactttccgtgttcaatatcaagcttctcgacatattatgtgcctgaatcggaca

SEQ ID NO: 11871 - DNA, 399 bp, Glycine max
agcttgtttgtatcgaacatgcttcggggagatgcggtgaaggatgcaaaatgagccaaaagatgcactgtgaaagttgcaacagacagaggttgcacgagaaactcaagatgtttgcggtaagtgcgagtgtactactattgcacttcacttagccatgtattgagtaactcgcttagcgagacgatccgctgagcgagagagacatttggctttacgcttcctctcttggcatgccaacatgggcccatgtaagattctttggcttaccgcgccatccgctaagcggtagcgagagacgtttggcttctcaacatgctcgcttatcggaccgttctaccgagcccaatcccaaattatgaaattcttatatatatagaactgcgcttagcgcacagc

SEQ ID NO: 11872 - DNA, 558 bp, Glycine max
  unsure at all n locations
nnnnccttctancccgannttgcnangnnntnctnnncnnnatnagaanaancaaccngngcgaccagcacccagaagcccgatgcnangngcaaccaatttgtgtntttatactatacncacaccacncgggggagcggggagaatatatcgaattaatacctcctgcaccccctcatcatacgcatatactattacatctgtactaacatgacatcgcgatgtcgcatggacatctcacaatanaacatcactctgctctaccttgatcttcagaagtaatatcttgcaatttaaccttaataactccacctctaactgtatacattacaccgattgtcaacaatgcgagaactacacaactatgccaagagagatctatattccgcatgacgcccattacccaccatgatacagtatactgttctatacgcaccatctcttagactctgtcaccttcacagacaactatcctccgcacttcatactatatacaatttgatggtgagatatctaatacaacacatttcacagcacatgaatttaattacatgaccc

SEQ ID NO: 11873 - DNA, 470 bp, Glycine max
  unsure at all n locations
gacacgccaccagaccaagaagaaaaggaaccaaaagaccacccacacacaanncggggcgacctgaccccgaaccccggaangaangncngggagnnagaggganngaggaaagcagagagttggaagaaaaagaagagannaaagggggggggaaagaaaaaaaaanaagaagaaggaggaagagagaaggggaggaagaaaaaagagaaaggaaagaaaaagaaaagggagnagagaaggaggganagaaaggagggcaaaaaagaaaaagaggaagagaagaangaaaggaagaaaaagagaagaaaggaagagaggagggggaaagaagggaagggaaaagaaagaggaaaggangaaggaaggaagaaaggaaggaggaaagaagaagagaggagaaganaaaaaaaagagggaaaaaggaaggggaagagaggaggaaaanaagaaaggaaggaagaagaaaa

SEQ ID NO: 11874 - DNA, 194 bp, Glycine max
ataagtagatgcatgtgtaacacggggggtaactgcgatgagggagagtctcgtgagacacagcttaaagatgagcttctctccctatctcgtccttcagtagcgagctgcaccctcttgctatctctcgctctgtcatttactcagatgaggcatcctctacatgcttcttatgcacagctcatcttggaggt

SEQ ID NO: 11875 - DNA, 402 bp, Glycine max
agcttgatcagctctataggaacggctttccaggttccggtggtggtgccggtgggtttaggattcgaattcccactgggttgagcgcgccgcagcagcagcatcctggatctgcttccaaggtgtttgggaaggttgggaatcagagattcagccccaatttgaatcaaaaccctaaccctaatcttgggaagaagagggagagagaccccgtgggtgaagtggtggctgcgattaaggtattgggagatgggtttgtgagaatggaacagatgaagatggagatggccagggagatcgagaccatgcggatggagatggaaatgaagcgcactgagatgattctagaatcgcaacagcggattgtcgaggcatttgccaaggccgtttcggataagaaca

SEQ ID NO: 11876 - DNA, 381 bp, Glycine max
  unsure at all n locations
actcaagctctgtagctntatgttgaaagtcctcactaccaaaataggtagcatanatatttttgtcatgaagttgccatggtgatgcatgtaatactgctggttctgttatgaatgtcccatagtacttagaaattaagtgtttcatatatatagaagccaatcaattaaacaagataaaatggttcttgatccctctattccaattagtatcacttcctaacctccaaccattgacgtcccttgcatacatgactctttacatctggacaatcaatgcaaccagtcgcacattgctagagcatgttatatatgttcattccacggctcctgacatgacttgatcttatatatataaaccaattcaataatgaaatctga

SEQ ID NO: 11877 - DNA, 396 bp, Glycine max
agcttgcttgaggctggggctttttgcaacgtgtaagagttctaattaacatttacatgtaatatatgtaaagaagattaaaaagacattagacaccgtctgtagtttgagattgacctttaagatgaatttcataacttaattaaggaatctataacaacttaattatggtcttataaataaaatacaaaataagtggttcagttcgaattactttgcaatgctagtatttttttaaaagcattttgctttgctagctagtatgaactcttaagataatatttaatgttactcgagttaatttttttggatatgattgatttctcttactagcattcttatttagataaacaataacatagcaaatatttctttacatagcctatcaaaaaaata

SEQ ID NO: 11878 - DNA, 476 bp, Glycine max
  unsure at all n locations
ngntgttatcctccgatataagtgatagaacatgaaatcaggtttgntttatttattctttcgttccatcggagaaaatccaaacaataaaaaggttccagtccactcaatctctattaaatatctagacattgtcctacgaattgttggtattttttggtatagctttctatctaaactagacgagcaatataattgagcaggtttctttaccagcatttcttttggcaggagatagtgtattctccttgctgtttttgttatctgatgatcaataatctaatatagttatgaatcctaataactctttctgaataaatgcagggattatggctggacttgcttttgaaggtagctgattgtttctctaaattgtttgacaatgtttaccaattntatgaagaacattcagtgcaccggtcacaatgacttggcacttctccacacttgatagttaggctgcatttgcatcacac

SEQ ID NO: 11879 - DNA, 435 bp, Glycine max
  unsure at all n locations
gatcctctaagtcacctgctgcatgcaagctntacactaccaagatgatgcagatcggatggatggcagtcaaattgttagttgtagactattgtgcaaactagttacttgtcaaattgaagttataaaaaaaaggagtgctttcaagtttttcttaccatttgtagtgtgaaatttgaaatgatcttctatatatgaatgaaggagataatagatagatggagtggttttctttttcgttatggctgtgttgcttagtttccttctttttttcgctcggagtgaaaaagactacatattgtacacattctattgataacaagcatgtctttctctactgctatgagtggcatgccaatgatcaagattttagcaatggctcttcttgtgcttccccaatgaattctaaaagaagaaaatcaccaattgaatcta

SEQ ID NO: 11880 - DNA, 193 bp, Glycine max
ttacaagccataactgacaaaccatgatatcaccttacccttaaagaatgttggagctctggaattgcttctgaaataaactgggaataagtgtggggggtatgcttcattggaagatatgattcttggccatgcttgatgtatctgaatattgcctagctcttgcttaatcttcaaatccttctccaaaaac

SEQ ID NO: 11881 - DNA, 405 bp, Glycine max
  unsure at all n locations
agcttctnggtcnatcaggccaacttacaacagcaagcgccgagagactcagcataaggatgcacatgccaaagttgagtatgtgaaaagattgtatgaccaagtgaaggtgcgaattgcaaagaagaatgaaagctatgccaagcgagccaacaagaaaaggaaggaagtggtacttgaacccgatgatgatcctgtacatttgatggcaaatgttgtccaagaaggaaggaatgatgagaatcctgatactggacaaatgcaggctaaaggcccaagtggagaagggtattggcccaggtggagaaagacgaagtccccgagtggagaacgatgaatgcccatgtagagaaagatgaaggcccagaggtagatgcactaccaaaactattaattattgctaaa

SEQ ID NO: 11882 - DNA, 325 bp, Glycine max
agcaccttcttcaacagatctatgtccctctccacaacaccattctgttgaggtgttcttggcgttgaaaatttatggtgaattccatgttcttcacaaaagtgttcataggactcattctgaaactcacctccatgatcactgctaattgaataaatgtagagaccttttccattttgaattaccttggtaagtgtgcgaaaaacatccaaagcttcatctttggttgtcagaaacaatgtccaaggtaaccttgagtaatctccactattaccaagctatagtaatttctcctaacctatagctcttaaaggacctataatca

SEQ ID NO: 11883 - DNA, 404 bp, Glycine max
agcttgcttattcatggaagctcctaatatctcccatactttttggggtgggccattcttggatggccttgattttctcagggtccacttaaaacccatttctaccaactacaaaccctaagaaaaatatattatctacacaaaaggtacacttctctatatttgcatagagggtgtttttcctaaggactgaagaacttgcctgagatgccctaagtgatcatctaggctcctactgtacactaaaatatcataaaaataaacaactacaaatctacctatgaaatcccttaagacatgatgcataagcctcataaaggtgcttggtgcattagtgagcccaaaaggcatcactagccattcatacaaaccaaacttggtcttgaaagcggttttccactcat

SEQ ID NO: 11884 - DNA, 113 bp, Glycine max
  unsure at all n locations
agctntaatttatgtggcaggccactacatttcatattgaattntatctatttataccttaattggaaaccaaattattttaaattaattttttttttaaattacattctaag

SEQ ID NO: 11885 - DNA, 259 bp, Glycine max
  unsure at all n locations
actcctacatgatgatgcatgatacacatatgatttatagtgactaagatgcaacanacaatacagcaatatagagagtggngcatgtaaaagataaatcttcttcaagctcttcttcaagttctaaggctaagtcttcatgttgctcccctatccctaacataccctatgcaatagtaatagtagactctaaagtccanatattgaacccaaggaccagggtatncacagttaaaaagaaaatagattaaatcctttt

SEQ ID NO: 11886 - DNA, 428 bp, Glycine max
  unsure at all n locations
caagcctncgatttattgcaggtagcaccagacatctctataaagactccttatgaaatgcacatcacctatttttctattctcagcattgacttaggaatatagtcataacctgtacaagaacaggtatgagtgggagtagaatctgaaccgccatcagaacatacatattttcctcagggcccgtgtaactcgatcatagagttcggtatcactctaatcactcggtagatgatagtgatgcacaggtgaaaatctctgatgtcttcattgatgctcttctattgcaagaagaaatggatgcaatggcaacttttagttcgtctcagtaaaaccagtggattcaattcagcttttcctgattattaataatgtcttattggcgtaatctacttctgataagataacagtttcatattttgcttctg

SEQ ID NO: 11887 - DNA, 504 bp, Glycine max
  unsure at all n locations
naaccctctgttgngngaacgtttgangnacnnctncncanatnagtnaagcnaccncgcgctgctagcaagaactntatctctnggaagaggtttgtaatctgtgtggncagccaaggcaacagtgccaattggcaaaactgaatgtggctcatacccaaaaactgcatgttgggcacactgttgttacaatgaaagagccacgaacaaaagatacaagtaaacagtattccaatgacttattaggcaaaattatgcagacaaattaacttcaagactccattcaaaataggaaacagattctatgtttcttctaatatatgtttccatttcaagagagttcatcttatgcagggaaaagggagctcaaacaaaccataagcacggttaggatcaaaggctctcatatcctctacgtgaagcgtgatcggaaggtaattgcaagcgtgcttgcatatgaacctgaaatgtaccaaaataccaatagtgagatttatgagaccn

SEQ ID NO: 11888 - DNA, 407 bp, Glycine max
  unsure at all n locations
agcttattaattgaaagttgttctattggaagatcagataaacaaacatgcaagtatcattcctagaacctacattctattccattgtgactttacatctaatctgactttagttgtgtccaatgtgatcaacctagagcatatttgtatttttactcttgcatgcttagctttaaaaactagtgccaattttgaatatttttgagcaaaaacattagttcttagtttatgcgtattttatgtatacaattccttctgtgtgtggcagttgagagggtggaacgagaaggatgatgttgtagctaaatggaagaaagtgcanaatgatatgtgcctacatgctcattgctttgttagtgatcccaattccttcctggatttggctagtgaattgagatatcacatat

SEQ ID NO: 11889 - DNA, 449 bp, Glycine max
  unsure at all n locations
aggactcaagggagttagtgtggagattactctnggatggngatgatgctattctgngacttgcatgagaaggacctgtttgagaagtatttcacacggcttctggcaaagcaacttttgtcccgaataacagtctctgataatgcagaaagaagtctcatagttaagctcaagacccaatgcagttatcaattcacctctaaattagagggcatgtttacagacatgaaaacctctctagaaacattgctgaacttttatatgccaaccaccccgagttaagcaacggtcctacgcttgccgtgcaggttttgacaacagggttttggcctactcaatctactgttacatgtaacctgccagaagatatctcttcactttgtgagaaagttcagtcatatattaccttggcacacatactggcaggagatngtcctgcanactaatat

SEQ ID NO: 11890 - DNA, 375 bp, Glycine max
agcttatctacttataaatcacgtgatcatgaattccgaaatatagggggagtaaacgcatgcacattgtatctatatacaattgtttgttgcttgcttgaatcttgatttcaggtattgtattgtcatcatcaaaaaaggggagattgtagatgcaattgcctttgacgttttgatgatgatcatgatgatgtgttgcaattgatgcaaatgggcttttcaagattaaaattcaagacaatacttcaagattacaagtcacaacatcaagatgattactagaatattaggaagggaattcctaattgaattagcaaaggttcggccaagtgatttgaattaaaaaagtgtttcgcaaaggttttactctctggt

SEQ ID NO: 11891 - DNA, 493 bp, Glycine max
  unsure at all n locations
agnnccctcggggaggccttaagnnatgcatncacactatagattactcaacctngagatgaagaagggttgaagggtgaaacttcctgttttattcgttgaccacagagtggtacctggagatatgtcgcggnggtcaagagaccttgnggacgtcaggtggngtgctattgcccaaaaccaagcttgaccaatcccgacccaacccgggcatagtcggtcagtgagaacttgtgatgtacctaaacagacgagctcctggcagtcaacagataaaaggaacaaagaccacaaagcaaggaggcttgtggtggctggccagctgcgaatattgtgtgatatatgggttgtggcctctggtaatcgattaccaagggtgggtaatcgattacaaggcttaaaaatgaaaacaggaggctaagatggtctctggtaatcgattaccaacgggtgtaatcaataacacagcttgtaacgatgacacgacaccacc

SEQ ID NO: 11892 - DNA, 575 bp, Glycine max
  unsure at all n locations
caccacccgcgccttacgagccgacacgaggagacangcgaagtcgccgacaccgccaacacagacacaccaactcannacnaannaaaaannnggcggagacgagccctcgaacacccacnnnttngaaaannnccnnggggnnnannnnngggnnnnnngnnnnnnnnnnttttgttgngggagaagcgaaaaaagnggaagggggaggaagagagaganagagcgaaggaaccaaagggaggaagagngaagggaaagagcgaagaggaaagagagaggagagaagaagagaaaaaacaaacggagcaggcaaacgccgaaccgacagacacacccacgacggcaaccacccgccaacacgaaaaactcacaacaacacaccgcacgggacacgacgaaaacccacacacaccaccacaccaagcacagcggacgcccaagcgccacgcaacgccacacagacagaacagccagagagaacgcgacacagacccgggaaccaccaacagcacacaaacggccgcaagcagccgaacaacacacaccacacccacacgccacccaaccaagac

SEQ ID NO: 11893 - DNA, 343 bp, Glycine max
atctatatatggtgtattacaagcctcccgtcagtggtaccttatgtttcatgggataatatcttcaggtggttttgatgataatcccatgcataaatgcatataccacatagttagagggagtaaaatatatattcttgttttacatgtatatgatattctactagcagctaatgatcggggttgtctacatgaggtgaaacaatttctctctaagaattttgacatgaaggatatgggtgatggatcttatgtcatcgacattaacattcatacagatagatctctaggtattttgggtctgtcacaggaaacctatattaacaaaattttagacagattt

SEQ ID NO: 11894 - DNA, 400 bp, Glycine max
  unsure at all n locations
agcttgcatagttagaaatatcttggttgattccgatggtgtgaagtcaaggaaagatttttctattgccatgatgaggtcatctatagttttaggagcctctttgtgttgtaatgactgaatggcattaaagaagccaagatctaagacattaaaatcaagcaagtttgggggttgagaaaccaatcgaatgtcaaaaccgccttcactagcagcttaatggaagtcgttgtcatcttcatcaatgtgacatggagcattgtcttgttgtatgaaaatagtttctcctctatcccctattggccattttgctttgattgcagacaacacatgatgaataagaaaatgtttgcttacttgcttatttattgaagaatattggtntcgttccatagtccct

SEQ ID NO: 11895 - DNA, 492 bp, Glycine max
  unsure at all n locations
nnncctcttttccaatttgcanagatcgctcnncnnnatagaananacaaccccgcgnnngctgaggatgaaattcgaagactaaaactttattattttatgatcnaactctcgagaagggggatgtatttatatcatacaaacagcgccatgattcaatacctctatcaaaagcattgatttgtatagttagagtgtttttcttcttggttctagatagtagatactaaacaaaaacatactaataccaagggggtctagctcagatggctgagcacggtgcgtaaatgttgtaaatctcctgataccatgttcaattcctatggattaaataaaacaccaatgagacgctttaagttatgaattatagcataagggaagtctactaacgccagcgtggcttgtgtggactttcagatctgtccgcgctaagataattacctaaacccttatgtttatatgagacatgaacatgatctccatgagctatcg

SEQ ID NO: 11896 - DNA, 572 bp, Glycine max
  unsure at all n locations
accccccaaactagaacgttgagcttctgcaaaacanacgncgaatntgagcanagaaccccgaggangactctagaangcgagcttgacaagcgaagcaaancncacgggtgngcgtacggacaagaaacagcacggcngcacacgagggcggcatgtgtgagaaagacataacgcccacaccgcacacggacgcgaacaaagggagatagacgcgaccatccgagtgcgccgaactggagacaaagagagcgacggtacgcgcaanacgagaaagcgtcgataccgacagcgagtgcgaggaccacgaagaggcgcacgaagcgagagtgcgaagcaagaagcaagcgcaacagcacaccgggacacccacaacgccaacacgtaagcggagagaagacccaagggacggggacagagcaacgcgcatggggaagccgaaaagaaacgggggagagggaacaggacgggccaccgacgagcgacaagcgtagagcgtaagggacggcgaacggcgaaaccgacgggcacgcacggggcaacagcgacgaccgaagcaggagcgaaaggcg

SEQ ID NO: 11897 - DNA, 419 bp, Glycine max
  unsure at all n locations
cccaggctttgcggtagaactggtgtcatgaagctaagcacctgncatggcggctaagctgaattccttgcgggactgtaagcgctaagtgagtccttatcagctaagcgcatacttctctatactcaagatgcatcattntagctaagctggcccagaacccggcttagcaacagttgcatcttttctaatctgcagacctcgctaagcggacttatccgcacgctaagtcaagcctgtgtgctaaaaaaaaaacttgaatttcatagttaggctaagcgcacggtgccgcanagcgagcatcttcgaanaaccaaacgtcacttcgagaaagcaaaatggcttatgtgagtgtaacggcaactactctcacatttggtggaaactgatgtattgcctgcatcntctctcttgactca

SEQ ID NO: 11898 - DNA, 401 bp, Glycine max
  unsure at all n locations
agcttcttataagctgaaccattttatcaataaacacaagttgagttttattcagaaaattagagtttatctcttttatcttagtgagagtgattctcctaaattcttgagtgattcaagaacaccttggctgtatcaaaggactttcacaacctttgtgtgttgccctcgctggaaagagtgattctttccttcctttcatcatcacccttgttctttcaacccacaattccaaaaaatccacctctgcccagaattatctcgtggccataactcccattntacgcactcaaattaagtgattcttgagcctaaattgaatttcanaacgagacctttcacctcgttgtggaatcacctcatttggagccctgtagcttcagntattgccatttctatat

SEQ ID NO: 11899 - DNA, 313 bp, Glycine max
ctggggtcaattacgagtgtcgcgatatcctacggcacacaataggacatccgaatcaaaagttattacgtgggactgttcctagagctcccgatttcaatctctagcgtctcgatatattaaggggctcaatcggacatccgagttaaaagttattgttgctcgacttttcttagagcttccgctgtcaatattgagcgtctcgatatattacagggctcgatgcgacatccgactcaaaagttattgtcgttagatctttctcagagcttccgttttcaattacgagcgtctcgatatcctacaggacaca

SEQ ID NO: 11900 - DNA, 228 bp, Glycine max
  unsure at all n locations
agcnnttangtggttgaagtgtatgtggaagagggggtgtttgacaaatctgaaaaaaagttgaatgattttaagggagatgaggttgttgtaattgatggagtggaggctgaaccagttgtggagggtgaagataaggctcaggttcaacttgatgaggaaggtttggtggaggttgaggtgcaggatgaagatgaggctggtgttgtacgtgagatggaggttgtt

SEQ ID NO: 11901 - DNA, 499 bp, Glycine max
  unsure at all n locations
ntgtgataattagcactcaagggaggtagaactaagaactctgtgtctcagactactattcaatattacaaagtcaaggttatgataaaaataaaaaactatactccctcttttctcanatataagggaaaaaatgacatactaactaaaaaaagttacttaaaattttcttatatttgagaccaaaaacaatgtgtttccccttctcatatttgagaccagagaaggagtaactcattagattccaaaccacatgcaatgtatctaccataacagataagtccatgaaatgcttaccaatctgatcaatctggtgattgatcataattactgaaatcctttgtaaatccaaatcttaaaaggtgggcctaagttattgcttttgaaatctactggaactattcaatacanagagaatgttcagaaatgaacgaacctcaaccaaaatgccaagtttcatactcntttcttaaggcaagaatatatatgttgaaataat

SEQ ID NO: 11902 - DNA, 406 bp, Glycine max
  unsure at all n locations
agcttgtnatgnttttttctttcgatcaaagcagagtatggtgtatctgcatcaacaagtaaatatcttattgtgaagttcttagagaattggccttgaccaaaagtggtcattaggtccacgtagcctcaggtctctactctttcgcctgcaaagccaaggagtggaccgacgtgaggatggacagtgtcaggggagacctcgagtctctggaaagttttccagtataggatatcattggagcttccctggtcaatgagaaccttggacaccatgaaatttgcaatgatgatggagacaaccatgtggtcgtcctggttgatggggttgatacccttgaagtccctatccgtgaaagtgataggagggagactttattgtgatggtgcattgacgaaattgatgt

SEQ ID NO: 11903 - DNA, 495 bp, Glycine max
  unsure at all n locations
cacatagatactaagctgctgcncatggagctcctntatctcccacactnnttggttggaccattcttggatggccttgattntctcaaggtccacttggaccccatttctaccaactacaaaacctaagataactatattatctacacaaaaggtacacttctctatatttgcatagagggtgtttttcctaaggactgaaagaacttgtttgagatgtcctaagtgatcatctaggctcctactatacactaaaatatcatcaaaataaacaactacaaatctacctatgaaatcccttaagacatgatgcataagcctcataaaggtgcttggtgcattagtgagcccaaaaggcatcactagccattcatacaaaccanacttggtcttgaaagcagttntccactcaatcacccttttcatnctgatttggtgataccactttaagaacaattttgaaagaattgcaccatcaactcataagcaatcatc

SEQ ID NO: 11904 - DNA, 410 bp, Glycine max
  unsure at all n locations
agcttgtattgnattttccactacatcaattgtacctatctagctacttatatcctgaatcaaacatgaattagaaaagaaagttaacttgatatagagattaaattgaaattgaaagatggcaagtataacacatctactaagtgtaaaaattcaataaatttgactgttccagagtgtatggctatgacttgttgactagcaggcaggcgaactactatggaatttatttctctatatgtagaataacaagtcaatgaggatgcaatatgatctgtagcaccagaatccaaaatccatgttgtagcctcaagcttgtgagcattacaaataagggatagtatatattacctatgcttgatgtatgagcagaacttgtaccaatctagttaacttgtgatccacgagag

SEQ ID NO: 11905 - DNA, 381 bp, Glycine max
  unsure at all n locations
cgtccattagtacaaatagcactattattgaccttgaatatntttacattaagaggcaataatgtttgcatctgatatttgaactgtatgaaaaaaaaataaaaaattacatcatgacccctgaaggtctcggtgtcacgataaaacaatactttggaccggcttcaagaagctctcgcacgcctacgtccatgactctcgaagacccagagtaagggacacaaaaaaatcaaggaccaactggaggagtcaatcactgaaaaagtgactcgacaattaatgttgtctttcagccaaatgcagtcccaaatgcaatcgcaactgcaatcacaaagactcacactgcctcctgagcttgaagttggtctttctgctgctcgt

SEQ ID NO: 11906 - DNA, 421 bp, Glycine max
  unsure at all n locations
gccttgtnattgagattanatggcggngaatcatgtganagggcgcatcgccattatccgactctggtcacttttagggtgatagacaagaaccgattcaagaaatctagacaccatactgtgcgcataatagctgttgcttttaaagaaccatgaagatgtagcttgctcatacaacgttgaggatacgtaggagcaagaacgcctctccatattgcgtccaggatagattctagcatatccgagcggtcaatatgtatagaaatgttctacggacctacactataagttattgagccacccaacggctaacgaatcggaacgaagacaatgtcactggtgtatttgagtcacgaaagctgtggcattggaatgcgtattgggcagaggtttctttcatctgccctattctcttggctcg

SEQ ID NO: 11907 - DNA, 490 bp, Glycine max
  unsure at all n locations
agcntgatggcctggggctaaagatatcananctagataatnaagctcgaaacagtaataacatttgtaacatggctgcttagcatgtatttatattgcctttacatgagaacaaagggaggggaaatatatgtggaaaatgaacacgaggaagtaganaataattttctccttccttgatttgatgccccacatgaggcgaatataatgctcagaaaaattaaaatcacatactcttccatataagagatttgtcaagatattattntaaaaagaaccatatattttaacattgtgagaagttccttaaggtcaagtcccacacagttaacacccgatcaactgattgtctcaccaagaactctaataacacactactctgactcccacagtagcactatatgtgtgttcaattcactgtgtcaccacactgaatgtgatttcatttattgagaagaggattgatgttgaatgtgccttatacagaggg

SEQ ID NO: 11908 - DNA, 405 bp, Glycine max
  unsure at all n locations
agcttgttggtttatggggtacccgtcatatgtggtactaggtggctatcgggcgatggtgcaagtcgactctccacatccacaaatcacacataaatccaccatcccaagttgcccaccttcaactgagctcacgtagtcccacgtagcccttatcctgattcctctcaacaccgggtccccatcaatccctccaagcttccataacatccaagcaattcaacatccaaacatcatgaattatcagaaccaagaaaacagggcagaggcagaaaactctgcccaaaacacaaaccaataccacagctttccttactcaaataccccaataacattctctttgttgcaattcgttcaccgctggatcgactcgaanattttactggaggtccctagtacataagt

SEQ ID NO: 11909 - DNA, 444 bp, Glycine max
  unsure at all n locations
actcagctctagaggatactaggttgtcacccagtagggcctccttaacgtttggagccggtcgtgggatgatgatctgctgatcacaggcctagtgcctgctcgtacccgtccctgagaattggttaagtgggaaatgacattatgctgtgaaacatggctacgctaccacttacctcggttcatccctgtcttggatttggcgccgtattgaccatcgcttgaaatgatcttgtccttgtctttcgattcataaaataaaaatgcatgtgcatgtgtatgtatgagcagtttcaaaagcaataattctttagcaaaagcctgttgggttcagttntaattaagcgcttggggcatccncatggatcgagcanaaaggctcggatcattaaaagaatacgcatcttttaaggcacanagcgaggatcagaacaacgaatcatc

SEQ ID NO: 11910 - DNA, 407 bp, Glycine max
  unsure at all n locations
agcttgtgtttctggagattcaaccctctggctcaataatattttaccaggaatgttacgacccttgagtaaccttcacaaaggaaaaatataaaactataaattcccataaattgtataaggcatgtgcttccatgaaatgcattttcaaagcaacaataatccataacactacgaaaagaaggttcccaatttgactgaacggaatacagtcacatcagcattggattcaatcagacacacataaaccatttccaaccatttcttagaatttcacccttcgaaaattcgtgatcttaatgccaaaaaaattcaaatttttttaaatgggttttctaaatccgacggatgaaaacattangaagtgaagatcagcgaatcaggcattgaaattcttgagatcacga

SEQ ID NO: 11911 - DNA, 329 bp, Glycine max
  unsure at all n locations
tactntggcaacagaagggcattaganaagatcatatcttcttatatcttccattgnnncaatngtataatttcatctaaacaatattcagaaaaaatgaaagaaaatatcctcataaatcatgtttgctatctcccctactaaataattagactccatctatacctcanaccccacgtaggatttatgtacaaacagacgaaagagggggcaaaaaataagtgaaatttaaagaggaccttggacaactttcaataaccaagtttagtcccactctgcctatctacccatgcatcgttaagctaagctatgtactcattcaccttttg

SEQ ID NO: 11912 - DNA, 405 bp, Glycine max
  unsure at all n locations
agcttnatcctcatcgtccctcacagtctttagattggggagccaatccaatccttgtgttcggactctcagccacttatgatagccgccgatgatcccattactgcttcccctaagctctctgtcctttcttcacgccgcatcccatgccttgcgaactccttggagtaccctcgcgttgtggtcactaaaaccccgtgcgatgaaaggcgtgatgctttcgtctaatggcgctcctctcatggcgtagccaagctgtcttatggtgagaacaggattataattaatacaaccccttgttcccatcaagggaacatttggacatccttcgcatgaagatagaatcctgattcttccttccttctagcgagggaaccaattaacagacgcccccccatgctagcc

SEQ ID NO: 11913 - DNA, 377 bp, Glycine max
  unsure at all n locations
tagagctgcattcgcgcacctattttgaatcctctatgatgttcttatgtatataaaacagtcccacaatcncgatcttaataaatcacatccatatgtcattgcggcatttcaccgagcacttggtgggcgcgtgtttaggcataaattgcaagagaatgggggcaatgtggcatgccccattgttttagaataccacataggcgtgaggccatcctctacaacccctcaactctaacaaattaagcataaaaacccccaanactgccccacaaatatgagcacattctcacaatttagagcaccaaaagatgaacaaaatgcaccaatggaaagctaaaaactcaaggattgaatacttacttgttggagtgagt

SEQ ID NO: 11914 - DNA, 400 bp, Glycine max
  unsure at all n locations
aactaaattgggcacagcctgggataananntatagttagttggaatataaaccaaatnnataattgggaagtgaatatatatanntatatatatcatactatactatnactgagggagggaatcttctcaaagtanaaaataatacaancntatttggtannaagtaactaagctatttggttgtccaggggtttaactataatatacattggcatcctaggtaactacttcaaacacacatgtcaaccttccacgtcagttttgaaatagaagcacagacgcccagtccttgacagtcggactctccaacanacaagttatctataacctcttaattatttgaatatatattggaaccactttatctcttgacaggtgtcacgacctgcctcgtcgtt

SEQ ID NO: 11915 - DNA, 490 bp, Glycine max
  unsure at all n locations
ncccccgcgatgagaagtcancgtacnncgcacacttagaaactcaaccttgcanaanaatgaaaatattaaaatttcaaattcatattcttatgtttaaatttttaaatcatgaaacacactcttaatcatacttacaatcttagcatattttcatcacatattcataatataataccgtgtttttattatcataatacaatattttacattttccttcatgtgacaattgcatttcaaggtacgttcatcaccaacttcatgtgacattgaatcattgacataaacttagattagaaaatgaatgaacacacttaaaggaaagaaatcattgtcaaaagttgtgctttgtaattaaggtgtacaatatataaagttagtgatgaacataccttaaaacatagtgttacatgaaggaaaaaacaaaatattgtataataatgatgaaaatgcaatattatatgaataatatatgataaaaatattntan

SEQ ID NO: 11916 - DNA, 443 bp, Glycine max
  unsure at all n locations
cccccgaacagaggcgaaacggacagngaaacgcacgcaaccgaaccccacacaaaaacaccacnaagggggcgccccgaccctgnacccccnnaanaaaaancaaggagaaagaagagaggagagaaaaaaaatggtgagagaagggaaaaaagaaggggggggagaaaaaaaggagaaaaagaggggaaanaaggaaaaggaggaagaagaaagagaaagaaaaaaaaggaaagaaaggaaggaagaggaaagaagaagaaggagaaggaaggaaaaaggggaagagagagaagagaaagaaaggaaaggaagagagaaaaaaggaagaaaaaaaagaaaaaaaaaggagaaaaaaaaggagaagaagaaaaaaaagaaagggaaggaggagaaagaaagagagagaagaaagagagagaaggaaaaaaaaaggaaagacc

SEQ ID NO: 11917 - DNA, 424 bp, Glycine max
  unsure at all n locations
ctgcggatntggtcttcgccgggtaaaggatcaaagtgagtcatataagaggcaaatntggtcatcctgctgtggctgccattcctatatggccaagtttcccaccaacccaacaatgtcattactcagccaataacaacccattttcttacccaccacccagttatccacaaaggccatccctaaatcaaaccacaaaacccacctaccacacgaccaatgctaaacaccacctttagcacaaaccaaagcactaaccaagaaatgagttttgcagcgaanaaaaaacctgtagaattcaccccaattccggtgtcttatgctgacttgctcccatatccactcgataatgcaatggtagccataacccctgctaggtttcctcaaccttcattntttcgaggatacaactcgaacgcaacat

SEQ ID NO: 11918 - DNA, 428 bp, Glycine max
  unsure at all n locations
ttcnatangtatagggncnaccagagagacgaggggggcatttttgaaagaccacagacacaccactgcggcgagaacaccgcacgagagaaccgagacccgagggagagaagcncggcgctggagaaccncggcaagaacgcagcgcagcgaccagcgaccgacccagagcccggacagagacacccacgacgccagcggagcgaagccaaaacgaccgtgctatctccctgttattgatgcatatggaagcgttcctagtacctctatacgtaggatgctctgtgtggtctcctcctcggccgtacattctgtgtagtttattgtattccgcctctgatagtcttggaccctgggtgtgtttccgatctcttgttttaatacgataccccgtaccactatttatcgtgccaatgtataaccgcttg

SEQ ID NO: 11919 - DNA, 492 bp, Glycine max
  unsure at all n locations
cgcccaccggccttttagggatgccagatcgcacnacnnttngaaacgncacccgccgcatgaanaagaccattgtgataaggggaagattagtgcnttttgataatctaagcccttgagtgcgataggaaccaatgaatatttgtagccaagcctcactacaagcccgataaagcccttctgattctgtgaatacatttctgactgtatggtctgaaacgaaatccaaagactgagcctcttgctagttgtgattaattaatcacttatacactagtgcttgagagaaacaagagccgtgaaactgtggggaagctactttccttgagatctggcttatgcctaactccatctaaatgctcacgcgacaatctattcctctctttggagaaatgcataccttgtgaaacacaagtgatgagagcattttactccattctcttatcattctatcaagaactcttggtgcatccaccctatgtacatatacct

SEQ ID NO: 11920 - DNA, 538 bp, Glycine max
  unsure at all n locations
gacgcaccgactacgacaagagagataagcggcacgacaggacacgaacacacgaaacaaatactccaacaccnacaacaggagggnnnnnttgacctcgctcgacccccnnnnanaanananaaaggggagaaananagacggaaagaggggagaaagatggtttaagaaagaagaagaaggaggagggagggnngaaggaggaaagacagacacaaanaagaaagggggagaagaggaaaaagagaaacaagcaagaagagaagggaggggaagagcgagaaagaaagacacgagcagacaaaacgagagcagggacgaaacccaaaccaaaggaacgacaccggaaaaaacaccacacaaagaccagcaccacaaagagccacacaccgcaaaaagagaaacgaggcagcaagaaacggagccaaagagcccgaccgaacaacgaggaacagagaccagaacatagcacaaagaacaacacaacgaacgcaacgccacacgaaagaccaaaggcaacacaaaccgcaacagaaaa

SEQ ID NO: 11921 - DNA, 367 bp, Glycine max
  unsure at all n locations
agcttcctcngccgtaaaaaagatattatcggccagtgtttgtaaaaaaattgcgcactgtccgctgaaaaatatccgtcggggctatttaactaccgatgtcggctattgttttttctattccacccctgaattatatttggatgatgcctattaggaaatgttcggtcggggtcatccggccatgcttctttttgaggcctcaatctgtcgtctttcctagccaggcgacgctggctagcatttttttcgatcaatatctgagtgaatcatgtttttttttgcccacgagggctaatggtttcatgtgccaccaaatgagaacatgccaatgtcggacgatacacaataccgcacgaaaaaccct

SEQ ID NO: 11922 - DNA, 471 bp, Glycine max
  unsure at all n locations
catgcgaagtgngtggaattcctagagcaattcctttatgttatcaaacatanaaagggaaaaggtaatattgtagccgatgctctttctcggcgtcatgcattactttctatgcttgaaacaaaattgattggtcttgaatgtttgaaaagcatgtatgaaaatgatgaaacttttggagaaatttttaaaaattgtgaaaaattttcagaaaatggtttctttagacatgaaggctttcttttcaaagaaaacaaattgtgtgtgcctaaatgttctactagaaatttgcttgtttgtgaagcacatgaaggaggtttaatggngcattttgnggtccaaaagactctanaaacattacaagaacatttttattggcctcatatnannaangatgtgcagaaattntgtgaacattgcattgtatgtaaaaaggcaaagtctaaggtaaagcctcatggattgatactc

SEQ ID NO: 11923 - DNA, 401 bp, Glycine max
  unsure at all n locations
agctttttcttgaagtactgggagtggtgctctgagacgaggtgaagtttccttgggactgcctctctatttatagttgctgaagtgggcttataggccttcgtagtcgcactcagcgccacacctcgcgcttagcgcgttcagatcgcgcgctgggcacgccatgcacgcttagcctgtgcttctgttggatcgcgcgctgggcgcctagctgggcttagcgcgcgtaacggtttctactccttcgtgcttaacgccacgcttagcgcctgcagctagttgctcgcttagcgcctgtgcgcgcttagcgccactgttgggctgggcctgcttcagaattccttttttttcttcctttctgttgccactnttgcttaatgtacccttttttttcgtatctg

SEQ ID NO: 11924 - DNA, 479 bp, Glycine max
  unsure at all n locations
gcactacttcaccttntatttaatttacanaataaataatacacaatgaanagganaacttaactactgctgataaagaaaaaacttctagaatttagccttatctttttattttaacaatagacaatgcaaaaaaaaaaatcaagatttgaattgactaaactctataaactgggctgattaattatgagttaaacagtcttaattatttaataataaatattaataacatttaaattgtacagcataatttatactattcacagaggtattggagggagacagagagaagggaaccaacctggtcttttgggaaagtagggcaacaacaccaaagatgaaaaacataagaagcattccagagtgctcaaagtcattcatgtgagcggngttaaggactccaccaacaaaaatcttgaggtgtgtgaatacaaaagctcgatgcacatgtcaacgaaagcaccaattgaataacatat

SEQ ID NO: 11925 - DNA, 406 bp, Glycine max
  unsure at all n locations
agcttgttattcnntatgatagaccagtgagcctcacgttcaaagggaagctagtatttgaggtgaacaggtatggcttcactgatggtggagcttgggttgatgggaacctaaactaatgcaatcctaccccgcaagggcattggatagaaaactccaagtagattaagccagagatgcaagagaaggccctaggattcttatgagccttacggtagatttcgggcccatgggctaagtatgagcccacttatctttgtaaatattagattaaggtttcattatttttgggccttgtatatagagctccataatgtaggtagggtaccctagaaatatatgaattttcagcccttgtattttagggcacctagactagtttttgtattacgggtagttttgtaat

SEQ ID NO: 11926 - DNA, 308 bp, Glycine max
gcagatgcatgaacatggtcagtttgcagcgctctgtcctcgtgcgtaacatgccagactatatatgcttgactcaatgaggaatgctacagtgtgtgagctcagcctgtgagaccatgacgagaccattgtagaaaactatagctaacgagagatacttactagaaacaccacatatagccacctgactagaataagaaaacaaaaggaggtgaggtatcctaaacgtcatacggagaatacatggagcagacaggcaactgtaagacgcactttgtgtaatgaagcagtggacatacttacaaaat

SEQ ID NO: 11927 - DNA, 406 bp, Glycine max
agcttttatttcgtcgtggtgctttcatcgttgtcatcttctcatgaccatcgtgtcactgtcaatgtcgaagtgtgaactcctccaccacaagactctcatcattagaagctatgaacccatctcttgcattttcatgtcttctttgttgaattttgttgggatcagagttggtgtggttgttgatgacattggctttaaggtgcggcggaaggagcgttagggtttgtggttaagattttgaaggaaaatggtctcaaaaccatattttgggctcaagagtcaattacatgtagagaaagtgttaacatcctatgatgtttgtcctaagacaattacctcacaactaatgtgcacatttagataaatttaaaattatttattttacccctcacaaatgaaaaga

SEQ ID NO: 11928 - DNA, 508 bp, Glycine max
  unsure at all n locations
agggaagggggnaggatcgtcngntcgatgcnnctcataacggcaccttagaaacanaaccttccttaagaagatacctaatgaagctagagcttaactacatctcttctctctaatagctaagctcacctgcttgagatgagaagctagagcttagctacacaccccatataatagctaagcttacccccatgacaaaatacataaaaataaaaaaaaagtccctactacaaagactactcaaaatttcttgaaatacaaggctaaaatcctatactactagaatggccaaaatacaaggcctaaacgaaggaaaaacctattctaatatttacaaagataagcgggctcatacttagcccatgggctcaaagtctatcctaaggctcatgagaaccctanggccttcccttggatctctggcccaatctacttggagtcttctatccaatgcccttgcggggtaggattgcatcattccctccaccttggaaaggatttgacctcg

SEQ ID NO: 11929 - DNA, 384 bp, Glycine max
agctcgtttatgggtaaacatgacacaagacaaggcttggtttggttcaaaggtaaaagggatgccccacattatttccatgacacaaatgcaaaaatgatgatttggaaacttcatgctaaactggtcatgcatgcacctatgtggacactcaagtgtcaaattattatggtcatgtgatgctaaagcttaagattcatttccactatgttaaatcaacccaatgtttccaaaatatgttcttttatcaatttgtgcattcattcgagtacatttcgggcgatcagtgaatttatacagcattcacccttcaagtgtagacacatctttcaaagatagggtatgatcaatgaatttctttcaaaaaaagttggaaattatttc

SEQ ID NO: 11930 - DNA, 493 bp, Glycine max
  unsure at all n locations
agggccgctttacgaagacgtagcagnacgtacnnnctngagtaatnaacnnncgaccncctgtgttctgggaacctctccttcctcaggtgttcctctttttcttcacctagttcaagcacgactgtgtttctgcttttgttggcttgccttgcatagcccgcattattcttttcaatttgagccttcacttgctcatgcagcttcttcacatactcagctttagcctgtgcgtccttatgcttaaacatagcaatgttaagcatangcaacaaatcaagaggagtcaaaggattaaatttatacatgacgtgccatcattttcttctatcttctaaaccctttttgcaccattttaattactgattggtcttaattgtcaattaattaggcagttttattattggggctcaattagctaatctgatgtttttaatctaatttcacgaattaatgaaacattgcgcttaatccggattttggttgtgactcn

SEQ ID NO: 11931 - DNA, 594 bp, Glycine max
  unsure at all n locations
ccgcagccgcggcacacacgcgtaatagtgacagcancaggaggaaagcgccgctaacacgacacacacgcctcccacatcatacatncgcacancacacagacacgagcgccgtgtagaccccgtagcancaccgcnaannnaccgacgaaccaccgcgaagcacccgagacgccgcgacggacgagcccctccaagcggtttgaccaccagcatacgccacaaacgcaggcgccaagaccanccancaccacaacacaacgcacccacacgaccgcaacaccgccgacacacacccaagagaagacacgcacaagagcacacggaaccacaaaccacaagagaccaacaacacgaaacagatgccaaagccaacacagcagcgcagacccacacaaagagagaccagcccaaagaacaacgcatcacccacccgagccagaccacaacacgcacggcacaagcaaccccccacagagaaccaacgagacacgcaaagcaaacagcgacaccgcacagcacacagaaccacaaaatgaacgaccaagcgcgagaaaacaccgaaaaccaaacacacacgccaccgaaaagacg

SEQ ID NO: 11932 - DNA, 319 bp, Glycine max
  unsure at all n locations
ttcactttattgtangtaacgcgagctctgaccactgttcttactggccgcgatgcttctnttcatgtccgcctgagtgggcttattgcctaaaccatactagccacgattcccttgtgtttttatcacactagttatgccgtcattgggtctgtctaaacccatctccgggttcataaccgttccacacataactcgggccatcattaccgccgcatcggacagacaaggctgcccatagagggagtccacggaggaaatgcttaccacctcacaagactggaaagcggtttctaacgattcttgtgcggcttccaca

SEQ ID NO: 11933 - DNA, 539 bp, Glycine max
  unsure at all n locations
acgcccgcaccaccaagacacgacgagagnactacgcagacggaacaagcctcacacagaaccacacaccaacgagcattgagcctgcaagcacgcaangacaagncncgggaccgnnaagcgacagcagcacgcaacccggtgaacaccaaccacgaacccnaccggcggagaacaaggngaanaccaaacaccccgagaacgcaacaaaaacaccggcgaagcagccaacaaaaccgccgacggagcaacccacacaagcaaccaggacgcacgccgcaggaagcaagatgaaccaccgcgcggcgaaggccaggaacccggaaaatgcacccccagcgaagaacacacgcaagacgcgcacgacgccggaaaccaacagagacaacgagaaacgcgaagacgagacccaagcgtcaagcaggcgccgcacaaccaacgaagacagaggagagcacacgccgccgatcaatacaacaatgaccatggcgcgaccacgaacaggcgaaaccgaacaggagacaacagccgacacaccc

SEQ ID NO: 11934 - DNA, 497 bp, Glycine max
  unsure at all n locations
nnnccggggccggtacggaaagtancangnagnncnnacanatacgcaagcnncnagctgttcattggtgtgttntgatctcctttnggtgttcnataatgtgggaatgtgctcaaatatgtggggcaattttggtttgttttcttgcttgattgggttgaattgggggtttgtatgagatggccctatgcctataatgcattttgaagtaatggggcatgccacattgtccccgttttcttgctattgatgcctaaacgcgcgcccaccaagtgttcggtgaaatgcctcaatggcattagcgtgtgattttcgtagggaaaccacccatggggcattttgatttgcacatattttccatttttttgggacatgcattcagtttcgaaagggctagagtaattgccccacatatatcctaggcctaagaacctaagttnttatgcataagaacacaagaagaggtgcatattgtgtaaagttaccttctttggccg

SEQ ID NO: 11935 - DNA, 471 bp, Glycine max
  unsure at all n locations
acgccgcctttcgtacccttgnanaccacccgtttgggaaacgctcgcgggaccttagaacacctgacgccgcagcttaatgacttagaaaatacccaccctcccgtggggctttcactatgagggaatcctctcatgaagccaactaagagcttcactttgacaggccttatggaccgaactctcaaccatacctagcatcttgactgactatgctaccatcgtacctacaagcttgtgttttctcatgacatgatctaggggatgtgcgcagctttatgagatctgaaggctttgtaaaatacatccaaaccttcggtcaagtttatcaatgctacagaacctcttcaattaaactctaaaccacatggtatacaattacaccctagtgcgggtcgacgaggactaacgtatctcaacatatcatccaaatcacgaaaattcaatgactgcagcacaatctataaatcg

SEQ ID NO: 11936 - DNA, 1056 bp, Glycine max
  unsure at all n locations
agggcnnnncaggcggaccaccggtctttgcnttcnaatttactcncccctgcangtananngcccgannnacntattannngannananannannacccgangncgtgangcagctacnctcangnagggtgagnagtgtaacacgntgcgnnangaagaaaagagacaancgaaagttacatgttcgntctttannttacanttnancagnacggcnggcncacancncacnaaggancgctgatnntgtagtantnagngtattgtacccangantanaactctncagtaccctatantcntcaccactagcgatanttcancntacctntgnagtgaggtcggcgncatcgtagaccgactatatcactactgactaacgangccacntcgtcgactgnttcgcttagtacgtcgatctatgggcnctgaagaatcttacgtacacgtcgagcgaagcatgancagcgcttgatnggacacatcgtcgtgcagtgtgncctacacagtgggatcacacancgggtccccgagnanctactacntaatcanctaacgacgccagtcatgntaacagtcncngcacttangcctncatcgaaactagcagcgtancagtcngcactcgatacnatatngcgcgtagctagcgcaccgccataggcctntgacgctatctatntgcagcctgaaagagcaagcctcggganatantgcagtataatgttgcacanttaacctcgancgtacccgccaatnagtncantcgtactacgtcgtgaactcgtgcagcactaatcatgtcgangaagctactcatcgtcgtactaggcaagtaggaagtacgaacgacncagaantccgcnacngagtantcgctatctgcgtgtcnccgttntcgtatgtcccaacnaggtgcagacaccatacantgcaacacagtacacgtccgcccacgtgcgacatgtcatnacancacagtacgtaaggttacgagtgtctccgcacatctcacgtcgctttngttcncgatantctcctncgncacgcgcgn

SEQ ID NO: 11937 - DNA, 405 bp, Glycine max
  unsure at all n locations
agctnatcctttccctcatcagcagggccttcaaagagaaatattgcatgcccaggcaggcgcagcagcaggaggagcagaaatagccagctgcaagcgtcaccacctctacgacatccactgttaatcatcgtttacgactaacttttgtatataaaagttttccaaaatgtatataaatttcccaatttatggttctttttggtaggattgtaaataaaatttctttgttttgatctctgctcagtagaagcctctctagatggaattaatgttaaattttctttaatttcatgcaaaaatgagactatttgaagaagtaccaaatgagtcatcacgctaagcgagctcaatgcgcttagcgcgcatcaacagctaagcccagcaccaacacgcttagcgagt

SEQ ID NO: 11938 - DNA, 484 bp, Glycine max
  unsure at all n locations
ccgccgtcnttgnagaactcnagatcgacgngcncatagatannaacctccgagacagggttatgaacctacacgctagcatcctaattctttgtaacaagcttttcgtatatttggtgtgtagttagaaaaatctctccaagcaccttaaataccttgagagagaagactaagtacttagattgtacaatcgtttgtaagacgattaatatttagtcaatgtgcaaacaaactataaatatgttgacttatttatagctagcagtggcttgatagaacaaataatatgtcaagcttggtgtagagcttgaggtgtaaaagccaaaagtgataatgacttatacttataacttgttgaagttggtggaacttgggggttaaccaatagctagtctcaatggtagagatgactagtattctaatctgacttggggcttgaatttgattttgtctgaacgactcttttaatttgcaaaatctattt

SEQ ID NO: 11939 - DNA, 302 bp, Glycine max
  unsure at all n locations
agcttgttcntgattttttctaaggtctttaacaagcttataactatatacttgtccttcatttaactgactttgggcttggcggccacgatcaacaaagtactttggacacctactatatgttgatttgaccaacgctgttatcggtatgctacgacaatccttcaataccttatttatacattctgagaggttcgttatcatgtggccatatcgacgtccttctctatcataagccatgggccatttttcctttgaaatgcgatctatccatgttgctatggctggactcacttgacgaa

SEQ ID NO: 11940 - DNA, 480 bp, Glycine max
  unsure at all n locations
tataggtatttgtgaagtatgttgtatgactcttcccaatttctgtatacctacttgagggcccattgntttgccagccatgctttatgatatgtgatggtgtatccgactctagtcttacgaatgtacgaatggttagctgctcgcttcttcaaccatcacacggatatttttgcctacaagtttcgaatccatcttattgtgatcttgtgaaatggttggcataacgcatgtgtgaggcccttctatcattctaatttcccaaacttttagattatttctttcggatgctctaagtttccactagcacccatgattcttaatgtgccacatttttaccgtgtgtttcaagtcctccaattgacaaaatcgttgaccaacatacatcttgtcatcgtgagtcagattgtcgtgtgggctcaaaaatgcctatgtcggcgttgtccgcacttggtgtcaccacatcaccctatttgatat

SEQ ID NO: 11941 - DNA, 637 bp, Glycine max
  unsure at all n locations
accgcaagccaaggaacaaaggggaacgagacaaacacagacccgaaccacgccaaaaaggggggcatgtgaccctggaaccccccaanaacaaanagcaccggggaaccacgcaacagaacgacgaccaacaatcttgacgcaacgccacacagaccaccaggagaggcgcaacccagaatacacacaccaaacacgcacactcgcacagcaagcacacacccaccagcatcgcaaacgcacacacggcacgccancaggcgaaacagcaggacagagcagaacggagtgcacaccgatctgcgagcactgacacagaacgcacaatcaggcccacgaaacgcaggcaccgaagaanacagcatagcgcgcaacacagacgcgcatcggacggacgcacacacgagacacacacgcggatggcgcgagacgacgacacgcagccacgacaacgcagcgacgccgctgagagcgccacactacaatcgaccacagcagagagaagcacgcgccatcgaaatggaggcaggacaaaaccgaacaccacacacagcagagtccgacagagcaaagacattgacggcatacagggcacacgcaagcgccggacggaacgagcaacgcgcacaccacaacg

SEQ ID NO: 11942 - DNA, 406 bp, Glycine max
  unsure at all n locations
aaaaaaaaagaatacaacaaaagaaaagaaaaggaaacggaacatacaaacannnaagaaggaganggcgcccctagaccccnnnanaaaannnggagagaaaaaaagaaaaagagaagaattttttagaaaaagaaaaaaagggggggaaggaaaaaaaaaaaaaagaaaagaagaaagaaaaagaaaggaagaagagagaagaaaaagaaaaaagaaggaaggaaaaaaaagaaaaaggaaaaaaagaaagaaaggaaggaaaaaaaaaaaaggagaaagaaaggaagaagaaaaaaaagaaaggaaagaaagacaggaagagaaagaaaaaaagaaaaaagaaaaaaaaggaagaaaaaagaaagaggaagaaaagagagaaaaaaaaaaaaagagaaagaac

SEQ ID NO: 11943 - DNA, 395 bp, Glycine max
agctagttttatctttatgcgagacagagaccaacatgtgagctatcatcgtcaagtaccaagaatagctaagtgtagccactgcccacgagcataaaatcacggatgagtatgctcaagtgtatgcggaaaaagaggctaaaggaagggtgatcgactctttacaccatgaggcaaccatgtggatggatcggcttgctcttaccttgaacgggagtcaagaacttccccgattgttagccaaggccaaggcgatggcagacacctactccgcccccgaagagattcatgggctgctcagctatttgcagcatatgatagacttaatggcccacataattagaaatcgttacgaaaattgtatggtctctcagaccttgactggatacgacttc

SEQ ID NO: 11944 - DNA, 355 bp, Glycine max
agaattaagtgcattctatatttccaagagcattcactattttactgaatacttagtactttataaagcattacgattagtaagatagggaagagaatagtattacttttccaagaattgcaaactttccagtaagttatttaaagaccagtcaaaccaatcttaacgaaggaagattcctagaggatagtattcacagcgaattattgcagggaatgttatccataaccgttacacgttgaagcagacacccatatgatataaagggtgaatgcgctacaatatcatcacaactctcgagccatttagttatacagtcactcaaccattaagtactattgatgagtactacaca

SEQ ID NO: 11945 - DNA, 559 bp, Glycine max
  unsure at all n locations
gccaccccacacccacaccggagaggaaagaagtgagaccacacacagacgaagcacacacaacaacacaaacacacacgcgagagaaccgnnnngtggatcccgtagcccaccncaanananagaaagaagccgcgagagnagaaagnccgcgacgacaaacaagcaaactgtggtggaagaaagacagacaccacaacacacaggaggcgagacgcacgacacaacgacccgacacnccacaaacacgcacgacagcaacaaccactcaaagccacaacgaccgagcagcaanacgacgaaggaacaacgagcagacgcaggaaaacacgacagcaaagacacaaacacccaaggagaagggaccaacacaccaccaacacacacgacaacaacaaccgacaagggcgaaaaacagacaccaacaaaccgagccgaaaacaacacgagaagcgacacacaaaaaccaacaaagaacaggaccaaccgcacaaggcaccacaaacaaccaccaccaccaaacaaacccacgcacaaggaaaccaaacagggagaagcc

SEQ ID NO: 11946 - DNA, 502 bp, Glycine max
  unsure at all n locations
ccacctcccgcgggggttgattgactgagtcgatcgnacnnnacgnganaatatagccaactcacgctntgggcataatgagaatgcaaatatttagagtttatttgtgttcaatgctaagctttagggcccattatatacttgtcaacgaaaaatgatttcgcttaagggagagcaaccaggtggaatagactcacttgggaggaaattgttgaagtataattgtgaatttttttatgaagctcgaatatatttagtaaatatattcaaatattggcacaagctatgatgacgaagtaaatatccttgtgtatgatgtacaaaaaataaaggtctttgttctagatcatggtagtatgatgcatcctccacactttaccaccaactctcttctttacgtttctttttttcctctcagtcgcataccaccatgattctcgtgatgaccttcttctcttccgctactaacaattcccaaccacaatagtgcaacccaccatcg

SEQ ID NO: 11947 - DNA, 393 bp, Glycine max
  unsure at all n locations
gggctagcgtttatgcgagacagagaccacatggtagctatcatcgccaagtaccaagaagagttaggcctaccccgggcccacgagcatagaatcacggatgagtatgctcaaagtgtatgcgggaaaaagaaggttgaaggaagggtgatcgactttttacacccaagaggaacccatgggatggatcgggtttgctttaccttggacgggaagtcagaactttccccgattgttacccaaggccaagggatggcagacacctacttccccccccgagagattcatggcttctcggctattgcagcatatgatagacttaatgcccacatattagaaatcgtaggaaattgatggctcttagacctgactgatcnacttcttttttaatan

SEQ ID NO: 11948 - DNA, 500 bp, Glycine max
  unsure at all n locations
tctcaagcaagcttccatcaatccttttatgttgctaagaatcataatgattccatcttangaacatgtcttaggaatttctgcacttttcttggattattcttacccaatggtttgtaggaaatataggatttccccatatgaagctttgcagaatgacccttcagaaaggagtaagaaatgtatacactaacaatctcttagcatctcacagtagggatagaatattattcctataaacatacttatgttcttcagatttgcttaaaagctataaatgcaaacttaaatgctttgaatttcaaacttccatgtttcttgaacactcttagtgagtagttntacttttatgagtgtttccacaaactaattactccccttgagctttctgagaaagtgccactntctctcttttagttntttgaacatcaaannagtggttcctatggcttggtttgaataaaatggtttctgaacatctgagtanatgatcatatatg

SEQ ID NO: 11949 - DNA, 389 bp, Glycine max
  unsure at all n locations
agcttatttttctaagcactaacaaaaaacctttattcaaacctttcaaagtgagtgagaaggctaaacgaaaaattagggaacttaagaaaactaaatccttaattgaaggcgtaagtgacaatcatagcgaattactaaacaagattggtagtttgcttaaagtcattccaaatactccccaagcctcggaaaatacttccaaaatggtaacaagaagtacctccaaattaattaatgttattaatgaagatagtgaccaaaactcagataacacaactgagataggatcagtgtcagaaaagaacataaatccgataaattccaaacactgganaacaccctccanattatattatcaacgtccaactgcccctgaccttctatta

SEQ ID NO: 11950 - DNA, 452 bp, Glycine max
  unsure at all n locations
gatcctattgaagactggcctaactaaacattattattgaacagcataattaaaaccaagacttaatccgcagatccctcttgtaagattaagtcttgatcctgcttcaatcaagttctaaggcaacagtacatttcccaatgctaaagtcacctaactatgcacacaaatggatgatcaaaccaaaagcatacaaacattaagcattgaaggaagcattgaacacagaaaacataatcaattaaatattaggtatttacatcagttgttcattagaaatccctaactagggtgcttatgcagccattacaaaaaaacccacataataataatgttacaaaacctanngttcaatgcacaagctgctctcttgatgcttctanggctttntttcccaaatatgcactgtggtgttctctggaatctgtgccctttcttctgcctacaatcta

SEQ ID NO: 11951 - DNA, 402 bp, Glycine max
  unsure at all n locations
agctntgtgtatattaaacgacaataactttttactcggatgtctgattgagtcccgaaatatatcgagacgctcgaaattgaataccgaagcgctaagcaaattcaaacgacaaaaactttttactcggatgtctgattgagtcccgtaatatatcgaaaagctcgaatgtgaatgtagaagctctgagcaaattcaaacaacaataactttttactcggatgtctgattgagtcccgtaatatatcgagatgctcgaaatggaataccgaagctcggagcaaattcaaacaataataactntntactcggatgtccgattgagtcccgtaatatatcggaacgcttgaaattgaatgtagaagctctgagcanattcaaacgacaantaacttttactcg

SEQ ID NO: 11952 - DNA, 357 bp, Glycine max
tctacattcaatttcgagcttttcatatattacgggactcattagacatccgagtaaaaagttattgtcgttggaatttgctcagagcttctacattcaatttcaagcgttccgatatattacgggactcaatcggacatccgagtaaaaagttattattgtttgaatttgctccgagcttcggtattccatttcgagcatctcgatatattacgggactcaatcagacatccgagtaaaaagttattgttgtttgaatttgctcagagcttctacattcacattcgagcttttcgatatattacgggactcaatcagacatccgagtaaaaagttattgtcgtttgaatttgctta

SEQ ID NO: 11953 - DNA, 404 bp, Glycine max
agcttatgtgctatttccttacgaacgttcacttgcacaagacatcctatcaactaagaaaaatgcacccatatacaatcaaggtagcttcattacctagattatttacatgtacttccaaggtgtatttgttatttacatcacacacgcctccttggctgaatttacatacatgcatactcaaagcattttggggtaccaaaaactgcacatgcgctcatcttggtatttctaatacccctacatatacaaacttcacgatgaatcttgactacctacacaataaggtgctacatttcatgctcttttttttcaagtttttgctacctaaagccacatgcaaattcaagcatattttcctttgctgactaaaattgtattcaaattagaaggcatatattttt

SEQ ID NO: 11954 - DNA, 449 bp, Glycine max
  unsure at all n locations
cataggctacatgccagctaactttgcggatctcgtcttcgctgataaaggattgaatccggactacgaagaggcaagttcaaatatgctgccaatatggcccccaacaacaacagaagagccccagtagtgggcgcgaggaaaaaggaaggagacgcccacgcggtcaccaccgccccgacgtggatgaaagcaccccaaaatatccaaagctcataccaacccaatcccccaaattttttaatccgagctgggaattccctcccgactcaagtaataggaccactcgcagcagaaagagcgccggcacaacgcacagctccagccgcaccccggccagttaataatacagcccgcggcgcgacttatagatatgcacaacacccgcccncgaaagacaacttcctcctattccatggatactccaagtatggcctcattattggaga

SEQ ID NO: 11955 - DNA, 407 bp, Glycine max
  unsure at all n locations
agctnttttctcacgtatgcaactattgtcaatctcatatcattcaattggaaaagatttgacaaagtggattggaggtaaaagttgacaggttgatgtctacggaaacaagagaaaagtaaaagagcaaaacacaggcgtattttgataagtttgagttattagtaaggccacaaaagagatacgtcaggataatttttaaaggaatttccaagccaagaggacaatgccttgatgcaccaaagaagtaatgcataaaagaagaccaaagagggattaaatgaatgaccaaagcctcaaggataaatagatagagcataatatcatcattcaaaatattacacggtaatattaagggtttcaaaaggaccatcaaattcacatgataatctaacacaataaagaaa

SEQ ID NO: 11956 - DNA, 433 bp, Glycine max
  unsure at all n locations
acactatataagacacaagctccaccacttccgactaaacttccagctggagctcatatacccncttgtgcttggcctggtacgtatnaattttcagaatattgctgtctggttttttgtttgcatatcctgtttttaactggcatgttcttttcttctgtaactgcaaaaaaatatttacttgctgagtggcttctaactttaataatctttaacaatttttaattaaggaatgatgcccattgctgattgcatgaacaaatgaattggaatccttccaatcctttgaataacttctcatgctatcatgcatgaggaatatagtgcaattttattcatatgccgacatatataaattcttgacccaatcaagtatgttattaacttattatctattagtatgaacgtctggtttgaatgttacatttcatgt

SEQ ID NO: 11957 - DNA, 394 bp, Glycine max
  unsure at all n locations
agctngtangatgaagtgttgaagggtgaaacttgctacttttattgttgaccacagagtggtacctggagatatgtcgcgggggtcaggagacctttgggacgtcaggtggggtgctattgcccaaaaccaagcttgaccaatcccgacccaccccgggcatagtcggtcagtgagaacctgtgatgtacctaaacaggcaagctcctggcagtcaacagataaaaggaacaaagaccacaaagcaaggaggcttgtggtggctggccagctgtgaattttgtgtgatatgtggattatggcctctggtaatcgattaccaagggtgggtgatcgattacaaggcttaaaaatgaagacaggaggctaagatggtctctggtaatcgattacc

SEQ ID NO: 11958 - DNA, 358 bp, Glycine max
  unsure at all n locations
gatcaactagcccgcaggtccattatgataagacggatgtggaacatgacaggaggatccaactggaaaggctcatttaagaagaaatccagagatatgaaagatagggagaatagttcaatgatttagtatgaatgcatgaagcaaggtgatgcaatcctactattcgctatcggcaagtgcaccggattgcataagtagtataaaacagtaagaaccgagtatcgaactctcgaggaacttgtgttacttggtaagctattgtagcgaataagtgtctggtgtgaaaatctaagtgtgaatatgaacatgtatgtaaactatctatgcataaaggaagatcatgcgagaganatgt

SEQ ID NO: 11959 - DNA, 406 bp, Glycine max
agctttcttgttagattcctaaagaagctagaacttagctacacacacctctctaatagctaagctcacctccttgagatgagaagcttgaacttagctacacaccccctataatagctaagctcacccccatgaaaaaatacatgaaaatacaaaaagaaagtccctactacaaagactactcaaaatgcctcgaaatacaaggctaaaaccctatactactggaatgaccaaaatacaaggcctaaacgaaggaaaaaacctattctaatatttacaaagataaacaggctcatacttaacccatgagctcaaaatctaccctaaggctcatgagaaccctatggccttcccttggatctctggcccaatctacttggagtcttctatccaatgcccttgcggg

SEQ ID NO: 11960 - DNA, 410 bp, Glycine max
  unsure at all n locations
catactgaattgagtatggcgcacacattgcatgtttgatattccttttagaggcttgaanagtgctagagaacgagctgtattttctgcgttntctggaaaacgcgatgaactcgctaagcgagcatgctgcactaagcgagttcatcaatactcattgtatgtaagtgttatctaaagaactcgctaagcatgcttaccgcgctaagagagttcatcctttgaggatgaacactcatcctcttgctgaactacttttggctaagcgaggctgaatcgctaagcccaggtaacttaacccatttttttggtgatagttatgcactaagccgagcattcctgagccaagcacaatnggttgcagcgtccgctgagctaagcgagcttcactcgctaagctcccaacactt

SEQ ID NO: 11961 - DNA, 400 bp, Glycine max
agctttttctaatacataatatcgtaactacaaaagtcaaaatatataagtctctacatattacagttgtcttatacacattttcatactttaaaaatattctataattttttgttgtcaatattataaaaaattaaaagcataaaatagtaaaattaatttcaatttattcttttttatttcttataattctttcattcatttataaaaaaatatatgaaaataatacctattttttgaaggaggcaatttatttttattacacatatacaaataatatataaaaaaatcataggaacaattgctcccaggttactattgtctatccgccacgtgatgtaacattaattaaatttgttatatcatatcatttataaatgtgcattaatactttacgaag

SEQ ID NO: 11962 - DNA, 429 bp, Glycine max
  unsure at all n locations
taataccttgnttagattctaggagagcatatggttcaaggaaaatttactctaaatttggggggaggaaagtcaattagaatgaaaagaaaaaggttaagcatcagcacacacaacaaataagttgtatgtcaaaaaaaaaaagataaaaaaaataacttgtgctgttacaaaaaggtcgaaagcaacttaagataagggaatagtgagaaggctatttgtacaaaacaagaaaagatcattgngattagtctaggacttgtgctctcttagaatctaaacttttgaatcctaganaaaccagtgattnttatgtagccacaacctcactacaagcttgagaaaagtcttctgattttgtttatatatctctgacttgatgacttgagatgaaatgcanagattggacctcctgttagttggtatcaa

SEQ ID NO: 11963 - DNA, 377 bp, Glycine max
  unsure at all n locations
agctnnatgcatgaccaccaatggtctatatatatgtgacttaaacacgaaattactcagagattttcagaacaacaaagtgtttatcctctcaaagagcaaattcattttatcctcttaagaattccttggccaattcaattgcaattcattaaggaattatttgagtgctcaatctgtaaaatccatctctttctagagagatttgttcttcttcttcttctcattttctaagggattaagagactgtgagtctcttgttgtaaaggatctctaaacacaaaggaaggattgtccttgtgtgtttagaacttgtaaaaggaatttacaagatagtggaactctcaagcgggttgcttggtgactgaacgtaagca

SEQ ID NO: 11964 - DNA, 378 bp, Glycine max
ctttaagatgagtaaatgaaaatctataggagaacatttttacatctttaacacattaattcctgagggtcttaacattgatgatactataagcgatgaggatcaagcttttttattattgtgttatttatctaaaatgcatgcatgtttcacagaaacctcactgtttggaagagactttttgtctcttgatgaagtatagactactttgaattcaaaagaattgaatacaagaaaagaaataaagtcctctggtactggtgaaggactaacagcatgaggcagatcatcaaagcaagacaacgacatcacaagataggatctaagccacaatagaagagtagcggaggaaatgttcctaacatcacgtgttatcac

SEQ ID NO: 11965 - DNA, 400 bp, Glycine max
  unsure at all n locations
agcttccttatcacaagcaaatcctaaatcttacattttaatatataattgcttaccatgtcatttatttttttatttatttttgggtaaagaaatgggagcaaatatccaaggattgtagggaaaatgcaatagatacctgaattgggcaaattgaaggtagtgatatggagtttcgagcttccacctcgggataaactgggaagctgcacacatacttcattaactgataagtgacaaacttattgtgaggtacatgggcagaaaacagatatctttaccaagttgtgaacatacatcagttttttggtacaatggcaacaatgaggtttaaacctaagactntatgcaaatactgaaattccccaccactatgtcgactccagtgggttcatgaatg

SEQ ID NO: 11966 - DNA, 483 bp, Glycine max
  unsure at all n locations
ggcctctttttttgatttntgacatgnacggntcnncnnnttnngnnaacaacggcaaggnanngcaagacgggcaacgaancaacagacattaatttggtttatatgacgatggcgacaagcagagcgtggtataagacttaatcttacacacccgacgcggcaaaaaacggccagctaatcttcactacaggggattctacgagcacatcacacccgtacttaggaatgcgaggtgaaattagaaccgtgctgacttacgaattgcaagacataccatactgcgaaggctgatatacatcaatggaaactaacaagtacgaagcgattatattggacccgcacagtagatgcagtagaaactttaactaaaacaccaaaacaagcttttaaactggtagcacacctaggaccggattaggatcagactacagcgacagtaataggacaacgtagagcgtagcagaccaagaaatgaaccag

SEQ ID NO: 11967 - DNA, 402 bp, Glycine max
  unsure at all n locations
agcttgttgtattatggggcacccgtcatatgtggtactaggtggcgatcgggcgatggcacaaatcaactctcccacttccacaagtcaaacataaacacaccatccccatttgctcacctttcaactgagctcacgcactcctacgtagcccttatccttgttcctctcagcaccgggtccctatcaacccctccaagcttccacaatatccaagcaattcaatttcatttatcatgaagctaccctaaaccaagaaaacagagtagaggcagaaaactctgcccaaaacacattcaaataccacagctttccttactcatataccccagtaacattctcttcgttccaattcattaaccgttggatcaccttgaaaantttactggaggttcctagtac

SEQ ID NO: 11968 - DNA, 307 bp, Glycine max
acatagttaaaggaagctgacttggatggctgaaattggatgcatagaaggaagcaaggagagcatgtagagagtgagagcacagtgcagagaaatagcaccaacataatgccaaaatgcagtttaaaagcacaaatgaaaatgtaactgccaaaggcagttatgccttatttttggcagtttcgaatggctcgcttaacgtgccaactcgctaagcaagcatacatgatgtttaagtttccaaacactcgtgcttagcgggcaaactcgcttagcccattgcacatattcaaaatttccagagaag

SEQ ID NO: 11969 - DNA, 343 bp, Glycine max
  unsure at all n locations
agcttggtgnttcacctatggagattttgaattaagggggtgtgttagttataattcacaatactagttgtaaagtttggtagtttgtttagttagttgagtgtgataagacagtgattgaggctgaacttgagttgtataaatagcctctgtgtaatttatttcataatgcaattcatctcattttagtatatgctttttcctggctttctctctttctccacaacatagattaggtacttattacaatcattagatcttaaaaaaatatatgatataaatgatgagtaactttaaaatcctccatctattactctgtgttggctacaacgatcagagaatg

SEQ ID NO: 11970 - DNA, 307 bp, Glycine max
  unsure at all n locations
ccaagcattgcagtggattacaagaggaaacataccttctccatagaaggtcanacaactttataaccttgttataatcaatttaagaactatgtgtgtgaggccaaaccttcggaatcactaagacactctgttatctagaagagactaagacttatctgtcttcttgaactttgatttcttgagctagattcggactgtaagaaactgttgagttgctatcgtcttggcgtcatctcatccttcatacacctacattcacattctatgccttattactgatgacaaccaactaagatgatttact

SEQ ID NO: 11971 - DNA, 388 bp, Glycine max
agcttgttttgtttaagtgttgaagggtgaaacttcctgcttttattgttgaccacagagtggtacctggagatatgtcgcgggggtcaggagaccttggggacgtcaggtggggtgctattgcccaaaaccaagcttgaccaatcccgacccaacccgggcatagtcggtcagtgagaacctgtgatgtacctaagcaggcgagctcctggcagtcaacagataaaaggaaaacaagaccacaaagcaaggaggcttgtggtaggctggccagctgtgaatttgtgtaatatgtggattgtggcctctggtaatcgattaccaagggtgggtaatcgattacaaggcttaaaaatgaagacaggaggctaagatggtctctggtaat

SEQ ID NO: 11972 - DNA, 418 bp, Glycine max
  unsure at all n locations
actcagctcgagagatgcttaatggaggataagaagagggagagaagtgagaggngggagcacganattgaaggaatggaagatgtatagaagtggaactttgaagtatgtctcacaagactctcattcatcaaagttacaacaagtgttacacatgcttctatttatagactaggtagcttccttgagaagctttcttgagaaaacttccttgagaagcttctttgagaaaacttccttgagaagctagagcttagctacacacacccctctcataactaagctcacctccttgagaagcttccttaagaagattcctaaagaagctagagcttagctacacatacctctctaatagctaagctcacctccttgagatgagaagctagagcttagctacacacccncctataatagc

SEQ ID NO: 11973 - DNA, 402 bp, Glycine max
  unsure at all n locations
agctngcnattcatggnaactcctaatatctcccacactctttggagtgggccattcttggatggccttgattgtctgagggtccacttggaccccatttctaccaactacaaaacctaagaaaactatattatctacacaaaaggtacacttctctatatttgcatagagggcgtttttcctaaggactgaaagaacttgtctgagatgtcctaagtgatcatctacgctcctactatacactaaaatatcatctaaataaacaactacaaatctacctatgaaatcccttaagacatgatgcataagcctcataaaggtgcttggcgcattagtgagcccaanaggcatcactagccattcatacataccacacttggtcttgaaagcacttttgcactc

SEQ ID NO: 11974 - DNA, 375 bp, Glycine max
  unsure at all n locations
cacatagaaactaagctaggcgctacttcntacgagcgttcacttcacaagacatnctgattctaagaaaacgcgcccatatacggtaaggtaccttcgttacctacatcatttatatgtacttccaaggtgtatctgttacctacatcacacacatttcctttgctaaatttacatacatgcatactcaaagcactttggctatcaaaaattgcatacgtgcacattctggcatttctaatacctatacatacacaaacttcatgatgaatcttgactatctacacaataaagtgctacatttgatgcttctttcaagtgtttttactacctaaagccgcatgcaaattcaagtatatattcttttgctgacta

SEQ ID NO: 11975 - DNA, 352 bp, Glycine max
  unsure at all n locations
agcttcnctccatttatctataaatagggggagaagagaaatgaataagggttcagccccttacgcacttctctctctttcgaatttgcttggaaaaattgtctccgtgaagaaaatctaagccgaggcgcttccgacgcgcttccgaaacgtttccgtaagcaatttcgcgaaggtgtcgaccgttcttcgacgttcttcattcgttcttcatcgatcttcgatcttcaacgagtaagtacctcgaaccaaacttttcgattcattctatgtacccgaggtgggccacattatgtatcatgaatttttattgtcgtaacattcactatatatacacgctcttgacgcgctt

SEQ ID NO: 11976 - DNA, 328 bp, Glycine max
  unsure at all n locations
agaatcaccgggacgagttttctctgtagctgnacaacnggttcagccgtatcttataaatctatacgacgcatacatgcggaggggctaataccaagaatgtgtaccaaggcccatcctatatccttcttatagcttcttgagaactaataacagcttatactcttgctcatcggcaagggaggaagatacaatcgctggaaaactctggctatcatcagagtaagcatactgtaaataagatggcagaggctttaattctggtgtgggcagctggataatgcgagaaagagacggtttctcatcctgtacctcataaagaaagtca

SEQ ID NO: 11977 - DNA, 494 bp, Glycine max
  unsure at all n locations
aaaccatcgtgggttaggtgccttgatanaccgccngaattagctcggacgccgggatgctcctntatcgacctgctggcatgccaccctgattgtaatctactcaaatgtgcacggaccactaagcattggatgtgttggagcagatctgccgctgagctgcctctcttgtgggcttaacgtgaagaagagtggggtatatgatgaactatgaagattgacgtaggcgacgcgttcatatgttcactaagcgagttagcacccgctaagccgacatatactagtgtgcacaacacacgaacggggtgagctaggcttacaagcgtttccgaagctccctgatgatgcactgatacagcatgtaaatacagtattctatactccacaacacataagagactatcgagagaaagtgtgacgacccagctcgtcgctaccatatcacttacctataaatatgacatttcaatttagaaagtacagcctcattaatg

SEQ ID NO: 11978 - DNA, 387 bp, Glycine max
  unsure at all n locations
tgaagtgatgaagtgcggaagggtgagacttcctacttttatttgntgaccacagagaggtacctggagatatgtcgtggtggtcaggagaccttgcggacgtcaggtggcgtgctattgcccagaaccaagcttgaccaatctcgacccatcccgggcatagtcagtcagtgagaacctgtgacgtacctaaacaggcgagctcttgacagtcaaccgataaaagaacatagaccacaaagcacggaggcttgtgtggtggctggccagctatggatcttgagtaatatttggagtatggcctctggtaatcgattatcaagggtgggtaatcgattacaaagcttacacatgaatgcaggaagttaagatggcctctggtaatcg

SEQ ID NO: 11979 - DNA, 405 bp, Glycine max
  unsure at all n locations
agcttggttttatacttcctgataataggctgccacacaacccagcttttagaactcacccctactggaattccaagataagagaaaggaatttccagttggctacaattaagaaattgagctgcatccctacaccaaccctctgatttgcccacataaccgaaatggctttccaaatattcagatagtattcttctatgtttcttggcatagctttccaatttgggacatgataggtgtatagaatgttgcttcatttcatgtaattgtagacctaatagggcagttgtgttgtctctgttatgcttttcctttgccaatatgtctatatagttntgtgggtacattaagtcttcaatagtttcgacttgctagtcattagttattgtctttgtgatgttctga

SEQ ID NO: 11980 - DNA, 279 bp, Glycine max
  unsure at all n locations
gatcactaagcgacagcttatcagtggctaagcgagtcntattgtcgctaagcgcgaatccttacggccatatctgaggtcgataaagctaagtgccagtcatggtagctaagcgagattcattgcggcaatatgagcgctaagcgagaacctctcagctaagcgcatgctcctctgtactttagatgcatcatcttagctaagctggccatagccacgcttagcgagagctgcgcgcttctaatcagcagacctcgctaagtggacgtactctcacgc

SEQ ID NO: 11981 - DNA, 401 bp, Glycine max
agcttttgattttccaagtgccaattcgtcttcttctttagtccagtcttcttctggcttcaattcatcagtgggctttccttctgtgtccagcatcttgggatgttcccagcctttgatgacagctttccaggttctgctatccagtgatttgagaaaggccaccatccttgctttccagtattcatagttgatgacagcacctttgtcaatgattttcttcatgcctcttaagtgcagatgtccaaatctttgatgccatattctgacttcatcttctttggaggatagacatgtggaggagtaactggtttcttgaggtgtccataggtaacagttgtcctttgatctgctgcccttcattagaacttcactcttctcatttgtcaccaagcattctg

SEQ ID NO: 11982 - DNA, 490 bp, Glycine max
  unsure at all n locations
gatagattgaacgaatctagtaactaatgccagctttaatcgtatgtatggatagactaaagcagagagtgatcaatataaagaggctcacaggtcgtggtcatgttgtcaagtatcaaatgatgtgaaagaaatgctattcaatggacaacaatatatataggagatatgataaacatatgaaagggaaaaggaaaaggaaaagtaagaaagcaatagacatgttaagttatgtaatgaggtaagtaggaaaaggaataatgaaatggaattaacacaaacattatagaaaaatgactatattattttataagttaacaattatttaaaaaatagaatataagtgatactctattctgaatatatacaaaagaattacacagtcagataacagaaatgagtatataataatgttctcttcgttcttctacactatatctatgtcttncaatggattattcacaattgcacatatataatactcatctta

SEQ ID NO: 11983 - DNA, 373 bp, Glycine max
agcttgctcatagaggtccaggaaggacaaggcggccgaaggaactagttccgccccggagtacgacagtcaccgctttaggagcgttgtacatcagcagcgcttcgaagccatcaagggatggtcgtttctccgggagcgacgcgtccagctcagggacgacgagtatactgatttccaggaggaaatagggcgccggcggtgggcaccactggttactcccatggccaagtttgatccagaaatagtccttgagttttacgccaatgcttggccaacagaggaaggcgtgcgtgacatgaggtcctgggttaggggtcagtggatcccgttcgatgccgacgctatcaaccagctcctgggatatccgatg

SEQ ID NO: 11984 - DNA, 440 bp, Glycine max
  unsure at all n locations
cggagaggatgcttcaatggaggataagaaagagggagagaagtgagaggngggagcacgacattgaaggaagaggaatggagagaagttgaactttgagttatgtctcacaagactctcattcatcanagttacaacaaatgttacacatgcttctatttatagactaggtagcttccttgagaagctttcttgagaaaacttccttgagaagcttctttgagaaaacttccttgagaagctagaccttagctacacatacccctctcataactaagctcacctccttgagaagattccttaagaagattcctaaagaagctagagcttagctacacatacctctctaatagctaagctcacctncttgagatgagaagctagagcttagctacacacccnnctatatagctaagctcacncccatgacaaaatacatg

SEQ ID NO: 11985 - DNA, 380 bp, Glycine max
  unsure at all n locations
tttcaccttctcgctaagctaatctgttggcttagagagcttccgctaagcgcaccactcatgggctaagtgtgaggaagactctggaagaagatgagctatataggttcactaagcgcaccgcttcatctcatccactaagcgagaaaggcacgcgctaagccgaaattcactaatgtgcgctaagcggtccataattgcactaagcgcacgaactcgaacaaggccacctattgatgcctgaaatcagattgtagagacggagttcggactgggattcagatctttgcatgtctagagtttctagagagagaaaggtccaagttccaaagagtcttgagagattntgctgtgtgaagatctgcagagaccagagcttg

SEQ ID NO: 11986 - DNA, 339 bp, Glycine max
  unsure at all n locations
tctcgacatatgatgcgcccgaatcggacatnccgtgtgaaattatgaccatttaaatttcgcgagagtttggcgatgtttaatttcgagcgtatcgatatattataagcctgagtcgtacatccgtgtgaaatgttatgaccatttgaatttctcaagagcttctgttgttcaatttcgagcctctcgacatattatgcgcccgaatcggacatccgtgtgaaaagttatggccatttgaatctctcgagagtttccgatgtttaatttcgagcgtatcgatatattataagcctgaatcggacatccgtgtgaaaagctatgaccatttgaatttct

SEQ ID NO: 11987 - DNA, 598 bp, Glycine max
  unsure at all n locations
ccgcacggcacaccgagcgaaggagcgtataccgtgataagatgagaacaagcgaatatacaagcaaacacanatatatntatnntaccncaaaaagagagagcaggggntccggacccccctcgnacacccacggngaananaagannngnangagggagananaaagagaagaaggaagangaaagagttgttttttatggatgaaggannaagganngaaggagagagaggagaagaagagaaaaaagggaagganaagagaggagngaagagaaaaatagaaaaggggggagagaagggaaggaaatggagaatggaaaaggttaaaaagagaaaaagagaggaagagggggagagaaaaatagaaagagagaaagaaagaaggagagggaaaagggaaggagagaggtgaaaaagtgaggaaaagaagtggtgatgaagagaaggggaggaagaaagagaaatggagggaaaagagggtattgagagaagagagaaaggaatgatggaaagggagagatagagaggaggaaaagaaaaagaagatagggaagaagaagggaaaggaagaagaggaaaagaaaagagatgagag

SEQ ID NO: 11988 - DNA, 396 bp, Glycine max
  unsure at all n locations
tggtattgaggtttaagaaccattattcactttcgatctaacgaanacactgtttatcggtgtatgtatctgaaggtcagtgcgagtaagattattttctaattctgtatattgatgatatcttgcttgcagctaatgatcttggtcttcttcatgagactaagacattgctctctataaactgtgaagcgaatgatatgggtgaggtaacctatgtgatacggatagaaatattccatagtagatcacatggattcgtacgcttatctcagaaagtatatatatcgatcaagtgctagagagatttaagatgaataggtgtttaacatcgcctattctaatttagaaatgagacagagttagtcttgcacaattgcctagaaatgatatggaatg

SEQ ID NO: 11989 - DNA, 399 bp, Glycine max
  unsure at all n locations
agcttgttataaaataaatattgaatggtggattaagttctgcactattgaactacttagacaatattaaaatactcaaagctataaaatatgacaactatcaagataatcgcgttggggagttcctactaaaatatctcttgccgtataaaaggtttttctctatttaacgctaccctagtgttcttacactgagaaaatacttagaccatgactcctcacatgaatgagcctaactctcttagcttttgttcttgattcctcaacaaacttgctctaacagagttgcactaagcatacagtgtaaaatatactagatcattgcactccattcctagacatacaaatttctagcttactctatcaagttctaaggttttaaagaattntccaatacta

SEQ ID NO: 11990 - DNA, 498 bp, Glycine max
  unsure at all n locations
agcaacgctgttacgacggattcaangcaagncnnncncgtangttagaaacccacccttagtaaatgtgctcttgcactacttgntntgttgtattaagcccagatgaaagaagggattcttcagtgcacacagttttgtaattcggctgctcgaattattttgtcatacgaaaatacaaattgttgataaagcgcttataacatgaaattcacagatcaaaatgattaagagggcatttggaagaactttcacagagcttttttgagcttctcttatcaattattgtatgaactcctaaatttaaaattgaagatgtgtggttaagcttatgataatggcttatggcccttctataaattccttcttgctcatcacaataagtttattgaattaagctcttatgatataagttctcatggaanaaagcttttataattatantaggacttanataagctattttcccaagcgtgcaataagtccagagacaattcg

SEQ ID NO: 11991 - DNA, 381 bp, Glycine max
  unsure at all n locations
agctgngtgntntgcaattctaagacactagagagcgggcaagtatatgacatgtcccacttgtactttttctatctaatttgcatcctgcaaaatcagaatatgaaaaacctgttatgtttaaggaggtacctttaagataccacataagcaaacacttagcatgatatccaatctacttgcagataggtagagaagcgattcaatcatacctctgtatcttgattcatccactaatttacctttctcatcaaacgtaaggtaggttgatgtagacatacgagtaaatgcttctttgcattttttcataccaaatttctctatcgagtttatgcaatatttgagttgactgaagaaggctccatgtatcaattgcttgac

SEQ ID NO: 11992 - DNA, 411 bp, Glycine max
  unsure at all n locations
tttgagaacactnnttagttatgctagagcttagctacacacacgcctcttgtaactaagctcacctccttgagcaagctccttaagaagagtcctatagaagatagagcttagctacacatacctctctaatagctaagctcacctgcttgagatgagaagctagagcttagctacacaccctctacaatagctaagctcacccccatgacaaagaacatgaaaatacaaaaaaaaagttcttactacaaagactactcagaatgccccgaaatacaaggctagaaccctatactactagaatggtcaacatacaaggcccagaggaaggaaaagctcatctaatatntacatagataagcggcgtcatacttaggccatgggctcggaatctaccctaatgctcatgag

SEQ ID NO: 11993 - DNA, 380 bp, Glycine max
  unsure at all n locations
agtttctantatgttgcatttcttccttgatgctcacttcgagctcaaataatccttggtctgaaaaactgagtcttctccagaacatatggattgaatccagtgggatgcaaccaacaacatatttggatagctcacaagcacaaggaagaccgtgcgtggttctcatcacacaaccacaagtggaatgattcttgctagcatagtgaacatgctcaaattcagcagcaatctggtttaaagcataccttgaaaccattccaagaagcctctnttataagggtttttttaagacatgtccaacgacatgtgcacttgtttcaaatgatactctaattttcgtgtgttgtagcgtcatcatgttgttcatggcattccag

SEQ ID NO: 11994 - DNA, 394 bp, Glycine max
catgttatccatgttgtctcctctatctctaacagtgactacaggacaaagttaacaataagccgggaatgtattaatggcatgatatggtacctgcatcaacttgctatctattagaagcttatccacataatcttgatgcaggtcaataagcacgctaaaacttctttaacatgaattcggagagagtttatcaatgtatgatgcgaacctgattacgagcggaatgtttgatacatgctatggagttctggatgacgccacttccaaagagggaagataagtcatggtagatgccacttctggtgaatgaagataagtcagggtagacgccacaaggattaccttgataagtctgataattggttcaacaaggaacccagagagaaactct

SEQ ID NO: 11995 - DNA, 401 bp, Glycine max
  unsure at all n locations
agccacttgtgnttctggtgaagcaaaagcgacatggcggggacataccagaacttgatctgacttacaaagccatggaaccagcagagtgactttctgctttgcaaattctgataaatatgcacctcgaaatagtgggtatacagctcttcccgtcatccaaggaagactagtagttgtcactattgcaacatgtctctcattggccaatcacaaaacaagctttctactatgatgccacataagtttgcaatgcaatcagatttgaataaattgtgaaaagagaatagcatatcgaatgaatcttaacttgtataaactaactgactgtctagaaacctactacagaaaaagcatagatctaatcctgncagctcatcaataattgatattgcaccaaa

SEQ ID NO: 11996 - DNA, 497 bp, Glycine max
  unsure at all n locations
ngccactctaaactgggngctagcactntcgngccactcttagaatactaacgctatgtgctntacaccaaatagacaccaaattcctcttaccttatatcattattcaaagataacccaactacctaaagaactttgacctgagtgaacaattaattaccttggcagacttagtacctcacttcctagtagtagttttcttaaataaggtagaaacaactggctcaggggcaggggttcaacaagtcgagccgtcaaaagtttacagagtgtctctcgtataacttttgtaggcacagcattttctgaaagtacatggtttaagattgaataatttgaaaggattcatgactttgagacatatagttgagctcaactgttttaaatacagtactttcaacatattattcataatcaagattatgtttgattaaattcaatatactgttcaactataggtctagtaataaatctccctataacgaaatntagaaagn

SEQ ID NO: 11997 - DNA, 222 bp, Glycine max
  unsure at all n locations
gagagaaattgaactctgaagcgcgtctcacaagatactcattcatcaaagtaatgacaattgagacacatgtgtctatttatagcctantacatgggaagcttccttgaccagcaacgaaggtagcttccttggcaagctaggaagaaagcttccttgagaagctagaggatggctactcacacccctccaatagctaagctcaccccatgccaaaacaca

SEQ ID NO: 11998 - DNA, 472 bp, Glycine max
  unsure at all n locations
cataacgaagtancgagtacnncacttagaaactaagcttaaattgaataaaacgttcataactgctggaatttttatcattatgtgtaatcgattacacaatgcagattgtgaattcaaattttaatagctgttgtaaatcagttttggccactggtaatcgattacatcctctggtaatcgattaccagagagtaaatctcttgaaaaagactttttaacttaaatttcttggccaaaccttttgctacttcaataggaattcccttcctattttaatatactctttctaagactctagaaactgtcttgatcgtccatcttgaatatctttgtcttgaataaagctttgagaaacatgtaaccctttggcaagctttccctttggcatcatcaacacattcagcttgatcatttgtctacattgtgaacaacattttaatcaattctatccgagtatttatgatatgag

SEQ ID NO: 11999 - DNA, 405 bp, Glycine max
agcttgaggttgtttgttaaagcaaccttatgttaatgccccctattgatgccatcaaaataattgaagatgtgttctaaccccccccccccccctacaacaactcatgggataagaggattatgaagagaggcatcaaccaggtggataaagatgaatcctaaactgaattgggaaagcagatgtaggctcaacaatgaacattgagacactcatgagagctcaagctcaagttccaatcgctacacctccattcccaacctatgatagatgtcagattgtgcatgggccagaagaatgcactattgatgataagctagttgtagccatgcttacgggaggaacaattcttataatttgtaccccaaaaatttcaatcaaggatagggctttaagcataattac

SEQ ID NO: 12000 - DNA, 376 bp, Glycine max
  unsure at all n locations
ctgcttagattgtggtctcagcctatctatgacaatgntaagctaagatggctcacagagtccatgggtggtgctctttcttaaccaacctctaaacctctccaatgcttcacttaaggattcatcanggaactgatgaaatgatgaaattgcagctttcccttctgtagtctttgactcggggaagtattacttcagaaatatatcaacaacttcttcccacgtctttagactgctacccttaaatgaatggagccacctcttggcttctcctgccaaggaaaacgaaaataggctgagtttgatggcttcatctggtatgcctgcaatctttacagtgttacaaatttcaatgaatgttgccaaatgtgcatag

SEQ ID NO: 12001 - DNA, 404 bp, Glycine max
agcttgccatgattagaggcgtcggggtcacgagctatgcggatacctaatgctcccatttgcttgggacgcgtgactggtcctagttcgcaagattccaacccttcgtataccagaagaagaccaaacgaagttgtgagtttttctatcaatggcggcatagattgactaatgcagccagaatagctgcataatgtacattggaagggaggataggacatatttagctaaacaaagtcatccagccctattcaaaagtttccctttccatgaagctagccttctatgaattttatccaagataaaatccaaagattgatggtgttgtctcccttgcaccaaggaaaaccctagatagcggccaaggttggaaacactcgcgatgccacaaacatccttgaata

SEQ ID NO: 12002 - DNA, 342 bp, Glycine max
tgatactatgtatcttctgcatgaatcaccataccagatactctgtccttctgttgcagcacatctaggagtcacatgagcatacttgaagctcatgctgcaaacatttataatagaccccctcagcaacacaaccaacaacacgagaataactatgatctttcaagcaatagattcacttcacgctggagagatcatccaaatctgagatgggcaagtgctgcacaacaacaacaacctggacgtattttgcaaaatgctgcgtggccaagcaagccatatgttcctcctccaatacattagcagcaatagcagcagttacaacaaagactacaagcacct

SEQ ID NO: 12003 - DNA, 199 bp, Glycine max
  unsure at all n locations
atcngtgnatttgaactgcgaagggcgaaactggctgcttttattgttgaccacacagcggtacctggagatatgtcgcgggggtcacgagaccttggggacgtcaggcggggggctattgcccacaaccaagcttgaccaatcccaccccaacccggccatacccggtcaatgagaacctgcgatgtccctaaacagg

SEQ ID NO: 12004 - DNA, 399 bp, Glycine max
  unsure at all n locations
ggccgtaacgagcctgatgctgaccccnntngnaaancccagagggggggagggaaccaaccagggtgattggttacagcgaggaaaagggggggggggggagcaaaaaacccacaacagccgcgcagaggggaccggaagcggcgaaggcgaaccgacgagggcgaaacggcaagaaaaagcacgagcgccaaccgccacgcaggcgcacaggaccacaccggacagcggcgcgccgagagccaacagcgaaaagggggagagcgaacanggcgaaggcagacccgacagagcggccgaccacgagcacggacgagcggggccaggcggcccgcgagggagcgaacgagaaaaggcggaagacgagagaagggcggccggggagcccaaaaagcgggg

SEQ ID NO: 12005 - DNA, 401 bp, Glycine max
  unsure at all n locations
agcttgttattcaatatcctgatgatggtgttccatatgttctcaagactggactaatacatttgttgcccaagtttcatggtctcgcaggtgaagatcctcataagcatcttaaggatttccatatttttttccaccatgaagccccatgatgtccaagaagatcatatctttctaaaggcttttcctcattctctggagggagtggcaaaagattggctatactaccttgctcccaggtccattttcagctaggatgaccttaagagggtgttcttggagaaattcttccctgcatctaggaccactgccatcaganaagacatttcaggcatcaggaaacttagtggagagagcttgtatgagtactgggaaagattcaagaaattgtgtgcaagctg

SEQ ID NO: 12006 - DNA, 459 bp, Glycine max
  unsure at all n locations
gagagcatctcttatttaagcatttcagccttnggttttcttgtagctctaagaacaatgccatgtggttttctttctttcttccaaatccatttctaaagttccaaatactttctccatcacccacatccaccattagccaccacaaaccatcattgttctccattgaaaacccacaccgagaggaacccttcaatcgaagcagaatttccaacttggcttgcgatttcggtagagaacgaacaccctaatctgatctttcattntctttcgaggtaaccatggntctatgcttgnttcttgttagtttcatcttgtctttgcatcttttctaactttgcaaccgccattgcatgtcttatngcttctttgaaaaaccttagagaaagagaacttgtaaacattatcctttcatgaaatgcatgttattnttgtaactacactgaaccccggcacatt

SEQ ID NO: 12007 - DNA, 238 bp, Glycine max
  unsure at all n locations
agcttgaatcgtacatccgtgcgaaaagntatgaccatgcgaatttctcaagagcttccgctgctcaatttcgagcctctcgacatattatgcacccgaatcggacatccgtgtgaaaagtcatgatcatttgaatttctcgagagtttccgatgtttaatttcgagcgtatcaatattttataaccgtgaatcggacctcagtgcgaaaagttatgaccatttgaatttgacgagag

SEQ ID NO: 12008 - DNA, 337 bp, Glycine max
cactatagacacacaagcctcggtattcaatctcgagcgtctcgatatattacgggactcaatcatacatccgagtaacaagctattgtcgtgtgaattatctctgatgttcacaattccatttcaagcgtctcaatagattacgggactcaatcagacgtccgagcaaaaagttattgtcgcttgaattagcttagagcttcaaaattcaatttcgatcgtctcgatatattacgggactcaatcagacatccgagtaaaaagttattggcgtttgaatttgctcacagcttcaacattcaatttcgagcgtgtcgatgtattacgggactcaatc

SEQ ID NO: 12009 - DNA, 578 bp, Glycine max
  unsure at all n locations
ggccgccgcccgacanaagagaacgagtgaagaggtaaagacgcgaaaaaagatcactgcaccgacaccgannnncnnncannccannnnggcagcgccccatncccctnganaccccggngagannnnganngngnnnggggggnnnnnnnagagnggannnggagagagggaagnggttgttggaaaagnggaaagggannagggggggagaatagaagaaggagaaaaaaagaaggggagagggaaagaaagggaagaaggggggagaaggaaataagagaaggagtagagaaaagaggtagaggtaggggaaggaggaggagaaagggaggagataaaaggaagaaggagaagtgtaaggggaatgagaaggaagggagggggtagatgagaataaggaaagggaagaagtaagaagagaagtaggggaaagggatgtagtagggagaaggagagaattaaagaatggagaaaagataggagagaaaggagggaattaaaaaggaaggagaggagaggagggggagaagggagaagaatgagaaaagagagggggaaggaagatagaagagagg

SEQ ID NO: 12010 - DNA, 89 bp, Glycine max
acctgaaactaatgcacctcgaaattgcctgcaaaagagcgagataccaaactatgattatatggaggatttgaagacggtaagacttt

SEQ ID NO: 12011 - DNA, 400 bp, Glycine max
  unsure at all n locations
agctnngtgaaacaatatttgctactggtaatcgattacaataaactggtaatcgattaccagagagtaaaaactctttggtaaaaggttttgtgaaaaattcatgtgctactcaatgttttgaaaaactttgaaacttgaaacttgaaacttctcttgaatcttgatcttgaatcttgaattgttcttgactcaatcttgaaatcattctcatgggctttttgtcatcatctttgttatcatcaaaacaccttgaatcaatcttgattcatcatcatgaagcaatgaagcttgcttctacagagaagagaagaatattactgcaagacaggacagtagtgtccattcttgaggaagaaactcattnttctgattcttcatcatctgattcaccatcatc

SEQ ID NO: 12012 - DNA, 493 bp, Glycine max
  unsure at all n locations
ngcttcccttaagcgagtgaacgnctgncgngccantatagaatactcacgcttgccacccagctcgcccaggcgagcaaggttgcttcttccttattttcagccttctggaggaatcttctggagggcccaagtgggcctggttgctatttgcacccctatttttactaaatacaccccctgccttttttttggtgattcttttttcgtaaagttacggaaacttatgaatttcgtaacgatacttgttttctttccgtaatgttacggaaccttgcggattacataatcatcccttttttgacttacggaatgttacggaacctcactaattgtgcaacgatgcttccttttgatttccggggtgtcacggaaccttacggattgtgcaccaatattatattatgatttccggcacgtcacggaatttatcatattgcctaatgatgggtgcaagcaccttaaaatgaccaaacacaagttgcatgccacg

SEQ ID NO: 12013 - DNA, 350 bp, Glycine max
agctttgttctaattcaaatgacaataaccttttgctcggatgtctgattgagtcccgtaatatattgagacgctcgaaattgaattctgaaccttagagctaattcaaacgacaataactttttactcggatgtctgattgagtcccgtaatctattgagacgctcgaaattgaactctgaaccttagagctaattcaaacgacaataacttattactcggatgtctgattgagtcccgtaatacatcgagacgctctaaattgaatgttgaaacctctagctaattccaacgacaatgactttttactcggatggccgattgagttccggaatacatcgagacgctcg

SEQ ID NO: 12014 - DNA, 356 bp, Glycine max
  unsure at all n locations
tattatggccaagcgaataacanagttaggtgccaaatcttggttaaattaatgtggaaattccatatcaattattatgcttacgcttcattgttaaaagctggaccacacaatacaaactcaggagcaccttaccatatatatatatatatatatatatatatataacgcaaaacacgtaaaagttgcatcatgtttttttggtaagccattgaaatgcattaataaaaaatcgcacaagatgtgtcaggtgtaatttaaggactccgatatatcattgttatccggccgtacttgtaatggcagtgaatgtgaggcattgttcagtactctgaggatcacatggaactatgata

SEQ ID NO: 12015 - DNA, 390 bp, Glycine max
agcttgttacccatggaagctcttaatatctcccacactttttggggtgggccattcttggatggccttgattttctcagggtccacttggaccccatttctaccaactacaaaacctaagaaaactatattatctacacaaaaggtacacttctctatatttgcatagagggtgtttttcctaaggactgaaagaacttgtctgagatgtcctaagtgatcatctaggctcctactatacactaaaatatcatcaaaataaacaactacaaatctacctatgaaatcccttaagacatgatgcataagcctcataaaggtgcttggtgcattagtgagcccaaaaggcatcactagccattcatacaaaccaaacttggtcttgaaagc

SEQ ID NO: 12016 - DNA, 402 bp, Glycine max
  unsure at all n locations
tacacacccatataattgctaagctcacccnctgccnattacatganaatataaaanaagtacctactacaaagactacttaaaatgccctgaaatacaaggctaaaatcctatactactagaatggccaaaatacaaggcccaaaagaaggaaaaacctattctaatgtttacaaagaaaagtggacccaaccttggcccatgggctcagaaatctatcctgaggttcatgaaaaccccagggccttctttagcaactctagcccaatcctcctggagtcttctatccaatacccttggggggtaggattgcatcatcccctccaccttggaaaggattntacctcanatcccgaggtttttcatactctcgactncttccctcaacacctgtaaaaagaa

SEQ ID NO: 12017 - DNA, 278 bp, Glycine max
agctttttacattcacgtgccttatggagctcagagcctgaacctccgcgtcaaactcctttgacttcccaccaccaccgtgcttgttcccaagcatgggggtgctactccacgagttctttctccttgcagggacatcggtgttccaaatatgcttcaccgcgagttctttcccattggaaagagtgaccctgtacacgttccccgagcctcctatccctatgagattctcctgcttgatggaatctacaatctctccctccgagaaactcatcacg

SEQ ID NO: 12018 - DNA, 321 bp, Glycine max
gcgatcgtccaataactccagaggggagtatgtgaacgaaatctctgcactccacagactaatgcccgagcttaaagttatttacaccagaaccataatgaaaagtttaattcaacaaagaacgaatataatattacggcgacaaaattcgcattgatggggaaatgcgatgtcccattttgccaacatgtgaaagcttatagatgaaactggatagaggactcactatcagctgcatacatcttgagctgctcaagaactgtggcattatttggagcaaccgatgatgcatcagaggccagagcgttccacgaataaacc

SEQ ID NO: 12019 - DNA, 173 bp, Glycine max
gcttccttcaccttcttggctgcgacgcgtacattgaccatttgtcttccttctcgcgatgcttcatttcatgtctgcctgaatgggcctatagcctataccgtacttgccacgatgaccttgggcatttatcagtctagatatgccggcgttggttgtttctaaacccattc

SEQ ID NO: 12020 - DNA, 461 bp, Glycine max
  unsure at all n locations
gcaaatctgtcggcgnccgtgtcaccccctgtgactcacccggctcnctccccccccccggtgcttgaccatgaaacccttaatccactcgtgacttatggaagaaaaaaaggcccttttaaagatttcctgaatcgtggcgatagaagaaaacctttggccaataaagtttcttttttattattattcaacttgcactgtcctattgatgaacaaaaggccctttcttttgctggaccatctccctcaagtgaaaaattgacttgaacctaaatctgctagttgctgcgttcttgtccatatcccgttctctggacgcagggcaggttagagcacatattattcaaacctcgataaacccgacgtgttcaatgtggtcgtaaatcaagcgaccaaaaatgatttactattatttgaataccctacctccagtatgatcttccctatatcacccgaacccg

SEQ ID NO: 12021 - DNA, 430 bp, Glycine max
  unsure at all n locations
agcttaacctgttatgttgaagacttatganaggttttatagaataactctagcaagattgttctggtatccttttagtaactctaattgaacctcttatcagttcaatcacaagtttagtttcgacttttgtaatccaccagagcaggcaatagttttttttatccataggaattgaacacagtaccaagaggtttactacacttacacactgctcaactagaataggcaataggtctttgtatctgtaggaattgaacacagtaccaggaggtttacaacaatcacacaaactgttcaatcagaacatgcaatagtagttctattacttatagatatccatttgccattatgtcatgtgcatatatatatatttcatatattaataaaaaaaattatcatctatttgcttatctctaagttggatttc

SEQ ID NO: 12022 - DNA, 262 bp, Glycine max
tacagatggcgggacatgacctatgtcgggatatttgtttagcaagtggttcaagaataaaggaatgccccatatcatttgcatgacacgcatatgataatgatgattagaaattcatgcgaaactgatcatagcacacatccatgtggacactcaaacataaagctttgtggccatgaaacacttaggcttacggtttgttttccccgttcaatcaacccagtggtttcaaacaatgcactttcatcaagttatgcacaca

SEQ ID NO: 12023 - DNA, 538 bp, Glycine max
  unsure at all n locations
gcgccacgtanacacaaancgtatctnagcgtatnattanataaagagatgtgaagacaagacganggcgcgcccacccnncgagcggcgccatgaaccctgtagagctgatacatagcaaacggcaganagaagccaagctgacgacacggcgcccacacatttgtaaaggagttacggacagggagcggaaatctgcgatgacaagccacaaacccacacccctgtgccgacccacaggagacgactcccacggacggggaagacgatcgaaccaggaggcagcaacacaaaagaccgcaaagcggagatgggaggagagacagacgggatcgaccaggaaaaagaaagagagaaaagcggggcgaaaagccagaaacagagacccactgaaggccccggaggagacggaacgcggggagaatgcggacagaaaaattaaagaaagagagaggaggccggaaaggcggggaaaatcaacacatcgagacagcagcggagcggcaagggggaggaaagagtggtacaagaagagccg

SEQ ID NO: 12024 - DNA, 425 bp, Glycine max
acactttatcgctaaaacaaaccgctggcataacgagcctccgctaagcgcaacactcataggctaagcgcacggaagaaacagccacaagatgagttgtccaggtacactaatcaacaccgcttcagaccatccgattagcgaagataggcaaccactaagccgtaagacgataatgagccgcacgcgattcaaagatgcactacacgcacagcatgagcaaacgcacctataagccagaatatgattaacaaagaccacagcatgccatacaatctagagagagacaagccaacgtctaacagaggtgagagatccgccacgagaaaacaagaacaccccacctgaactgaaccacctgagactcagatgatacgcaaagatgtacatccaaacgcgaagagacgaccaccagttgacattcc

SEQ ID NO: 12025 - DNA, 407 bp, Glycine max
ctctgcacttgtataattatgctatgatattgggctttgctgtgtgtaattagcttaattacgtagattagatggtcctaatcaaagcccattccttccttctacgtatccattatatatattaatgtagttagttagtcagttatttcattctatacaaaaacaaatttaaaaacttgttgcggaagttttaggattaaactttatctctcaattggtcttcattcttcttcctctcttcaactctgtgatacctgtattcttgcataaattccattgctctttcactggtgatgattattgaaggctaaacaaacaatcaatccaaagatccactccatgcagggtgaacttgagttctagtttagtattcaaatttgagtgaatggcatctttttttcattcta

SEQ ID NO: 12026 - DNA, 399 bp, Glycine max
  unsure at all n locations
agcttaaagtatgccttattcattcattcctatgagatgttgctgaagtattggcgatcagaattgccattccttggattacggngttgaaccaagctcatgcttttacaaaaaggctcatcaagtcaagttgaaatatggaagtaaccgtcttgcaaaattgtggcaaaagatgaatcaagtcacatcactgcttcgtctactgccaaacatatttaggattgttgatgtccttgttacttccagattcaccttggcaaagatgtcatggaccatgttgaatatctaaattgattcgaccccatatcctgcgtaacaatttgcaatacttcaattgtacatcattcgcatacatccatgcttttcattggttgcattgctcattgcattctttccttg

SEQ ID NO: 12027 - DNA, 408 bp, Glycine max
  unsure at all n locations
cccctcagtcgcagaaccaacaactttagaataattatgacctttcaagcaacagatacaatccgggtgggaggaatcatccaaatctaagatgggcaagtcctccacaacaacaacagcctgtccctccctaccagaatgctgctggtccaagcaagccatatgttcctcctctaatgcaggaacaacaacaacaacaacaaagacaacaagcaactgaggccccttctctaccttccttagaggagttagtaaggcaaatgacaatccanaatatgcaatttcagcaagagacaagagcctccattcagagtctgacaaatcagatggtgcggatggctactcgagtgaaccaagctcaatcccaaaattctgacaaatagccttcataaactgtgcacaatctga

SEQ ID NO: 12028 - DNA, 450 bp, Glycine max
  unsure at all n locations
ccacgcatccatcccttcataattgacctggctntacgccncccccccccccgagggccatgaacatgaagccttnaaacacaanccnggaaaacgcgacgaacacgagaacacggattaaagcatttgtggaacggaaaggcgtcaggaaaacaccacagcggcccaaaacgcgaaagaatatgacggagtgaccaggagaggcaacacacaggcaagaagagggacggaacaaaccacgaacggcacacacacaaaagcaccgccaccgacaccagagaacgcccaacaaaaggccgagaaagggacggcacaatgaggcgcaaaacaccgaaaaataaaccgggacaagaggctacagacaagaccacgcgccacaaaaagcgagcaaacagaagaccgaaaaaaaacggagccaacttagagaggaacactagaacaggcgcacag

SEQ ID NO: 12029 - DNA, 409 bp, Glycine max
agcttgtcgcaattactatctcattattatatttaaaaaacatgtagatgaacatactgagcaatcgaataaaattggaacagagataccatctatatgctgtatctaatacattcatggagaaaacaatattgaaatacgacggtatgcgactatattcttcggtgaaaaggaagttattatattgttacaatatatttctatagcagatttttacattcacccttttcttgtatctctctattatacgttatttatctcattctgtactttttttccttcttttatggcgcttttaattatagaagaagtatacaaagaagtaatataacacttcgctaacagatttgacatgtatttaacggttgggtctaatacgttctttgcattataagataatacgtgttca

SEQ ID NO: 12030 - DNA, 514 bp, Glycine max
  unsure at all n locations
cgcaaccccctgccctnnccggtatgaggatgcacggcataacccanaccccccccccgcgcgcgcatgacctttgaactgaacatcgaaacgaaccagccaaggtggactcgagcngaaggtgatccacgacaactgtgagcccagcggcagaccgggggaggaaccagcggcaaacaacgaccgaacaaactacggacacaaaggtcgcgagcaagaaggcccaacgtagccaccgcggcaacaaagcagggccaaccatgcagaagcgagaaccagagcaaaagcagccgggcacgaaagaaaaagcgaacaacaacgacctatggcgcagggacgacgagtaccaaggagaggacccacaaagacccagcaaaggtcagccacgaacaggccgcccagcgatgacaagacaccggtgaccccaccgcggacaaggctgtgtacaacaccggtgggtggcaggggccgaccaccaaaacatagtcacgaaagcgacatgaaggaacaaccg

SEQ ID NO: 12031 - DNA, 616 bp, Glycine max
  unsure at all n locations
ccgccctccacgtcgaccnnctttgttgnagatgaactatgcacgaataccactatantattcatanannanaaagagagaaggnnctgagacagtgaacacactgcgaatacccgcgagatcnagcgtggnacccggagatcctccagagagcacccgcacgcatgcaagcttctgttggaactttctgacttgcattccaatgtgacatacgccacagattctgcctgcgtatattgtcagatagggaaagcctataacagcagcaaagcgaatgattttcgtgatgcctcacaagcgcacatgtcccaatttatgatgccaaacatggactacatctccctcgtacaacaaacatgcggaggacgaaccggattcctgaagagtacatagagaacaacacgcccttgatctgctgcccatcactacagacacaatcttatcattagtcacaccacatactgactatgtgaagagacatcgaaaccttccgacacagctgcctgatgctgccaagcatgcacacaagcctcaccagcagtacttcgccagatagagacgcatctaggcaagctcaccactcaatgagatatacatacagcaacacccaatgtcc

SEQ ID NO: 12032 - DNA, 258 bp, Glycine max
aacccccaccaattgtgaacgcattccaacccccccggcctgcttactaaaccaacaacacggacagacggtttacatgcgacaagcgaagaccacaaaccactaccggcgacagcaactagaccactgccagacacaaaaaacgacgtaaacaaagcagaaacgaaaaacgggactgaaaacccgccagcaacaagacaatcgaaaaacaacgaaaggatagagaaaaccccaccacaacggaggcaagaaacgccc

SEQ ID NO: 12033 - DNA, 405 bp, Glycine max
  unsure at all n locations
cagcttgtccataaatatatgtnntttgaagttgtcatttcaatttcttactaagtaaaatggatcattttcaaggtccaacgccttataatgatcacctcttaagtaaaaaagaaatcacttgataagaaagaactacgtangtctgatttcctcatcacaaattgaggaatacgtaggagcaaagggaaacacccttgtcgaccacaaaaagagaaaaatataaaaagggtataaggatatatagacataaaaagggaacatataaaatcaaagtcatgtttgcacattcgattaaaggctgccgtcccttgggacggacgtgtggtgtgctaatacctttcccgtgcgtaaatacaactcccgaacctttctcttaatagatcgtagatcgcgtcttttccg

SEQ ID NO: 12034 - DNA, 169 bp, Glycine max
cattatctcattgtattttctaggatcatcattctgcatcacattcgacagtgactcggacaaagattgaatcatttgtcgtatcccagacagtcatctaggtaatgtcaaatgccatctgtactgtttattacattagctgcccttctgggctgcatccataaacgtg

SEQ ID NO: 12035 - DNA, 453 bp, Glycine max
tattatatattcttagatcgagaccccacacaccatgaccgtcgcctgaacgcaagaaaacacgtgcataagcagagcgactctggccaaatcatattctcatagtacagacttcactactcagataacccagatacatactctatcttacgatatgttaagcgtaggatcgacatgacagattaagtgaaagtgcctagtagatataatggcattatgacctgtgggaatctgtataaaaggatgagaagcacatacgtgctgattgcccataacgctcgatgcactatgcagttttacacatgagctataattctgatgaccaattcgacatgactgttctgcataatatggcagatacccaaatcattcttttctacatgccattttgataagatggatgctgcaagcctagatatgagtaatcgtattataccaaacaagctctaaccg

SEQ ID NO: 12036 - DNA, 582 bp, Glycine max
  unsure at all n locations
ggatggacgccccncntttgatngccagcttgaatngcgcttcgnanngaccnccncncnnttngcggaagannaccgtcncgngacncnncnncangncgcnannatncanacagtctttttcataatatatttatgtacnctgtgcangctcacaagagacccatcgaagattnagtatgaactgactccaaatggtacacatcgtacacattncttacactaacaatccgacatggcgtgatcatcatacatagcgcgatacggctctaggttcataccgaccgatatgctcgctcgtcaatgaagtgacgcgacaccttcgtcacgacacgataacacggctcactatactccctagaagaatagtatgcaactaacgactaataaacaatttagaacgagccatatcctcatatgagtacgataactaatagtgcgacgttactcaatgaccatctgcatcaaaatcaactaagtcattctactgtgtctaaacgtaaatcgctaatcactgctgtcgtcgtcaacactgtaaagcaaacggcgagatcattggactgactggatatatgtgtaccc

SEQ ID NO: 12037 - DNA, 619 bp, Glycine max
  unsure at all n locations
tatggggnnacgggcgtagagaccgtcgtactaccctggaagnacactacgtactatacggcgaatnctagctcggtaccccggngatgcctctagaagtcgtacctgcagggcattgccaagccttctttgatgcannattgagnnntatccctgtctgagggtatgcgctatcaaagtaggtngacatntcagaaatgagtttgaagtttcgcatgaacctttgtcaatagacttaggtgatttacatttacatgcgtggtttcatttgccgcagtagtacttcaagcattgtattgacaaggagaatgtcattgtgatcgaagcacaaatgcctgcacaatatgcaacgcatgtcgagtggttgacaactgccatgcgtggtcttgaagtgcctaacatagatcctacttatgcaaaaatgagagcagtatggtttgccttacttttcaagctgttaagcaaataggtgataatttaagaaacgtcagatcatggcacatgcctgcttgtgtatgtaattgtanataaagaaaatagacttcgggtgcaattatgagtcgcatttattagtagcttccgttntgatcggttngagaagctgcttatattcnacatg

SEQ ID NO: 12038 - DNA, 359 bp, Glycine max
  unsure at all n locations
tatacgctattaaattatgaattgtgtaaataaccgtgcgcganaggatgctgacactacgccacggctgtntcttgaactgttactgngactatgcctacgtgaatcatcctacgaagcacataanattgaacaagttatgtctttacatgaaaacatatctaatggttccaggaccatggtgtttctggtcaatcttcacatgacatataatcaacttttattaactcgtttctggtaaattaaaaaaactcagctacatgaacttactcctggtccagcgtctcctctgngacagctttgcccttgtgaatgaacttgaacatcttgctcatgcacattttgtacaaggcgtgtgt

SEQ ID NO: 12039 - DNA, 324 bp, Glycine max
  unsure at all n locations
ccccaccccacccccaagcagaagaaaagggccccccccccggcaatgacttagctgaactcaaccaanttccacaatcaccccacattcccccccttatccggcccgagggcgaccccacacaaaatcgacgaacaaccgcccagcaccccccaccacccgacaaagcacgacaccgcaaacaccgccacaacggcagcggggaaaaccgcccgacccgacacccgacggcgcgccccaaccccgaccagcgcgaacaccaaagcccgcagcacccacaaaccccgcgcccacccaacaccgacacagccagaccacaccccc

SEQ ID NO: 12040 - DNA, 457 bp, Glycine max
  unsure at all n locations
agctntagtcaaacagaataatctgaatatgtcttagaattgggtggtgaaaaagcataataagactgtctatgattggtttaaagatacaatctttgcagatgagaatgcttcagaaactttaagaaagctagcagatgggcctaanagaaatgttataacctggcaaggatacgacatanacaggtattcattntacacaaaagcacaagatgacaaaagtacaatgcagaacaacggngtcaccttaagggttgaatctcaacactttgcangtgtcaatgacgccaatccctgggtagcttccatcccttactttgngttcattgatgaaacttgngagcttaactatgtgaaatttacggtatgtgtttcaaatgtanagggttgacagcacaccggtgtgtgcccgatgatatangattacattgtagacctaagaaacttggtaccacat

SEQ ID NO: 12041 - DNA, 358 bp, Glycine max
  unsure at all n locations
cacaacaagtttttccacatccacaatgcgcgcataaacccaccatcccctgtagcccacctncaactgagctcacgtactcccacgtagcccatatcctcgtttctctcaacaccgggtccccatcaatcctcccaagcttccccaacatcaaagtaatacaacattcaaacagcacaaactatcacagccaagaaaacagagcagaggcagaanactctgccaaaacaccaaccaaaatcacagcttttctcacttaaagaccccagtacaattccttcgtccaattcgtaaccgtggatcgactcaattttactgaagtcttagacataacctacatttgaccggtggatctact

SEQ ID NO: 12042 - DNA, 399 bp, Glycine max
  unsure at all n locations
agcttgaacgagctgatgaatcatgtcgtgcaaacgccggagcggcactgttatctggcacgattgttangattcgactactctatccaatatcggacaggtaatgtgaatgtggtggcagacgtgttgtcgcgatgctcagagttacccaatgctgcttacttcgtcctctccatgccacattntatattccttgaagatctctccaaagagttgcaggcgcataatgagtatgttactctacgagacaagattcaaatgaacccataagcttatccagggtatgtgctaacacctaattttgtgttacaccattggcgcatttggctatcttcatattgcaccttcattcaagctctactcacagaattccatcagacaccaactgggggtcacatg

SEQ ID NO: 12043 - DNA, 434 bp, Glycine max
  unsure at all n locations
attataggtttagttatttattgcattccatctgacattatctgtcatgctacatctatgatattgagtgaggcataaccgcataagcatataatacaaactcttctagtttattgattatgaccagacaccagtcctttattatgccttgaacaggtgcttattcattaagtttttaaagttcttgttctttgcaatatgaatacataaacttaagataaaacttatagaaattagacagttctgtgaattacttgagcaagagcactcagcgtctgtggtatttcatatacatataaagaatgaatactttntacacttacaaggacaataataaggagttaatatatagtttacaactgattggtgcatgatttgatgtttcatgtgagagaatcttcaccccactgatactgacaaacagtttctttttg

SEQ ID NO: 12044 - DNA, 393 bp, Glycine max
  unsure at all n locations
agcttgcagnctcctttctgatcatggtcgaactgaacagaaagtacccacaaacatgcactaaattgcctataaactcaaaacgtgtttaattgaatttatgttaaactctgtcatatgtgttgcattacaattatgaggcatctcactgctaaatttggctcagcttggaccttctggccttgctgccaattggcttgataaagatagtttactgcatcgtcgattgctctctanggccaatctctaggacgactntaaggagtttatcttattattatgacatagaggttgattggattagaatatttgaatactggaacttcaaaagagtcagattactattcatgccttattctggaatatgacagtttgcttgatgtttatgtacct

SEQ ID NO: 12045 - DNA, 391 bp, Glycine max
tattgaaggatcataggaatatccattctgatgttgctaagaatgaatccatacttgataaatttcttacatgacgttgagattgagcttctatgctgaagtggcacaacttcatcactcttaacactatgtcatagcttcaagcattatgtgattaattactttagagagacttagagtgagtctagttgatgttgagctagtgatgtgtccaaggtcatactgagtagtgctcttaagtccttcgattagatgcgtctcatcagtgcgtttcatggacaacttcatcattcaacaatcttgcatctttgtatgcaattagttcttactttctaatgtgcctccaatgattatggaagcaggtgaaaagtgaagaactgccaaatttgag

SEQ ID NO: 12046 - DNA, 430 bp, Glycine max
  unsure at all n locations
agctctgagcaaattctggcgacaatatctatttactcgtatgtctgatggagtcccgtcatataacgagacgctcgaaattgaatgttgaagctctgagccaattcacacgacaataactctgtactcggatgtctgatagaatcctgtcatatatcgagacactctaaattgaatggtgaacctctgagcgaattcaaacgacaataactttttactcagatgtctgatactactctcagaatatatcgagacactcgaaatcgaatgttgaagctctgagcatattcatacgacaataacgtgttactcggatgtctgaacgagatccgacatacatcgagacgctcataattgaatgtngaagctctgaggaaattctaacgacaataactntntactctgatgtctgagcgagactagcacatat

SEQ ID NO: 12047 - DNA, 470 bp, Glycine max
gcgtctcgtatattacgggactcaatcagacttccgagtaaatatttattgtcgtttggattggctcagagaggcaacattcaatttcgagcgtctccatatattacgggactcattcagacatccgagtaaaaagttattgtagtttgaattagcttagagcttcaacaatcaatttcgagtgtctcgttatatcacgagactcaatcagacatccgagtaaaaagttattgtcgtttgaattggctcagagcttccacattcaattttgagcgtctcaatatattacgggcctcaatcagacatccgagtaaaaagttattgtcgtttgaattggctcagagcttcaacattcaatttcgagcgtctcgatatgtgacgagactcaatcagacatccgagtaaaaagttattgtcgcttgaattggctcagagcttcaacattcaatttcgagcgtctcgatatatta

SEQ ID NO: 12048 - DNA, 358 bp, Glycine max
gagctcttcaactattcttctctaacacaattggcaggattgatactattcctgcactgtacgagtcgaaccaaccaattccaaacaaggtcatattgcattgacttgttttggtcattgaaggcatgcattgatgcagttgcattttgtacacccattgtgcaaatcgatggaacatggatatatggaagatacatatggatgctattaattgcatttacataagatgaggctataaacatatctacattggtattcgccattgtcgatggtgagacagcagatggttgacacttctgtttttttctttgcgaacttgagatccatgtacacccaacatggatatgttaatctatga

SEQ ID NO: 12049 - DNA, 181 bp, Glycine max
gagaaccagcgcatgagagataacttccttcagcttgttgaaagccttctgagccttcggcgaccaacgaaatctgtctttggccaagagttgagttcaaggtgccactatggaaacgtatcccttaataaacctccgatagaagcctgacaagccgagaaagcctcttaaagctctggta

SEQ ID NO: 12050 - DNA, 400 bp, Glycine max
agctttttgaaaattcttatggtcataacttttcacacagatgctagattaaggcgcatcgcatatagagagactcgaaaatgaacaacggaagctctcgagaaattgaaatggtcataacttttcacactgaggtccgattcaagcttataatatattgatatgctcgaaattaaacatcggaagctctcgagatattcaaatggtcataacttttcacatgaatgtccgattcgggcgcataatatgtcgagaagctcgaaattgaacaacggaagctcttgagaaattcaaatggtcataacttttcacacggatgtccgattcaggcttataatatatcgatacgctcgaaattgaacatcagaaactctcgcgaaatttaaatggtcataacttt

SEQ ID NO: 12051 - DNA, 396 bp, Glycine max
  unsure at all n locations
caatttcgagcctctcgacatattatgcacccgaatcggacatccgtgtgaaaagtcatgatcatntgaatttctcgagaggttccgatgtttaatttcgagcgtatcaatattttataaccgtgaatcggacctcagtgtgaaaagttatgaccatttgaatttgacgagagcttccgttgttcaatatcgaatatcactatatgtgatgcgcctaaattggacattcgagttgaatgttatgaccatttggatttctcaagagattctgttgttcaaattcgagcgtctcgagatcttatgtgatcgaatcggacattcgtgtgaaaagctatgaccatttgaatttctcaagagcttgctgtggtcaatttcgagcctctcgacatattatgc

SEQ ID NO: 12052 - DNA, 377 bp, Glycine max
agcttgtttgtatctaatatgcttcggggagattctgtgaatgatgcgaaacgagccaaaatatgcaatgtgacagattcacaagaaagatgtcgcgcgataaactcaagattttaggggtgagcgtgagtgtactactatagcacttcacttaaccatgtttcgagtaactcgcttatcgagatgatgcgctatgcgatagagacatttggctttacgctgtctctcttgcactgcaacatgggcccatttaaaattctttggcttagcaagccatccgctaagcggtagcgagagacgattggcttctcaacatgctcgcttagcgagccgttctaccgagcccaagcccaacatttgagattcaaatatataga

SEQ ID NO: 12053 - DNA, 345 bp, Glycine max
  unsure at all n locations
aatctacctagtctatatatagaagcatgtgtaacacttgatgtaactttgatgaatgagagtcttgtgagacacaactcagagctcaacttctctccctttntcttccttcaatatcgtgctccccactctttctttctctccctctttcttttcctcaattgaagcatcctctccaagcttcttatgcaaggctcatcttggcgtgaagctacttcttcatggctattcctaacggatggcgctcctctccctatcttctttgcttcagtgatctccattggggaaataccattaaggaccccttgagctcaagatcagcctctatcagaacagctttatcag

SEQ ID NO: 12054 - DNA, 342 bp, Glycine max
agctttcttgtgacgtactaatgccgagttcagctgcgtatgtagattcacatgtcgcatcaaggaaattaacagcgattaacacaatacattgtagaggcaacgcaatgttcaattcgattcactcaaaacgcgtgtgggaaacatccgtaacattgaggttaaccgcttatactattcagtagcgactctgacggcgacacacatttaccttagtaatacagacgcgagtttctcgatagacctaaccaacaaccactaggcacttgcgatgaacttatatctgatttcatactcacaaatgacatcgtacacatgaattcatactcacttatacttact

SEQ ID NO: 12055 - DNA, 488 bp, Glycine max
cgaagagcaccgtttgtcatggcggctgcaccatctgatactgaatctcttgatatatgaacgttcctttcacaaggttactctgactatctcggataccgaatacacgctctctattcctactttttcacgaatctctttgccaccttcgatctccgcttcatatcaacgtagcgtccggaatgtctccctctttcgatacctacctcctcactatacgctgcctcgctagttcatgtatcgattcactttcttagatgattgttcgtgctgaatatcatttgtgattagattctctgctctgttctattggaccttgcacaatgaagactatagggttggcggcgcgacctgagagagtcccttcaagtcatgacaagagacataaggcggatgttgcgagcgattttagagcgtgcttgtaaagttcctagcgtgcaaagaatctgcagtttcggagtgcagagcaatggtctgtattgtctccg

SEQ ID NO: 12056 - DNA, 412 bp, Glycine max
  unsure at all n locations
agcttatctattaatttcgaccgtcttgatatgttaagggactcaatcagacatccgataaaaaagctattgtcgtttgagttggctcagagcttcaacattcaatttcgaccgtctcgatatgttacgggactcaatcagacatccgagtaaaaagttatggtcctttgtattggctcagagcttcaacattcaatttcgagcgtctcgatatgtgacgggactcaatcagacatccgagaaaaaagctattgtcgtttgagttggctcagagcttcaacattcaatttcgagcgtctcgatatgttacgggactcaatcagacatccgagtaaanagttatggtcctttgtataggctcagagcttcaacattcaatatcgagcgtctcgatatgttacgggactcaatc

SEQ ID NO: 12057 - DNA, 252 bp, Glycine max
gatgatctggctgaaccccttgaacccccaacggcaatttttaattacgccccggtaggagtttggagccctgctacatcctaggctcagtattccatggactccgatcatatcagagctcagagcttatctttagtaaaaaatatttcttttagcctctaagagagtttacgcccggatttgcgatttaatagtttataaacttgatggttagattgtatccttattatctttaaaactttgtaacttatc

SEQ ID NO: 12058 - DNA, 443 bp, Glycine max
  unsure at all n locations
ttgcggtcattactatcacactagatcgaccatgaacagcttgagctatanacatactgaataacgtactagcctataatataaccaattcaacaagtgttaacaattcagccggaggtacgcaatacacttgtattgctatggatagcgtccaagagaagcatatgatgtctctgagattccaagcgcgcagtagcttgttccaagatagtgtgatcgacatctaatatatttcacacctcacgaactcctcgcattgaaacatataagatatgttgtgatcttcagttctcaaacagagagatcttccaagacctttatctatgagcactattgtacacgagtaatctatattcaatagacatttagaatgctctgacaattggcattggaggcgggtttgcctcaatgtgtcttanatatacttcatctaacccacgtag

SEQ ID NO: 12059 - DNA, 345 bp, Glycine max
  unsure at all n locations
actttatctnttaattaatattgttcacattgattattaatatgctctaatgtatgcaaatgttcaagttggttgcaagaagaagaattagaagacttggattatttggataagaatntgatgggagtcgaattcatttttgacaagtattaatttgactatggatcttgatcctaattcttttcattgttcaattctaaatatgtatatggagatctataatacattcctctaattctatatacaagagaagttctaaggggggagatatataagttgaaatggctcatgtacgttgtgtcttaagattctgngctggatatagtatctagtttacttgattat

SEQ ID NO: 12060 - DNA, 194 bp, Glycine max
  unsure at all n locations
agcttgttatgaggaagtgttgaagggtgaaacttcctgcttttattgttgaccacagagtggtacctggagatatgtcgcggnggtaaggagaccttatggacgtcaggtggtgtgctattgcccanaaccaagcttgaccaatctcgacccaacccgggcatagtcggtcagtgagaacctgtgatgtacct

SEQ ID NO: 12061 - DNA, 427 bp, Glycine max
  unsure at all n locations
tctgttntcaatntcgagcgtcttgatatattacgggattcaatcgatcatccatgttacaagttattgcgaattgcattntctaccaccttttgttttccattaccagcatctcgatatattacgggactcaatcggacatccgagttgacaggtattattggtttgcatttttacaagcttccattttcaatttcgagcacctcgatatattacgggactcaatcgaagatccgagtcaaaacttattgtcgttngaatttgctcacagcttctgtattcaatttcaagcgtctcgaaatagtaagagaactcatcggatatccgagttaaaagttattgtcatttgaatntgctcagagcatcttgtcataccctaatttcgtccggggatctttgcttgatgacatgcgacctttctttggcc

SEQ ID NO: 12062 - DNA, 419 bp, Glycine max
  unsure at all n locations
agcttatggacatctttgaacctctagttngccgtggnggtattagcaaaatcagaaattcacacatccactaagtcgtacaagtgttgagctgtcttctangatgctcttttgactagctgttgntttgtctaattaaggacacatcttagttntctgttttgcttttttaccaaattgtctttgctgtcatttcccttttaatcttatccttagttataggcacanagagtggctatatatattctttcctctgtaantatacgactatgaatgaaatgtgttttcatacattccgttatagtctgtgtcgtttctctctttttcatcccttatatccaatcttatttgacatttgtaatgtattccagcaattccagcgagtgtgtcttctgctctttnngaaaatacctgaaact

SEQ ID NO: 12063 - DNA, 359 bp, Glycine max
  unsure at all n locations
atctttttttgtgagatataagaaaactttaattntaacttaagataggtgggtctatgcattgtccaagcttcaagcccaaagggctccagcgtgagggggtatactagaaatataatatagaattgaatantttttcacccaatagcttaagcttatgagattggaggttcttgacagataccatgtagacagaacaaaaaattcaaattgatcatattctaagactggaanagctggaaagggaaaaggataaggggaagctgcgatggtgtgaacaatngtgattggatggctgtgtactcccatcaacaagagatagactcatcaaagttacactagtggttacagcccacacc

SEQ ID NO: 12064 - DNA, 447 bp, Glycine max
  unsure at all n locations
agcttgctggtgaatccctccaaaaaccctggacggacaattctctggtcgtttctccaaaggctcgtcaaacccaagatttgcacttagtgagtctcactagttcacaaaacccaaggcccgtccttggtaagcctcgacgcacctctacacgctnttcaaaacctagggcaaacacgtccctggtgcaaggctcgttaaacccaaggttcacccttggtaagcccttcttttgctaagttccatctttacaagatctcaaggtacacaaggtcaacccttgacaatttttcttacccctaactgttatatgtgcaagaattcatgtttgcaagaatatcaaaaacctaaggcccgcccttagtactaaaatctcaaggtctacccttgatacacactcttacaaaacccaaggtacccttttggtccgcttacttgcaacaacaa

SEQ ID NO: 12065 - DNA, 232 bp, Glycine max
atgtgatagagcctaagtcacaatgtggtggaatgcaccttctctcaatagcaacttgggcgaagccgaactcgatccatgagaggcagaaccaagagtagagcccacagaaaaggctaagcccgaatcaaataaacattaaaatatagtaactaggaagtgatcctaggtcgttttccaacgagcaatgataaaccagaagttcataatatacttgcagtaacagtaaaaa

SEQ ID NO: 12066 - DNA, 443 bp, Glycine max
  unsure at all n locations
agcttgtatacatgatttngaattttatgatcctaatagctccgtgtttgggaaacataaaattcctcttcaatgtatccatttacgaaaacactnttgacatccatttggtatagtttgaaatccataacacaagcataagcaaatagaaatcttacaacctctaatctagctaccggtgcataggtttaaccaaagtctatatgctcttgttgagtatagcccttggctactagccttgctttattcctaatgatcaaaccatgttcatccgatttatttttaaacacccatntagtgctaatggtgtgcatatctttagaataagatacccaattccatacatcattccttttaaattggttcaactcctcatacatggacattatccaaaactcatctttaagtgccttctctatagacatgggttctacttgagacac

SEQ ID NO: 12067 - DNA, 370 bp, Glycine max
  unsure at all n locations
gttgattaatggtgatctagattctatggactcagaanagaagtaattaagtcataagagtttanagtggagggcactttcataaatgactatataactagtttaaaaatagaattttagtttaattagtgggtgactagctaaagtgtctaattatatgatgtagaataattaacataagttagagttgtaacaccctgaaaaattacaactcagactaacaaaggaaactctgtgttgtgtcattggtgcatgtatngaattaatttcattaattatatggttttaatcagataatttcatgttgtgtgtgtgtatgcatgtgactgatttagtaaagcttgatagagaaataanaactatctaacct

SEQ ID NO: 12068 - DNA, 456 bp, Glycine max
  unsure at all n locations
agctntacatttaatatttgattcggggttagccttgataggtgttgcacaaaatatgtttggtatttgtgtgtatggtcaattagtagtctaagcctttaatgaagaacctaagtcattttgcaagtatgattgtaatattaagtacgattgtgtgtatggtaaatttggccttgacatgattcaaaagtggatctttgtataagatttgcataaactatntagataaggtatctaagagaacttgtancaataagttaaaaacatcttcatagctctttttttcatttntaaataatntgactcattcaatggtgtactattatacagagttngacagtgattntcaccataataattcaaatattgattttcatagcaacaatacactgcacatgaacatctcatccncttacatgtcatgtacaagtgatgaaactctcatgccttatcact

SEQ ID NO: 12069 - DNA, 321 bp, Glycine max
  unsure at all n locations
cttatgcacttctctctttctcanaataactgaggaaaattagttccgtgaagaatatccaagccgaggcgcttccgtaacgtttccgtgagtgatttcgcgaaggttttcgactgttcttcgacgttcttcattcgttcttcagtcttcaccgggtaagtacttcaaaccaagcttttaattcattctatgtacccgtggtggtccacatttggtttcatgtatntttattctcgttgtcatttactttttatacccccttttgacgtgcttaagccatttatttaagtcatttctcgcttaatctaacaataaaataaa

SEQ ID NO: 12070 - DNA, 374 bp, Glycine max
  unsure at all n locations
agctntgtgtggagcttctatggtgaatgaagaagaagaaagctacgtgagagagggagagaaaaggcttctgaatttctttcttttggctgagtgaggagagagaacagctttttggttttaaataaaaagggttttctctttttctattattttattataaactatgccacatgtctccatttgagtggagcaaaaagggcccactttccccttttgactgtgacccatactcagccacaaaagtgagaaaaatctgacctttgaaacgctaaaatcctgcctcggtttgcgtgctgtttctcaggtttcagttcctcgcgtttctctgcgtccgtcggggccagttttcgaaagtaaccaatatatatatc

SEQ ID NO: 12071 - DNA, 443 bp, Glycine max
  unsure at all n locations
atgataaccaaagatgatgacaaaggtgatgaccaaaaactcanagatcaatcagagaacaactcaagtgaatcaagaacaattcaagagttcaagaaaagaatcaagaagaattcaagactcaagaagaaatttaagagtcaagaatcaagattcaaggttcaagatctcaaaaatcaagatcaagattcaagattcaagaatcaagagaaggcttaatcaagataagtataaaaagtttttctccaaaattgagtagcacatgatttttctcacaacatgtttaccaaagagtttttactctctggtaatcgattaccagattgttgtaatcgattaccagtagcanaattgttttgaanaagttttcaaattgaatttacaacgttccaattaatttcanaaaactgtaatcgattacaatgttntggtaatcaattacc

SEQ ID NO: 12072 - DNA, 435 bp, Glycine max
  unsure at all n locations
agctttattctcttaatccaaacctttgcaaactttttaagagattcttttaacatataaaggtctattgtaaatcgtttctcttgacttcttgatcttgacttgaatcaatgttgaatagctctaatcttttggcatcatcaaaatcttaatacagcatatgcacttacaaattcaacacaaacttagaacataatgtgataattattatgactaaaaatgactctaagacaacatgaatgaagtgattacacttagattattgtgttttcttttctaatctatattttgcaagaatattttgactganaacatgattcaagagtagatctatattattgtgactgaatatttctatgttntctaatttcaagggttagcacaagaatatcttgattgaaaaatgatagaaccctaaatcaacatataaacatg

SEQ ID NO: 12073 - DNA, 372 bp, Glycine max
  unsure at all n locations
tggtatctgaggatcacttgaaattagtgaananaatcgtttctgtgaagaacatcccagccgaggcgcttgcgtaactcgtccgagacgtttccataagcaaatccatgaagatcttttgccatccttcgttcgctcttcgatgctctttggtcttcaaccggtaagtttccgaaatcgaacttttcaattcattctatgtacccttggtggtccccacttgtttcccgtacttttattatcatttcatttaccttccgtacccccttttgacgtgctntagtcatttatataagtcattttctcgcctaataaagaaataaaataaattttcaccgatcatttgaattgaacatctgtaatttctgtaaa

SEQ ID NO: 12074 - DNA, 405 bp, Glycine max
  unsure at all n locations
agcttgtcatgaaagataagaanatttatagataagagagagtgaaaagtatgactatttgaaacagatgaaagagatatgaaatgagaaaatagaacataatagtgtagtaaaatatttcgtttttaaaaatcatttgtacaattgcaatcttattcatgtgaacttgtattaaataatattctagtttgatatatatatatatattccatttgattttgattttgctatnttttaaaaaaatttaacaggcataattaattatggagagatagaatcgaatatcattagatattggttaccagcatattattcaattgtatttactttcgggtgtacccttgtatttgttatcagcacgttcgatattgttggctcttattggcgacctaatgctatattgag

SEQ ID NO: 12075 - DNA, 415 bp, Glycine max
  unsure at all n locations
tatcgatggcaagtctntagagaagagttcggaatctggattcttctggattgctcctttgtaactcactctatgaatctttcactcatcccattaatatcaaagatttcttctagataaacttatctagagcaatgtgtgtcacatgcaatttaagttcataaatggtgcagatcatttctatgttgctagtgtacgaaaaaacgtgttcacatacacacatggcgaaataaaaggatatattttggatttaaattatattataatcaaatgacatattaaaaggtgtacctattgatgagttcttgaagcataaaaattcttcaatagtgtacagactctacgtgtatccacatcgatactgacctctattcgtcaacaactttgacatgtaaaaaataagaatagagaagtg

SEQ ID NO: 12076 - DNA, 259 bp, Glycine max
  unsure at all n locations
agctatgtaaagtgttgatnttcaccttctcactaagccaatctgctggcatagcgagcatccgctaagcgcaacactcatgggctaagtgagaggaacactctagaagaagatgagttgtatagggtcgctaagcacaccgcttcatctcactaagcgcaccacttaagtccatccgctaagcgagaaatgcacgcgctatgccataatcactaatgtgtgctaagcggaacataattgcgctaagcacacaagcacg

SEQ ID NO: 12077 - DNA, 398 bp, Glycine max
  unsure at all n locations
acccggcgtaaagaggaactatgataagagctacgtggaagtccgtgagcctcagtgaggtgggcaacaggggatggtgggtttatacgtgatttgtggatgtggagaactgttntgcactatcgcccgaccgccacctagtaccacatgtgatgggtaccccataatcctacaagcttgaaatgaggaagtgtggaaaggtgagacttcctactcttattcgctgaccacagagtggtacctggagatatgtcgcggnggttaagagaccttcgtgacgtcaggtggtgtgctattgcccanaaccaagcttgaccaatcccgacccaacccgggcatagtcagtcagtgagaacctgtgatgtacctaaacaggcgagcttctggcagtcaaccga

SEQ ID NO: 12078 - DNA, 332 bp, Glycine max
  unsure at all n locations
cgaaagggaaagaatagctgggttgcctcccactaagcgctcttttaacgtcactagcttgatgcattgttctgttatccaggatccacaagagttcctacttcgaggaccttcttctcacgtctcttttcctccatcacatgcactntacaacacacattgtggcttggtggatctttcgcctcatggaacatatcaaagctgatcttctgatcttctatgcccatctgcaatatcttcttccctatgtccaccatggaacttgcagcagacatgaatgggcggccaagaatgagaggaatgtcagcatcctcttctatatctatgacaat

SEQ ID NO: 12079 - DNA, 406 bp, Glycine max
  unsure at all n locations
agctttgtgtggagcttctatggtgaatgaagaagaagagagctacgtgagagagggagagaanaggcttctgaatttctttcttttggctgagtgaggagagagaacagctntttggttttaaataaaaagggttttctcttattctattattttattataaactatgccacatgtctccatttgagtggagcacaaagggcccactttccccttttgactgtgacccatactcagccacaaaagtgagaaaaatctgacctttgaaacgctaaaatcctgcctcggtttgcgtgctgtttctcaagtttcagttcctcgcgtttctctgcgtccgtcggtgccagttntcgaaagtaccaatatatatatcaaaacgctcagaataacaccccgagcgtggttc

SEQ ID NO: 12080 - DNA, 561 bp, Glycine max
  unsure at all n locations
cgccgcccttgatcccnttaggaaaagcgcttcgnannaccccnccncnttngcaaagnaccgngcggtcanagctgtctgcaataaccaacatttatgactatgtttgactacaactcagagatcaatcggggagcatttcgtgaatcaagaacaatacttcatgttcacgaatagaatcaagagtgaatcacgactcatgagaaactcgtcgatcctagcatcaagacataaggttcaggatctccttcatcgagatcaagattctagattcaagaatcaagagatggcttaatcacgatcggtctaacaagtttgtctccaagatcgtgttgcacatgatctttctcattacatgtttaccaaagagtttttactctctggtaattcgataccagagtgttgatgtcgataccatgatcataatttgtttgaatagttttatactgagtgtacagcgttgtattattttaaaaacgtgattcgagtactatgtttgttaatcattaccgtcgctatgagtcgttattcaagtctcatggagtgtcgatgctttccttt

SEQ ID NO: 12081 - DNA, 416 bp, Glycine max
  unsure at all n locations
agcttgttgcaattcttctagacttggagttataacatgcagtcctcttgaacccttacctcccactctttcgtcatgccgggactcanganacccaacaggttttgccttttcaatgtactctgaacaaaactcaatagcttctttggcaatatacctttcaataatagatgcttcaagacagtctagattctttgcatacccttttatgatcttcatgtatcactcaaccaggtatatccaccacaaataaatgggaccacaacatttaatttccctcaccagatgaacaattaagtggtgaaccatgatgtcaaanaacanaggaggataatacatctccaactgacaaaataaaatagcagcctcgttttcaactcatctaacttgagaggatcaatgactntactacatat

SEQ ID NO: 12082 - DNA, 378 bp, Glycine max
  unsure at all n locations
tatgatatttgttaatgttntcttactaattgtagttatatgatctttctgtattaatttcttttataataaactcaccnctcacaattntgtactgtgtggttgatacctgtgatgatcgcgaacctttgttcgtgggagcagaatgacaacagtagagtacgagaagtgagattcttttgtcgagccgacgtgatgacgttgggtttattttgggagagagttgtgttttgttaatcaactcctccgtagctggttacataattcttttttctaattgaggatgtaaatcacagaattaggtatatgtatgaacanattcactttccattatgtgaatgatgtgtactggagtactatgcctatatatatatgtat

SEQ ID NO: 12083 - DNA, 465 bp, Glycine max
  unsure at all n locations
gctgagcttncttcttggcatccacctactaatcatgaggaagaagagcagaatgatgctgcaggatcaagtggagtcatagccattgaacaacaacaacagcaacagcagcagcagcagcaacaacaacaacaacaacaacaacaacaacaacatcaacagcaacaatcagagtcttgtggttacaactttcagctccaaaggcaattgggagccttcatttcaacacatgttgacactgaccacatcaatttccaaaccaacaacaacaactcctcagaagatcttggcctatccctccattggcttcaagaccaccctggccttattcagtggcaatcacaacaagaaggtgcaaatcaaacacctncttcagatgaacaccaaatccagcaaaccccntttgccagaatcaaccgcagtgggtttgagaaccattatcaaagaagtgtgacttggaacaag

SEQ ID NO: 12084 - DNA, 464 bp, Glycine max
  unsure at all n locations
agagaatatcatctctctngaaaagcaaatcacctgatctgcattctttattgcactcaaatattcaccactnggtgaaacatcagccacagaattcaacaaattctctctgggtatcctcacattatcaaacctgaagacacatgtgaataatttctgcgtttactcttttatataaaatntcattttcaggtgcaacttgtttgaaaaatgtatatattaccagatacggccattatcaactccatttaaaccaattntgtgaccacaatcagctattcggatgtttggacatatgtttccatctgaatccctgatttgngcaataaatgcatgcaccccttgattgctccatttatatagagctgtgaaaagactatagtgtgggttgcatgctgaataaaagaacaagttaatataagggtaatatatacaaagttggagccagtgaaaaatgtatcatg

SEQ ID NO: 12085 - DNA, 455 bp, Glycine max
  unsure at all n locations
agcttgccaagaagagaggtgttggtgttacgagctatgcggatacctaaagctcccatttgcttgggacgcgtgactggtcctagttcgcaagattccaacccttcgtataccagaagaagaccaaacgaagttgtgagtttttctatcaatggcggcatagattgactaatgcagccagaatagctgcataatgtacattggaagggaggataggacatatttagctaaacaaagtcatccagccctattcaaaagtttccctttccatgaagctagccttctatgaattntatccaagataaaatccaaagattgatggtgttgtctcccttgcaccaaggaaaaccctagatagcggccaatgttggaaacactcgcgatgccacaaacattcttgaatatattcttcatgcgggtngggattcccttggagctcatcatcgtagatttat

SEQ ID NO: 12086 - DNA, 385 bp, Glycine max
  unsure at all n locations
cctagtaactcagcttgccatgaatcaganatctgcacctgttgcaagagtctatgatctatgttcttctgcagatcaccatacagatctctgtccttctttgcagcaatctggagtcaatgagcaacttgaagctcatgctgcaaacatttataatagaccccctcagcaacaaaaccaacaacaagagaataattatgatctttcaagcaatagatacaattcaggttggagaaatcatccaaatctgagatgggcaagtcctccacaacaacaacaacctgtccctattttccaaaatgctgctggtccaagcaagccatatgttcctnctccaatacattagcagcaatagcagcagtcacaacaaagacaacaagcaact

SEQ ID NO: 12087 - DNA, 398 bp, Glycine max
  unsure at all n locations
agcttagtaagctgattctagaatgtgagtgttgttaatcaagaattcaatgtataacgatgtgataggatatgaaatctgatttagaggaaactgaatatcctctaattatgtgtaatcaatactacttgtctgtagaaacacctggtcatttatttttgccttgaaaaaaagctacttcaatatgggaaaaatctttttttgggggggaacatcaatgaccaaaccttgtaccttntctgtagacaagttaaaaacctacagttcagcaacatcacttttctttcacagctataatgggaaaggatattagcactctttactatctagcaataccagagcatggccacacacctttggaggctaattgtatcagaaacttttaaggaanaatcact

SEQ ID NO: 12088 - DNA, 410 bp, Glycine max
  unsure at all n locations
atattttatattattagtactttgattttcagccttgtattgtggctatattattatggtatttgaacaatttactatttccctatttgcatggtatgtttgaacaaatattaagtatgttatttgactatatgggttttatagataatctatttatgattgctgcttcatgattcttgcttcatgagttggttgttagtttctcaatgaatgttgtatggatgtttagttctatttgattatttcagatttgttacacactttggctgtttgttgatgccaaatggggagagaaatacggattaaatcaagaactcacatgagaaatcaatntgaatttaagatatgcacaaattccaaaacaaagggggagaaattatgtgagtgatcgactaggannaagtgtgtgt

SEQ ID NO: 12089 - DNA, 368 bp, Glycine max
  unsure at all n locations
agcttaggatatatgttaacattcattcccncanattattaacaaaccacaacttatgaattttcacaacaactaaccttttgctttgctactcttttcagcacattcattntctttgatgataagttaccccagcttttactctntaattntggtttttttttagtntttttttcaaatgtaactagagatattcatgttgggctggagtaaaatcatgttttgtgactcaatttaacttgcgttggttatttattttcccgcaatagaaaatcacccaaaaatattcccccaaatttaggacaaatttgtttggaccatgagtactctcccacaacctaagaaagggtagttagtaaatatcacat

SEQ ID NO: 12090 - DNA, 324 bp, Glycine max
  unsure at all n locations
ctcttctagaaggctgctgatagctgcgtccatgataatgttacctcctacatgcctaatgagggcactgttactcgaatcgagtgagtcagattataatttcttggctcttgttttgcccctttctctttataatcgagtttcactattcgtattaatgctctattctttcgatttttttattagtaatttaattctcaatacatggttgctctgcttttaatttttttcttatttttgtaatttactgatgatcatggacattgtaaaaggttnttttnttttccaattattcgctcgttattctgctctttgattaaacat

SEQ ID NO: 12091 - DNA, 455 bp, Glycine max
  unsure at all n locations
agctntcatcgganagttctcanacccaaaaatgctctcaaactttcaaaaatctcaagcagagtttaagataataacaagatggagaagtattggtagaaatggagaggtaaaatatttataacactttgaaaccccttcaaaacccttttgacttctcatcattagtgaccacctcgagagttacaaactctgcaatgtcgtcatttagggtttttctccaattgaagcaacatgtatcatttaagaccacaaacgttatgacacacggtgtgatcaagatatgcctagactatcgtgtcttagatcgaaaggtcgtgattctttntgtctaanaagtcattaccatgtcacgtgcatcataatgtttgtctaagatanagtcgaccatccaattcattggttatctatcgagatanatacaactcagccatttaaatagatgggattcattt

SEQ ID NO: 12092 - DNA, 405 bp, Glycine max
  unsure at all n locations
ttgggtggttttgttgtgtaggaaaacaattttgtagctgtgttataacttataagggatcttgtgatgaataatatccttgagaaagcaagttagcgttgtctgctctatgtagctgacctacctaatgggatatgactttgttgttgtgtcatgtagaaaacaatttatttttctgttacaagtgggttgtgattctattgttttgcaggggaaaaatgtcagagtagaactcttggagacagcactattacttccgagcacgtttagcaaaattctggatgttgtaaacagtgacaacttgtcaagggcaattgagtattattccaatnttgtcagggatgctcacattgaaaaggatgtaaagcanaactagaattcttattcattgtgtaattctcatta

SEQ ID NO: 12093 - DNA, 401 bp, Glycine max
agctttaacctcatcgtccatcacagtctttagatttgggagccaatccaatccttgtgttcggactctcagccacttatgatagccgccgatgatcccattactgcttcccctaagctctctgtcctttcttcacgccgcatcccatgccttgcgaactccttggagtaccctcgcgttgaggtcactaataccccgtgcgatgaaaggcgtgatgctttcgtctaatggcgctcctctcatggggtagccaagctgtcttatggtgagaacaggattataattaatacaaccccttggtcccatcaatggaacattttgacatgcttcgcatgaagatagaatcctgagtcttcctttcttctagcgagggaaccaattaacagacgcaccctcatgct

SEQ ID NO: 12094 - DNA, 339 bp, Glycine max
  unsure at all n locations
cagtcccacaatcccaatctgtaaatatcacattcatatgtcattggggcatttcaccgagcacttggtgggcgcgctgttacgcatatattgcaagagaatgggggcaatgtggcatgccccattagtttagaataccacatangcgtgaggccattctctacaaccgctctacttctacaaattaatcataaaaaccctcaaaacttgcgcacggatatgagcacattctcacaatttatagcaccaaaagatgaacagaatgcaccactgganagctatatactcaaggatcgaatacttacttgtcggagtgagtatgaatacgaaaaatcaaag

SEQ ID NO: 12095 - DNA, 548 bp, Glycine max
  unsure at all n locations
cccacctggcnttgaaaaccntttaggtatgccctaacgacnatgcgacactatagaaaactcaagcctcgcgagtatgctcatctgcaggaagagagatcacagatcgtcaganatgttgcctatttggtcatactgcagaggctggcgtntctatatagccaaatttacacccaacctaacaatgtcattacccaaccaataacaacccatcttcttacccaccacttatatatccacaaaggccatcccttagtcacaccacanatcccacctaccactctaccaatgcttaacaccaccattaccactaactagaacacttaccacgtaattatgtttgtactgaaaacatatctgcagaatatactccctatcctgcgtataatgcttgcttaccacatatctactcatatttnatagtatcctaaccattctatgttaatcaactacatattatatgatattctcaaactcatatactatatggaaaccttcgcattcattcctttcataattaaacattattcaagacttcttctgctgct

SEQ ID NO: 12096 - DNA, 402 bp, Glycine max
  unsure at all n locations
agcttattttgcaccctcactaagcgggaaaactcangcttagcgtgaagaatgtccacgacgaagcccaaatgcgtgcttagcacgaagttagcgtgaatagtaagctactttaggcctataacaggaattagaagcaaaaggaaaagataccactctggagactcaaggttctctaatgaatacatactaagtctgagcatctctaataggggaaagtctctatatatgtccattgtccccttctccttctctatccatccaccttcttctatccacattaacccctaaattgaaagcctctcatgacaatgagaggcttaatccccttagttagggactgacaggtctaaaaagtcataagatgtattatatgtttcatatctatcaactgcaacatgt

SEQ ID NO: 12097 - DNA, 423 bp, Glycine max
  unsure at all n locations
tgtgaatgtatgtatacatgattntgatgatgtcaaaagaagaatcaaacaaggctcattntgcttcaagattaatacaagattgtttcaacaaacaaagccttgattcaagatttcttcaagatcaagccttgcctcacaatgaaaggtttcaagtcattcaaggcacatgtaatcgattaccaatggtttgaaagtgtgtaatcgattacacatcatatgtaatcgnataccagagactctgaacgttgggaattcaaattntaaatgaagggtcacaactgttcaagaaaaacaactgtgtaatcgattacactaattctgtaatcgattaccanagaggattntcaaggaatatcgccaacagtcacatcttatcatttgaattttgaatggccatcaaaagcctatatatatgtgtga

SEQ ID NO: 12098 - DNA, 461 bp, Glycine max
  unsure at all n locations
tcaccttctggtcctcctcatagttgttgcatgagaaaacatgctctattntcatctcccactccaagtaggcctctggatcattctttcctttaaatggaggaatgttgagtttaataccatcaattcggttttgtctaagaacaccatcattccctcttctcctcctttcttcttcattatgatctctattctccatttgatccaacctctcatggagcgcatcatctcgttgcttcattaacctctccaaatgttgcatcanagcttgcatttggaattgcgaaagccccactccatcattatngatagtacctgacatctcanacaaacaaatcaaacgtaacaagacaattagtagtgctggttgaataccctcacccactcagtgtatcacacaattatggcttttctctaatgaaacactcttngcttttaccactctaatctccttgagtctt

SEQ ID NO: 12099 - DNA, 370 bp, Glycine max
  unsure at all n locations
agctttataagcgcgggtctgggatacgaaggtcaagtggtcgcgatatacgaagatgatgttccgagtacattggatttggtacgaccatgccctcctgatttccagctgggaaattggcgagtggaggaacgccccgacatttacgcagcgagcataatgtaaacctttacggttttaaaagctctatagttgggcctaggctntagagttnttcttttggttaaggctgtgtgtattttgttaggtttaatacaaggatctttcttcatttgttcctacgtctctacccattctcatccattngcatgtttacttctttatttctgaaacggcagatccgatgacgagtcccccgaaggtctaatac

SEQ ID NO: 12100 - DNA, 194 bp, Glycine max
  unsure at all n locations
accttctactgaccctgagcacccngaatcttcttcttaccgataggggttttagcctcccaatgattttcgtaccgatttattcattcactatttgataattaatccctacttttattttctattgatttctatttcacaatgaacttttaaaaatataatatacaatcttaactgctcttattatcaaatcc

SEQ ID NO: 12101 - DNA, 434 bp, Glycine max
  unsure at all n locations
agcttgggcaatctttattgtgcangccaatatttagggttaaggccctataaattctaatatcttcataccctacttgtaacacaagatacaaagaaacaaaatgcatgtaaatcacaaatttcgtcttaaactattactctgtcccctaaataaattctaaagtaataacactattcaagtaatccctagagtattgaatattcatcactgtagtccctaagttgatgtattggtttaatgtttaaggaatattttgaggggtattgtaatattaaagggaaaactttgttaatntctaataattataggactacttaagtagttcgtatactttaacgatattttactttaagtttgggcgatcttcatcatacaagataattgtgagggttaaggtaggccctatatattctaatatctgcataccctac

SEQ ID NO: 12102 - DNA, 297 bp, Glycine max
acccatccgacacttatgcagcttgatacccactattcgacccctgccccaccatacctgaactatacaaacacattagcacccttgtttgtgttccatttttccaaatctgagagtcaccggccacgtcggtgcactatcgtgtgtggagaggcataactttgatagcaacagaatgaaacttggatcttgattcatgtggggttctcatatctaaactattatgggtggtggagattgtcatgtgtgaggaggcaaaactctgatataggtgccaacgaactcacatcttgacgt

SEQ ID NO: 12103 - DNA, 439 bp, Glycine max
agcttatgtgaacgttctgtataatgtataaagccacaaaagaaggcaactacctgtctcaagagatccattgtactgttaaacgttaaaacaaatatctgggagcttatttgaccccactttgaaaaacgatattgaaatacaatgaacaactaagtactgcatacaagaagtacgcacgtaaactacataattcaataatggttacactcgtaactattgtgtcacattagtttaaaacaagtacaactttagcacaacttactacgttgactagggacattagattccacaaagcatacagtcgagcaagcccagctgatctcctaggtccttgactaaacaaagcgctgattccagatggaaatggaaataggacaccatgagggaggacaaatagaactaataagaagctcaacagagacagcgagtacatctg

SEQ ID NO: 12104 - DNA, 363 bp, Glycine max
  unsure at all n locations
cgatacanactccanatctctntcaaagtggacctcatcttataatatgatgatacaattaatcaaacaccctctgctctgcaactgtaacttccaatatgtaatctaaattgtatgactctttcaaatactatagactctaccanatctaacattctttatagttacataacacacaaactcagcatattctttagcgtagcgtgattcagcaaatagaatatatacgtgccaactccanaacgcttgtgcagtttgtacacctggattntgcctttgcaacttgcacttcctgatttccaggtcctatttcaccttcgttctttcttggcattccagttaaccctcggaatattctactat

SEQ ID NO: 12105 - DNA, 413 bp, Glycine max
  unsure at all n locations
agctntaggtgttggttcagtgggagggattatcacccgaggatacttcatgggaagactgggactagcttatatccacatatcaccttgatgacaaagtgcatttggaagacgtacggaatgctacgaaggaggaacctcaagcatgattaatggaaatgttacaacacctgtgtaccttaggaactacatctaatggcattgagagttgagctgacaatcttgtttgccttatctttttctgtctgccatntccattgtccaattaattctgttatgaatttgttattacaaaattacaaattctgctatttttaatattatatatatataggacccatgtaataagacacaataattgaaattacctagatatttccatgcctctcttatttaggaggtcatggtcctct

SEQ ID NO: 12106 - DNA, 386 bp, Glycine max
  unsure at all n locations
tatcctgatgagggtgttccatatgttctcaagactgtattaatacatntgctgcccaagtntcatgggcttgtaagtgaagatcctcataagcatcttaaggagtttcatattgtttgttccaccatgaaacaccatgatgtctgttccaccatgaaacaccatgatgtccaggaagatcactatcttttacaagctnttcctcattctctggagggagtggtgaaagatgggttgtactaccttgctcccatgtcctttaccagctgggatgaccttcagaaggtgttcttggagaaattcttccctgcatctatgaccattgccatcagaaaagacatttcaagcatcaagcaacttagtggagaaagcttgatgaatacttg

SEQ ID NO: 12107 - DNA, 421 bp, Glycine max
  unsure at all n locations
agcttatatcacataattgacaaactcttaataaactatgcttaagaccatcaacaagtaaaacattttctatggaggtagagggattcaaacctatttttccaactccaagaattntacctttgctgttgtctccataggtcacatgtttactatttttggaagaaatatgaataaactntgatgcatctcccatcatgtgttcagagcaaccgctatcaatgtaccaattatgcttcaaggagtctttcattcatataatcatatnttgattttggtacccanatnttcttgngttcttaaatgttagttatgactaacgatccttttggaacccataccatttttctaatgctactaccattctttctaatataacatattgatgcactataacctttcttaccacaatanaagcatg

SEQ ID NO: 12108 - DNA, 393 bp, Glycine max
  unsure at all n locations
agtatgtcgcggccacagngaaagagttcactaccataagcttgtagagtgtccatgttatgttcctagaattcagagactacgagacctccagataaaaggagattaatgagagcaaatttattgattgttatagctngcatttctattacaatgattgtccatttataggcaccaaatacttattctagttccttctacaagtcctacgatggaggctaacaataatggatcttggaaatatcctaatacaaagatatattccagcagacagaatatcctaattgcccatgatatgttccttttagtgctagactccttcttacctgctaacaattcttctgtgttgggttgcctcaacataacaattgattgatccatataaaacacctt

SEQ ID NO: 12109 - DNA, 382 bp, Glycine max
  unsure at all n locations
agctngcctcanagatgtccaggaaggacaaggtgttcgaaggaactagttccgctcctgagtatgacagtcaccgctttaggagcgccgtacaccagcagcgcttcgaggccatcaagggatggtcatttctccgggagcgacgcgtccagctcaaggacgacgagtatacggatttccaggaggagataggtcaccggtggtgggcctcactagttacccncatggccaagttcgatccagaaatagtccttgaattgtatgccaatgcttggccaacagaggagggcgtgcgtgacatgaggtcctgagtaaggcgtcagtggatcccatttgatgcagatgctatcggccagcttctgggatattcgttggtgctgga

SEQ ID NO: 12110 - DNA, 548 bp, Glycine max
  unsure at all n locations
ccatcaaagaatgatgcaatcctatctcgcaagggcattgantntacatatgtacacacatctctatattttctatgcatcaagggaagaccccggcgcgcatgctgttgtcactcgatactatatatcatggcgcgctacgaatatatcaaatgacctacatatgcatgttactcctcaccagatgtagcctgtgtctactggtaacattatcacgcacaaatgcatttcatctctttctagatcgttgatgatctcagaataactttgtcgagtccctttccaaagggctctggtcttgatacccctgggtttttgtttaaaatcgacgactgcggagttctccaacgacctgtacctcgtataccattttgcgcgagcaggatgtgttaacaaatcttgaatggtaagtgtcattcaactatagctaagcaacgcgtatgtatgaacgagtatgccctcatatgagagtgtacactgtgataattcacgccggcacgaagacaataccgttaatatactgntcgggctgaactctatatggagcg

SEQ ID NO: 12111 - DNA, 287 bp, Glycine max
  unsure at all n locations
agcttgaagganaactatatgcattgtttaacttgtttacccagctagccttgaatcataaatctgtacctgtcgcaagagtctgtggtttgtgctcctctgctgaccaccatacataccttngccctgtcatgcagcatcctggagcaattgagcagccctaatctcatgctgcatacatttactatagacctcctcaacctcagcaggcaaatcaaccacagcagaacatttatgacctcccatgcacatatacaaccctggatggatgaatcacccttatctca

SEQ ID NO: 12112 - DNA, 534 bp, Glycine max
  unsure at all n locations
agggcgtccggtggagacgnctganacctctcactacggannacctccccncncnncntnttttaantcatcgtgaacaaattaccacgttttatattcagcacgatgaggtgttggagggctttacgcgcacacttctcatatcatcattcagttatacggaacgactcacagcatacctgtacgaatcgatagaacagctccagtctaacagtacgctagagatggattacacgcgatgcgttggatgtgttgcaaacctgacaactctaacatagctaaatacttcgatgataagacatcatatgtttgattgtcgagagaatgcagggaagctatctggagtgtatctagtttggtagataagtattgtaatgtactgtattgagtaccgaatatagtaggagtgtataatcagtacgtggaagatatgctatagctataattatttacttcgtcgactcctggcatttctactaatatgtacggttaatgttaatggcgattaacatcatcgtagtaacgaattgttat

SEQ ID NO: 12113 - DNA, 428 bp, Glycine max
agcttgaaggtacgttatgatgagtgtaggagagggggaagggggaacaaaattttgatagagagaagatgaagaatgaagtatgaactttgaagactaatttctcatcaaagtttcaaaatgcacacacaattgttctttccctttttgtatttgataacatatggaaattgctctaataactctacccattttgcatgcctgttatctaacttgcattgccctctaatgtacttaagtgattcatgatcactatgaataacacactccttggaaacaaggtaatgttcctaagtttggaaggctctaactaaggcatacaactccttatcatatgtggagtggttgagagtggcatcatgaagtctctcactaaagtatgcaagagggtgcccaccttgcaacaacataggctcccacacctacac

SEQ ID NO: 12114 - DNA, 453 bp, Glycine max
  unsure at all n locations
ctcacggacttcggctggtttcctacttatgctctttagctntgtgagccaagttatcccttgcatcctagagggcaaccacttttgataaccgccgatgatgccattgctacttcccctaagctccttatctttcctttccactgtactccacgctttacggactctgtgaagtatttttgcattggcttcaatgaaacctcgcgcgacgaaaggcacgatgatctcctccgatgacgcacctctcatagggtagcctagttgtcttatggctagcatacgattataattaatacaaaccctcattcccatcaaggggacatttgggaatccttcacacgagcataacacttctgccgctcttctttccaccgagggaaccagctaatggacactcctaccatacctggtaagagttcttcctaattagctgttcccttgtcgacacacatg

SEQ ID NO: 12115 - DNA, 504 bp, Glycine max
  unsure at all n locations
tggtacnctgagacctgaaaccctcanatcgggaatacagcgatactctngatcctctgagtcatctgcacgcatgcaacttttttancttttataaaagagaaggtcagaactatcacgatgactataaatgccttgaaggggatctaagtgctctctaattattacatattatgatttggtggcatgctcaccactgattgtatcttttgaaactcaccataactaataaagcaaaatggatcccttatacacccgatgcttaatcagacggatacaaatacggagtgcatgaacagatgaaggcctacctttcagctgtattagatcatatggattctattattatagccatgccacatgttcgaaatcactaggatacctgctaaccagccgctccattactgctaggacacgatattatgcttcaccccgatgacttaagcttgactaaacgcgaaggtttaatgaaggatagctccatcctaccgtacgttgactccc

SEQ ID NO: 12116 - DNA, 537 bp, Glycine max
  unsure at all n locations
cgcgacgtccttatgtactcttggatngtcctcgannatcgnacacngcgactnagctcctactggttnctcctacctaaacctcagactttcgaactcactttaccgcaccaatgacgggccgtagagccaatcattctgcttttactgctctttacttccaccgatcacaatgcagaataacttcatctagtggcacgagcatccaataagataaagggatcattcttcaccgtaccgctgctgtccatcgacgtcacagtgcatgcggagcacccaccacacctattcctgcctctttggcatgtaccagagtagtaacactggtgatgtggacgataaccgcttcggctcattcctagagttctttcataattaattaagacctgagttctagaccgtaagtcctgatcaataaaacgtctgtggacagcattgttgcgacttatggctggctggtacatgcattacgtctgcacacatcctgccttgtaaagccttcactggaaatacaatccagagcgtcactgggcggcg

SEQ ID NO: 12117 - DNA, 429 bp, Glycine max
agcttgttcttgattttttctaagttctttaacaagcttataacaatatacttgtccttcatttaactgtctttgggcttggcggccacgatcaacagagtactttcgacacctactatatgttgatttgaccaacgctgttatcggtatgttacgacaatccttcaataccttatttatacattctgagaggttcgttatcatgtggccatatcgacgtacttctctatcataagccatggtccatatttcctttgaaatgcgatcaatccatgttgctatggctgcgactcagctgacgaaattcttctaaattctgatcaacaacatgcttgctaggagtgtagcctgcatgtaattacttagcaacaataatctgaagtatacatgaaacttaacataacatgaccatgatacatgatatcttac

SEQ ID NO: 12118 - DNA, 288 bp, Glycine max
  unsure at all n locations
ataatctagagacanagaaggtgattattagcagatacgtggcgtttaacgagataggcatgaaagattggtcttcagagtctcaatatgagtcgatggcgatcgctgacaaccatgaagaagattatgaaaggctactagatccaacacctgatgagccataatcatccaggaggccatagaggaatcctcaactctcagctagattgcaagattatgtcatgtttaatgaccaagatacatctaatgaagagagtatcaatattactttatttgcagactgtgatc

SEQ ID NO: 12119 - DNA, 398 bp, Glycine max
gctattttattatttcagcttctatatggactccttcacgctcccggttataggggcccatgccacaactctattagtacattattagagtaacttatatagatccacaataatttaagtggataatttcgaaagcccattgcagttgttcaatgggttgagttagagttccgctatatacattgccagaacgtaaatacaagtaatgcgattggaaacttattccaacataattccatgttaaatctctcttcttgtctcgaaatactaatatctaactaaactatagaattactctacggatattgcagtcattatttcctctaaatatatttacactattactatattccaaaaacatataaattagaagagaaactcataataaacctaacccc

SEQ ID NO: 12120 - DNA, 582 bp, Glycine max
  unsure at all n locations
aatgcaggtcgcncnnttgattaccgctgttaganacccaatgcatntatgtgacactatagcctactcaagctggtagagtnttccaacctcacacaaggaanattcttataagtagaggtctgtaattcatggagaatgagagatggagctagaatgatactgagaanatgtcaatagatggccctttgcaagatcaagatgagctaattgatgatgtacccatgataggcactacattgccctaaaatatttatgaaagatgcaatgcagcagttctagaacctacatgatattgggatgcaaaggaggatcctaaatgaagggatacaatgcaagataagcttgccataattgataaatatcaaacttgtgaactcgttgaaagacctgaacacacaacagtcataagtgtgaagtggatgtttagaaccaaactgaatgcagatggctcaatctacaaacacaaagcatggttagtattnacgcgtatgctcaaattctcggagatatttctctgatactttgtcccgtggcaggcggataccatttgatattgtagtatccaacacataaggatcg

SEQ ID NO: 12121 - DNA, 308 bp, Glycine max
gctttcattattctatgtaccgtggggccacatggttcaagtattttatttcgttcaggacttttatccccttttgacgtgcttaaccattttattaagtatttctcctaacctaaaatacataaattccaccgatcgttcgaattgattattcgaaactgtggtataatgaattccgaccgtcggtcggccgtaaccacgtggagatctaaagaggtaaatataattaatctctaaaacgtctttatataaaaagcggaaataatcggacgtttctcttggattctcattctattgactgctataac

SEQ ID NO: 12122 - DNA, 146 bp, Glycine max
  unsure at all n locations
agctttttctgcttcttattagagaggganggtatgacttgtgttgcaatgccgcatggcaaaaaaccaactggaatgggaatgtgcaccgactacactaatctgacagggctacccctagacgtgaccctctcccagcgtaatac

SEQ ID NO: 12123 - DNA, 200 bp, Glycine max
ctgctgctgctccctgatcgccccgcaattttatatttttcgccggggggtatctcccatacgagattcgatttctggaactcattaggagtctttagatcgtatacggaaaaatgttatatgtattgtacgtatgtcttataacttttagtgtttataacctaatctggaaacttttttgaactgaattttgacgtatg

SEQ ID NO: 12124 - DNA, 396 bp, Glycine max
  unsure at all n locations
agcttgtatgagtttattgcatcanggaacaatttcactttacaagtgggtcctaattggattcctaattntcaacttacctatttggatgtgacatcatggcagataggtcccaactttccatcgtggattcaatcacaaaacaaacttcaatatattggactgtctaacacggagatattagattctattcccacttggttctgggaaccacactctcacgtattgcatttaaacctctctcataatcatatccatggtgagcttgtgactacattacacaatccaatatctatccgaactgttgatctaagcacanatcacttatgtggtaaattaccctatctcttcaatgatgtgtatgagttagacctctcaaccaattcattctctgaa

SEQ ID NO: 12125 - DNA, 319 bp, Glycine max
  unsure at all n locations
acatacatctcttgagtctttttctctgtcaccacactntcacctgctaaccttctcttcacttactctgactcagttacctttcccagtattctatgatgttccattcttctctcacgatcatcctctctcttatgcacagcatcagaaaccacctttctcacaccttcttcagtaacttccactgagggcagttccttcttgtgcagagtctctgatatcacttcagagagagccctgtcttcatcaccaggcctcagttcgtccaccaaatagtccttcacagaaacccgcttgtcctgttccacacccatactac

SEQ ID NO: 12126 - DNA, 318 bp, Glycine max
  unsure at all n locations
agcttgtatataatgttactcgcaaacttagcanagctaagattcactcaatttgctcgagtatccttcatctagtanaactgacagcgttacaacatttgttcgttttgtctctgattattctcttatgattcgacgttgttaacacacacatctttaagctttatatagactttagagctctcatctgttgagagatcccaactaaccattggctaatagctttgtcgcttgacataaggccactattgtgcagagagagaatgtgaagaccacaaacactttctgcagcatatcttcaaaagagacaatttgtca

SEQ ID NO: 12127 - DNA, 256 bp, Glycine max
atgagaaggaagaaattcggagcccatcctcgcctcccacaagtatataacatctatttatacttgctcaaactggatgtacacctacaattccaccgaaacgaaatatgactcctcgacacccaattttaccctacacatggctcttagctcactatggtgatttgcatttctctctggcacagaccaaggttctcataaattctaaatgacattacagactacggtgaactcacattaacctccaaataccact

SEQ ID NO: 12128 - DNA, 461 bp, Glycine max
  unsure at all n locations
agcttcccgacaaacacttaaaggagaagaagattaataggaagaaaaaagttaanattaacttacgaaccttacaattattagaatctttctcatctaactactccaaaagttgactgcataacgtgattttatcttagtggagaagttntatttattttacctccctatttcttctcctataggtgattgtagaatgtacagaagcttatacaaattgaactattactntgcttatccaataagattagatntatatacttgctagatgcatagtctattaaaaagtaatattacacgaagttttggattattgaatntagtctcgtagcagtttattatttattataaattgaanatcctttntgaacactntgtttaatcgggttgactagttattgactaaccattacttgacctattaatgttagtatacatctcatatcatctcactggatata

SEQ ID NO: 12129 - DNA, 431 bp, Glycine max
  unsure at all n locations
tccaccccnatatctcaagttttaggtaagaattcaagaccctttggaaggtacactgaattaattctctcagagtctccattgtgagatntgaaagtgagtaatctcaggtttggcatctttctgaatactttggagcttaaatttatatgtgtaatttgagtcatatctaaccatattccttcaactgcagcagttccctgacaaataataattagaattaatgtttacatcttttgtaataatttggcatttttataccaagagtttaggaatgcaagtcaaagtatcattaacatactctattatttgtcaatacatcatagatntccacaggatcccacaatctactgcgttgccctgganatntaacagattcttcacgaacaacttctctacccatttcttgtatcagatcgtgcatatctatg

SEQ ID NO: 12130 - DNA, 410 bp, Glycine max
  unsure at all n locations
agcttattacactcatctcttctctattaaaatgtattactttgacacctccttagtcaatactgttaacttagcgtcttaatattagtgaaagataaaanaatatccttaaaaaatcccaaatttttaattttcaaataattaaaaatatacaaaacacctctcctccgcactcacccccaccgactccacctttgagtggcagaaattcgtagctatatagtttgagatcttgagcaacttgaagaagaatcaagggattttgcaaatagaatacttgacgtaagaaattcagatatcaaattcttaatctagttatcagaaaagcattattgtttttaatcaagacaccatattcattataactngacaaacactacatattaatagaaagggccaagacaatgaac

SEQ ID NO: 12131 - DNA, 414 bp, Glycine max
  unsure at all n locations
tcgtcgtctgtaatgctgactcgagagacaaggacaactccactctaaagcatttacgccatcagactcaatgcttgaggggttgtacatcatccaanatgggaatcccaataataccgactcaagagacaaggacaactcatgcttaagcatttatgccattatgcttaatgcttgaggggttatacaccgtccaagatgaatatcctagtaataatgactcacgagacaaggaagactcacccttaagcattctangcacaaggataaatgcttgatgggttgtacaccgtccgagatgagtattctggagatattgcctctagtgaggagatgacttagccctaaacatttatgcgacaaggctgaatgcttgaggggtatacgccatttaagatgaatatcccagaaata

SEQ ID NO: 12132 - DNA, 443 bp, Glycine max
  unsure at all n locations
agcttatgcgcatatnttcttacaaacgttctcttgcacaagacattctanttaaccgaaaaaatgcacccatatacaatcaaggcagcttcgttacctagattatttacacgtacttccaaggtgtatttgttacttacatcacacacatctccttggctaaattcacatacatgcatactcaaagcattttggggtaccaaaaattgcacatgtgcacatcttggtatttctaatacctatacatacacaaacttcatgatgaatcttgactatctacacaataaggtgctacatttcatgctcttttcaagtttttgctacctaaagccgcatgcaaattcaagtatatcttcctttgctgactaaaattgtattcaaattaaaaggtatacattttttggaatgtatcttcttacataacatgcgacatatttatgtat

SEQ ID NO: 12133 - DNA, 377 bp, Glycine max
tgtttgagaaatgaaattgagaatgacgtacattgggagcaaaccctgacctgccacaagtctataacatcaatttaaacttgctcaaactggatctacacctaaaatttcaccgaatcagaatttgactcctcaacacccacatttaccctagaaaaggctctttggtcactgtgggcatttggttctctctattgcacaatccaagctttctataagtactaaatgacatttcaaactaaggttaactcactttaaccttcaaataccactaaattcagatttggcctttccactcttcaaaacataatctttttacactcataacagcatattattactatctaacactagggtaactctacccttcatctcta

SEQ ID NO: 12134 - DNA, 407 bp, Glycine max
  unsure at all n locations
agctntgagccaattttattgataatatacgtttactcggatgtccaattgagtcccgtaatatatcgacacgctcgaaattgaatgttgaagctctgagccaattcatacaacaataactntttactcggatgtccgattgagtgacttaatatatcgggacgctcgaaattgaatgttgaacctctgagcaaattcacacgacaataactttntagtcggatgtctgattgagttccgtcatatatcgagacgctcgaaattgaattttgaacctctgagccaattcaaacgacaataactntttactcggatgtctgattgagtcccgtaatatattgagacgctcganatngaatgttgaagctctgagccaattcaaacgacaataactntttactcggatg

SEQ ID NO: 12135 - DNA, 371 bp, Glycine max
  unsure at all n locations
gctaacattcaactntgtgcgtctcgatatattacgggactcaatcagacttccgagtaaaaagttattgtcgtatgaattggcttaaagcttaaacattcaactgtgagcgtctcgatatattacgggactcaatcatacatccgagtgacaagttattgccgtttgaattggctcagaggttcaaaattcaatttcgagcgtctcgatatattacgggactcaatcagacatccgagtaaaaaagtattgtcgcttgaattggctcagagggtcaacattcaattttgagcgtctcaatatattatgggactcaatctgacatccgagtaagaagttattgtccgctaaattggctcatacgttcaaca

SEQ ID NO: 12136 - DNA, 462 bp, Glycine max
  unsure at all n locations
agcttgcanatctttttattgaactgttattcaaaaccaagaggtgtgtccatgtagacttcctcctctaagtccccatttaaaaaggcattctttacgtcaagttgttgtaatcgtcaatctaaatttgcagccaatgataagaggactctaatggtgttaagttttgcaacaggagcaaaagtttctgagtaatcaataccataggtttgggtgaagcctttggcaactagcctggccttgtacctctcaacaaacccatttgcgttatacttgatagtaaacacccatttgcatcccacggttgttnttcctcttggtaggtccaccactttccaagtctgattnttttctagagctctcatctcctccatgacagcttccttccacttaagaacccttagagcttcctgtatatctcttggtatttctatanttgtcagttcacaagtaaaagctcta

SEQ ID NO: 12137 - DNA, 460 bp, Glycine max
  unsure at all n locations
acatattgagtacatgccatccatatattttgttgattaacattaccaattntgactcccanatttaatgatggaagcttgcttgtggagcttctatggaggctggatctttgagcttcaatggggtcctttaatggtgattntccactatggagatgcagcggaagacaaagganaagaggtgagaggaggtgccatccttangattgcatcatcaaattcctattttgactgctagaaccagaaaagatacattnttctccttatctcttatgttgcttcgtattaaattgcaagatgtttctatatattggtcctaattnttaatactcgctcatgcatgttgattattttgagaacattangttntttataatntatgaatgatccttattgaaggactgctgtctgttagaggtcatatgtaaatcactgtcctagttntataatttataatact

SEQ ID NO: 12138 - DNA, 268 bp, Glycine max
aatatacctcaaactacatttattgattaacctttaatattgttaaataccttattatataattatattttttacgtaatgtttatatatataatattttcatttatatttcaatgcaataagtataaatattaattaccaatgtaggcttcaatatatttattataaaatttaattccacttattaataaaaataaactatatgagtatttgggctgaatctgattctttaaatgaacgaagctatttacatattaagcttcaaagc

SEQ ID NO: 12139 - DNA, 536 bp, Glycine max
  unsure at all n locations
cttgtcgcatcttgaagccacatctattangccgcactatagantactcaagctcggtagatgtangntcaactagagactcacaagatgtgtcgtgaaatatttagattacttgaacaatggctgcaccatttgtggtgcaccatgaggtttacactaacaactccatattataacacctaatgaacaatcatttgcttcgatctctcttgtattatcagagaacatatctggtatatctaatattgtatattattcatctctatgccaaggaccgcatgcgatttctaaccaagatttgtcatgagagatgatatatcaatatctcgctattgtacacattctatcaatatttattatactcttcgtctccctttctcgaatatcacattaactatcatatatatttgccttttctctcgttcttaagtgtagatacatctgaggatcaatataattatccgacctttattttgggtaacgctcttgcctcagtcatctttatcttatatgagttgttatattacaactcaact

SEQ ID NO: 12140 - DNA, 384 bp, Glycine max
  unsure at all n locations
agcttactaatctggtttaaatcctttcccataaataaattaaattcaaatctagataagataagataagatctagattaaataatatctagatgagaaattcaaatctagataagataagatcagatctagattaaataatatctagatgagaaattcaaatctagataagataagataagatctagattaagtaatatctagatgagaaattcacatctagataagataagatctagattaaataatgtctagatgagatcaaatctaaataatatctagatgagataaagatcagataagatctaattntgtagaataaaatagtctgccctcttcaagtccaagcccaattctggattcatacccatgcccgattctgga

SEQ ID NO: 12141 - DNA, 320 bp, Glycine max
  unsure at all n locations
atgaagtgttatcaagcattcggaccaccttcacctctaatatggatgcggtagcacaatgtgtctttgcactcaanaattgcttccccaccagttctacgacattggtgaactcctaccatacaccacatgacaaaaacccaaaacacttcctagaattggatgtctcacattntccagtgatgacccttanggatggatcttcaagatattccagttctttgagtatcacgttacacctaacgaagaatgaattaatgtggagtctttctacctcaatggagctgcattggtttagtatcaatggatgtataaaaatg

SEQ ID NO: 12142 - DNA, 407 bp, Glycine max
  unsure at all n locations
agctttttattatcagtagatgaagatgaatctgtggccacctcatggactcctctaagaacaatatcatcatttcttgcactgaatttgtgggagccatcttctcaatcaaatttctagcctcaacacggtcatatcaccaaaagcttcaccattggcagcgtcagtcatactcctctccatgttgctaagtccctcatagaaatattgaagaaggagttgctcagaaatctggtggtgaggacaacttgcacacaatttcttgaatctttcccagtacttatacaagctntctccactaagttgcctgatgacctaaatgtcttttctgatggtagtggtcctagatgcagggaagaatntctccaagaacaccctcttaaggttatccagctgantatggacct

SEQ ID NO: 12143 - DNA, 418 bp, Glycine max
  unsure at all n locations
cgcacatcgttcacgtctatgatatccaatcgacaaggtttgaagtagaggagaccttcaatcctataacgcaacgtggcggacaaaagtgggctgttaacttgaatggccattattgtcaatgcgaanagtattttgcgcttcactatccatgttcacacattattgcagcttgtggttacgtgagtatgaactactaccaatatatatatatatatatatgttgtttacacaaatgagcacatcttgaaagcttactccgcacaatggtggcatcttgngaatgaagcggcaattcctccttctgatggcgcatggacacttatccccgatccaactacaattcatgcganaggttggccaaaatcaacaaggataaggaatgagatggattggctcgaaccatctgagcaccgac

SEQ ID NO: 12144 - DNA, 310 bp, Glycine max
agcttatgtattactttatccatatcacatgtacaaaagggtaacacaataatcacgcacaggtgctgggtgtaccagcaactctaccagtgcatgtagcacattcgcttgattgtttgcacaaaataaatggaagtccactaagtcagtgcaatgatttttgtccacacacacacaacatatcaaattattgggctgcacctcgtactatatctaaagatgatgattgcttgcattcttacataaccaaaagtttgaacaaatttgtaataagcagcaacgtattgtagctatcaccgaggatgagatg

SEQ ID NO: 12145 - DNA, 386 bp, Glycine max
catatttgatcatcctactaagacgactgagagaactggtgcacataaagacggtgacgatgacggagacacccatgctgtgactgccattcctgtaccgacaagaatcccaccaaccgcacaatatctctactcaatcaataacaaactgtctccttacccaccacccagttatccacataagccatccctatatctaccacaaagtcagtctaccgcacttccaatgacgaacaccacctttagcacaaaccatatacaccaaccaagaagtgaattgtgcagcgagaaagcctgtagaattaccccaattcagtgtcctatgctacttgctccatattacttgatattcaaggagccataccctatcaacgtcatcacctcca

SEQ ID NO: 12146 - DNA, 189 bp, Glycine max
ctgctactgaccctgaacggcctcaactttcatatttaagcagaagatgacatacgtcagtgacatacctttgtaaccctcagatggatgatccctgtaacacacattaatctacaaggatctgtattacagctcaattctgcatgtatagattttggtctactcatttttgtcccaaagtcatttacc

SEQ ID NO: 12147 - DNA, 378 bp, Glycine max
  unsure at all n locations
agcttccgtaaaatttatatggctataactgttgactcggatgtccgattacaaccataatgatgcaatcctacccccaaagcttattggatagaagactccaagaggattgggctagagcggctaaaaaaggccctatggttctcatgaatcttaaggtagatttctgagcccatgggccaaggctgggtccactcttctttgtaaatattagaataggttttccttcttttgngccttgtattttgatgcaatcctaccccccaatcttattggatagaagactccaagaggattgggctagagcgactaaagaaggccctanggttctcatgaacctcatggtagaatttttagcccatggtgatgcaatcctac

SEQ ID NO: 12148 - DNA, 438 bp, Glycine max
  unsure at all n locations
atctcttttatcttagtgagagtgattctcctacattcttgagtgattcaagaacaccttggctgtatcaaaggactntcacaacctttgtgtgttgcccttgctggaaagagtgaatctttccttcctttcatcatcacccttgttctttcaaaccacaattccagaaaatccacctctgcccagaattatctcgtggccataactcccattttacgcactcaaagtaagtgattcttgagcctaaattgaatntcagaacgagacctttcacctcgttntggaatcacctcatttggagccctgtagcttcagttattgccatgtctatatttctgtccagccaccacttaacctacgttgtaccatcccattcatgcattgtatgccaagaaccaccttattaagacccacgaaattagccaccttattttccat

SEQ ID NO: 12149 - DNA, 363 bp, Glycine max
tctagcttgtatagttccgcaatttatgggtattgtgtagtgattcttgaacataaatcttattttatggttaacgctatctctagaacatttccattggatttaatgatgaaatctgtgcatttttatgggaaaaaatgctatgttttgaattgcaaattgtagcacttgggctaagcttaacagttgggctaagcgcatatccaccgctaagagtagctttagtgcgcttagcgcataggagaatctagtagagcatcagcatcaaagtcacgcgctaagcgcgagatcagtgcactaagcacagcaagtgccttcagtcaggctaagctcgagactagcgcctagcccaattcacttact

SEQ ID NO: 12150 - DNA, 214 bp, Glycine max
  unsure at all n locations
tctatactntgtacaagaatgaagctctgataccactcgttatccaagttgtcctcagatatcttaagaaaaggggnggggggtgaattaatatattccaaactgtttcccctaattaaaatatctatatcactctttactcaaactataaattcccttaatgaccatcttcttatatattaattcaaacaaagcaacttgaatatgaatataa

SEQ ID NO: 12151 - DNA, 446 bp, Glycine max
agcttggaaggtagtcatacttcacataatatatgtatgtgtgtttaggtagtgaaaatgccttagatatgcatgtatgtaaacaaaaaaatacttcacaaaatatatatatatgtatgtttaggtagaaagataccttggatatgcatgtatatagcaaaaataccttacaaaacatatataggtatgtttaggtagcaagataccttggatatgcgtgtatatagcaaaaatacctcacacaaatatacacatgtttatgtagcaaaatacctcattgaaaataaacatatgaacaaacaagaaaagagataaacaaatgataaataaggatgagaaaaataagtctgttagctcgaaaaccgatatgctgttgacaagagatgacttccaactcttctttgaaaaatcactgatcataactcagttttataaatgtgtataca

SEQ ID NO: 12152 - DNA, 345 bp, Glycine max
  unsure at all n locations
gagcttgagatgagttcgtgagtgaatgtgaggttctagaggttgaggagacatccttacgcttgtatttattcaatccttcattnttctcttctctttggtgaaaggaagcttcccagttatggagatctaaatctgctggtggttcttccttgtaggtacttgatgtaaatacctgtatatctatttaatgatgctntgtgtgtcactgggctatcagaacttcattctaccatgcatttgccttgatcacgtagatgtatgtgtcattaggatcattcaacaatggaaattggtctgattcttagaacatgataggacggggctagnttatcgtattatcac

SEQ ID NO: 12153 - DNA, 462 bp, Glycine max
  unsure at all n locations
agcttgaagctcaatgtaaagcttgaagatgttntgaagaagttttggcttttacatgcctaactctcttgagtgatacttgtattggttgttatcttggttgttgcatcttagtacatttgatatttgtattacattatgcatcatcatggttagtgtgaagaaaagtttcaaagttagaaattttttttcaaaggcaaaaattctctgctttaatcaattacagggtcatcgtaatcaattacaacaagctatttggagcttgtagagttgagtctcgatcagtttaattgattacaactatctcataatcgattacactgttgtttgggacaatgactgatttattcaggagtctctactttaatcgattaccaagtggattaatcaattacttctttctcgtttagttgtttagaagtgaacaagaacactttaatcgattacttagagcatctaatc

SEQ ID NO: 12154 - DNA, 422 bp, Glycine max
  unsure at all n locations
ccttctggaggaatcttctggaaggcccatgtgggcctgattgctatttacacccactttntactaaatgcacccncttntctatttatttgtaattctttttgcgtaacgttacgaaactttacgaatttcgtaacgatacttattttccttccgtaaggttacgaatccttacggattatgtatttactccttctttacctttcgaagaagtcacggaaacttacggattgcacaaaaacacctcttttgacttccgccacattgtagaatttcacggatcgcgcaagcctgcttcctttagatntctgagacgtctcgggacttcatttgtgtaacaaaggacgccaagtatctcaaagcggctaaccaaagatcgcatgtcatcaagtaataatccccggacaaaataaggtatgaca

SEQ ID NO: 12155 - DNA, 420 bp, Glycine max
  unsure at all n locations
agctntagaacctgatttaagacgttcagaaactgctggtaatcgattacacagtgcaaattatgaattcaaattgtaatagctgacgtaaatcagattttgccactggtaatcgattaccatagagtaaatttgctgaagaaagactttttaacttaaatttcttggccaaactttgtgctacttcaattggaattcccttactatataatataccctctctaagactctagagactgtcttgatcatccatcatgaatatctctaatgtctttgtcttgaatatagctttgagacgcatgtgatactatggcatcactcaaacattcagcttgatcctttttctacaactacttgtgcttaatttccacttattccccattgctcctctatctcttcgggattaactacttagtccat

SEQ ID NO: 12156 - DNA, 336 bp, Glycine max
ctcagggtccacttatatcccatttctaccaactacaaagcctaagaacactatattatctacacagaacgtgcacttctctatatttacatagagggtagttttcctaaggactgaaagaactttcctgagatgtcctacgtgatcatctatgctcctactgtactccaacatatcgtctctataaacaactacaaatctacctatgaaatcccttaagacatgatgcataagcctcatacaggtgcttggtgcattagtgagcccaataggcatcactagccattcatacgaatcacacttggtcttgaaagcgagattgcactcatcactctt

SEQ ID NO: 12157 - DNA, 381 bp, Glycine max
  unsure at all n locations
agcttgttgttctccattgcactgatgaccatgacaggtacgtttcatttcgtctacctatgttgttctattgaatagctaggtctgtttctggaacctttggttaacctaaggaccttntttggtttctggtgcaaggattagggaactcgtcgtgacctgagacccattgtcactgccattgaatggccgagtctcgatgccattgtcagtgatgggttcgaggcatgcttcatgtcttcattgtaactttatgctatcgcgtacgtgctctttgtgctcacttctctctgaagcatgtntatgttcccattgtaattngttcttatgaaaactagatggttattgttagttagattggtaattagttactactactac

SEQ ID NO: 12158 - DNA, 344 bp, Glycine max
tctagcaagaagcttctgacagtttatgactatgataatgaggcagtggaagcaatgattagttgctcagagaagagaggagccaaggcacatagcagcacctgcaaaaccaaaagaaggttctggaagtgtggaagcaaaaggaccagttgagagacttcaaagtaagaaagcacaagatagtggtgagaatggtgggtttaacattgagtgcaggtgtttggatcaagtggactctttgggattgataatgatcaccaatagaacgaggtaccttataaattggctggtgaactccatgatgaagctgaagcaccctaacgcagaggggttcccctagtcaa

SEQ ID NO: 12159 - DNA, 552 bp, Glycine max
  unsure at all n locations
aaaacagaagagggannnaagggtgagaccttgaatacactggactatcggcgaannccgcgagcctctgagacactctgaggcatgctggcgcgtgcagcatgttatgaatctgttcatcttcaagcccttggcgagaatatgcgcataatgcgttacagtactgcattactatccgtctattggctgactgatcacattatcccgattaatgtgagatattgctgtgggcgctctgatttacgagactattgaactatggccaatctcttcctgcatttgctgcccacatacagtcctacctgctctctaatttctaccttctactctatccgcaaggagtctagccataccgcttggcatgcagaataccacgctcgcatgtactcaacctcgcatgaatgaaatgctactacatgttgcatccttgaacaccagcttattggtgcacctaagaacttgatgagaatcccgtagtgcttccgtttccaccttgactacacaccagtccgagtctgatatacccatccacatacgtgatgattatgatcg

SEQ ID NO: 12160 - DNA, 414 bp, Glycine max
  unsure at all n locations
tctcgcanaacagtgggatcctgtctggtcttcctatgattctacctagtgagagtgacctgagtgaccagtgtgtagtttgttctcctacgcgtctgatgaggtttttcactacatggtaccatattgcatataagattaagtcttaatatatctgttgcataacgtttgtgtaatgatcattgtgacttgctacgtgatgatgggtaatgagttgtgagtgtgatatgttgtgttgtacgtgttgttctgaacacatgattaatgtgaaagtatgaaatggtgatttctgattacattcttgggacaagtgatgttgcgcaatgagtgataaactgatacggattgtactaagtagagcttgctatacttatatatgtgtgtgtgtgtgtgtgtacttgcttattcctacct

SEQ ID NO: 12161 - DNA, 397 bp, Glycine max
  unsure at all n locations
gaagagggcattctattgattangaaacaagcagtaagcaccgcgtctccccaatgatgtgtacgaacattcgaatttagcattatggaacgagcagtttcaagaagatgtcgattcttcctttctgctataccatttttgtgtggagtgtgtggacatgtggactgatgtataatacctttggaagacaaaaaagaagaaagatcatgcgagaagtactctttagcattatcacttctgaaaattntaattggtcatccaaaatgattctcaatctcattgagaatgacacgaatataggcaaaagttcagatctgtctttcattagataaacccaagtacatctggagaattcatcaataaaggttacgaaatatcgaataccaatagatgtgac

SEQ ID NO: 12162 - DNA, 428 bp, Glycine max
  unsure at all n locations
atttacccgatttcttctttctattgttgaccaatttgatatttctggttgtgtttgtgttttcaatcgtattctgcattgagcttcatttatttctagcaaaactgcatcataattctggtatgtctaactttttttttaatcttttgtcccttattgaatgttcttaaggaccaagtggacaatttattcaaggaattgaaagagatccatgacaaattcttagcactgatgatttccttgtgtgcagcaaaaaacagtgacacgggaaattctttgntcgcaaaacaacacaagctgatgatgtctttggtttggcccttgtctttactcttcttggtaccttgngacatacttctaccataataccggacacaaccttttttctatctacatgtctatgctatgtggaagtgtgttcaatctgc

SEQ ID NO: 12163 - DNA, 450 bp, Glycine max
  unsure at all n locations
agcttataataatgatatagcctatatcatttccaaatatgcatgcgaattaggaagcatcaacaagaatcaagccaaggctattgtgcaagcgatcaatggggcaaaacacaccaaatgattatgatgatggatgactcgaattctcacaaaggtaaacttatcactttcagattgagctttcaaaactatcatgacatgtgaaggaaacacatagatttccaatcacataatgtccagagacttttatgttcagaacaattacccattacttgaacatatactataattcaaagacaaacatgcaaatttaacacaaaaaactaacaaaattagactagaacccgacanaactaactaaattaaactaatttaacacaactaacaaaaccaaaaccaaagaacacactccccgctactaatacttaaacaacacattgtcctcaacgt

SEQ ID NO: 12164 - DNA, 276 bp, Glycine max
cttgataattctttgatagcctttgaccttgttcccttccttgtttgaactactacagccttaatgaaaaccatatttccatatcttaagaatttggagcttggaattgttgggaaaagtgtgggggttttgttcttggacaacttgtttgtggctatcttatgatgatttgggcatcttgtgacattgatattggtaatgtgacatgctgagaatgtgttctcaagctaagagtaaaaaaaaaaaatcaaaaaaaaaattcaaaaaaatcgaaaa

SEQ ID NO: 12165 - DNA, 397 bp, Glycine max
  unsure at all n locations
agctcttgtggtctctctcaccaccaccctctttcaccttatcagcaatagaaacattagtttgagaagattgtgtttccactgtgacatgaacatgaacatcctttggtgttgttgcttcatcatccatttctgattgtggtttctcattgccttgcactggaaattgttgctgttgatggtgatggtggctccttgttcttcttgacatggtgatgtcatagtgacgttctgctgcaagagattgaacctccattaatcttgctatctgggaaatttactatgatgataatctctaacangtctctcttcacttaattttgtgtggtganatctctcaaagggaagaagccatcatggctatagctgcacctcttagacagcaagatcactcttg

SEQ ID NO: 12166 - DNA, 411 bp, Glycine max
  unsure at all n locations
ctatcaagccttatctcgttattgtttgctganactctgagggatgtacttcattgaggctgaagcaatgatctttgaccagtgaccaccaaagagaatgagctaatacctcacctacaatctcgttagagtatgaatcagattttgaagttgcctttattttttataagtttgttgggcaggtccttttttttatccataagaattaaactgggtaccgagagatctataatactcacacaccttactcaactaactaaagtaaatcccgttagtggcatgtcatggtttaatatcttttagaatgggtaaacttgtgcatgtagctagtccctttatttatacgagggctaaactgttatacttgcttaagtttgagattcaagagtgagattntagaatcaacatgat

SEQ ID NO: 12167 - DNA, 444 bp, Glycine max
  unsure at all n locations
agctngaagagggtcttaaagttctgacaccaagtgttgatggtattgacacaactgtcagccatattggaggtcagttctttatttagaggagaagtgatcagttttttaattctgaggctgtagcttgtgcttgcaataacacctcttcaactacagttcttattcctcacagggaaagggaacacaatctctgtatcattgctcagttgttttgtttattttgggccataatcttgaataaattatataatgaactggcttgtgaatgtgtcagctactgggtagtgtatattaaatatcagtgaaaagctttctgaacaatgcggtcatttatcgctgattccagctnttgggttggtactaaacacgatgaattgtcttatgctaggatagtgttcatttttaatannaccatatattagtatagtcagactgattcta

SEQ ID NO: 12168 - DNA, 253 bp, Glycine max
agcctgctgaagacatcgtagagctctctgataattatagatacccatgaaccagagatcgaaatcatccacagtaactatttctatgtattattgcgaaggcttctccacattctgactttagacgacagactatatctttgtaaggggaactgacacctgaactgacatatacattgcactaacatatcagcagaagtgtgaagaaagataacgagactgctcaaaacatttgatagactaacactataaa

SEQ ID NO: 12169 - DNA, 125 bp, Glycine max
agctgatacttatgttgtgtggcggacttacttcgctgtaatgattgccacaccagctttgtgcactgttctgtcttcccgtgacgcttcctttcatgatccgctgagtgggcttatagcctaaa

SEQ ID NO: 12170 - DNA, 524 bp, Glycine max
  unsure at all n locations
agatggtctcnncgncgttgaaaatcggtttagcngatagnanancccntcncnnaatagnccacgcgccgcctncannanagcannggaacactattctctatnnactatctgtatttatancngcgagaggagtatagagtacatggtgtggtttctcgaaggctccatcccctacctaacacattacatatacaatatatagctattaactctaatttacgtaatttctaagatagatttatattcgtcgacaacatgtactgtgagcaacattttataagtagtaattatttcgagtagcatattggtacatttcaatctatgatgatataagtatacggagtaatacggactgtcattatatcgcatgtggttcctcgttcaaagattattgtgataggtaccgttaagagtaatatatttatctaagtctaattgtgcttgtctgacgcgggtaataatcagctcttataaaatattctctaaatcttgctggcatgtgtgttcgtagattacattta

SEQ ID NO: 12171 - DNA, 409 bp, Glycine max
  unsure at all n locations
agcttgatgagtntatgtactgcccgaggttcacaaaattaacgtggcaagtgatgcggcactagaatatgcacgtcaaccctacctgtcagctctagcataggaatgaggatgtaacacccttagcaaccaggccattagaccgacaggttattaacaaatatctatatatttaaatcttaatgataatgttatgattcgttcatcaagttacaggtacttatttatctataagcgatgaattatctactagctattatctataagatatgatgtatctactagctattatctactaggaattatctacaagaagtgtacaccactgtaatagctcctacagtcaaggatctgaagctcttatcccacgctataaataccagctcctgcattaatattggttccatac

SEQ ID NO: 12172 - DNA, 466 bp, Glycine max
  unsure at all n locations
agtggagcaatccatatacccacccctagntattgtgaatcgtttttcttaaccgccatacctgtggataatgactagtatattcattcactcatgggtcgaggtccgaagagactttatgaaatggacttaatatctaagtgaaaggtcactttaagactctaagtttaagaagtatacatcttaccatataatcgagaaggtacacnaacccgctaacatgaagccaaaaagacacacgaagctttaaaggataatgtgantggcatatagcttatactaagagcaagaagacacacatttatatatgagacaagtgatattagatgacgcacacatatagatagataangtatctctatttgttaagtanatgacacacaaaagctcttgtaaataacatatagataaacataactctcttatacactaattatatagaactcntaagtcttagtaactacta

SEQ ID NO: 12173 - DNA, 367 bp, Glycine max
  unsure at all n locations
agcttgtatgtgcgtaccccaccattgttcatagtataacattggtaatgtgtctactattattgtgatcatctctttctccggcattggaggtgccacttgagctgccaggtctctccacctttgggcgtattctttgaaagatctgtgccccttattgcacatgttctatagttgcatcctatccggagccatatcagaattgtactgatactgcccaacgaatgcaaccattaggtctttccaagaatggactcgagaaggttccaaggtatgtgtaccangtaacagctacccagtaagactttcttggaagacatgtatcagcagtttctcatcttttccgtatgcccccatcttccgacaa

SEQ ID NO: 12174 - DNA, 421 bp, Glycine max
  unsure at all n locations
tctacttatgtggcagggcgggcttccttcactatcttgcctcaaccgcgagctctgaccaccgctctttctttccgcgatgcttctctntatatccgcctgagtgggtttatagcctaaaccatacttcccacgatatcctttggcatttatcaagctagttatgccgccgttgtctttgcctaaacccattccgggttcgtaaccgttccccaacagaactcgggccatcattactgctgcatcggacaggcaagcttgcccagagaaggagtccacggaggaaatgcttaccacctcataagactggaatgcggattctaatgactcctctgcggcttccacatgaggcatataggatgggcagctcaccaagatgtcttcctcgcctgatacgatgaccagatgcccttccactacg

SEQ ID NO: 12175 - DNA, 448 bp, Glycine max
  unsure at all n locations
agctntanactgttctcttactttattcacagatcttaagctttgaagtattacaagtttgcttcattgctatgtggtgccacttggcttatcaccggcaaccacctggttatcctgtgtaaaactccatggtaccagagggctagggagttatgggcttctctcangatgctaatttttataggggtaagcattntagatntgatggatgagggaatcattaatttacagttcaggttttcttaagctcctgagtcctgattgtttgcaaactcattatattattggtgaggtggtcatcatactgcaatatgtatcgacaaattcataattcattnttaaaatatttagtggatcaaaacacgttggtatacattactggctngcattatctttgagcactgttctatgaattatacttctgctaagtcaagtgctgattaaattg

SEQ ID NO: 12176 - DNA, 349 bp, Glycine max
cacctatctaatcctattatgtgatatgggttttgtctcccttaatttgttactaaattgtcattctaactgtgaatctgcaggtgggtttgttgaatgtagatgggtatttccacagcttgctgtccttatttgacaagggagtggaagagggttttatagacaactctgcaaggcatattgtagtcatagcagacacagcagaagaactcatatagagaatggaggtacgatattacacgagacatgctgattgtcatcatgtttgaagaggacgagaaaactaaattgtatggtagccttgtaggtaggtaacaagtagtgaacttgttattcatttgttaatttt

SEQ ID NO: 12177 - DNA, 448 bp, Glycine max
  unsure at all n locations
agcttgcaatntcagataaaacaatcttgaacaagttatgcagcaacaaaatataagacaacaaattaatatgacaatacacatggagataaaaaaaagtatgaagatggaagttagtctaatggagatcatagcagcatgtaaaattcataagaatcagaacaatattgatagtctttttttattggtaaaaatagtgatagaatttaaaataatagtgcattaataaaattcagaacaattagaagcttattcttcaaaagcaaaataatatattactaagagtggtatagaatataacatgtacccaataaacccaccattcaaaggcaanaaatatattaataaangtgatatagaatataatatgtatccagtaaccccaccattcaaaggtataataatatattaatgaaagtgctatagaaattaacatcctgtgatgctc

SEQ ID NO: 12178 - DNA, 373 bp, Glycine max
gacaagagtggtgaaggagaagctgaatgtgccagtcactatgtgtcaggaaagaatgtgatgagctaaaagatatcaacgtgaccacggttgaagcgttaaaacaggaaacgaataaagctcgaaaggaagaatggagcaagaacaagttccaaagggctttgtggggcagcagtaacgagctcaaacttataaaggctgagattgacaaatcaaggatggaaagcatggtgttagatgataagttaaagatttgtcaaaggtcaaagagaagtttgacagagcagttgagcaaaatataagagaatatgttgataatcattgatcaatataaggagaaggtgaacctagttgctagtcacaggcagatgct

SEQ ID NO: 12179 - DNA, 469 bp, Glycine max
  unsure at all n locations
agcttgtgcatcaactgcnttctcctttattttcattgggtatganaagctagatagatcaggaactattatactcttggaaaaaatttctgtaattcagccaaaactattttgagtcacctaaaagttccaacttcattgtttccaatttctcttttactttcttttgcacgttntgtatttctattttagcattccttctgacttcatcaattactttntgtgttccaagtgcagaccttgttcccaattagtatacgttnttttaactaggttaaattataaatattcttccttgagaaaatataaacaattggaagctactatattagcgtggctaaactctccctcaaggtcaagtatgagtcacgcaattctatttctagaaaanaaaaaagagaanagaaagataatttgcaattgtaaaacctatatcaattactaattcaacgaaatatgtctgtttctt

SEQ ID NO: 12180 - DNA, 404 bp, Glycine max
  unsure at all n locations
ttattgcagatacagaaatacttaaacaaacctgccaattaggggttntgcggctntntgcaaattccgcccatgtttctggatcaaggccatacttgactgtaggatcagatatttgctgaccttcattgtcagcaaagacaaattttgaagtcaatgaagacttanattgcctccatcttgctgcaactgttgacatcacctttttttttgcattntcaccttcagggatatcaaatttgcgctacacaacaaaaggagttatgtaacagtatgtaaatgaatcctttanaagtaacttaacaacaaaatcatgaatacaagtgtgaattacttaccaaaatatctttccatattaagctctntagatcgtcggngacaacattccaattcgcgtgtataat

SEQ ID NO: 12181 - DNA, 457 bp, Glycine max
  unsure at all n locations
agctntcttgaganatcttccttgataagcttctttgagaaanattccttgagaagctagagcttagctacatacacccctctcataactaaactcacctccttgagaagcttccttaagaagattccctactacaaagactactcaaaatgcctcgaaatacaaggctaaaatcctatactactagaatggccaaatacaaggcccaaacgaaggaaaaacatattctaatatttataaagataagtaggcacatacttagcccatgggctcgaaatctatcctaaggctcatgagaaccctaggggcttcccttggatctctggcaccatctacttggagtcttctatccaatgctcttgcggngtangattgcatcattccctccaccttggaaaggatttgacctcaaatcttgagattcttcatactctgggctcccttcctcaacacctat

SEQ ID NO: 12182 - DNA, 417 bp, Glycine max
gttaattaatatagttagtagcattaaatagttaactatgttgtattattttgtcagaattattcttataattatcggaactcataattcttctcttttcacttaattactttcccacctaattaattaatgggtgctagtcttcctatctaatccttataagataggtaatgcatttatctttttagtatataacatttattgtaaaataattatgggtatttgggtcaaaaaataattaatacaaaagataacttgagaagactcttataagaagggaacaaataaaattgagaaaagattattatatctagggatagagtgagtatgtccgagcactaagccccttgttgaaactaatggcatgctgacccctctgaatacgacaccctctcctctcatctttcccttaccaag

SEQ ID NO: 12183 - DNA, 382 bp, Glycine max
  unsure at all n locations
agcttgtataaattactcggaattggtaactacattntttaagctgaaagttttactgaattntgtagacatttggaccaaaattataaaaaaagaaccaagcgatttggattaaagaacaaaattagaaaaatcacacaagttggatgaaaaatcagtgtccaggaaaataaaagtgaaaaggaagtgtgcttgttgtttagctcanaattntttctataattggtgcctactttataccactcctagttctgaaacttcaattgaaaataattatgaaaacaagtgccaaaaatagaggtttcttgagtctttntttcgttnttcttttttagttnttctactctactctatagcctttctaggtttgtctttgagtcct

SEQ ID NO: 12184 - DNA, 509 bp, Glycine max
  unsure at all n locations
tatgcgcatatntccttacgaacgttcacttgcacaagacattctattatctaagaaaaaatgcacccatatacaatcaaggcagcttcgttatctagattatttacatgtacttccaagttgtatttgatacttacatcacacacatctccttggctaaatttacatacatgcatactcaaagcattntgnggtaccaaaaattgcacatgtgcacatcttggtatttctaatacctatacatacacaaacttcatgatgaatcttgactatctacacaataaggtgctacatttcatgctcttttcaagtttttgctacctanagtcgcatgcaaattcaagtatattttcctttgctgactaanattgtattcaaattanaaggtatanttttttttgaatggatttccttacataacatgcaacatatntatatatatnnttttgtgagacattntgactaccannaaatatatgtacataccatccagtattntgctatcatac

SEQ ID NO: 12185 - DNA, 405 bp, Glycine max
caattcagagtcttcataaatgacgaattggtctttagttcttcttaagtacttaagtatggtcttaaccacttttcaattgttctcaccaacgtttgcttgatatcaactatgtacacctaatgcataagcgacatcatgacgtgtataagtcatggtgtacatgatagcctccagtgcactagcatatggtactctactcgtgtgttctctttcttcacgagttggtggacagttctccctactaagagtaaattccacacctacaggcaaatagccttgtttggaatatccatgtatatctcttaagatagatcaatgacatagattggagagtcaagcacctattgatcttctctataattttataccaaatatagtgttctccacatctcatggaaatgt

SEQ ID NO: 12186 - DNA, 542 bp, Glycine max
  unsure at all n locations
ctgatccatgttgagcccatcgatnangcgcacttagatactcagcttatgatgatgagtctagtngattcnagtacgttcgatgatgacaaagatgatgtacgaaaaccctgagaatgatctcaagaataagtctaaacagtcaagatcacggtaaatttcaaggttcatgagaagaaatcaagaagattccctattcacgataagatgaatccangattcaggagaagacatcacgaagacttcacatgggatgtattgaaaagagttttctagcacacacatagcacaatgttggttttcaaaagaagttttctcanaatattctaagttaccgaaagtcttactctctggtaatcgattaccagtttcctgtattcgattaccagtagcagaggttgatgtcaaaagcttctaactgaatctgcacattccaattgatattaatggtgtatcattacatatattggaatcgatactagtgttttgacgttgaatcacatcagttggagagtcctcttttctanatgcttgtgtatcct

SEQ ID NO: 12187 - DNA, 365 bp, Glycine max
  unsure at all n locations
agctntcatcacatcttacggcagtacatcttgagatggtttttgggaccagtcgtccctttatacttgtcgaagtccggcactttgaacttcgggggaataacaacatcgggtactaagcaaagatccgtcatgtctgcgaacggatagtccccaaatccttccatggccctcaatctttcctcaaggagatcgagcttnctcctttcttcagttgctgggggcggtccttccgtggacaaaactataggtggtgccgcgatgtcnggttgaggcaacgttcctggtgccggcccttcggggatcggtggatagaactcgacatcccttcgagcatagtcttgagggtctntatggacttcgtc

SEQ ID NO: 12188 - DNA, 235 bp, Glycine max
  unsure at all n locations
ctttntataaaatgagaagttctgaactcatcacgttatctaataaaccttggagtggatccaagtgctccgatcattcatttgcatattcatgntttggtggccgacttcaccgtgtttgtttctttagggaattcaccataactaagaaagcacaaaggcacccctataacactcgatccagaaaaatggataatcaagagggcgtgcaagagcagatgaaggccgatctatc

SEQ ID NO: 12189 - DNA, 376 bp, Glycine max
  unsure at all n locations
agcttgccacccagctcgcccaggcgagcaaggttgcttccttcaaaagcaacagccttctggaggaatctttatgagggcccaagtgggcctggttgctatttgcacccccatttttattaaacacaccccctgcctttnttttggtgattcttttttcgtaaagttatggaaacttacgaatttcgtaacgataccttgtttctttccataatgttacggaacataatcatccccctttntttgacttactgaatgttacggaacttcactatntgtgcaacaatgcttccttttgatttccggtgtgtcacggaacctagcggattgtgcatcaatattttcttttgattcccggcacgtcacggaatttcac

SEQ ID NO: 12190 - DNA, 393 bp, Glycine max
  unsure at all n locations
tctatagaaggttcattcctaatttctctacaatagcatcacctctcaatgagtagatgaagaagaacgtggcatttacctggggtgaanaacaagagcaagcctctgctttgctctaagaacagcttactaatgcacctattctagctcttcctgactattataacactcttgagctagaatgagatgcctctggagtgggagttggagttgtattgatacaatgtgggcaccctattgcttattntagtgaanaacttcatagagcctccctcaactaccccacctatgatacacagttctatgccgtaataagagtcctccaaacttgggaacattaccttatctccaacgaatttcgcattcatagcgatcatcaatcacttaagtaca

SEQ ID NO: 12191 - DNA, 435 bp, Glycine max
  unsure at all n locations
tgctagcttttagatccggtcatggaaagacttggcaactgccttcattaggcagtaccaatacaacacggatatggctcctgatcggaaccaacttcagagcatgaccaagcgggagcatgagctcattaaagaatatgctcanaggtggagagacctatcagcccaagtcgtcccccctatgactgacagggaaatgatcacgattatggtagatacgttgcccacattctactacgagaagctgatatgatatatgccggctaactntgcagacctcgtcttcgctggagaaagaatcgagctcggactgatgaaaggcaagtttgaatatgcctccagcgttgcccccaacaacaatagaagagccncagtggtgggcacacgggagaaggaaggagatacccacgcgatcaccaccgccctaacatggat

SEQ ID NO: 12192 - DNA, 330 bp, Glycine max
  unsure at all n locations
gtgcccttgacctgtctganncttgatggcaggcccggnagtatccattttactttgttctaaccaagaccttggagagtcttttcgaccatccattcaaaagacctatatcttattgaaattttagctatctgatcagtcgactcttccctccatctgatcctcataaggttactaagttgagttttcgaatatgtctgatttatcggcacaaagtttactttgaatcatcggatttgctcttccctctatgttatatttttatgttctcgtcattttcttcgtacgtctgttgcctctcctcctgactattatcattgcatcgttctc

SEQ ID NO: 12193 - DNA, 445 bp, Glycine max
  unsure at all n locations
tgtctttctattgaggctgagctaaacgccaacatgctgcgctaaactacaagcctcttcnggtgtgaaaattgtacacttatgctaagctcacgtgtgcgttaagcctattctgcacaaaaatatggtttttgtgtctatgaattaagcgccagcttgctgtgcttaacgcttgagtaanatttcataatgcgcgctaagctcaggatggtgcgctatgtgactagacaatagtttagccttatatctctgattttgtgaaataacctgtactaatctcttgtgtttgtcttatatttatgnagatggcatcttatgaagatgaatacaccctatacacctacccaagccaaattcnatagatgcactatcacatgccaagacgctggngagagatatatatacattgtggcgcctcacgagctactaccagaaatgaatgtgn

SEQ ID NO: 12194 - DNA, 226 bp, Glycine max
  unsure at all n locations
atcacatgtggtactaggtggcgtgcggtcgatggtgcacaacatgttntccacatccactatgcgcgcataaacccaccatcccttgttgcccacctccaactgagctcacgtactcccacgtaacccatatcctcgtttctctcaacaccgggtccccatcaatccttcgaagcgttccacaacagtccagcaaaactgcattcacaccgcacaagctatcaca

SEQ ID NO: 12195 - DNA, 400 bp, Glycine max
  unsure at all n locations
agcttcttttntaaatggcatttactacaccgtcaaacanatatgaaaataatcagctgccggtgtttgtttggtagctaaaacaaggcagaaattgtaaatttaatgaaaagatcaatggttaaggaatgataatgtaaactaattnttattctcaattaatactcaattaattttaaatggcattntctaattgatataattnttaagataattctattaacaaattaacanatgtgtattttggttaattgtattcttcaaaagtgttttttttattaatatgcttgtctaaactatgtttctctttntataataagtaatatctacttattacaaagtatttcttaaaaacatctttttttaaacattatgtttaaagttatcttctcttaatatg

SEQ ID NO: 12196 - DNA, 400 bp, Glycine max
  unsure at all n locations
tctactaccacacccaacanatctagatctcataaccttgcactcanaagaagaagcagaagtcgtgttgtgactgttagtgttatcttgttcaacaacaatgtgagtcttgagagaagaaccagatcaacacctatctttaagcctagcagaactagtacttcctgatgctgagttaatggttgagatccttggagtgttgttgtctctgaagctcttggagttgagcttttggatgatttggaagagagatagggaaaagaccacanatatgtttctcttcttgggactaanacctccaatgaccaaatcgttgtcattgttgatcaaagagtggtttcttcgcagcgtggtggtggatttgctacacttgagaacaatattatcgaaggttggtgat

SEQ ID NO: 12197 - DNA, 385 bp, Glycine max
agctttggttctaatagctccaatcacgtctattccccatatagagaacgaccaaggcgctgccaagacattcaaaggtacaggtgaagcattgacattattgacgaaggcctgacacttgtggcactttctcacatggatgcaacaatcgttttccatagtgagccagtaataccctgctatcaaaatcttctgggccatggcatttccattggcatgtgttacaaaggatccctcacgtacttccactagcatctgcttagcctccctggcatccacacatcgaagcaaaaccatatcatgggtcctctatgatgggaaaaccaagtgcttggttcaagttggatcttctaggatggaatttgtgcaccaggagcaacaaccc

SEQ ID NO: 12198 - DNA, 252 bp, Glycine max
gtgtctagacccttgaccccccctgggttctctcatttttttttaatcccccgttttatttagccctgccttacctggcctttctttgaaatgggctgctcccctttatacagccgtccttctaaattctgcttttttcttcctcctgcgcattctccttttttttttctagtcccctttctcttctttcaattttacccttctttactacccttgtttatatcttcctgctttaactttccttcccttttc

SEQ ID NO: 12199 - DNA, 392 bp, Glycine max
agtttgagatgaggaagtgttgaagggtgaaacttcctgcttttattgttgaccacagagcggtacctggagatatgtcgcggaggtcaccgagaccttgcggacgtcatgtggggtgctattgcccaaaaccaagcttgaccaatcccgacccaacccgggcatagtcggtcagtgagaacctgtgatgtacctaagcaggcgagctcctggcagtcaacagataaaaggaaaacaagaccacaaagtaaggaggcttgtggtggctggccagctgtgaattttgtgtaatatgtggatggtggcctctggtaatcgattactaagggtgggtaatcgattacaaggcttataaatgaagacaggaggctaagatggtctctggtaatcga

SEQ ID NO: 12200 - DNA, 287 bp, Glycine max
  unsure at all n locations
tattatacgagctagagcacatatccttaatgatcttgattgcatcaataaagggctctaacatgaggctacccncacaatcaacatcttaacttgtgctattatgtgaggacactccaccatagaanatgtgaaatagcctttgttgggagaagccatgatatggacaacttctgatcctttcttataatctctcttacgcttcaagtagactctcttgctctttctgcacaaaattcccaatgtcccttatgtactggtttatcttagaagagaaatatttcctt

SEQ ID NO: 12201 - DNA, 332 bp, Glycine max
tatggtagcttctgggaatgataactttggtacagagtcgcgatctgtattagatttttgtgatggcgtgtgcataccatattattccacattatgagtaatggactttttttaattgtcctgataaatcatcaaccatgtagcattgagtcgtaggtgaggtccactatacgaacgaagtggggaattatggcccaactccaagtgactgaaaagatggtgtgcatgatattaatgtccgtggctcgtcttctggatcaggcgaggtgcctactacttctactagcgatgacttctgggattgattggaattatccgatgactctctagat

SEQ ID NO: 12202 - DNA, 430 bp, Glycine max
ctcgcgcaggcgagcaaggttgcttcctccagaagcaacagccttctatatgagtcttctggagggcccaagtgggcctaggtactatttgcacccacatttctactatgtacacccccctaccttactcttggtgattctttattcgtatagctacggaaacttacgacattctgaacgatacttgttgtctttccgtaatgctacggaaccttgtgaattacataatcacccgttttttgacttactgaatgttactaaacctcactaattgtgcaacgatgcttccatttgatttccggtgtgtcacggaaccttacggattgtgcatcaatattctcttttgttgtccggcacgtgccggaatttcacaaatggcctagtgatgggtgcaagcaccttacaatgactaaacaaaagtcgcatgtca

SEQ ID NO: 12203 - DNA, 462 bp, Glycine max
  unsure at all n locations
cgtacnnccaccattttcatagtagaacattggtaatgtgtttactatcattgtaataatctctctctatgttattgagggtgctacttgagctgccaaatccttccacctctgggcatattccttgaaggattcatgctcttttttgcacatgttctatagttgcatcttatctgaagccatatcagaattgtactgatactgcttaacgaacacaaccattaggtccttccaagaatggactcaggaaggttcctaagttagtataccaggtgatagttgtcttagtaagactttcttangagaaatgtattagcagtttctcatcttttgtgtatgcccncatcttccgacaatacatctttagatggttcttggagcaagtagtccccttgtacttgtcaaagtccgacaccttgaacttgngaatgaccatgttcgggtactaagaacaactcttct

SEQ ID NO: 12204 - DNA, 381 bp, Glycine max
tcaagtttgacaggtttgaaatatatctctgatgtcttatatgtgcctgacattgatcaaaatctacttagtattgctcagcttgtagagaaaggcttcaaagttatatttgaagaaaattggtgcttgatcaaagatgcaataggaaaagacgtatttagggtaaaaatgagggctaaaagctatgctttaaatctaatggaggagaagcaaatagctttttcaagcatgaccaccaatgttgaactatggcacaaaaggctcggacacttccatcttgctagacttttatgcatgcaaaaacatgccttggtgaaaggtgtgtcaatccttgaagacaagttagccgattgcgtggcttgccaatatggtgagctagtc

SEQ ID NO: 12205 - DNA, 210 bp, Glycine max
  unsure at all n locations
atatgacaaaacacatcgatgtgactctatactctctcatatatgtgattgaatctgatactgtgaagagctancatgtcattacagaagataacccggctgatatgttcatacacttcatctctagtgtcaagatcaagctctgcttggactagataatacatcataatgcctgaggcacatgagagaattgcaaccctgattcacaag

SEQ ID NO: 12206 - DNA, 391 bp, Glycine max
  unsure at all n locations
tcaagtttgatattatgaaangncgaagggtgaaacttgctgcttttattgttgaccacagaccggtacctggagatatgtcacgggggtcaggataccttgaggacgtcaagtggggtgctattgcccaaaaccaaacttgacctatcccgacccagcccgggcatagtcggttagtgagaacctgtgatgtacctaagcatgcgagctcctggcagtcaacagataaaaggaaaacaagaccacaaaccaaggatgcttgtggtggctggccacctgtgaatttaagtaatatgtggattgcggcctctggtaatcgattaccaatggtgggtaatcgattactatgcttaagattgaggacacgaagctaagatggtctctgggaatc

SEQ ID NO: 12207 - DNA, 393 bp, Glycine max
  unsure at all n locations
tatttgactttcctatgctatctctacatacataanacaaccccaccatcccagtgttgcanaatcatattcatatatcaatggggcatttcaccgagcacttggtgggcgcacgtttggacataaattgcaagagaatgggggcaatgtggcatgccccattgcttcagaatacaacataggcctaaggtcggtccctttcctagtaaaatatatcactagggcctatggatatttcaagctgcccgcaatccatgagccgctgaagcaattcttccactgcgggataggtttccatgtcgtgcgactccccgaggtgatccgccacgggagaccatgcacgccgcttgcagtgattgatagatgaagcgtctagcagtagccacctcttct

SEQ ID NO: 12208 - DNA, 372 bp, Glycine max
agtttgccgcccagctcgcccaggcgagctcagctcgcccaggcgagcagggttgcttcctccagaagcaaccgccttctggaggaatcttctggagggcccaaatgggcctgggtgctatttgcacccccatttttactaagtacacccccctctgctgttttttggtgattcttttttcgtaaagttacggaaacttacgaatttcgtaacgatacttgttttctttccgtaatgttacggaaccttgcggattacataatcatcccctttttgacttacggaatgttacggaacctcacttaattatgcaacgatgcttccatttgatttccggtgtgtcacggaaacttacggattgtgcatcaatat

SEQ ID NO: 12209 - DNA, 570 bp, Glycine max
  unsure at all n locations
cgcccttgatgcattcgatgncgactccaanaacacnaagccagatctatagtcctaantctcatgtaggtcttatggccacttcacgctctgattattatatgggctanagcacatagtcctaatgatcttgattgcatcaatcatgcggtataacacgacgtgacctacaccaggaacatattaacctggcctattatgtgaggacgctccatcatacaacacgtgaaatagcctttgtcgtgagaacccatgatatggacaacctccgaacctttcttatagtctctcttacgcttgcagtanactctcttgctctctctgcacacaaataccaatgtgccttatgtactggctgatcttaaaagagaaatatttgcttaagaaggactggtgcactaggcaatgtggtatactgctctcttcacgtcacatacctatccatgccttcgatcgagagagaagganaggcttaagtctaattattcagatgatcctggtctgtttactgtgtcgccacttgaggacttccttngtgntgatangacttatggaaccctactagccgcn

SEQ ID NO: 12210 - DNA, 356 bp, Glycine max
agctttaacattcaacttcgagcgtctcgatatattacaggactcaatcaaacatccgagaaaaaagttattgtcgtttgaatttgctcagaggttcaacattcaatttcgagcgtctcgttatattacaggactcaatcagccatccgagtaaaaagttattgtcgtttgaattggctgagagcttcaacattcaatttcgagcgtctcgatatgttacgggactcaaacagacatccgagtaaaaatttattgtcggttgaattggctcagagcatcaacattcaatttcgagcgtctcgatatatgacgggactcaatcagacattcgagtaaaaagttattgtcgtttgaat

SEQ ID NO: 12211 - DNA, 539 bp, Glycine max
  unsure at all n locations
ctaagcttctatccaggcacattcttggtggtgaagctccttcttccatggtttattcccttgtggatggtgcctcccctctcctctnttcctttgccttccgctgcatctccatggtggaaaatcaccattaaaagacctcattgaagctcanagatccagcctccatagaagctccacaagcaagcttccatcatacctccatgtgggatgaggatgaaattattatagatacctccctctgggatgaggaagagattntggatacctccatttatgatgaggaaggagtgggatgccattgcatgaaatatgaactcctagaccttttgaagaatntgagatccaccttggttntgggaaccatagaattgagtcttgtaattccaggaaccactaagttgtgtctgttatatttatttggatgcgttgaggtattgtcatttatttaaatattntatttattcataattccatgaatggggattgtntaatatgattttactgcctatatatacataataatctatntaaatcat

SEQ ID NO: 12212 - DNA, 476 bp, Glycine max
  unsure at all n locations
gacactatgatactcagcttgagccattcanacaacaataacgttntactcggatgtctgattgtgttccgtaacatatcgagacgctcgaaattgaatgttgaagctctgagccaattcaaacgacaataacttttttctccgatgtctgattgagtcccgtaatatatcgagacgctcgaaattatatgttgaacttctgagctaattcaaacgacaataactcttttctcggatgtctgattgagtcccgtaacatatcgagacgctcgaaattgaatgttgaatctctgagcaaattcaaacgacaataactttttactcggatgtctgattgagccccataacatatcgagacgctcgaaattgaatgttgaacctctatgccaattcaaacgacaataacattntactcggatgtatgatngagtcccgtaacatatcgagacgctcganattgaatgttgaagctctga

SEQ ID NO: 12213 - DNA, 403 bp, Glycine max
agtttttatttcacgtatgcaactattgtcaatctcatatcattcaattggaaaagatttgacaaagtggattggaggtcatagttgacagggtgatgtctactgaaacaagagaaaagtaaaagagcatagcacaggcgtattttgataagtttgagttattagtaagggcacataagagatacgtgaggataatttttaaaggaatttccaagccaagaggacaatgccttgatgcaccaaagaagtaatgcatgaaagaagaccaaagagggattaaatgagtgaccaaagcctcaaggataaatagatagagcataatatcatcattcagaatattacacggttatattaagggtttcataaggaccatcaaattcacatgataatctaacacaataaa

SEQ ID NO: 12214 - DNA, 419 bp, Glycine max
  unsure at all n locations
atataagacgatacttacttanacaccgtccttganagttattcttttaagacagtacctacgtaagcatncgccttgaaataaagattaattttaactattgatantttttctgaacgatatttcatcagagaaaatatgaataattaacaataatatttattagcatgattgtaattaatattaatattaaaatttatttaaaaaataaatattaaaatgatatattaaataaaaataagaggttgacaaattagaaattccagagtcaatttcatagaanaaaaaagttatcaaagttcttttattataaagtacctcataaattaaataattattgtttcacaataatttagaggaccaattaacactttgacagcctccaagatattatctccaacagcagacacaaagagaag

SEQ ID NO: 12215 - DNA, 430 bp, Glycine max
ggcgactccgagctcgggcccgggatacttaagtcacgcgccgcattttatcttgtcctcgtccgagcggaataaatgctgtcaaataaacaatatcgcagacttcctaccatatggtctggtgatagatatatatatatggcccgagagagacagagagatatataaatctccagaccctctctcccagattctagattgagcaactaaatatcaattatatcagaaagctacttgagattccaagttccaactcaagtttaaaatgtggtgaacgcgaaaagtggttaaaataattgtaccaagtgtattatattacattacatataacgtgtcaacctataagacgtgagaaaaagggtgcagatgttttggtatggatgtgattatattatatagggggcaaatacagaccatatgtatatcaaaa

SEQ ID NO: 12216 - DNA, 586 bp, Glycine max
  unsure at all n locations
tgccttgttgccttttgatgccgttgcaanagcacacaacnagactcagcttcacagtcaagcatgagcgcttcgtcantaccggtctccatcagacgtactctgtaggaggtatcggcgcggagcatgggtggtattgacaccacacctcaatactgagacgctcnctcttatagcaggactcagtcatacattcgccgtaacagttagagtctttacgaatcgctcagagattcttcatttcctttccagcgggtcgcgatatcacagcgcttcatcagacatccgtgtaagaagtattgccatttgaattggcttaaagcttcaacattcaattccgagcgtctcgttatatgacgggactcaatcagacattccgagcaaaagtcattgtcggttggattggctcagagcttcaacattcattntgagccgctcgatatatacaggactcctcaacatgcgggtaaaacgtatctgtcgctcgacttggttcagagctacacaatcaatcttgagcgtgttggtctcttacacgactcaagccacattcngagaaaagttattgggtctggatggctccacg

SEQ ID NO: 12217 - DNA, 435 bp, Glycine max
  unsure at all n locations
tgaagctcactacaagccttaagtgaacaaccatgatatttccatatccttaaggaattntggagctttggaattgttatgcgaataagtgtggngggtttttgtttcattggacaacttgatttgttggctatgcttcatgatgtattntgngccatacttgatgtacattgtatattggttaaatgttggacatgctgaatgaaatgttgtttctcacaggctatagagtaaaaaataaaatacaaaaataatcgaaaaacaatattcgaagaaagattaagaacagcactaaagttgagtgaataagatcttatatggcacaagaatgatgaaactcttggctctactcttcatgtgtaattgatatctgtacttcttgttattntcttattactttcttaatatgcacttattgccctttgctcctctatt

SEQ ID NO: 12218 - DNA, 406 bp, Glycine max
  unsure at all n locations
agtttggattcatcaaaataaactttcatccggcgctttagtcttctcagtctttcctcctacaaaatttttacaaagttgctgctcaatgaattcattttttttcttgttttcctcactgctctctgtcctcaacaaattcatgacaagaaaataaatgaagaaaaaaaactattaaaccatttatgatggagaacaccagacagtttggaaacaaattatgaatgcattttcaacattgtttctgcaattattctcagaaaacaaaacaacatttccaacaacatgaaactctagttataatcacattnttcaattaccttcaaaaactattgccagttagtttccaaaagttnttcagttattctcaaaaactatattgaaatatattntcacaggtcattga

SEQ ID NO: 12219 - DNA, 326 bp, Glycine max
  unsure at all n locations
ctcgcncaggcgagcaagggtgcttcctccagaagaaactatcttctggaggatatctttggagggcccaagtggacctggttgctatttacacccnccttnttactaaatgcacccncttatatattnttctgtaattctttttccgtaacgttacgaaactttacgaatttcgtaacgatacttattttcctttccgcaaggttacgaatccttacggatttatgtatttactctttttggctttcaaagaagttacggaaactcacggattgcgcanaaacacctcttttcgattntcggcacattacggatattcacggatt

SEQ ID NO: 12220 - DNA, 361 bp, Glycine max
  unsure at all n locations
atactcgcccattatctcagntgtctgttgtttattgcattcttacggaatctcttaccgaaaagacagaacaatgttagaagaagttcgtacaacaggattgttntactgcaatgatctggttgattcaatgcagatgagaggagaagacnattaatcggacatagaaacatatttgagaaattgtagagtatgtctgggtgcatagcttggtaatgaanacagatgggattataactttctaaccgaatgagaaccaatacaacagaatatgatatanatcggccttttaacaagtattaattcttaattctaanatatattntaaataacaagtcagacatatctatgataaactgta

SEQ ID NO: 12221 - DNA, 383 bp, Glycine max
agttttgatgtaacatttggagaggttaatgaaacaacgagatgatgcgctccatgagaggttggatcaaatggagaatagagaccatatgaattgctcaagagcttccattgttcaatttcgagcgtctagatatataatgcgcctcaatcggacctccgagttaaaagttatgaccatttgaaatgctcaagagcttccattgttcaatttcgagcgtcacgatatattatgcacctgaatcggacctgcgagtgacaacttatgaccatttgaattgctcaagagcttccattgttcaattttgagcgtcacgatatattatgcacctgaatcggacctgcgagtgacaacttatgaccattttgaattgctcaagagct

SEQ ID NO: 12222 - DNA, 401 bp, Glycine max
tagaaaccataatgacaattctcacatttcaaattaaaaccaaattacggcatggtgagcaccatcatgagtttcagaacttaataccaaatatatgcaccacattcacataatgggcactgccatggatgttgtgtttgtcctcttctctgtgtaaagcgaccacatgatcaagcgaacatcattcgtcaccctctcaagcatcgtaccagatcaagatcgagatctataaccaaatctataatgcacaatatcgagatttgtgtggttcgcggctggttatggtgggtgacgttctcagaggttgatggtggattgatatatgcggctcatgtgcacattgtgtattgtagtgggtaacacacggtagagtcactacttgatcacatgacatcggtgat

SEQ ID NO: 12223 - DNA, 203 bp, Glycine max
gctctgataccacttgttggacaagtggccatagatatcttaagaaggaggggggggggggagggtctatacttctaactcccacgccctatcaacgcgcataatatatctagacgctcaatattttacaatggaagctatttggctatacacatgctcataacctttcactcacaggtgcgaataaggcgcatcaatatatc

SEQ ID NO: 12224 - DNA, 376 bp, Glycine max
agttttaacctcatcgtccctcacagtctttagatttgggagccaatccaatccttgtgttcggactctcagccacttatgatagctgccgatgatcccattactgcttcccctaagctctctgtcctttcttcacgccgcatcccatgccttgcgaactccttggagtaccctcgcgttgtggtcactaaaaccccgtgcgatgaaaggcgtgatgctttcgtctaatggcgctcctctcatggggtagccaagctgtcttatggcgagaacgggattataattaatacaaccccttgttcccatcaaaggaacatttggacatccttcgcatgaagatagaatcttgattcttccttccttctagcgagggaac

SEQ ID NO: 12225 - DNA, 398 bp, Glycine max
catttcttggttggtggtttggtttatgctaaatgtggtgttcgtcattggaagtgcgatagacaggctgtgtggtttatttagggatggcctttgtggatgactgagtggtgggtaatgagaaaggttgatattggttgagtaatgatgttgctgagctggtgggggattttccatgtatgaacgacagtcacaacatgggtttctccttcattctcaccctcttcatttgccccagttttctcattcgtccaagcaggatgattaaatttgcctcttttcagacccacttggatcctttcgctggcgaagaccaaattcgtaaaacttacaggtgtgtaacccaccatttctcatagcagaacactattaatatgtctactatcattgctatcatc

SEQ ID NO: 12226 - DNA, 397 bp, Glycine max
agttttcttgagagaacttccttgagaagcttctttgagaaaacttccttgagaagctagagcttagctacacacacccctctcataactaagctcacctccttgagaagcttccttaagaagattcctaaagaagctagagcttagctacacatacctctctaatagctaagctcacctccttgagatgagaagctagaacttagctacacaccccctataatagctaagctcacccccatgacaaaaaacatgaaaatacaaaaaaaaaagtccttactacaaagactactcaaaatgccctgaaatacaaggctaaaaccctatactactagaatggccaaaatacaaggcccaaacgaaggaaaaacttattctaatatttacaaagataagc

SEQ ID NO: 12227 - DNA, 388 bp, Glycine max
  unsure at all n locations
tatatggactatgacagagtactagctaactacatgtacttaatttgcacttctcattagcgacacttaattgcttggaagttgatgaagcgacggctttcgcccagtctcggatctttgctttgatcttcactgcagccaccttagctaattcattatgctcagccacaaggtacagatgaggttgttgtgggtcacactcttccaaagtgatgcaacattctttgtaatccttgcctgccattgccatagcctcaatagacatgtttcctttcctaatatagggatattgaggatcgatatatgattaatgacgcanactaagtgtgactgtgaattgtaattgacgtagtaatagccgcatagaatcatttgtatatataccata

SEQ ID NO: 12228 - DNA, 344 bp, Glycine max
  unsure at all n locations
agcttgagttgtacaagccaaaagtgacagtgattaatacttgtaacttgttgaagttaatgaaacttggtggttagccaagaactggacatatggggggatgatgcaatcctacccccaagggcattggatagaagactccaagaagattgggtcagaactactgaagaaggccctatggttaggtttttggcccatggactaagtatgagctcacttatctttgtacatattagattagggtttcattattttttggccttgtatttagggctccatagtgtagggagggtaccctagtaaagtaggatctttcagcctatgtattntagggcacatagact

SEQ ID NO: 12229 - DNA, 415 bp, Glycine max
  unsure at all n locations
agccatgttctcagcatgaagattaacagccgaatgctcaacatcagaatattcagaatcactagcaacaaaatactcagaatgctcaaaatgctcanaatgcgtagaatgatcaggatgcacactatgcctaactaatctatgaaagggtctatctatttcaggatcaaagggttgtaagtcacgtggattgcccctagtcatgcactatatgcagcaaataatgtgttctcaaacaagcacctgacaagggggtaaaactacaactatagtcaaacgatatccaaaggagctgagattntgtcagcaacaccctagaatcatgaacagatagcacanaagatntcaaacaaaaattcaaagtctaactatgaanactacctaagcanagttatgaaaataggacaataatact

SEQ ID NO: 12230 - DNA, 356 bp, Glycine max
agcttgttgtatttgccatgtttggatgagttagacatacccattctgttttacggtttttgtgatgatgtttgtgatgtttatatgctgaaattgctgatggaaatctgttagagatgaagggtagaattaacccaaggttagaaagtgagaatgtgatgttatgagtggaaaaagagtgagactttgagagttggaaggctaagtctgaattctgtggtaaatggaggttagagtgagttaatactagcttgaaatgtcatttagaacatgtgagaaaggttacgctgagctagagagaataacaaatgaccaaagtgaacaaagagccattgctagggcaaatttgggtgttg

SEQ ID NO: 12231 - DNA, 411 bp, Glycine max
  unsure at all n locations
ctcactcggaggcccgattcangcgcataatatatcgagacgctcganattgaacaacggaagctatcgagaaattcanatggtcaatacttcgaactcggaggtcctattaaggtgcataatatatctagacgctcaaaattgtacaatggaagctctctggctatacaaatggtcataacttttcactcgaaggtccgattaaggcgcataatatatcgagacgctcaaaattgaacaatggaagctcttgagcaattcaaatggtcataacttgtcactcggaggtccgattcagctgcataatatatcgagacgctcgaaattgaacaatggaagctcttgagcaattcanatggtcataacttgtcactcgaaggtccgattcaggcgcataatatatcgagacac

SEQ ID NO: 12232 - DNA, 335 bp, Glycine max
  unsure at all n locations
agtcttgtagcaaattcaaacgacaataactttttactcgggtgtccgattgagttcagtaatatatcgagacacttgaaatagaaaacgaaaacttgtagcaagtgcataccacaatcaattntaactcgtcgcgaaatatgttgagatgctcgaaattgaaaaagaaatttcatagcaaattcaaacgacaataactttttacacggatgttcgattgagtcccgtaatatatcgagatgctccaaattgaaaacggatgctcaaatcatattcagacgacaataactttctacacggatgtctgattgagtcccgtaatatatcgagacgct

SEQ ID NO: 12233 - DNA, 357 bp, Glycine max
  unsure at all n locations
acacgagccaggttctgattaaattcatgaactgctccatatatgacacaatctcaaactaccacttttaatttcttaccctaccattgtttagagaagatcttccacaaangcatcgcacagaatccatgaggtgcaccaagcaggacttcttgtaatgctgcaatatgaccctgcatcatttatgagattatgtcaaaatagcacctagcttatgtcacttactgtcaatctactgccaattatgtcagcacagtccctaacatatgtcacttactgtcgaattagtacttcagaattaataacattgacgaatctatccaactgctattgcatgcatgccacatactatataat

SEQ ID NO: 12234 - DNA, 382 bp, Glycine max
agcttctacttttgttcaactgagaaaaggacgtcaatcgtcatttaccgaccatgatccgcttatttctttcttctctttcgtctaattgtcgtaaactaagaataatggagtataatatacaccacagaaaaaatggagtatcatattgataaaaagtaaaacatcggacggtgatcttgatgcagaagtctacaattgataatgacaggcaaatttatatatataagaaaaggcttatcatatgaaattatgcacacttatgagctatgaggccttttaatctctaaatgcacactagcgacactaacgaaagtagtggtactattgctaacatatccgaacatcttggaaacaatcggcgattggttaaataaaaaat

SEQ ID NO: 12235 - DNA, 473 bp, Glycine max
  unsure at all n locations
gcttgctagcgttatgcaacagaaccacatgttagccattgtatatgtaccaagaagaattaaatctagccacggaccacgagcacaaagtggcgtacgagtatgcctgagtgtacgcagaanaggaggctagaggaagggtgatcgactcgttacatcaagaggcaacaatgtggatggaccgatttgctcttactttgaacggnggtcaagaacttctctgattgctagccaaggccaaagcaatggcggacacctactccgcccccgaggagatccacggacttctcagctattgtcagcatatgatagacttaatggcccatataattagaaaccgctaggaagttngtattgtcactcagatcttgactagttataactntctgaataaaatgagtntatcccatgtttntactccaaagatcagtgcgaatcanatcactcccgcattntatctctagcatgcattc

SEQ ID NO: 12236 - DNA, 358 bp, Glycine max
tcaagttttagatgaggaagtgttgaagggtgaaacttcctgcttttattgatgaccacagagtggtacttggagatatgtcgcggggctcaggagaccttggggacgtcaagtggggtgctattgcccaaaaccaagcttgaccaatcccgacccaacccgggcatagtcggtcagtgagaacctgtgatgtacctaaacaggcgagctcctggcagtcaacagataaaaggaacaaagaccacaaagcaaggaggcttgtggtggctggccagctgtgaaacttgattgatatgtgagatatggtctctggtaatcgattaccaatggtgggtaatcgattaaaggcttaaaaatg

SEQ ID NO: 12237 - DNA, 569 bp, Glycine max
  unsure at all n locations
ccgccttgatgtttgatgcantgcaagacacnaagctaggcctcgatcctcatgtagacggggatcgccttgcggactgttgcatagggtcgtcacggcatgccaatgctaggactacactatcagtacacacactagtgcgtgatctcaccacgagcatgcaatgtatcatccatggaagaagcagtgaacatcagatagaccgactcgtgcgtattaaggtactgacatcaactgttgattatgaatactcaacaaggagtgtcagcccgccattacagaggaaccctaacacatatgagattaagagtggataagaactgctgtcttacacagcaatggggatccgttctgctctacacaacgtctgacagtcactcgtgagctcactagtctctctctaattacacaacctatcgctgtntgaagagctgaacgcttgctgcctcatagctgtgaactaagatagcactagtgcgtgcttggagtctatgcgaatatcatctacactaatctacatagacagcattcgattgttctaaatcggatgcgcaatagctcaccctccg

SEQ ID NO: 12238 - DNA, 356 bp, Glycine max
  unsure at all n locations
agctttttgtttgcttgttaaaagccatgacgagtgtggcacaagcagtgaccaaaaatgcaaccactctgagggacaaaagaacccaatccttctttggctaatttgtctcatgaggaaccactgatgcattattcataccaccaagctccactttctctccaccattttatgaggccattgtgcaattaataacaaacacttaattaattgccaaagtgagaaaatgaaggtggtgatgatggtgcagattattatggagaggacaatgggttattatatagatagggataccagtgaaatggtcanaccatatcatttggtaagtctaagaagccaagtgaggattctttctc

SEQ ID NO: 12239 - DNA, 496 bp, Glycine max
  unsure at all n locations
cactcagcttcgttaattcaccgctcgataataccggtctcatccggattttcgtgtataaagntattgtcatttcaatgtgctcagagcttctagtctncaatttgagcgtctcgatatattacccgattcaatcggacatccgagtaaaaagttattgtcgtttgaatntgatacgagcttccattttcaatttggatcatctctcgataaatcacgacactctgctgggcatccgagtaaaaagttattggcgtttgactcttctaagagtttccattntcaatntggagcgtctccatatattacgggactcaaccagacatccgtgtataatgttattggcattacaattctctcagagcttctagtctcaatttggagcgtctcgatatattacccgattcaatcggacatccgagtaanaagttattgtcgtttgaatctctatgagcttccgtntcaatttcgagcgtctcgatatattacaggactc

SEQ ID NO: 12240 - DNA, 411 bp, Glycine max
  unsure at all n locations
caacaacacatttcccaatgctaaagtcacctaacagtacacacacaagtgggtgatcagaccaagagcatgcaatctttaagcattgaaagaagcattgaacataagacacacaatcaattagatattaaagtaattacatcaactgttctttaaaaatcctcaacaagggtgtctagccagccattacagaaaaaccctaacaataatgagattaagagtagagaataactactccttacacaagaaggtggatccctcctcctcttctcagcatctcaaaatcactctgcaactcactaatctctctctaattacaaaacctatagctctctgcacaagctgctcctcttgctagctncagagctctttgtccataatagacactatggtgtgctcttgaattctatg

SEQ ID NO: 12241 - DNA, 363 bp, Glycine max
  unsure at all n locations
agtcttaaggatttccccatttgacatcaactgtgaatgaagaacaaataacttcagcctaatgattacaaagatgaagtcagtaacttccaattcattactaatttagaatcactatttatattttcaggaaatggataaaagaagaataatggcataaccattgtcctgagattaatgaatttaccaaaacagaatcaaatgctggtagaaagtcaacttgatgagttacaagtaaaacagttttctctttaagaccatccatgatgtattcctgccaagtttcanaaccatgttggagtaaagaatgacacataagcacaattatagtatgtgaggaaaggaagatgccattacattaaa

SEQ ID NO: 12242 - DNA, 328 bp, Glycine max
ttatcttgtctaatactactgcaccagggatgagtgagttctgcgaagcctttctcaaagctcctaagccaggttcaaaaaatgaaaattgcatcatcctcactgtccctacaaaattggcatgacgtgtcatcaacctgcacttgcctccactgcaaactctgtcttgtgggaagtctatgtctattaatctccgccaaagaaatctacttttcttggaacctttatgctccataatttgacaaaacattccttctgggttattgctgttgctcctcccattattacctctgtttttatcagccaaactaagtatattatatatata

SEQ ID NO: 12243 - DNA, 431 bp, Glycine max
tacaataacattctgattctagtattaatcactgtttataggaatattatctttgatttagtggaaacaaaatatcctctatttatgtataattaatgtaattatcctatatacgctcgcatcctctgtgtactctgacacacggttttagtctattgaccctctatattctctctcattctacagtatatactacgtattatgcaatcgatagatgacaaaaataatagagaacgaacatcacactctgtatgatatcccatgtacaatgcttctgtttctgagctacaatgcacaaagaaacaatgctcgagtgcttcatattaatgcatcccatgtgattccaatttccaaaacttctgaatcttcatgtactctttattccaaaatgccatcagacattctacaagaactattctgttttccaagat

SEQ ID NO: 12244 - DNA, 314 bp, Glycine max
  unsure at all n locations
tcaagtttgatattatgaagngcagaagggtgaaacttcctgcttttattcgttgaccacagagtggtacctggagatatgtcgcgggggtcaggagaccttggggacgtcaggtggtgtgctattgcccaaaaccaaacttgaccaatcccgacccaacccgggcataatcagtcagtgagaacctgtgatgtacctaaacaggcgagctcctggcagtcgacagataaaaggagcaaagaccgcctatcaaggatgctcgtgcggtggctggccatctgtgaatcttgtgtgatatatgggctatggcctct

SEQ ID NO: 12245 - DNA, 396 bp, Glycine max
  unsure at all n locations
tgatgataacaatgatgacatcagaagatgatgaacaaaaagctcaagtgaatcanagaacatctcacgagaatcaagatcaagatcaagattcaagaatcaagaattcaagactcaagaagacagccttcagaaaagtatcaagattcaagattcgagatctcaagaatcaaagatcaagattaagaatcaagaatcaagactcaagatctcaagaatcaagatcaagatgcacgaatcaagattcgagaatgaagaatagactcaatcaatataagtattaaaaaggttntttcaaacgttgaatagcacacgagtttttgacagaatctttaccaaagagctgttactctctggtaatcgattaccatattggtgtaatcgattaccagtagc

SEQ ID NO: 12246 - DNA, 396 bp, Glycine max
  unsure at all n locations
tcaagtttgtggatagcatccacagcattgttttcacccaaggaaatggtggtcctgacaccatcaagaagatcaccaccattgaaggtcagttaattaatgttacctttaattttttttatttgtaagaataaaagaataaaaaacatgtaccaaaatttacaccaactcatgtacttatatattgttcagctaattgagttagatgctttgattaatattatcattaattaattcaatacaagatattttcttgaacttatatataaacaaaaataactattttcacacagagttataattaaataaatgatattgtaataataatatcattaaataggaatgaagttacttanatgtacttatatttatatttgagtgttagatagagtaact

SEQ ID NO: 12247 - DNA, 311 bp, Glycine max
  unsure at all n locations
aaacaaatccatgtatggtttanagcaatccnccacgcaatggaataggagacttgatgaatttatggctcacataaagtttcatagaagtcactatgataattgtgtctacttcaaatttccttctaaagtcgagtttgtgatattgctattatatgttgatgatattttgatagcaagtaatagcaagagtaaggctgagaaattgaaatctgagctgagcacggaatttgaaatgaaggatttgggagcagctaagaggatattgngaatagaaatcaaacgggatagaacaaagaaattgtggatct

SEQ ID NO: 12248 - DNA, 391 bp, Glycine max
agtttacggcgggagaaataaaagaaaggaagcaaaaaagctaagcaaaaccaccgaaaagcaacatcgccacctatatgtcgctgtctcacaacaagtctaagtgtgtctctgagagagagagacatctttatcatcatttttaaacacaccaacaacacatgttgcaccaccaaccattctctctctctctctctctgggttttcttgtttttattgggtctctcaatgagagattgtaatggaaaaggatcatcaaagtctgtccaaggaacatagtgactcttcagtgtgttgctggcttatacgagtagtacttattcatcatctaactccttcaattctcttctccaatgattaactccttcttcaattctcttctccaatgatt

SEQ ID NO: 12249 - DNA, 377 bp, Glycine max
  unsure at all n locations
aatgacctttattctttgaagagtcgtgggaaccccttgattaccatttataaaattgaggacagcaatgcaataaaatgtacctttatttatattctcatgttgattactcctaccaaanagtatgacaaacctaaggtgtcccatatgagcacctacgtctgtattgaaacaaaacatacgaacaaacctacctaatgagtccctatgtacacaaatcatgaagatgttgagtgcatgagtgattgtacacaagacggttgcaccactcaacacattcatcataccacctattctgggcaccaacatagcacaaggatctaagatcttacgagccagaccctcatccaacaactctcatacttgatgaataacat

SEQ ID NO: 12250 - DNA, 397 bp, Glycine max
  unsure at all n locations
agcttctcatagatgtaatgtgctaaaagagagggaaaaggaagaaacaaaggtaacatctcttaccaaggagtctagctccgttggttaaattaggtgttgagtgtactaaattttttgatatcgtgttcaatatttaccgatattaagaaagtagcatctcaagtaaaccaaatagaagaaacagaaaaagagataatattaattataggtgacttttgtgtcttaaagatgtttaatttgtgttatgttaatagcgtgtagtagctatgcaaagagtgtgtttcttgagtgcctgtgtgttttttccctactatgatccttcttacgttttgagtggctttcagccagtngtgaataaaactatgcaactttagtagtatctactaaatatagt

SEQ ID NO: 12251 - DNA, 387 bp, Glycine max
  unsure at all n locations
aacttccttcagacaaggctcgatatattaagttaacttattctanaaananaatgccatatgtttgcttatacttattcaaggcacaaggctcacaatctttttntgtctagaattggatgtgtgtgtgaaggaagcagttgctcattacgtcaagtcatcttcaattagtttcgggaatagaacagaacaactatctttattagaaaaagattattgaacaaatagttataatgtgattaaattattatttttataaagcgcgtgattntgaaatcaaactttaactaaccgcagctnttactctgtatgactctccgtcctctttcatactcttgattacatacctctntgaatgattccaatgtgtaataagtagtcaacaca

SEQ ID NO: 12252 - DNA, 353 bp, Glycine max
  unsure at all n locations
agcttaaaggatgtgaacaaattagcatgggcagaaatgtctccgcattgattggtaaatctgttccccaaattcctgaaaaatgtaaagatccaggtacattcagcataccttgtattatagggaatagtaagtttgacaatgccatgctagatttaggagcttctgttagagctatgcctctgtctatttttaattctctatctctaggtcccttgcagtcaactgatgtggtaattcatttagctaatagaagtgctgcctatcctgttggtttcatagaagatgtcttagttagagttggtgaactgattctccctgttgatttttatattntgaatatggaggatggg

SEQ ID NO: 12253 - DNA, 416 bp, Glycine max
  unsure at all n locations
cggtgacaaaggcatatgggaggccttacttgcatatgaggtgtttctatgtgaacttctccaccttattagttgtaatttctcacagtggtcttgcctcgatcccttgngtgaagtaatcgattgccattagtaggtatttaactgttcttggggcctttaacagtggtcccagtatgttcattcctcacatggcaaagggccatgaggagctcacactatggagattgtccggaggggtgcatggaatgcttgcaaactcatggcatcatctgcatctctttgtaaagtcaagggtgtttgccctgaatgttggccagtagtagccaacacgcaccacctttgttgaagggatcgtccccagtatggagatcgaatattccatcgtggagtcctctcatgacataatttgctag

SEQ ID NO: 12254 - DNA, 385 bp, Glycine max
  unsure at all n locations
agttttgtgcaactgaagcatgggaagaagacattctatgctaggcatcattgatttctcaaagaatatcacccaaatcgttggttgaaaaaaacttttaatggaagataggagtttggatttgccccgataccaataacagaaaaaaaaatttatgagcgagtggaggaaatatgtactatctttggaaagacccaaaagaaggatgcaaatgagaaaaacaaatggaaaaagaggtctatattctttgatcttccatattggtttgtcctanatgttagatattgtattgacatgatgcatgtggagaaaaatgtatgtgatagtttaatcagcacacttcttaacattaaaggcaagacaaatgatggtttgaatgctcgtc

SEQ ID NO: 12255 - DNA, 308 bp, Glycine max
  unsure at all n locations
tcttggatgcctaagtgtggaccctctagggcaatcctccatttccatttattttgagccccatgaatgtcatggcctagcgtagctcatgtgtactacaccttcgagtatggagccccgcgaatgtcatcgtctagctctattagccaattctccattccacacttttatttggagccccatgagtgtcattgcctagcgctgtacatgtgtcctccaccttcaagtctggagctatgcttcatgaatgcctaagngtgaaccctcttgtgcaatgctccattctccacttttattctgagcctcat

SEQ ID NO: 12256 - DNA, 395 bp, Glycine max
  unsure at all n locations
agtcttttttctgtcccgagactccatggctgtaaagctgcgaatacaatcatgatgatctgattcatgttgaaggcctatagatttcgcaagaagtcattgctgcatagcctattccaagtcttcaagagagttttcttctgtattcttgaacccctcaaaagcctctagagtcctgttgtttgggcctttacaagaggaatcatttaaaccacccagacccttgtcctcccttagcgagatatcttcttctactacaggctcaagaggggcagctttagatgggccatgtctttgtctaacatagactctagagaacaaatcatagctcccttntgatgtctgagccgaagctgggtgggtttcctttgtacacccctccatcttcattattg

SEQ ID NO: 12257 - DNA, 445 bp, Glycine max
  unsure at all n locations
gcgagacacactatcgagcgactgacanatacaagttaatatatttggttgataaacacgaaaaaaggatacttagaaggtgcatgaaccacaccctaactttcgtcatccaccgaacattaatgggacccaatatctagtatattacatatcatatagtgacactatataaaacgacttaagtttttctaacgatcgttttcaaacgcaatagattcccgtgtcattcaatgctttaagcaaaagagaagacaatatagacaaaatataaataaaaatatgcactacatattagcggcaggcgaaatgaattatgctttcaagtataaattatgacagatttcaagtataaattatgctttcaagtgtaaattatatattatatgtaatattatgactctcaattgagaatctgtatttcaacacggattacttaatagtatca

SEQ ID NO: 12258 - DNA, 392 bp, Glycine max
  unsure at all n locations
agtttgacaaaccagcttggttaactaatgataataataataataactttattttatcaaatcttatcttatccagattttattctatctagattttattttattcaaattttatttcgtccagattttatttcatcacatcttatcttatcttgtccagattttatgttatttcgtttataagtttggacttaaaatagatttgtaagttttggggctgaggacctatataacagcaccaaagttttaggttagggagtttttttccggagaggagaataattctaggattttagaatttcagtttttattactgttcatgcacactgttcatgtagaataaaattcattttttgcaaatcatctctaatccatacattttntaatattat

SEQ ID NO: 12259 - DNA, 394 bp, Glycine max
  unsure at all n locations
taagtctagattaatntaattgtcactatccatggcaacctctttgatatttttttttttcctttttaagaggaaacagatcgagacactgacgaatacaaatcacanaaccgtgaagaaaattcacaaaaacgctaaaatttcataagttctcaacccacattccccaaaccccacaagttttcttcattntctcagcaaacaagcaggaaaaaaaaaaggcaaatcaggaggattgcacattatgcacaaagttagatctgagaaaaaaaaaaacccaaatgcatgcaaaatagaaaaaagaaataaacaagttgaatcaacaatgatgaaattgaaaaataaaattaanaaanaaaaagtagaaagagaaggtggaaaattgaaggttacc

SEQ ID NO: 12260 - DNA, 428 bp, Glycine max
  unsure at all n locations
gatcagctcgaccgggatccttaatcgactgagctgcagctttgtttttctttatcgccgccaccatcgggttagacggatatcttaatattagtactntgattttcagccttgtattttggctatattagtatggtatttgaacaattgactatttccttatttgcatggcatgtttggaccaatattaagtatgttatttgactatgtggagtttataattaatctatgcatggntggttgattcatggtttcatggctcttgcttcttgcttcatgatttggttgatattgtttacgaacattgtatggatgcttaaattaaatttatttgatacgcattttggctttttgttgatgccaaagagggagagaaatgagattaaatcaagcattcacatcaataatcaacttattgttaagatatg

SEQ ID NO: 12261 - DNA, 473 bp, Glycine max
  unsure at all n locations
tctgtcaactaactaatatttctaattgcaagttcacattcttgttctttctttgtctaacatacatacttgctcaaactcatgaaaagaaacacaaactccatcataatcatgcattcaaaccaaaatcaattcatacaccaattntcacaaaaagagtttcactgcataatcatccaagtcaagtcaaactgttctatatgcttcanaataagcataccaactaaccataaacaaaaaacaacaatgcatataaacactaaccaaaatcactaaaaacattgtactaaaactataatcataataataacaatccanaaagcatcatcaggaatntaaaattcctgtgactggtcctaagtgtcctgtgtctgaacatcctcctcatttgacagatgaagtactggagtagctggaggagaagtgttcagagtcangactagtgtgatcaggtcctcangtatctctaggat

SEQ ID NO: 12262 - DNA, 342 bp, Glycine max
agctttcatcaccgtcgtggtgctttcatcggtgtcatcttctcatgaccatcgtgtcactgtcaatgtcgaagtgtgaactcctccaccacaagactctcatcattagaagctatgaacccatctcttgcattctcatgtcctctttgttgaattatgatgggatcagagatggtgtggttgttgatgacattggctttacggtgcggcggaaggagcgttagggtttgtggttaagattttgaaggaaaatgggctcaaaaccatattttgggctcaagagtctattacatgtagagaaagtgtaacatcctatgatgtttgtcctaagacaattacctc

SEQ ID NO: 12263 - DNA, 412 bp, Glycine max
  unsure at all n locations
cactcaagctntctcttttgtgcaactatctcatcctctttttcaggtgtagaatgaagcttgtcttgttttggtgcaggtgctgctactggtggagacacttgaatttggattccagacctcaaggtgatggcactcacattnttcagattctgcacagtttgtcaaggatatttgtcagaattttgngactgagcttgtgtcaattgagtagccatctgccccatctgatttgtcaaactctgaataaaggctcttgtctcttactgacattgcatattctggatggtcatttgcctcactaactcttctaaggaaggttgaggaagagcctcagttgcttggtggatttgttgagactgccgctgtattggaggaggaacatatggcttgcttgtaccagcaacattct

SEQ ID NO: 12264 - DNA, 380 bp, Glycine max
agcttatgcttttacgaaaaggttcatcaagtcaagttaaagtatggaagtaaccatcctgcaaaaaattggggcaaaagatagatcgagttacatcgctgctttgtctattgccaaacacatttaggactgttgatgtccttgttacttccagtttcaccttgacaaagatgtaatggaccatgttaaaaatctaaattgattaaaccccatgtcatgcgtaaaaattcgcaatacttcaactgtgcatcattcacatacatacatgcttttcattggttgcattgttcattgcattctttccttgacaaaaaaaagataaaaacgaacttaatcattgttatcacaaagaaaagaacatgctttacggtacccttatc

SEQ ID NO: 12265 - DNA, 315 bp, Glycine max
  unsure at all n locations
tcctaccccgcaagggcattggatagaanactccaagtagatagcgccacagatgcatgagaaggccctatggttcttatgagccttagggtatatatcgggcccatgggctaagtatgagcctacttatctgttgaaatattacattaacgcttcattattattgggcctgtgatttatggctccataatgtacgtagggtaccctagaaatatatgatttttcagcccttgtattttacggtacctatactagatcttgtattatgggtagttgtgtagatttacatgaactaagtggatattngatgtgtgt

SEQ ID NO: 12266 - DNA, 354 bp, Glycine max
  unsure at all n locations
tctagcttctatgagaaaaacttacttgagaagctagagcttagctacacacacccttctaataactaagagcacctccttgagaagctttcttgagaagattcctaacgaagctagagcttagctacaaatgggggaaaagaaagagggagagaaagagaaacgagggaggatgatattgaaggaagaagaaaggaagagaagttgaactttgagttgtgtctcacaagactctgattcatcaaagttacgacaagtggtacacgtgcttctatttatagactaggtagcttccttgagaagcttctttgagaanaacttncttgagaagctagagcttagctacgcacaccc

SEQ ID NO: 12267 - DNA, 503 bp, Glycine max
  unsure at all n locations
cctctctattggggaatcacaactgatggatatgtagcatttgttatgatttagttggtaaggttcctctctaagagcaaaattataatctaagcaagttcggttaggctctcaagtggttgacaagtctcgtttaagtggtctttttggccttggttaacaacaaaatcgagtgttaggtgcaaaaattggaaagctccactacacataatagcagtattatttatttcaatatttgtttttgcattcatggttagtttgcttattntgtctgtgtggctctcttcatttatgaactntgagacttatatgttatgatatatttcatctatttgatgcgatgaactatcangtggaagggtcagcagtccttgcaggcacagagtagaagatccatcttcaaatagagtaccgtgtgatgcattaatggagtaatgtgtttatgtgcttgtgacagtaagtcttgcatgcanggccatgtaaatacctttaatgataactat

SEQ ID NO: 12268 - DNA, 373 bp, Glycine max
tcaagcttgaggaactcatacaaacttgaggcaatttatacgcttaccatggctagcatgatcacacctatatatctataattacctatccccactaattacgtgaatctatctcttatcattgaaatctgaactaataaatttaaatcactttgtaggtatctataaatacaaacagttgcagctataccccctttacctctttctttcttcttataccctaagcactattcatggaccgtatctgctatattcagctactttcttattgctagagagaagctaatgcaatcctaccccgaaaagcattgatagaagactccaagaatattggactatagctgttgaaaaaagccctacggtcctcataacc

SEQ ID NO: 12269 - DNA, 458 bp, Glycine max
  unsure at all n locations
gctcgcccaggcgagcaaggttgcttcctccagaagaaactacctttctggaggaatctttggagggcccaagtggacctggttgctatttacacccccctttttactaaatgcacccncttatatattnttctgtaattctttntccgtaacgttacgaaactttacgaatttcgtaacgatacttattttcctttccgcaaggttacgaatccttacggatttatgtatttactctttntggctttcaaagaagttacggaaactcacggattgcgcataaacacctcttttcgatttccgccacattacggaatttcacggattacgcaagcctgcttccttttggatttctgagacgtctcgggacttcatttattgcatgtcatcaatttataatcctcggacgaaattaaggtatgacagttgcccctctttacttacctctcatcggagat

SEQ ID NO: 12270 - DNA, 174 bp, Glycine max
agcttctattgatgttccaagtgattcttctgctgcagtaattgatgactgaagagccttacctgagatgttgaacatataacaaatatattgcgatatattctacacacaagattgttgagacgatacatgattcagcaataggggaggacaggcgcccggcacccttgttcc

SEQ ID NO: 12271 - DNA, 357 bp, Glycine max
  unsure at all n locations
tagtgttggagacttagtttgtaatgttattctgcccatagatagtaaggatcgagccttgngcaaatggtccacacattgtgaaggaccgtttaaaataattcagatctattcgaatggtgcttatgagttagaggagctaacccctcagaaacgtactttgagcataaatggtaagtatctgaaaaaatataaaccaacactgctcgaagttaaaataagcatagaataagagaaatacgggaaacataaaaatggcgataacagtaaattgccacgaaagggcatgtgtcaatattacatcgaatagtataatcgaaatacagaattcgaaataaagaaatcataagttctact

SEQ ID NO: 12272 - DNA, 353 bp, Glycine max
tctatcttgaataaaaactgttcgagaaaatgtccaactaaaaagtgaaataaaggaagaaagagaacgatatgaggaaaacaagaaaaaagacaggagaagattgaggaagtgaaagacaaaaatgaaggagtgtagcggcctcgtaggaacatgactgataaagaagaaaggaggtggctctagcagtgcaaccagcgagcaagaggcaaaatggtgtcgtttgggtagagaaatgcggaagtgtgcggagagaggggttctagaagggtcaaggagatgcatacagtcctaacaacgtcactctcaaacgcagaagcataataaacaaaggttgtggaaatatcataaat

SEQ ID NO: 12273 - DNA, 404 bp, Glycine max
  unsure at all n locations
cgcgggtctgtgagacanaggtcaagtgttcgcgatatgcgatgatgatgttccgagtactntggatttggtacgaccatgccctcctgatttccagctgggaaattggcgagtggaggaacgccccggcatttacgcaacgagcataatgtaaacctttacggttntaaaagctctatagttgggcctaggctntagagttnttccttttgttaaggctttgtgtcttttgtttntgaatttataatacaaggatctttcttcatctgttcctggtctctacccattctcattcatttgcatgtttacttctttttctgaaacggcagatccgatgacgagtccnccgaaggtactaatacctgngacccgcctatcgacttcgagcaagaaatgaatcaaac

SEQ ID NO: 12274 - DNA, 385 bp, Glycine max
  unsure at all n locations
agcttgttcatagaagtaataactaaatgggaattgtagaaacacctaccaaacgctgtcaaccaattaaaaaaaaaattgtggacaaatatggaagccattattctgactagcttccagcttctaatgaaagaattgaaccgccgttcacaaaatcatcatcaactggaatgttgctgtatcctctacgcattattggtgggtttaagttttgcagatcctcctcaaatacccactgatatccacaactgcacacctccaagtgcaaaccttgagagttgtcgaccatggcatgcattntgatgccataaagatcaagcattntctctattttaagataggaaaaaaactctcccctagtcaaatagagtaaccacaagtgatg

SEQ ID NO: 12275 - DNA, 567 bp, Glycine max
  unsure at all n locations
cgggcttgatgaatcattgcaaggcgaactatgatactaagctagaaggaagcttaatggaggaagagaatgagagagcggcgttgtgggtggctgtggcancnccncgcgacncnngctggagggctacctctcttctgtcgcccccctgcccgtccncgcgctcntgttctcacgtgccttctggtttccttttgtccctctgcttttgtgaccctccttgtcttccgtcgttgtctcttccgttgtctcccttcctgcgcccctccctccatgtctcccttccttcntggtgtgtgcctctgcagccctcgattctttacactctctcatatagactacctaaacacatcttgtataacgctagtgtcacataccacaacactcacggttaatctcagtccccgaccgtcacatacttatcctattatgtaacacctctccacactcttaattgtggatggtaagcttctctgcgtaccaccattcctatacaatatccctcacttgcaagtctcttatgtttaatcgttcataacctattctcactacacatgaatcttaacg

SEQ ID NO: 12276 - DNA, 377 bp, Glycine max
  unsure at all n locations
agcttgccgcccagctcgcccaggcgagctcagctcgcccaggcgagcagggttgcttcctccagaagcaaccgccttctggaggaatcttctggagggcccaaatgggcctgggtgctatttgcacccccatttttactaagtacacccccctctgctgttttttggtgattcttttttcgtaaagttacggaaacttacgaatttcgtaacgatacttgttttctttccgtaatgttacggaaccttgcggattacataatcatcccctttttgacttacggaatgttacggaacctcacttaattatgcaacgatgcttccatttgatttccggtgtgtcacggaaacttacngattgtgcataatattttttt

SEQ ID NO: 12277 - DNA, 477 bp, Glycine max
  unsure at all n locations
tctagccaatggacatatctccncatcctctctaccagttttctatctatattntaagcacacatatatctcanaacatcattattgaaccctanatcaacatgggcagttntgcttacattaaacatgtcaagtttagcataattacaataatttccttcacaaacaactaccctaaagcaataacctagtagaactacccattatagctcccaagaacccaacacctgttggatcgagtggcctcaaaataattaagaagggggggttgaattaattattcctaaacctttactaattaaaaatttactcttttaaggcttttacttatgttgttaagggaataaggagtagaagagaaacttaacagaaagtaaaagcgggaattaaatgcatagcgganagtaaaatattaaggaagaagganacaaacacacaagaagttttaatactggttcggaacaacccgtgcctaca

SEQ ID NO: 12278 - DNA, 363 bp, Glycine max
agcttatataatcgatcttagcatctaataaattggcatccttcaaccatacattcggtaaggagtgttctattttcttcaactcggattcaattggatcttctaaagccacactttcttcttttttagagcatggtctattttctaacatcctttttttgccttctcttgcatctatcatttcaactagagtacggttggccgaataaaccaaaatggctgatttttctgttggggctggtggatactttctgaaagcttggtccaatgcaaggactacttgacttaccaatgtcttgccttgccccctagctttcagatatgcaatcatggctagggtctacttcattttggtcatagcct

SEQ ID NO: 12279 - DNA, 326 bp, Glycine max
gacattcatatatcaagtatcataatattatcataaaacataagaacataaaatatcattattataattcaagtcatttaaacacatgcataataattaatctacacacacacacagttagacaaagtacataaattctctgtaaacatacagtatttgacaatttaaaatgtaatattagaataacattatccaaagtaagcaattcttaaaaaaattatcatgtctttataatctccactaactttaatagtaactttaatagatgaaatgtagctgtattagcagatggataatcatgcatattaatgacttgaatagggata

SEQ ID NO: 12280 - DNA, 384 bp, Glycine max
agcttgcatatagacgttgcaacttgcaagctctcacatcaccttctcaactcacaaaacgttatcacattaaccacagcatcgcatgccatcaccatattttctagtttgtgtctctaattctgctcttccatattggcctttgtcatttcaacgcctctctctctctctgatcagcttatgtttatgtttatgtgttctgcccaatttttgttctgctcgtggcatactaattttggacctcattagttaggctcatgaaaaaagcaagctacatgttatttccacctaacatttttgctgtttccaccccaaattttctttgtaatccttgcttctagatacagaacttatatattgcaaggcgcacacccaaaaccttat

SEQ ID NO: 12281 - DNA, 436 bp, Glycine max
  unsure at all n locations
gtcttgtctatctgctctctctnggtctcttgaatacacttcttgtcaacttgatgttntaataccaatcttctaactgctgaccacttcactcctctccccagccctctgatgttatatgagataatattcatgatgagatgtttctctttcccaatgcttcagcttcctttctatctctgatctccattgttgtgattntgtcgatgattgttgattgctcttcccctgatgtcatccccaggattntagccatttcccattgagcgctggcctcttctctaatgtaattattacatggaatcttggtttgagatgcccttgactnttctgattcagtttcgggctcccttgngcctgagtctggtggagcgtgttgtccatcattccccntgtttgctgcttccatttcctttatagcctgagtcaacttatg

SEQ ID NO: 12282 - DNA, 360 bp, Glycine max
ttatcttggctgttacaaaatcagagacatgagtcatactccaaatctaaaagaacattctatcttgatatatctcgatgaacaattgcgagtgaacagacgtgatgcataaaaaaaaattaaaccacaataaaagtttataacacaataaaaaaatacatatttcaattttttcaatgtcatccatgagctcttcaatatcacgtgtccatggagaggatcaacaccaattgtgtataaaccaatgcttcaattgtcttttgaggagagagctttcataacaattaagcactttacctcatgtcctataaggagactctgacagacccacaatcacaacatataatgatgatcgaaaca

SEQ ID NO: 12283 - DNA, 362 bp, Glycine max
  unsure at all n locations
gatcctgctattctctctatctacggttatgcgtganatttccatactacgtcaaagtcatggccaaaagatcgacgtttggctcaacaagcctgccaatggcgggacatggtgtatgtcgggatatctgtttagcaaatggctcagaaataagggaatgcccaaatcatttccatgacacacatatcatgataattagaaattcatgcataattaatcatagcacatatccatgtggacactcaaatataaggctttgtggccatgcaaacactaaccatgtgtttggatgaggaatttacaaattgctaggaagatcatatacacaacattgtgattgccttgacttaaattcctttcat

SEQ ID NO: 12284 - DNA, 377 bp, Glycine max
agcttaacatatttagaaatcaagtgatcatgtattccgaaatatatggggagtaaacggatgcacattttatctatatacaattgttcgttgcttgctcgaatcttgatttcaggtattgtattgtcatcatcaaaaagggggagattgtacatgcaatcggctttgatgttttgatgatgatcatgatgatgtgctgcaaatgggcttttcaagattaaaattcaagacaatacttcaagattacaagtcacaacattaagatgatcactagaatattaggaagggaattcctaattgaattagcaaaggttcggccaagtgatttaaaataaaaagtgtttcttaaagggtttactctctggtaatcgattacc

SEQ ID NO: 12285 - DNA, 480 bp, Glycine max
  unsure at all n locations
gtggtaatcagagcacaagagcttcaagtatgtgctccttatactctccattaatttntgctttaccttctcttccattagttagttcttcatttttctccatgtatctcctcacatgtcttgtgataaatgtttntaacatgattgtttagagtttccaccgattaaacttgctatagaagctagatttgattntatatggttcanatttcttgttcttgttcttgaaccatgaattgtgttgagtttaagttcctttgagttntgtcttggttatttttttggctganacctannaccatagaattcttaaaaaatattaaagtagaagaaaacctcanaaatctagagtgacttgttcacctattgtagttntgtcatagaagtcatgtctagtcatgaaacttgtcacataagatttcttatgttgtgcctgaattttttttcttggttctttgtctaactcatttgntcatgagt

SEQ ID NO: 12286 - DNA, 398 bp, Glycine max
  unsure at all n locations
agctttgagaaaattcaaacgacaataactttttactcggatgtctgattgagtcccgaaatatatcgagacgctcgaaattgaataccgaagcgctaagcaaattcaaacgacaaaaactttttactcggatgtctgattgagtcccgtaatatatcgaaaagctcgaatgtgaatgtagaagctctgagcaaattcaaacaacaataactttttactcggatgtctgattgagtcccgtaatatatcgagatgctcgaaatggaataccgaagctctgagcaaattcaaacgataataactttntactcggatgtccgattgagtcccgtaatatatcggaacgctcgaaattgaatgtagaagctctgagcaaattcaacgacaataacttttac

SEQ ID NO: 12287 - DNA, 388 bp, Glycine max
  unsure at all n locations
gagaataacaacacaaacaccattcaagtatgaaaacgttactgatattccttgggcagtggattggaggcagaaaggtgatgttacttcaatcaaggagtaccatcatcagtgctaccatgaccaataacagtaacaccatggtctagttgactcccacattgtccagtgcanaaaccccacttgagaagaattggaaagaagatccgccggcatcaatggtaatcgacactggttggtttgcaacagtaacaccaactgtctggatgattgatatatgtagctgagtatgtgtatctaaagcttacacatatatgttagaatatctgattcccataagacatatttgattatcatcctatatagatggttaatgttattctatcac

SEQ ID NO: 12288 - DNA, 390 bp, Glycine max
agcttcgtgggaaaccagtgcatggaggggaaggttggatagtgaagttgatctgtgggattcacaatcatgaattggccaagtccttagttggacatccatacggtgggcgattgactaaggatgaaaagaaaattattgctgatatgacaaagtcgatggtgaaaccaaaaaacatcttgctaacgttgaaggaacataatgccaacagttgcaccacgataaagcaaatttacaatgcaagaagtgcatatcgttcttcaataagaggagctgataccgaaatacaacatctgatgaagcttcttgaacatgatcaatacattcattggcatagattgaaagatgaagttgtggcgcgtgatctgttttggtgtcacccagatgctg

SEQ ID NO: 12289 - DNA, 492 bp, Glycine max
  unsure at all n locations
gctttcatatattacgggactcaatcggacttcctattaanaagttattgtagtttgaatgtgctcagggcttcggtattccatttcgagcgtctcgatatattacgggactcaatcggacatccgagtaaaaagttattgttgtttgaatgtgctcagagcttcggtattccatttcgagcatctcgatatattacgggactcaatcagacatccgagtaaaaagttattgtagtttgaatttgctcacagcttcggcattccatttcgagcgtctcgatgtattacgggactcaatcagacatccgagtaanaagttattgtcgtttgaatttgctcagagcttctacattcaattgcgagctnttcgatatattacgggactcaatcagacatccgagtaanaaagtatgggtcgttgcaattgctcagagcttcagtattccatttagagcgtctcgatatattacaggactcantcagacatccgag

SEQ ID NO: 12290 - DNA, 367 bp, Glycine max
  unsure at all n locations
agtttatgtcccaagctattcaaagtcttgactagcaaatttatttgtctaaattattgggatatgattatgttatacagtacaagtcaagatctcataatatcgtggctgatgcattatcccgaattgcggcaccggatgaagcacagttttactccctatcagtgcctatgtttgtcttcttggatcaattccgggatactctnttaaaagacacccaatacacaacactattggatgaggttcgtcaaaatcccgccaaacatcctgaactcaaggtttatcacgagcttctctttcgaaatggaaggatatggttgtcgttcgcaacacattttgctagcttactattgcaggaagttcactc

SEQ ID NO: 12291 - DNA, 488 bp, Glycine max
  unsure at all n locations
ctacaaccttttcttcccctttggcaacatcttagagtcaatgttctcgganatcaacacagttataacaatggagtagcaagatataagtatcagagtattaaatccaataagccaaactcataatcaagaaaataatcaaaccagaattcaaataacatacaatgtcaacaaccacaaaatatccaagactgaaacacaagagaaataagcaaagtacttagcataataatgtaaattctaagaaactaaaagccaaaatacacggcttataaaagataaataagcagaatctaaaatctaagaagacggaggaggtggtggaagatcaaaactctgacgaatgtatccgacatcctcttcaagctgtgtaagacgaatgtccataccggcaaagcgtgaatctaacgagtcanagcggtcaccaacatacgaacgaagacnccgtaattcggagaggacttcattcatgagtgcggaatcttcac

SEQ ID NO: 12292 - DNA, 294 bp, Glycine max
agtttctaatcagttgttgcttttgaatggacgattgttgctgttgatgaatattgttagtttggacaactctctggggattcagaagttgggtgtgagcttgatcgtgtggtaaagtttgatttgtcaagttccttggttggtgagtgatatcacccaactgctgcagcggctgtgtgactgctcccaatgcactggatgggcatggtggcttctgaatgtgatcgagttgctgggaagtctgaagtatattctgagcttcgacagatacattgtttgattgagagatttgtg

SEQ ID NO: 12293 - DNA, 415 bp, Glycine max
  unsure at all n locations
gctcgcccaggcgagcagggttgcttcctccagtagcaactgcctttctggaggaatcttctggagggcccaagtgggcctggttgctatttgcacccccattnttactaagtacaccccctgctttntttggtgattctttnttcgtaaagttacggaaacttacgaatttcgtaacgatacttgttttctttccgtaatgttacagaaccttgcggattacataatcatcccttgtttgacttacggaatgttacggaacctcactaattgtgcaacgatgcttccatttgatttccggtgtgtcacggaaccttatggattgtgcatcaatattctctttagttctccggcatgtnccggaatttcacaaattgcctaatgatgggtgccaagtacctcacaaggaccaaac

SEQ ID NO: 12294 - DNA, 375 bp, Glycine max
  unsure at all n locations
agtttctatataagctgaaccattttatcaataaacacaagttgagttttattcagaaaattagagtttatctcttttatcttagtgagagtgattctcctaaattcttgagtgattcaagaacaccctggctgtatcaaaggactttcacaacctttgtgtgttgccctcgctggaaagagtgattctttccttcctatcatctccacccttgttctttcaaaccataattccagaaaatccacctctgcccaaaattatcttgtgaccataactcccattttgcacactcaaattaagtgattcttgagcctaaattaaatttcaaaacgagacctttcacctcgttgtggaatcacctcattnggagccctg

SEQ ID NO: 12295 - DNA, 351 bp, Glycine max
ctggagctcatataccctcttgttcttgttctgatacgtataatatttcaaaaaattgctgtctggttttctgcttgcatatcctgtgtttaactggcatgttcttttcttctgtaactgcaaaaacatatttacttgttgagtggcttctaactttaataatctataacaattcttaattatacgaatgacgcccattgctgattgcatgaacaaatgaattgcaatccttccaatcctttgaatcacttctcatgctatcatgcatgaggaatatagtgctatcttattcatatgccgacatatataaattcttgacccagtcgagcatgatattaacttactatctat

SEQ ID NO: 12296 - DNA, 274 bp, Glycine max
  unsure at all n locations
tcaagttttacatatatgagaaaacctaggcttgtatccgtttagaattattactttcaagactaatggaggctcataatagaatcaggaccaatctaagttattaatacattctgcgtgaactaacttaggatacaaagtgggtttttacaaactaaatatatatacattagaagcgaaagaactaatcttataccatatttgttctttataaattaaattgcactagtagatcgttactatttaaaatcngaaggcctacttctaactaatt

SEQ ID NO: 12297 - DNA, 491 bp, Glycine max
  unsure at all n locations
gcttgagntctctccacaccattttttttatttaattcttttatattaacacttgatgtanatcacacagctcagctagttgtataggaatactctntcaagacaataatagtttatctacttgatcattccagaattttcaataatgttcaaaattcaatggccaattgatggttctatccgaatattctaccccgaattctaagtttaagccgtctaaatttcaaagggaatctaaatcttccacatctccacaaaccangatcctgcaatctcctanaggactctgtcctagtcaacttgcgcttgccactgttatcatttctataatgagagccagaatctccttccacgtaactacccttngaggctaactcactntctctctcggntccagcanaagggatggatccaatttgcttgatcatggcccaaggatcctggaattcatgctcagaatcactnntccacanagatatggacttgataat

SEQ ID NO: 12298 - DNA, 204 bp, Glycine max
caccaccattcacgaatgtacatcctatggtacttcttctgtccaaaacatctccacaccaattggagtcggaataagccacaagatgtggtctacccttctgatcgtgatgtaagaatacaacgcccatattcactgtacctccaagatatctcacacatctcttagtgtgctaccatgtgagagtgcctaggatcactcatg

SEQ ID NO: 12299 - DNA, 329 bp, Glycine max
agcttgtcttttcgtttatgcgagacagagaccaacatgctagctatcatcgccaagtaccaagaagagttaggtctagccacggcccacgagcgtagggtcgcggacgagtatgcccaagtatacgcggaataagaggctagaggaagggtgatcgactctttacaccaagaggcaaccatgtggatggatcggtttgctcttaccttgaacgggagtcaagaacttccccgattgttagccaaggccaaggcgatggcggacacctactccgcccccgaagatattcatgggcttctaggctattgtcaacatatgatagacttaat

SEQ ID NO: 12300 - DNA, 519 bp, Glycine max
  unsure at all n locations
gctatctatgcttttacctcaaattttattttggtgaatttatctatcaaagcattcaccctcaacatttaagagacttgtgagttntaccttctatcaatttacacataacataatttcactttntaaccccaattntttttttggcaaattttaccctgatcttttgttcttactaatggataatgataggaataaagtaagcaagttttcttaaaagtcaagagtaaaatgtgtcaaattaattntttgaaaataaaattcgccacaaaaaattgcgggtaaaaagtgtaattaagccaaattaactactattttcatcttactttttctttgtctttctaaaacaatatatgacaactattattgtgaaacggagggagtaacattatccattcttactaganaannaatattcattcctttgtatattacaagaaatagctatgataaccgaagaaatatgagttntgcttaccatggtattgatatgaagtatctatcacacaagatcatgac

SEQ ID NO: 12301 - DNA, 383 bp, Glycine max
agtttggatcctcttaacaacttcaccaatcagctttctaaaaatcaaccagttaaagttcacaggtgctataaatctgagtgacaaaaatgtatggtatttgtcaaatagtccctttatttgtcggacatttaaaaaaaaaaaaaaccaacccaaagcttatacacaactgactcaaggtaaattaaagaagctgcatagagatttactagaagaaatcaggatacaaacaagcacatttgtgttcatctccggcatgtgctgtataagatattcggttacagaagcctgttgcagaaaccccatacgaaaattttaatgataaaacattatatacattaaatggggatgtattcaataggagtgcaagcaggataaccctt

SEQ ID NO: 12302 - DNA, 484 bp, Glycine max
  unsure at all n locations
atggtatggtatagagaataaaattattatgttgtccctttgttnttcttcttcatcatttctcaattaattntcttccttaacgcatttgcatatgcaggttgagaaccatgaaattgacacacaactgatggngaaggtgaagcagttgatcaatgcatactatgaggaaaacctgaaggaaagcttctaccagtctgagatagccaagaggttggagaaacagcagaacacctctgatatagattgggaaagtaccttcttcatttggcatcgccccacctctaacatcaatgaaatttcaaacatctctcangagctntggtaagtcaatccatatatgttcctttntctttntttttacctacatgtattctcctttagagataattntgattgagacacagttaaacactanatgtgaatatttctccanacatanattcanactttgattaccatgtggtggaaactaacccttatg

SEQ ID NO: 12303 - DNA, 374 bp, Glycine max
  unsure at all n locations
atcttgttatacttgnatattatatgtgtgtgtgtgtgcgcgtgcgtgcatactttcgtttatctctacttatttagaaatgtgataactcactccatgtgtgttatttgtgtttagatcctgtgatgatatcgaattttatgttcgtgggagcagatgattaggtggatgattttaaataacctcgtgctagaggacgctgggatacaacactctgatggatgtgacattgacgtatgaatttctatattatttgtataatattctgaacatgttattttatgttgctccgctgtttaactagttttttgtttttaaaaaaaaatagacgactttgtttgcggctagagacgtttcatactcttataagtttt

SEQ ID NO: 12304 - DNA, 438 bp, Glycine max
  unsure at all n locations
accccttgaactacttcacattgatttatttggtccctcaagaactatgcgtttatgtggaaattactatggcttagtaatagtagatgattactcaaatttcttggactttgtttttgaaaaccaaaaatgaagcttttgatgattttcacaaacttgccaaggtgattcaaaatgaaaaaggtctcaacattgtttcaattagaagtgatcatggaggtgaatttcaaaatgacttttatgaanaatatgaaattcaccataatttttctgccccaagaacatctcangagactggtgttgtggagaggaaaaatagatccattgaataatgtgcaagagaccttctatatgaaacaagggtacctaagtactatatagaagaatgtatacatacgtatttgttcaccttgaacagagtacttattagacctatct

SEQ ID NO: 12305 - DNA, 397 bp, Glycine max
tctagcttataagaacaaaatcgcctcaatcattgtcaaatatgcatgtgaattaggacgcatcaacaagaatcaagccaaggctattgtgcaagcaatcaatggggcaaaacacaccaaatgattatgatgatggatggctcaaattctcacaaaggtaaactcatcactttcaaattgagctttcaaaactatcatgacatgtagaggagaatcaaggatttcaagtcacaaaatgtcaaaaatttttattgtcaaaacaattacccatttcttgaacatatcctataattcagagaaaaatatgcaaaggtcgtacatgcacacaaaattggacccaaacattaaactaacaatccgacaacattaacaaattaacaaaaccaacataactagc

SEQ ID NO: 12306 - DNA, 430 bp, Glycine max
  unsure at all n locations
ctaagttctttaacaagctntgaacaatatacttgcccttcatttaactgtctttgngcttggcggccacgctcaacanagtatttntgaaacctactgtacgttgatttgaccaacgctgttatgggaatgttgcgacaatccttcanaaccttattgatacattctgagaggttggttgtcatgtggccatatcgacgtccttctctatcataagccatcgttcatttttcttttgaaatgcgatcaatccatgttgctatggctggactcaattcacgaaattnttctaaattntgataaaaaaatgtgcttgcaaggagtgtangctgcataaaattagttatgaataacaatcttaagtacatatganagttaaataaacgtcaaccatcaaatatgaaatcttacccaatntcttcaacatttc

SEQ ID NO: 12307 - DNA, 274 bp, Glycine max
agctttgagttaattcttacgacgataactttgtactcggatgtctgactgaaaccagtgatatatcgagtcgctcgaaactgaataccgaagcgctgaccaaattcagacgaccataactttctactgggatgttcgattgagtcccggaatatatgcaccagctcgaagaagaatgacgaagctcggagcgaattcggacgacctaaacttgttactcggatgtcggactgaatcccacaatatatcgggaggctcgaatgtgattgttgaa

SEQ ID NO: 12308 - DNA, 397 bp, Glycine max
  unsure at all n locations
agtaatagnctgcatctagaagaagatagtaaacttgatacagggtaaatagataatgttcaaatgaagtaacggattttattacaaattcgtatgaatgaattgccaacaaagtattcaatatttctgccaatgtattgtcttgtaacttgtaaggttataagaacttaaaggcccctcaatatcaaaataacagaagaatcatcttgcactggccttanattattctgggaatttgtagcacanaatgttttcaacctctccgtctgtgttggctgataatcagcagttgtttggactctggtcatcaattgatttgctgttttcttcactctcttcctttcttgtactgtaattaatgtgtacaatttgcagcttcaaggaacacaatgatggt

SEQ ID NO: 12309 - DNA, 143 bp, Glycine max
agcttattttttctatacactaaccatagaccttcattcatacctttccgagtgagtgataatgctacacgaaaaattacggcacttacgatatcttaatccttagatgaaagcgtaagagactatcatagctaattactaaa

SEQ ID NO: 12310 - DNA, 344 bp, Glycine max
  unsure at all n locations
aacatgctaactntcacgtgtggcaccgtaaccgaggagatctccctgtgtcagacaggtgtccaattccaaacatgctgaagatcaacttatacacatatattatgatagctctttactctaacttctctaaaatctgaaatacatgagttgattctgattcatgggagaactacaacacactctagctgctatgtgtgtgttcttataggaagagtttacaaagaaggtcgcaatgcacacacgcgagctattcttaaggtacgtgatgatcttactaagagtgatactagttatggaacacacagatgccacccgctcgtcagacacactatcaagtaact

SEQ ID NO: 12311 - DNA, 110 bp, Glycine max
cagtacattatccaaagctaaaggcacctaactatgcacacaaatggatgatcacaccaacagcatacggacattaatcattgaatgaagcatagaacacacatcacata

SEQ ID NO: 12312 - DNA, 385 bp, Glycine max
agtttgcccagagaaggagtccacggaggaaatgcttaccacctcaaaagactggaaagcggtttctaatgactcctctgcggcttccacataaggcatagaggatgggcagctcaccaagatgtcttcctcgcctgatacgatgaccagatgcccttccactacgaatttcaacttttggtggagtgttgagggaacaactcctactgagtggatccacgggcgccccaacagacagctgtagggggggttaatatccattatttggaaggtaacttgacaggtgtgagggcctatctgtactgggagatcgatctctcccctaacctctcggcgggtgccgtcgaaggcacgaactgttagacaagtggcctcagatatctta

SEQ ID NO: 12313 - DNA, 417 bp, Glycine max
  unsure at all n locations
gcttctacattcaatntcgagctnttcgaatattacgggactcaatcggtcttctctattatttagttatcgtagtttgaatttgctcagggcttcggtattccatttcgagcgtctcgatatattacgggactcaatcggacatcagagtaaaaagttattgttgtttgaatttgctcagagcttctgtattccatttcgagcatctcgatatattacgggactcaatcagacatcggagtaaaaagttattgtagtttcaatatgctcagggcttcggtattccatttcgagcgtctcgatgtattacgggactcaatcacacatccgagtaaaaaggtattgtcgtttgaagttgctcagagcttctacattcaatttcgagctgttcgatatattacgggactcaatcagaca

SEQ ID NO: 12314 - DNA, 341 bp, Glycine max
agcttctagattagtgtaccaaatgaccgcggctccagccaagctatcttggaaaaagtgcattaacaacttttcatccctagaatacgcccccatcttgcgacaatacatattgagatggttcttaggacaagtcatccctttgtacttgtcgaaatcaggtaccttgaattttggggggatgacgatgtccggtaccaggcaaagatccgccatgtccgtgaacagatagtcgccatagccttcaacaactctcaatcactcctcgatgagatcgaggttccttctttcttccactgccaggggtgagccctctgtggacaaaaatattggccatgctg

SEQ ID NO: 12315 - DNA, 522 bp, Glycine max
  unsure at all n locations
tagcgtgcaccctcactaagcgcgaagactcangcttagcgtgaagaatgtccattangaagcccanaggcgtgcttagcacgaagttagcgtgaaaagtaagctactctaggcctataaaaggaataagaagcaaaaggagaagataccactctggagactcagggttctctaatgaatacatactaagtctgagcatctctaataggggaaatcctctatatatgtccattggccccttctcctcctatatccatcccgcttcttctatccacattagcccctaaattgtaaagcctctcatgacaatgagaggctaaacccctttagttagggactgacaggtctaaaaagtcacaagatgtattatatgtttcatatctatcaatgcaaacatgtgtattctttcctattatccttccttattctaattacatgtatcattcatccttgcattatctntaggagttaggtgctcgaaagaagataatcattagtagaaatacaaggaagggcttatat

SEQ ID NO: 12316 - DNA, 386 bp, Glycine max
  unsure at all n locations
agcttcgacttttactcgaaggtatctccttgtcttgtttaattttcgttttccgctagttgcagcatcttctggattggaaatatcgcttgttgcgtattctctttcaccgaacatgaaacattaactggtatagattaactattttgcatcttattatgctttgcttgcgccattgttgttaaaactccaatcatattgtttaaactttgaagacttattanggattaaagattgactatgaatttgggccaataattgtttcaaagaattactgagtgtcaaagtttaactgtagggtcaaaagttttagtatgactccctgatgctttgtgattgaatctggaaaactgatagcttaacagtacttctaaatttatacatca

SEQ ID NO: 12317 - DNA, 333 bp, Glycine max
  unsure at all n locations
tgtccacatatactntgttgcaacctacccttcggcgtgtatgtttacgcgagggctcacaggtgcgtcttccatgacaggaanatgtgtggagttgccaccaacgtttattcgaggaaaacgtcggagaaactggaaaaggcatggtctacgaactttaagtttgaaaggttcgggagttgtatttacgcacgaggaagatattagcaccccacgcgtccgtcacagagtacggcagcctttaatcaagtgtgcaaatatgacttcaatttgttatatcttcccttntttacgctntgtatgtctatgtatgccttttatattctttatctt

SEQ ID NO: 12318 - DNA, 394 bp, Glycine max
  unsure at all n locations
agcttttgttcctttntataaaaagagaagttctgaaactcatcacgttgtctaaaaaggccttgaggtggatccaagtgctataatcattcattagcatattcatgttttggtggcatactcaccactgtttgtttctttagggaactcaccataactaaaaaagcgcaaaggcacccctataacacccctatcggccttaaaagatcaaatggcttctatcacagaggccatgctaaagattcaataaactatagaagataatgctacagcggtcgcttccaatacggctagggaagcagaatcggtgctacaacccgcaataaacttgggccgagatgganacgcgacgggtttcaatcggaggtataatcctcaagctacccttatggtt

SEQ ID NO: 12319 - DNA, 390 bp, Glycine max
  unsure at all n locations
cttcctggctttattgttgactatagagtggtacctggagatatgtcgcggtggtcaggagaaccttgggacgtcaggtggngtgctattgcccanaaccaagcttgaccaatcccgacccaacccgggcatagtcggtcagtgagaacctgtgatgtacctaagcaggcgagctcctggcagtcaacagataaaaggaaaacaagaccacaaagcaaggaggcttgtggtggctggccagctgtgaaaattgattgatatgtgagatatggtctctggtaatcgattaccaagggtgggtaatcgattacaaggcttanaaatgaagacagggagctaagatggtctctggtaatcgattaccaggggatgtaatcgattaccaggctt

SEQ ID NO: 12320 - DNA, 391 bp, Glycine max
  unsure at all n locations
agcttgaataagcgatctaagtatttaataatatttagaatatgttttgaattccatctattaattaatagtaataatgttgaagtttaaatctgtatacgttataagttaattaaaccccattatcattattgcaacgaaaaagcattaattaaatgcatttattaggcttaaacattaaatgttgtaattactaaaaaaactaagtatttgttaaatggttttcatattgtcaaagggatttaacttaggttaggttaagcgaacgaattattgtaaatttttttatctttaattcctaagaacaaaanaattaattttatattntaaaattntattattatcataacattgatgggaaactaatacattacttagacattntttatta

SEQ ID NO: 12321 - DNA, 364 bp, Glycine max
  unsure at all n locations
cttcctgctnttactcgttgattacagagtggtacctggagatatgtncgcggggtcaggagaaccttgggacgtcaggtggngtgctattgcccanaaccaagcttgaccaatcccgacccaacccgggcatagtcagtcagtgagaacctgtgatgtacctaaacaggcgagctcctggcagtcaacagataaaaggaacaaagaccacaaagcaaggaggcttgtggtggctggcccagctatgaatttgtgtgatatatgggttgtggcctctggtaatcgattaccaagggtgggtaatcgattacaaggcttanaaatgaagacaggaggctaagatggtctctggtaatcgattacc

SEQ ID NO: 12322 - DNA, 345 bp, Glycine max
agcttccactatatccaagaaattcaatttccaaacatcatgaactaccctaaaccaagaaaacagggcagaggcagaaaactctgcccaaaacatattcacatattacagctttccttactcaaatactccagtaacattctcttcattccgatttgttaaccgtaggatcgacttgaaaattttactggagggtcctagtacataaatctacattatgaccgttgggatctgctagaaaatatccagaacccaatatgtactacctttcccataaccaacaatgcacaagcattttctacacatgaacaaaaattctgctgcacaaatttgacagcaattttc

SEQ ID NO: 12323 - DNA, 415 bp, Glycine max
  unsure at all n locations
ntgcagaattggtcttcgccagtgaaaggatcaatgtgggttctatanattggcatnattgatcatcctactangacgaccgaganaatctgggcaaataaagagggtgaggatgagggagaaacccatgctgtgactgccattcctgtacggccaaatttcccaccaacccaacaatatctttactcagccaataacaaactttctccttacccaccacccagttatccacaaaggccatccctaaatctaccacaaagtctgtctaccgcacttccaatgacgaacaccacctttagcacaaaccanaaacaccaaccaagaaagtgaatttgcagcananagcctgtanggttcaccccanattccgttgtcatatgctaaacttgatcccatatctacttgataattcaat

SEQ ID NO: 12324 - DNA, 385 bp, Glycine max
agtttaattggttcaggccggtttggacaagtctacgaaggaatgctacaagataatacaagagtagctgtgaaggtgatggatacaacgcatggtgagatttcaaggagctttagaagggaatatcaaattctgaaaaagattaggcacagaaatttaataaggatcatcacaatttgctgtaggccagaatttaatgcccttgtttttcccttgatgccaaatggtagccttgagaagtacctatatccaagccaaaggttggatgtggctcaattggtaagaatctgcagtgatgtagccgatggaatgtcctatctgcaccattactctccagtgaaagtagtgcattgagatcttaagccaagcaatatactccttgatg

SEQ ID NO: 12325 - DNA, 326 bp, Glycine max
  unsure at all n locations
gctactccgcacaatggtgacctcttgggaatgaagcaacaattcctccttctgatgtctcatggacacttatccttgatccaagtacactccatgcgaaaggtcggccaaaatcaacaaggataagcaatgagatggatnggctcanacattctgagcaccgacaaaattatagtagatgtggaacagaaggacacaacaggcgtcgatgtccaatgcaatctgaacgtggaagttgtaaattaatagattatgtattaagttgcgtcttcaatgcatcgtagtatccatgatcagtntgttttaaaattatttattaatatatt

SEQ ID NO: 12326 - DNA, 379 bp, Glycine max
  unsure at all n locations
agttttatatactttccatttttatataataggactatgaaagttttacctgaaatgttgaacatataacaaaaatattgggatatattttacacaaatcatgttggccaagcttcatgcgtatgttttgtactattaagtcaatggcaacatcattatctcctccactcgggatgataatatcagcatactttttagttggcaatacaaaatcttcaaaacttggctttacaaatctggaatactgaacaatcattntgtatttagtcaaggaggactttaaacatttttaaacaaaaacaactttgaataagttatatgctgaaaagaaaagctacaagaatcaataaaaaaatgttcaactaggggattgttagta

SEQ ID NO: 12327 - DNA, 408 bp, Glycine max
  unsure at all n locations
tacccatcacatgtggtactaggtggctgtcgtgtgatggtgcacnaacaagttttccacatccacaaagcgcgcataaacccaccatccnctgttgcccacctccaactgagctcacgtactcccacgtagcccatatcttcgtttctctcaacaccgggtccccatcaatcctcccaagctttcctcaacatccaggtaaaacaacattcaaaccgcacaaactatcacagccaagaaaacagggtaaaggcagaaaactctgcccaaaacaccaaccaaaatcacagctnttctcacttatagaccccagtaacaattccttcgttcccgttcgttaactggtggattgactcgaanatttactggaagtcttagacataacctacattttgaccgtggatctgt

SEQ ID NO: 12328 - DNA, 399 bp, Glycine max
  unsure at all n locations
tcaagctttcataagtgaaattaggtgcaaccatctccctatgagtcctctcacgaggtggagattgagccatgttctcagtatgaaaattagcagtcaaatgctcaaaatcataatgttcataatcaccagcaacagaatgctcagaatacacgaaatgctcagaatgctcaaaatgcacagaatgatcaagatgtacactatgcctaactaatctatgaaaggttctatcaatttcaggatcaaagggttgtaaatcacctagatttcccctagtcatgcactatatgcagcaaatcatgtatttctcanacaagcactaagggtaaaattaggggtaaaactaaaactatactcaaacgatatccanatgagctgantatttgtgagcaacacctt

SEQ ID NO: 12329 - DNA, 228 bp, Glycine max
gtcaacagaatcgtgcttcaaaagacgaataactcacaaggatcagatgtagttcagcagtttctaattagggaaatctattttctttttaactatataactcttatgttccaataagacaagatactatacattgtcaacacacacgaatttccatagcttcagctgtgtagtgaactataccagcgagcccgcactctgcaggacagcagaaacacaacatgaccc

SEQ ID NO: 12330 - DNA, 374 bp, Glycine max
agcttctaatctttatacaagaatgaagctctgataccacttgttagacaagtggcctcagatatcttaagaaggggggttgaattaagatattccaaactactttcccaattaaaaaaaactatttcactttttattcaagttatgaattcccttaatgacaatcttcttaaatattgattcaaataaaacaatttgaatatgaatataaagaaataataaataaaggagattaagggaagagaaagtgcaaactcagatttatactggttcggccacacccttgtgcctacgtccagtccccaagcaacccgcttgagagttccactatcttggaaattccttttacaagttctaaacacacaaggacaatc

SEQ ID NO: 12331 - DNA, 342 bp, Glycine max
  unsure at all n locations
tagtcccgctgtcaagatgatcattnggagtccttctgtctcttgctttcacattcaatcggcatttccaccaattaaatgtcaatacaactttccttcatggngatcctcacacagaattatacatgccacctnctctangctttagagacattngatccgaggctagtgtccaaactgcagaaatccctttatgggttaaagcaggctagttgtcaatggaatgacaagctatcctagtctctcattggttctagttattcctagttcaagacagattatntcccattcactaagttgaaactctaaagggtcgagcttcgctgcaattctttactatgt

SEQ ID NO: 12332 - DNA, 298 bp, Glycine max
agcttgccattcagctcgcccaggcgagcagggttgcttcctccagaagcaacagccttctggaggaatcttctgtagggcccaagtgggcctagttgctatttgcacccccatttttactaagtacaccccctgccttttttttggtgattctttttcgtaaagttacggaaacttacaaatttcgtaacgatacttgttttctttccgtaatgttacggaaccttgcggattacataatcatcccctttttgacttacggaatgttacggaacctcactaaatgtgcaatgatgct

SEQ ID NO: 12333 - DNA, 468 bp, Glycine max
  unsure at all n locations
cttcatggactatcaatatcagatcacgttcttcttgaattataaataactggcagattattggtttgaagtcaaaagaatcttgcttcanaagacgaaaaactcanaaggatcagatgtagttcagcagtttctaattagggaaatctattttttttttaaatatataacttttttgttcgaataaaacaagagaatatacattntcaacaaaaatgaatttccatagcttcagctntgtagtaaactagagcagtgagcccgcactctgcaggacagcagaaacaaaacatgacccattttctttgaaatgcanaaagaaaaaaaaatgcaacagttnttggcacatgtaacctttgagctntgaccggagaaattacttaatagaccctatnntttgcttgtgtcaccccatanaataatgagcaagaatggattatgtcccttggtagtatttactccaccata

SEQ ID NO: 12334 - DNA, 414 bp, Glycine max
  unsure at all n locations
taaatactatgctatttcagagagattatggaagtcaaatcctagtcgtcaagatatatgtggatgataccatattcagtgctactaatgacttgttgtgcgaggattnttccaaacttatgcaggcagagctcgcgatgagtataatgcgagaattgaagatctttgttggacttcaaatcaggcatacaaactatggcatatacacacatcgaaccaagtgcatgagggaacttctgaagaagttgaagatggatgatgaaaaccaaatgataacacttatgcatccaaccactgtacttggactaggcanagaatcatagcgggtggatgaaaagacatacaaagaaatgataggatatcttttgtatgtcattgagtccagacctgacattatgttcagtgtatgcttct

SEQ ID NO: 12335 - DNA, 357 bp, Glycine max
agttttctaatgagcttttgtccctggaatagagtctttcagttgtgggagtagttgaccaattgtgtcttctatttttggttgggtcgggtttcattaaagtagagcttgaagccctttttcttcctttcatcatagatgggcagtcttgggaaaactctgttaggcaccatcttgatgtcagtgcatctactaatgtggagtccaatgggataagtagttgcctagtctagtacgtacatttactttaagatgcatcctatcatattaagatattgttcggagggtattaggcaaccaagatgggaggtattgaatctggtgcgaagaatttagattagcaccttcttggaccat

SEQ ID NO: 12336 - DNA, 471 bp, Glycine max
  unsure at all n locations
actgaacatattctcggatgaaatgatgatcgatgtctatgttctcgtatcgttcatgatgagtanggttggaagcaagacatatagcagatttattatcacaaaatagcatcacagagggcacatcaacttcaaagtaaagaagtaactagcttaacctaacaatttcactagtaacagaagacaacgcatgatattaagcttcactggatgattctgaaacagtgagttgcttcttagaacgcctagagagaagggtgtctcccacataaacacaaaggccagaagtggatcttctggtatcaacacagcgtggccaatcagcatcagcaaatgcagtgaagttgacagagttgtgagcatggaagaacaaaccttgttcaggagcagatctgatatactacagacgaatatgaacaacatgtaggtgacgaactctaagtgctttcatatactgacttaatcgatcac

SEQ ID NO: 12337 - DNA, 562 bp, Glycine max
taagctaacctatacaatacgtcacatatacgataaggaatatagggtaatcatacacatatttaactagacaaagggagatttgaattcgaaagccatcgacacatcataggcgaatccgagctcagcgcccggtgatactctaaagtcgaccagcacgcattcaagcttataaatgcaatagactcttgctcaatcgattacttgataaccgaacgacgtacagccccttggatagcgaaacccgaaataaaaggagcaaatgcttgctaccctaacaattacattgtcattaacaaacgacatgcagctgaccaagatagaatcatttgccaaccaagcgataattgtgagtaccatctaatctatcctacaccaacataagaatatcagttaatgttgaaacgatagaacaaaagataactcaatgaatccctaatgcaatgagattcgacatctcgccactattgacgattcattaacatgctcttttttgcctaagaaaccccacatcacacacgttgcagtccctgaagagtacaacatcgagctgaaatggctc

SEQ ID NO: 12338 - DNA, 489 bp, Glycine max
  unsure at all n locations
tatgcgcatacttcttcacgaacgttcacttgcacaagacattcttataactattataaatgcacccatatacaatcaaggcaccttcgttacctagattatttacatgtacttccaaggtgtatttgttaccttcatcacacacatttcctttgctagattcacatacatgcatactctaaacactttggctatcaaaaattgcatacgcgcacatcttggtatttctaatacctatacatacacaaacttcatgatgaatcttgactatctacacaataaggtgctacatttcatgctctcccctttatttnttcaagtgttgttactacctagagccgcatgcaaattcaagtatattctctttagctcactaaaattgtattcaaattaagaggtagttccgtaatgtatcttctctacataacatgcaacatatctatagattgttgtgagacatcttgactaccagaagtatatgtcatacat

SEQ ID NO: 12339 - DNA, 311 bp, Glycine max
agctttcaacctgctgtttttatgtgcattcccttttagtcctcaaggcttttaatgatatcactgtggctgcttaagatataacaaatgtctggatgaatactttatcctattgtggcccacatggagtatccagacgcccatatctactgagacaatggtgactgcgctgatcattccgctcactatggtgtaaaattactctattatagtggacgatacactttgtataaacatgaggtgtacaaggggagatacttggcattgcttggacatttagataaaggtgacctttgtcatttgtatggaca

SEQ ID NO: 12340 - DNA, 349 bp, Glycine max
actgaagttgctaactttattattgtacccctttagcatcatgattagaatgttaaattgttgctagaattattttcattataattgatcagaggtgtgcatcccctgaacttcataaagcaccagtgctgtgctcttgattatattttggggtcttagacccttgaattgtaagtcacattggaatgacttgctctttactcaacaggcagctgctcaatcggcacacagtgctgaccctttctggagccttgcctcagtgcttttgagtctcgcatgttattttgcttacaggctaaatctgatatattttctcacctgcacattataattacgatgaatatgtctt

SEQ ID NO: 12341 - DNA, 382 bp, Glycine max
  unsure at all n locations
agcttgccactggagctgacccatcaactgccctaactcttttaaactggtgattcctatgctcttgaccttgacttgatagaacctctttttaagcgaaggcgtttgacttgatcccatgttttaataaagtgaaacaaaatctagtgcgaatcaaaactccgacatctatcatgggttgaatggatgaatgcataaagaaatgcatatgatacagatgcaatttatgaatacgggagcccgggaaattgtctccttcttagatacaacgtcttggggtagcacagtgcccaacgtatgtatttaagaaagtgacacggaccctccgttggnttgccaaagagaggngatcaagacagaacccatgcatgatgcatatgtg

SEQ ID NO: 12342 - DNA, 415 bp, Glycine max
  unsure at all n locations
atgtaacattgaggtatgggtttctgtttcaattgtatgattctctanacatattattttgctgtattgtatttcgttgcttaacttgagttctttagtaaacttggacgaccttgttttgttctggagatgttcttaataaattntatttagtaacagtgaagcgaatgtgatccttttacccacgtggatttgtttacatgatttgaataaaatgggtttaattaaattctggatttttatatatctttcttatttatatgtatctcggcgtagagggtgtcacactcagtgctcgcgtgaccctgttcacctgtccctatccctgttgctgtgcttgctcaactgctctactcagagtcaaagtacatcgtgacggatcaaggccgcgactagttcactactccgtcaatct

SEQ ID NO: 12343 - DNA, 366 bp, Glycine max
  unsure at all n locations
agcttgcttaagaagattcataaagaagctagagtttagctacacacacctctctaatagctaagctcacctccttgagatgagaagctagagcttagctacacaccccctataataactaagctcacccctatgccaaaaaaaacatgaaaatacaagaaaaagcccttactacaaagactactcaaaatgccccaaaatacaaggctaaaaccctatactactagaatggccaaaatacaaggcctaaacgaaggaaaaacctattctaatatttacaaagataagcgggctcatatttagcccatgggctcgaaatctatcctaaggttcatgagaaccctanggccttctttagtagctcta

SEQ ID NO: 12344 - DNA, 491 bp, Glycine max
  unsure at all n locations
tacctcaatgcnattttcctctatatccatgaagatagctaacatacaccttnggaaagtggttggtgcatttcacaatccanaggatatccttatgtatgtaaaaacatcaaaaggacaagtgaaagtagttntctcttggtctttaagatctactacaanttggttatagccgaaataaccatctaagaagcaataataagcttgtacggccagccgctctaacatctaatccatgaaaggaaggggaaagtgatccatccttgttgccttgttaagaattttataatctatgtacattctccatccggtcattgttgttgtgcgaattaattcattnttctcattcttaacaattgtcatgccacccttcttcagatccacttgcactcaactaacccatgcactatccanaattgngtangtcattctagcttctagaagtttanaacctctttccttaccccttncttcatcacaagaatcaatct

SEQ ID NO: 12345 - DNA, 373 bp, Glycine max
agctttggatttggtaagcaacacttatgtcgagtctcccccagtgtaaccgtgctcatttggcgtcgctttgatggtagctcgtgtgatgttagggcatggatacgagcccggaaggggtttgggtcggaacgacgacagcatggtgagcttggtggagtccaaagagaaccgcggaaggttcgggctaggatataagcctacacgcaccgacgtgaggagaagtgctctagaaaggaggggtagaagcatgggccaaccgtgaggaccgcaagtgaaagggattcccttacgtcacatcaatgaaagcctcatcagcgtgggctggatgtgtgaaatggcaatcgccatgatccatgatgaagtccttaag

SEQ ID NO: 12346 - DNA, 528 bp, Glycine max
  unsure at all n locations
tattagttgttgcatttcagtattactgcctcttatggaagaacggtatgcatttcttgtattgtatacttgcttgattattgtataactattggcattatcctctttcaatgttagcagaatatttattggttcaccattgactntgtcaataatcttttcatccaattaatgacttagtcaattcatgattgtgactcccacacattaacttcaccatccatcctttgcctccaaccactagtcttccatgcggcttaatggggcacccacattntctactgccagtcattattcttaacaaatctttcttcttgaccctatactgaccactcctttcacaaccaattaacacaaatgacgtcctttctctcataccaatatttgtgtctgacctcacaattaccgtcacanaaccaatttcataagcaacagctcgagcccaattcanaacatcatcacgggtagcanacatttacaatgcaatccanacatctntagttnttaagggacattcattaacttact

SEQ ID NO: 12347 - DNA, 357 bp, Glycine max
agcttctaggccttgtggagcttcttgcctctactgcttgaactgcacttgcaagcttagcttgaacttcaccagtaacatcatcagggtctggatcacttaatatttctgcattgatatgcatcattggcttcttgcttggatcatgcttgtgcttcatccatgtgttcagcttatcgaattggacatccttactaaaaactattagattcgctcttggatctaagagtttgtatgaccctatgggattgtagccaacaaagatcatgtgttcactcttgtcatccaatttcgcccttgattgatcaggagtatgtcatgaacatgatgaaccacaaactctcatatgcctcacag

SEQ ID NO: 12348 - DNA, 175 bp, Glycine max
aaagcctacatgcatcacatggaattcactatacatagcacaatactatccatgggttagcatgatcacgacgcgagctatacttgcctttatctaactagattgtacctcacacacttattgatatcagctcacgcgatggcaaatagacatgctatcgacttaatgttgaaca

SEQ ID NO: 12349 - DNA, 388 bp, Glycine max
  unsure at all n locations
agcttctcttccaattttctataaatagggggagaagtgaagtgaaaaagggttcagccccttatgcacttatctctctttcgaattcgcttggaaaaattgtttccatgaagaaaatctaagccgaggcgcgtccgaaatgtttccgtaaggaatttcgcgaaggtttcgaccgttcttcgacgttcttcattcgttcttcatcgttcttcgatcttcaacaggtaagtacctcgaaccaagcttttcgattcattctatgtacccgtggtggtccacattgtgtttcgtgtatttttattctcgtgttatttactttgtatacccccttttgacgtgcttagaccattttatttaagtcatttctcgcttanactagaaataaaat

SEQ ID NO: 12350 - DNA, 472 bp, Glycine max
  unsure at all n locations
cttattttcttctcctattagtgtgtgttgattattttatccaagcatgcccttatatacctttcgaagaagttgaatgaaaagagtctttatagaagtgcataagttgatattagtttatgtggaatatcaactcattntaccttatcatcttctcctgtaagtacttatagagaagtttatctagagaggaccttgtacactttctaatgtgtaatataatcctttctttgtgttctaagaaaataataacagggtcttgcagcggataaaggtgacatcgcaagaggcacagatttcactgcgacattgcctctgcctcacacaacagctattgatttcaggcanacttccagaatgacatttctatctattatcaaacataattnggtgtatntaatttcgagcaagactttgacgtttcttcagattctaacgtatcactntagtttagtagatgtaatcttaagtc

SEQ ID NO: 12351 - DNA, 392 bp, Glycine max
  unsure at all n locations
agcttactgatttagtcccttcaaacgggttgccatctgattcctataaaatatcagtttcaattttgtcacaatctctggctcagttttcggcggtcatcatccagtttccagcaagtgatggggctcttctgagatctagtttagaatctgctcgcctctatttccaccaaagggaaacatatccacctgcagatataatccatactagcgagtctcgtgagtggtgcaaaacatctggttattatgcagatcctcatttgtggcaagaaacttatgactatagaccaggattgactccttcagaacctaataattcaattgagttccccccggcaggtttgccagacatanttgccttattcggaaaagcagccagagatattctggat

SEQ ID NO: 12352 - DNA, 399 bp, Glycine max
agctttcataagtgaaatcaggtgcaaccatctccctaagagtcctctcacgaggtggaggttgagccatgttctcaatatgaaaattagtagttgaatgctcaaaattagaatattcagaatcaccagcaacagaatactcagaatgctcaaaatgctcacaatgttcgaaatgcacagaatgatcaggatgaacactatgcctaactaatgtatgaaaggttctatctatttcaagatcaaatggttgtgaatcccctggattgcccctagtcatgcattatatgcagcaaataatgtgttctcaaacaagcaccaggggagggttaaaactacaactatagtcccatgatatccaaatgagctgaaattttgtgagcaacacccttatatcatgaa

SEQ ID NO: 12353 - DNA, 369 bp, Glycine max
  unsure at all n locations
tcctggatctgagaatcacttagaattagtgangaaaattgtttccgtgaagaaaatccaagccgagatgcttccgtaacgctntcgagacgtttccgtgggtgatttcgtgaagaatttccaccgttcttcatcgttcttcggtcttcaaccggtaagttcccgaaatcgaactnttcaattcattctatgtaccttcggtggtcctcatttgtttcgcgtgctattattgttatttcatttgctttcccgtacccactttgacgtgctttagtcatttatttaagttattttcccgcctaatcaaaaataaaataaatttccaccgatcattcatattgtgacatcttttaatntctggtaaaataa

SEQ ID NO: 12354 - DNA, 349 bp, Glycine max
agcttctctttgtgtgagcttaactatgaaaagggtatgtgtatctaaactctagcttctcaaagatgttttctcaaaaaaacttctcaaggaagttttctcaagaaagcttctcaaggaagctacctattctataaatagaaacatgtgtaacactcgttgtaactttgatgaatgagagtcttgtgagacacaactcaaagttcaacttctctccctttatcttccttcaatttcgtgctcccccctctctctttctctccctctttcttttcctccattgtagcatcctctctaagcttcttatccaaggctcatcttggtggggaagcttctttctccatggctt

SEQ ID NO: 12355 - DNA, 214 bp, Glycine max
  unsure at all n locations
tactaagctaagaaanacattattttttatcatatttctagttagcttgcagttaatcttatttgtgtttccatatgaaaaagtttagagacattgaataatcttaaacttatgttttcaatgatcaagtcaataatatcaaggagggagcctttatgctttcttcaagaaatgacaactcattttgtaagtacaatggccttcctaaaggtat

SEQ ID NO: 12356 - DNA, 376 bp, Glycine max
  unsure at all n locations
agcttgcttctacaatctccccttttttgatgatgacaacttctgaaatcaagaaacacacacacacattttttcctagtcgatcactgacgtaaatttccattctccccctttgtttttgaatttatgcttcacttaacattaagttaattactcatgtgagttcttgatttaatccctatttctctccccctttggcatcaacaaaaagccaaagtgcgtaacaagtatgaaacatacaaatacaactaatcattcacacaacaatcatggaaaaatataaactaatcatgaagcaagaaacatgaccaaatcanatattatagaaaatcacataggcacataacataattcataattgttcaaacacaccatg

SEQ ID NO: 12357 - DNA, 482 bp, Glycine max
  unsure at all n locations
tggtcttcgccggcnaaggatcgaagcgggtctgaaaagatgcattntgatcatcctactttgatgagtgagaaagatggngcaaatgaagaggatgagaatgaaggagaaacccttcctatgactgccattcatacatggtcaaatttcccatcagcccaacaatgtcattactcagccaataacagtccctctcacccaatcatccacaaaggccatccctaaatcaaccacaaagtttgtttaccgcacttccaatgacgaacaccacctttagcacaaaccanaacaccaaccaaaaagcctgtaggattcaccccanattccggtgtcatatgctaacttgctcccatatctactcgataattcaatggtttctataaccccagccaagggttgctcaacctccattttctgaggatacgactcgaacgcaacatgtgcatatcatggaggagttccaggacattccattgagcact

SEQ ID NO: 12358 - DNA, 392 bp, Glycine max
attttgtgaattatattcaagagctcttaacactttggttgatgaattcttgtgttctattagggtaaatatatatggccaaaaggaaacaagttgactcctgactttttgctggatgggtcagatatggatcatcatgaagactaaaaggaaaaaagtaattaaaaatttgaagatttgcatgttcggttgcccatagaaaaaaagatacatgaaaaagaaagatgtgtttattaattaaagaattgaaagcaactttgtgatgctaattaaaagtatccctctggatgttgattctgttgaatttaaatataaaatccttatatgcataaaaacttggaacgtgtggttggacttaatggttggctggctggctgttactgcttatattg

SEQ ID NO: 12359 - DNA, 502 bp, Glycine max
  unsure at all n locations
gctttctctgacacctacattcctatacgatgaaaactntgtttgtatacacacgtattattataaaccctgtctctttatatcaacacggtctatataaaacatctattccttttcaaagatttctttntcctttntcaacatacactcgttgttgtataaaacaattttctttatatacactcattgctcacacaccagaatttcttttcacacattatttatacacacaaaatcttttcatacactgtntatatacaaaaactctnttcttttctttatataagatatgacatttgttcacaacgcctctntctttntctattcttggtgttatcatgatgtttgttcgttntattntaggacgacgttcctaaatgaaaactctacacggttccggaatttaacanacattatcgacaataacgaagtaagcactanagcaacagttcaacataatgtatgcacaaaacanatgacaatcaaaacaacataaacaaac

SEQ ID NO: 12360 - DNA, 274 bp, Glycine max
tattttgaagagcagatctgagcctttcttttatagactcttcatgtctggccaatataaccatttacaagagtgataacttttagaataacttacaaccaatttgaaaagttcaaaaaccctttcgaagagttacatctgtagatgtattcacaaacagtcactggtaatcgattaccatatcagtgtagtcgattacacagagctattatgtgataagatgtgactcttcacatacgaatttgaatctcagcgttcagaggtactggtaatc

SEQ ID NO: 12361 - DNA, 153 bp, Glycine max
ctcttctattgatgttctcatgtgcttcttctgctgcagtaattgatcatgaagagtcttacctgaaatgttgaacatataacaaatatattgcgatatatcttacacacatgatgttgagacgactctatactcaacaataggggatgaacg

SEQ ID NO: 12362 - DNA, 461 bp, Glycine max
  unsure at all n locations
tgtgtctgaatataaaaagatactagaattgtgtttattacgtaatttaatattgatttcatcaaattacagagcctgtttccaaagaacatgttaaattaatccttgggttcattaaattaatcatttgattcctataagtagtacttaagatttagtccatatacatccttattagtacacatcggtacctggtattactatgttccttaagttntatccttatatcgatgtataaggaccaaatcttaactttgcttttcatacaatgactaattcttagatgaatatcaccgataaggactaactaatttaaacttctgatttgtaaactccttcctattggtatgggacatttctttcaatgtcttctcanaattctttggcatctcatctttggaaattcttctaaaggaataaagctattatcagttgtttcaatcaacacatgtttctaaata

SEQ ID NO: 12363 - DNA, 58 bp, Glycine max
agcttatagagggagcttcaatggaggaaaagaatgagaggggggggggggcgccccc

SEQ ID NO: 12364 - DNA, 484 bp, Glycine max
  unsure at all n locations
acattgatcttagcactagtctcttccagactatccttgatggngatgggaacacgatccanaagctatgctagctccatcttctcatcttgccttactgttacatacttgaattcttcactcatagagaacaatcgacaaagctctatgtcccccattgtaggcttcaaatgctcgctatatgtggatatggatccgtgtgttatgtagtagtagctggcaatacgacccaagtcagtgacctgaaaatatccactcttcctatcatacttcaccaaattatttctatccaagatggttgcagccgtatgaatctgcaaaatttcagcaagatataaagatcanaatcagccaataaataatataagacaggatgaacaggcaagaaaaanattcaatattgaatatcatcngaaattcatttaagaaaaaatttgaaggagataaatcagactaccaaagaagaccaagaacctatctctaa

SEQ ID NO: 12365 - DNA, 390 bp, Glycine max
  unsure at all n locations
agcttgggattattgatggggacccggtgttgagagaaacgaggatatgggctacgtgggagtgcgtgagctcagatggaggtgggcaacaggggatggtgggtttatgcgcgcattgtggatgtggaaaacttgttgtgcaccatcgcccgaccgccacctagtaccacatgtgatgggtaccccataatcctacaagcttgagatgaggaagtgttgaagggtgaaacttcctgcttttattgttgaccacagagtggtacctggagatatgtcgcggnggtcacgagatccttgggacgtcaggtagggtgctattgcccataaccaagcttgaccaatcccgacccaccccgggcatagtcggtcagtgagaacctgtgatgtacc

SEQ ID NO: 12366 - DNA, 439 bp, Glycine max
  unsure at all n locations
tcttntctctctttttctctcaatcgttcttcatttttcttcctctnttcactctgtttcttccttatttcttgtacaaattntgtgtcttttccattagtgatgatcatggaaggctaaacacttaaatccaaggatccactccaagcaaggatgaatttgtgttctagtttagtattgttggacaaatggcctcaataacttaagatggnggattnttaatccccttctaaatgatatatgataggctcaaaatgtagaacatgaagcaacaattaaattaatcaatattctttatacgtgcaagacaaatatcacttgcaataaaataaatgagataagggaagagagaattgctactcgattatataggtcggcacttctgtgctacattatcctcaacaatcacttgaatttccatattatgtaatcttacagc

SEQ ID NO: 12367 - DNA, 381 bp, Glycine max
agcttgattttaataataatacaaccattgggagccattcctcttacacttattcattctcattccttttcccttcatattttacaccctttttgtatagttaagcccttcatggcaatgaagggctaaacaatccattgctgaagaactttccaccaaactctcttgatgtaattactatcactatctatttaatattattattatgttcattgcctctttccatgcttatttctatgtatttgagttgatcacccatttatatgctatgatagaggttaggtattggaaaatggggttaatccttataaatggaaagaacattctaaatgcttcattgctaaggataatgtgaagtggttatcctgtgatacatatcta

SEQ ID NO: 12368 - DNA, 486 bp, Glycine max
  unsure at all n locations
ggaggaggatgtctctgcacctttacgcanagggccttgttactattataagagaactntggaagggaaggagtatgttcaatattgcaggcgccttatatctgataaccaaaaggtgccatatgtgcatgacatcatgcccacaggacctgaagctcctccggagcatgttattttggatgtgaatgttaaggcacaacatcaccaatactgcaccaatactacagtattggtggctttaaggttagatcatatcattattaatggcattttttctcactttnttctggcttgtttcctgacttccaagttctgacctgctnttattntattccaaacttcacttcttttcaggtcagcccanataacaagttggtagcatacgccgaagacaccaaaggagatgaaatatatactgtatgtcattgatgctgagactcaagctactattggagagcctctttgtggtgaacatcatactttgat

SEQ ID NO: 12369 - DNA, 394 bp, Glycine max
  unsure at all n locations
agcttgagtttggtctggattgaagttaagctgagagtgcatgttgacatcataatagggttatggtaaataaaaaattttcttgatgaccacaaccatgagttattgccaaataagctttgtaaaatcctgactagtcataggtcaatccttgaggtaaacatgatgttgttgaatagtatgaaagcagttggaatgggaaccccacaaatttttggttctattgcaaatcaatgtggaggctatgatagggtgggatatcgtatcaaggacatgtataaccaaactggaagaaacaaaggttgaaaaatgtggatggtaaattagcattgaaatgttcgagtagtttgagtgtgaatgaacctttatgttcttncatacacaattgatgatg

SEQ ID NO: 12370 - DNA, 344 bp, Glycine max
  unsure at all n locations
ttgttggtggtgacacccctgttgatccatatctagaagacgagggagactgttctcttacagttntgttcttgtcaccttttgtggcagggttttttgttggagactntgctctcttttttggcaaacgaagctgtgcattgtcgccttccttactgctttgcttaaggagcctaacatgaaagggatcaacggatgtgcagcagacagacccatcaactccatttctttctaaagttacatctccgttgtttacctgacaaatgatagaacccacatcatagattgaaattatgatccatggttaatccaattaattggactcttcaatgtcaaacatcata

SEQ ID NO: 12371 - DNA, 378 bp, Glycine max
agctttcttttttttttgttctgattttttttactaaatgtagtttttttttttcttttaaatttctatgcttcaatgaaattttatttgtggtggttgagaaccataatgttaactttaatcaaattgtgaatcaaaattgtgatactttatcaccagaaatcacaaatgatagatgcatgacaaaggtttattgttacacatttatagagatgagaaaccaaaagacgatgtttctaaaaggaaggattacaacatatgtttaaccatttaataaattacattaacaagttatagtgtttgagatattttatttttattcataacctagtgattttttttacagcaacctcatgaaaaaatagacaactaacatag

SEQ ID NO: 12372 - DNA, 408 bp, Glycine max
  unsure at all n locations
cagagcttgaaagatttcgagtagtcgaagagaagttcaagtccatagccatcanagtctganaagagtatgatgaactaagggacgtcaatatggccaccgctgaagccttggaacgagaaaccaagaaggcccgaaaggaagaacacgtgccagcaaagttntgaggggctttatagggcagcaatagtaagctcaagctccgaagaggtgaaaggaatcatcatgggtcanaggcatgatcttgaaggacgagctaaaggcttaccttaggtcgaaaagaaatttatcccaacagttaagcgagactgaagggaatatgtgggccgtcatcgatgagtgcanagagaagctaaatctagcggcgactcacgagcaaaggctagaggatgagtacgccaagatatc

SEQ ID NO: 12373 - DNA, 403 bp, Glycine max
ttgttttgctcagcttctaacttctggacccttttaacagtgcatcgcttcgtgtgcatcttcaacacacacacacacacacatacacatacacagccacacacacacagaaacacacacacacacagaaacaaacacgcagacagacacgacctgttagggcacacacacacgctgagaaacacactcacactgtcacggacagacacgcacatacgcataaacagacagacacacgcacacacacacacacacacacacaaaaacacacgcacacacagaaacaaacacacacacacacacacacagaaacaaacagacacacacacacaaacacacacacacagaaacacacacacacccacactgggtttctgtgtgatagaagcattataaattaacg

SEQ ID NO: 12374 - DNA, 231 bp, Glycine max
attgatgtgtgtgctattgtatgtcatgagatgaaatgcaaaagttgagactcgtgttggttgttgactgaagaattgccttacacacttgtgcttatgagtgaaatagtgaccgtgaggatctggctagatgaaccttgatatctgtgttgcttgctagcttatgtcacttgtgttgcttaataaccatggtcatatctttgacattctgcatatctttatgaaaagctg

SEQ ID NO: 12375 - DNA, 554 bp, Glycine max
  unsure at all n locations
ctggcgctcacanttnggtagtccctgtatnaaccannccattagtnnannaaccgcgcgcggctnttgccgatcgatcatcaacgttctacgacgtatgtttatcttattgacacaagacaaccgcacttgagggtgcgctcataatacaaccgactccacctccacnnccactagccataatcaactactggaacctcattatcgtgcgtacactaatattgataagtgcgttgaactatcgcctagatcacgaagtagtaattacgataacatccgatctcacagtgttatagactgatttgcacgcaccaagcgcacgtagagtttgatatgtggaacacaacaatgtatcccttatcaagacacactccccacgctatcgaactataccatacgcatgcatccattctgattacgctataacttacaacatcgctgatgcctgtattatcgtagtttcaatatgaacgacgtgacaacacacagaactcgtcaatatatgttaagaaatcgcgtatcactctgcatgacgttgttcacgatactaatcc

SEQ ID NO: 12376 - DNA, 497 bp, Glycine max
  unsure at all n locations
cggacctatgatactcagcttggtatctccttcttcactacatcaagaatcaccgggttatgtcttctctgtggctgtcttactggtttagctccatcttctaaatttattcgatgcatacatgtggatgggctaataccaggaatgtccgccagggtccagcctatagccttcttatgcttcttgagaactgacaacaacttctcttcttgctcatcagcaagggaggcagatataatcactggaaaactcttgctatcatccaagtaagcgtattttanatttgatggcaaaggcttcaattctggtgtggtcggctggacagtggtagaaggagatggtttctcagcctttacctcataaagaaagtcagaggtatgtgtacttcctgaaacatggttagtcctatctgactctataaaatcaatctcaagaagtaaaacaccaccaccaggcattcatcaatatcactctcagattactctcacatcaaattc

SEQ ID NO: 12377 - DNA, 867 bp, Glycine max
  unsure at all n locations
gccgtagntantcttacgaacagactactctgctcagccactagttagtatttgtcncgtgntanttttgnatttnntnngctgantattancactgcgtactntcgtccatgactntcntggtaacgacnnacnganntgttgcagaccccgcttgnagtactcgtatgntgcacatgcgactcgnagtncactgctgcgacntattagttgcaacaccantgcatctntgatggactatgcatcggtgcatcanttactagctgggacangtagatcatttgctgatgcgcgctatatagatgagcancacntntagtagtgtacgaacatgtgatcangngatcgctagatatacactctctcananaggtatcacagtgacgtaggcatgataaataatgcgtagctatcgcncntctatatcgcgatatacgctactctagctcacagaacgacgcacttgtacgtctcgtaaagatgtgacgcttggagcacacaacactacgcgcagacggacttcatgctcagtgagacgacatactcgaatcttgatgatcggtgcgtcgcgcactcgctctncattgtactacttgcagcggaagacgcatctcgtatatgacgccgtacgtggatcacgagccagtattcactacctcacaacgccgccgcatatctgtgtcagaaatgttatgtgtcctattanactcacgaaggcgcctccttggtaaagtcatactatttatacatctctcactcggatagagcgcctatcgtacatatctctagctgtgatacacctatacgcctacgctacgccacccgccctcttcatcgcatatgtcatataatatgacgactgcggcc

SEQ ID NO: 12378 - DNA, 494 bp, Glycine max
  unsure at all n locations
nttgaacttgaacacggaacaccaatactcaggttgaggattatggggtacccatcacatgtggtactaagtggctgtcgggcgattgtgcacaacaagttntccacatccacaatgcgcgcataaacccaccatcccctgtttgccacctccaactgaactcacgtactcccacgtagcccatattctcgtttttctaacaccgggtgcccataaattcttccaagctttcacagcatccaagcaaaacgtcatttaaacagcacaagctatcgtaaccaagcaaaacagagcaaaggatgaaaactcttgtcaacacattaaccacaatcacaagttttttactttaagacacagaacaattcttcgatccatttgtaaccgtggatcgactccaaatttactggagtctatatgctaacccacattggaccgtggaattatatcaaatccaaactattctgtctacctttcacaacaacaacacaagcttt

SEQ ID NO: 12379 - DNA, 441 bp, Glycine max
  unsure at all n locations
tactcaagctnttatcattgcttagaataggatagtacgatttcatacattgtaatctctctgttgatgagtggcccattcaaaagtgccatatgtctatgggaaggatattgcacttacggtgaacaacggttgaacatatagtctttggggttagctggtctggtattagatgataaagaccatgtctcgcttcaattataccaatcttcatacgtttgttcgtatcctgcaacatgcatgaattggaagaaaatatcaatgcacagtcagtagatgacacgagttttgaaatggaaataatattgaaagcgaatgtgggtcttaataatacattaaacagcgttatattgggtgagaggtgtacgacttcggaatgagtaacgtggacatgatggccgttatgaagctttactgtgactgggttgatgcattcatatg

SEQ ID NO: 12380 - DNA, 529 bp, Glycine max
  unsure at all n locations
ttgacattgtagcctttgtancnncncacnacttgacacatanacgacggaagcttacttgatcgaaaatgcctaaatcatcgcgcatatatgcatgttattgatgaagctacgcaagagatccatcctggccattgagcaaacgcacacaggtgctaaacacaccacaagattatgatgatggatggctcgaatattcactaaggtaaacttatcactatcgaaactatcatgacatgttaaggataaacaaggatatcagatacaatacgtcgagagacttttattttcagaacaattacccatttcttgaacatatcttataactcaaagacaaacatgcacatctatcacaacgaaacttacaatatttaactaaaacccaacccaactataaaatctaactaatttacaccactaacaaagccaaacctaaaacacactctccccatacttaaacacgcattgtcctcactgtgcccaattaacagataaatacactattacctcanaagaagctgacactgtg

SEQ ID NO: 12381 - DNA, 841 bp, Glycine max
  unsure at all n locations
agctcctactacagcanaccatnctgcgatgctatnagggatactgtntgntcntcgcatataatnctgtancgatacttactatactcccnnaagaaacganacangannngnagtttggaaacccttttgatnaccnttcgtgtagtcactcgncgganacncatnaggacagactgangagcactnctctgcacacagtcgcatgtgcaagaagtcgccgacgagacgcatctgtatgacggctncgaacgtctggggaactgacgtcantcgcactacacagccgcagattgcntgtcantatccgtcgaggatagcgactcgtagaactcagctgcgcactcttatatcgcaccatcganaaacacacatagcgcgactattcactggcgtgacacgatcatctgtgtcatctcatantacacatgtcgatggcacntcgcgcgctatctgtgaactacgngatcactcgtgtatgtntgtggacntatgtcacacacaatcgcgcgtgctatcacgttcgatgtcacgccatcatggtgagcgctactacatgagtactgtgcgcgtgccacgcggatatccacctctgcgacgatagggcgacgcacttcccgaacgacgatgggtcgaggcgcctcaggnatacgtctgtctgggaccatcacacatttgtcggaacgaacctatcctattcgaattcgcacctagggtgtaagaagaatagtaatctgttgtataggtcttgaaatgcacgactgacacgcgaacatactcttacctaatgcaaaagcctgactgccggcacgctcgcacggataagtgatctccatcttcc

SEQ ID NO: 12382 - DNA, 443 bp, Glycine max
  unsure at all n locations
cttgaaaccccttggatatacgcgacactataggaatctcaagcttcatcgggagcaactcttattgattatccgattaattaagattagctaaatggaccatatatcagtctagacagtacacgaatattctccctaggctcgatgataagaaccgtacctttagactgtgttactccgcccactatttctatctctcaacttctagaatctcgnacacggtagagtatttgcatgctacgaactttgtgattagagatagaataattaaacgacttttggatagaatgggcacacaggtccctatttttcgactggcttttaccgtctatctttatttgcaaatgtctcatgagtgcacaaggacgtgtacacggtgaccttctttctgaatatgacccaaatgagggatctatattaacaatctgttaatagccttgccn

SEQ ID NO: 12383 - DNA, 579 bp, Glycine max
  unsure at all n locations
actactgatgtgctatcacatcacatgtgagtatgtataatttgttatatactantncncacntactttcncagaccaggacgatttgganncttgattccctctgtaatacgtggaactcatagaatactaagcctctatataagctgaaccaatttatcaataaacacatgttgtgttatattcacaaaattaaaggttatctctttcttcttagtgagagagaatctcctaaaatcttgagtaattcaagaacaccctggctgtatcaaaggactttcacaacctttgtgtggtgcccttggcagaaagagtgagtctttcctttctttcatcttcaaccttgttcttgtaaaccacaactcccgaaaatctacttttgcccaaaattattttgggggcataactccattttacccctcaaattaaggatttgtggcctaatggaatttcaaacaaacctttcccttgtttggaatccccttattaaccatgagcttgattatttccatttatttttggccgccccacttacctatgtttacatccttaatcattatgcaaaccacttttaaaccg

SEQ ID NO: 12384 - DNA, 397 bp, Glycine max
  unsure at all n locations
tagacataagttatataattgttcaaggaaatctgcagcagtgggtacttctattgtaagctaccacctcctgagacaccttttccttgttacctatcagcaccatagttgacatttaacttttttctagtgctcaatgcacactccaaattataaactcattcaagttaaatgttattggttgtgagcaatgctgtcaaatggtggcaccatggccaaatggtgtggaggcttctttgctacccaacctccaaaggaagattgtgaatggaagcctgctatggcggcaccatatgcaacaatggcatgtntatatggcaaaatttctgccttctgccatctgccattgataacattgttgttgagatacatacaacagaagctcctatgttatatt

SEQ ID NO: 12385 - DNA, 538 bp, Glycine max
  unsure at all n locations
nttgacncccttgnaacctagatgacgctctctatgtacgcgacactatacaatgctccagcttgcttgtgtggcttctatggaggcttgatctttgagctgcctgaggccctgttatggcgagtatgcaccatggatatgcatcggaagacctacgataatacgagagaggacgcgccctccactttgcaataagccatggaagaagaatctccaccaccacgatgagccttggataactagcttggataggaggcttcgatgtaggaatacacagaaggagagatggagagaggtgtgagcacgacattgatggatgatatagggagcgaagacgaactttgagttgtgtctctgaagactctcattcatcaaacgtacagcatgttgtacacgtgcttctatttatggactaggtatgctacttgagaggctttcttaagaagacttccttgacaagctgtgttgagacaactgtctctcgaagatagatcttagctactcacacgcgtctatactgacgtcacctccttgagat

SEQ ID NO: 12386 - DNA, 527 bp, Glycine max
  unsure at all n locations
cgtacacactttgaaaccttctgtatttgactacactcgtctattccgtgacactatatagtactcacgcctccgatgatgaatcaaggcgcttcttgtttntctgatggttgcacagatgatgactgagagcctcagagaatgagtttcagattgagtcagcgcgttcaggatcaagttatatttcgtgtttcttgacgagaaatcatgaatatgtaagaatcgggagaagtttgctgtcaagattctcgagaagatgagtttcagattcttgagaagagatcgagaagacttcacaatggaagtattcgatatatttttccaagaacaaacgtagcatagctttgtctctcataagagtattgctcaagatctctctagttaccagagtatgttctctctagtaatccgctacagtttcccattatcgatacccgcggccatgttagttgcggcgcttttcctgaattgcgcgtccatttgttttaaaggtgtgggatacatatatgtgacgatactaaagaccn

SEQ ID NO: 12387 - DNA, 334 bp, Glycine max
  unsure at all n locations
ctggaactacttcacatggacttgatggngcctatgcaagttgaaagccttggaggaaagaggtatgcctatgttgttgtggatgatttctccagatttacctgngtcaactntatcagagagaaatcagaaacctttgaagtattcaaagagttgagtctaagacttcaaagagaaaaggattgtgtcatcaagagaatcaggagtgaccatggcagagaatttgaaaacagcaggttcactgaattctgcacatctgaaggcatcactcatgagttctctgcagccattacaccacaacagaatggcatagttgaaaggaaaaacaggactc

SEQ ID NO: 12388 - DNA, 316 bp, Glycine max
ggatatccatctaaatccagagcatgcaccaaaatcatattcaaacgcatatccggcacatgttgcatgcccttcaatcttagtgtgccaccattattggtttgaatgcacacatcaccaatcccaacaatgtttgtaatgctactattgaccatgttcacttttccaaagtctcctgctttatacgtagtaaagaattccttgttggaagtggcatgataagatgatgttgagtcaatgacccattcaacacatgaatatgaaacacggcactattcatcttccacagagatcctgtgggtacaagtgtgaagtg

SEQ ID NO: 12389 - DNA, 467 bp, Glycine max
  unsure at all n locations
cattgcctaacaagccaacttacaacagccagccccaagagtctcagcataatgatgcacaggtcaaagttgagtatgtgaaaagattgtatgaccaagtgaaggtgcaaattgcaaagaagaatgaaagttatactaagccagcccacaagaaaaggaaggaagtggtacttgaacccggtgatgatcctggacatttgangacaaatgttttccaagaaggagggaatgatgagaatcatgaaacaagcgcaatacagtctaaaggcccaagtggagaaagacaaaacccccgagtggagaaagatgaaggcccaagtggagaaggatgaaggccanangcagagacactatcaagactataattngtgctgaaggccaaactaatttgaggcccaagtaaataagtttantataattattttatttatagatttgatacanatagattgattgatngatacaac

SEQ ID NO: 12390 - DNA, 501 bp, Glycine max
  unsure at all n locations
nttgaaacttggtacatgcgaactatngatactcagcctatctggagactcgctagcacacttgcgggaccaagcgtgttattctgtgaagatgaacattcatcctcttgctgaactacctgtggctaaacgacgctggattggctagcccaggtgacttaaacattttatttatgtgatagtccggcgctcaactgaacattcttgagccaagcacaattggttgcggcatacgctgagcttaactccataacttaatgaaatntttgctgagtttaatggccgttagcgcaacttattcttgggttagcttcaattcatgccggttaccttaacactatgcttattaggaacctatgaagagaaccatgctttctctacttgttttacacagatntcttttgatgatttctttctttgttctagatagggaatacatgttataaccacagtatatttcatccagatgcgatttatctaatagctgcagatacacaagtg

SEQ ID NO: 12391 - DNA, 483 bp, Glycine max
  unsure at all n locations
ntcataagtgaaatcaggtgcagccatctccctaagattcctaacacgaggtggatgttgagccatgttctcagcatgaaaattaacagccgaatgctcaaaatcagaatattcagaatcactagcaacaaaatactcagaatgctcaaaatgctcaaaatgcgtagaatgatcaggatgcacactatgcctaactaatctatgaaaggttctatctatttcaggatcaaagggttgtaagtcacgtggattgcccctagtcatgcactatatgcagcagataatgtgttctcaaacaagcacctgacaaggtggtaaaactacaactatagtcaaacgatatccaaaggagctgaaattctgtcagcaacacccttaaatcatgaaaagatagcacaaaaaatttcatacaataattcaaagtctaactatgaggactacctaagcataggttagaacaatacgacaataatacttgaaaaa

SEQ ID NO: 12392 - DNA, 528 bp, Glycine max
  unsure at all n locations
ttgaacctgagatctgtgaatacggacacttaactattaacctcggctcccttaaagtgacgacatgactaatatttctatattattgatgggcatatcatctttgcgatgcactcttgcatgtgatgtangaccgttcatcctactttgtgcgctgcttaaatctgtcttccctattctttaactaaggatcctaccgtattcaccaatcctcaggattgtcaacactcataacgtaatttattcgacgattacactgacaactattggcccatgtttgccacactatcggctgcatacagtgccactctagccgtgaactgcacactgagatgctnccgcctcagacgccatcggatattatgaatgagaataagctcctgacactcctagtaaagggggacttgcgaagacacggtgctcctgctgttccacgaggcgcaccggcattctagacttgccctgcgtatgcttgtgacggcttaccattgccgacttaatcgtccgaagaaaagccgacttctctcg

SEQ ID NO: 12393 - DNA, 433 bp, Glycine max
  unsure at all n locations
ntcataagtganatcaggtgcagccatctccctaagattcctaacacgaggtggaggttgagccatgttctcagcatgaaaattaacagccgaatgctcaaaatcagaatattcagaatcactagcaacaaaatactcagaatgctcaaaatgctcaaaatgcgtagaatgatcaggatgcacactatgcctaactaatctatgaaaggttctatctatttcaggatcaaagggttgtaagtcacgtggattgcccctagtcatgcactatatgcagcaaataatgtgttctcaaacaagcacctgacaaggnggtaaaactacaactatagtcaaacgatatccaaaggagctgaaattntgtcagcaacaccctataatcatgaaaagatagcacanaannattcanacaaaaattcanagtctaactatg

SEQ ID NO: 12394 - DNA, 216 bp, Glycine max
agccatgttctcagcatgaaaattaacagccgaatgctcagcatcagaatattcagaatcactatcaacataatactcacaatgctcaaaatgctcaaaatgcctataatgatcacgatgcacactatgcctaactaatctatgaaaggctctatctatttcaggatcaaaaggttgtaagtcacgtggattgcccctagtcatgcactatatgca

SEQ ID NO: 12395 - DNA, 344 bp, Glycine max
tgctctattcaatgggagtgacaagaatatcttcagactgatcaacacatgcacagtggccacagatgcctgggagatcctgaaaaccactcatgaaagaacctccaaagtgaagatgtccagatggcaactattgggcacaaacatcgaaaatcttaagatgaaggaggaagagtgtattcatgacttccacatgaacattcttgaaattgccaatgcttgcactggcttgggagaaagaatgacagatgaaaagctggtgagaaagatcctcagatctttgcctaagagatctgacatgaaagtcactgcaatagatgaggcccatgacatttgccacatga

SEQ ID NO: 12396 - DNA, 117 bp, Glycine max
tgtatcagcgtctagacctgaccctgtccctcttggtatctatggagtgcaggaacctgcaggaattattcgtgacctgagacctgcatcacaaatagggaacagacttctccttaa

SEQ ID NO: 12397 - DNA, 318 bp, Glycine max
  unsure at all n locations
tgtcaagatccatcctcttctctggtgtctttatgtcatcaattctggatgaatgagatcacatatattctgtacgacaacaccatgtgacatattgtatgaccttatgctccataggacctctgactcttatcttatacactaattgttgaagtacccaacagttngatacatatcctttcatctatatatattgatggctgccagaacttacgaccgaatcgtgcatgtcttgagatatgtgatattcatacactgtcatgttatattcgcttagttttcttattatctgtcttggttcagtgctgcaagtcatct

SEQ ID NO: 12398 - DNA, 426 bp, Glycine max
  unsure at all n locations
cttatgacggatntgcgagaggccaaattgtctcgaaaccaatttaagctggtatccaaccaggcctaaatagttcgattgaacacctgtacgacaagacaggatctgtggattcaagtaaaatgaccatatttcgctcacttcttcttcattgtctggatcgacaacaggaaaatagtcagtgaaccaggccgggccgacctctcgactaatgaatggagcatgttggggaagaaacttgtcaaagctcagaaaaatcttcatgtacttgaggaaaagcttttgtggatattgatcgaaagtcttgggtgttaatcgaagtgctctctggccttcgatcgagcgatnggcaacttcttcagcataatcttgcgtgattattaatcccattctctgttcgaaagtgccgttaagccacaactggag

SEQ ID NO: 12399 - DNA, 264 bp, Glycine max
tatcatgaaactaccctaaaccaagaaaacagggtagaggcagaaaactctgcccaaaacacattcacatatcacaactttccttactcatataccccagtaacattctcttcgatccgattcgttaaccattggatcgacttggaaattttactggaggttcccagtacataaatctaaattttgaccggtgggatctactagaaaatgcctggaacccgatatgtactactcttcccatgactagcaatgcacaagcatttt

SEQ ID NO: 12400 - DNA, 285 bp, Glycine max
  unsure at all n locations
ttcatttttaattataatgctagttttatggggaacgtattttatgtaaaatatgtaataacatatgttgatattggaactggtgttttgctgaagaatttgtagtacgaagaaatttgttgctactgtcagttacccattttaattaaatataatttgttgctgaaatttgcgatttaatcaattcacctaaacccagntcaattaaatataatttttatttattaaataaaatttggtggtgtatagccaattgaattaaatataattttattggtatttatt

SEQ ID NO: 12401 - DNA, 565 bp, Glycine max
  unsure at all n locations
ttctcacctctttatgcttatgtctacttgtctccgtatgtacantatnncctctgatcctaccgcccatgacccttggacttctgcctctcaatcacagcttattctttgggagaccgttccgactgcaccatacatattgccctgagaagaaataaacatggcgcgagattgagccactggagtatgctattcagccctgatggagctgaaccgaaccttttctactatcagaaggtaaaatctatccatggattcttgtgcccccggtccaaagagtttgccttaattgttgcaagacgactagcacaaaagaaggtgatgctttccacgctggaacatctggtaatgagggttcacatgctcttggattctagcacttcttcttatgcanataataaatctaactattgtttcacaagacgtttccaaagaaccaccccttgtatgctcaattggggatgttgggccatctcatgattgaggttacagtgcctggattcctctaatttaaaaaaatggatttctccgggttagaagcaacttttcctctctgaccactccg

SEQ ID NO: 12402 - DNA, 605 bp, Glycine max
  unsure at all n locations
ccgcttacagtgctgcacgatatatttactcatgcagtcactcgantatgcactgactttantncncaaaatcagaanangaaagattgggctttggtacgtcgtgaatccagacacataagcatgtggacgctgactattntagtctcacccgcttgtcatctatagatggcttgttcgatgacatgcggagatacccaagggtatccgtacctttgtcaactataggcaagcgagcctgttgatcgagactattttaatctcaccacttttgcaccccgacccatgagttatgtggcatgcggagatattcaacggttattcgcaccttngtcaactagaggcaagtgagcctcttgacgagactattttagtgtcacacctttgtcatccagagacggcaagtccgataacatgtcaagatacccaaggggtttccgcaccttttgtcagttagaggcaagcgagcctttgacctgctaagaccaatgtggtcatctgcaccctttccgaagatgtaggcatcttccggccgagacccacaacaagatcaatttccttttgtgacctatggggccggagcacacatacacacataatggttg

SEQ ID NO: 12403 - DNA, 444 bp, Glycine max
tgctcccaattcttccttacctttctctccatcactgcctctgtataacatttactctctctttctcaccgtgccagaatcataccctcaattcatcatttgccacatatccttcctattatgatccccattctctttgctaaccaatttcccaccatatatcatttaatgcaaatccttaatttttgtattgcctcttgtgccttcattgttggcattatgctcaaattttcttttgtccagagcccatccatttctttttttctctcatctgaactacttccatgcgacacgtgtatttaccttgtagaagctctgtatattcatattactttattattgttgccacatttcttgactgcactgcagatctacttttcttgagcccttataaattaccctttcccccattctttaatgaatactatcacattcacattcact

SEQ ID NO: 12404 - DNA, 281 bp, Glycine max
tacacaggctgaactttccatgtaaaaccatgaataaattcaagacaatattaactgaaagacctgtgaagcacctttatcattgtccacagcaataacctgaccaattccttctactttacgagcatatctgagagaccttagcccagaagcagacaatgcctgtgtgcaggcaagagagcaattatattacacacatgatacttgctctggattcaattgccataaaatattaaattcaatcaatattgaatggacgacaatgatgatgacatgaaaca

SEQ ID NO: 12405 - DNA, 467 bp, Glycine max
  unsure at all n locations
ntaagatntatctaacatagtattcaatcccacttctagtgtgatatttgntatttcaaactgaacatagcaaaataaaaacttgataagaaatgggccacaaaaattagctcatatcaaggcattaaagatatgcaataaaatcataaaaaaacaataaaagacacatgacaaatatcccaattcccgtgggtattggcccgaacccatcctgacttttacgaggagtngcctgtttggtcgagtataggtatgggtattacccgaanaatttaagcgtggatggggatggcgatggngatgacgacgtgtatcaaattatacttatagccatacctggccaccattacatttttgtatgaattttttgtcacaacatatatttacagaatatatcttgaatatttattggtatattttttaataattaataacacagtaaaagataatgaatcttattttatctt

SEQ ID NO: 12406 - DNA, 447 bp, Glycine max
tcttacaaagcatacggctttctggatgtagatgatgatatctatacagatggatcttatatatctatatatctatagatagatatatagatatagatatatagatatagatcatacaatgaagtaccgcacgagtgggtatataggaatccaaatctgccgaatcactcatgttatgatcttctacatcctaggtcttcccgttccttcatctggcttatgttcttcatgtagcattcagactgaatgactctatgaaattacgtcgctacttccacatggtacgggtaacgtaggagacatctctatttttccggggggaatccttatattaccacagcttaactttcattcgcctctgacatcacatgaaaggataacccgcctccctcttgaaatttaaacaaaggtgttcggtctgtcgtgttgaacaatttgctttcatat

SEQ ID NO: 12407 - DNA, 369 bp, Glycine max
gacatggaaatctacttcagaatatttgttgtcttggattaaaggctgaatgtggatattcattcaaagacttcagtatgacaaactgagataattatgcattaattaccaatgctgaacctagtgccattaaagagaaaaattgtgtaattttaaaaatattcccagaatctacattctagaatcgtttttactagttcccattgactttctatggagggggggaattaagattctgaggggaagttttataactatggctcatcccggaatatctgccacaatctatacttttacgaacataattccagaaaatgatctcgggacaaaaaattactgaccagttagatattggttttaccccccaac

SEQ ID NO: 12408 - DNA, 204 bp, Glycine max
  unsure at all n locations
tgcgtatgcganatcatgagcaggcatctccatatgatctctaacacgaagtggacgatgagccatgttatttgcatgaactttcacatgcgaacgctcacaatcatattattcgagattcactttctctgctctactctgaatgctcacaatgctcaaaatgcgtacaatgatcangatgcacactactgcctcactaatcta

SEQ ID NO: 12409 - DNA, 469 bp, Glycine max
  unsure at all n locations
taatgatggaatagctcttcctactatatcactcagctgcatgggtaaatactttcattcacataatgattaggtgattgagactatacatattccaacgagtaaatttagatacacaagtcattntcaccaattgtgctctgatcatattgcctttcctctctgcatatgtttaggagaacttttcctacacttttagatacataaaaataacatataaaaacaaccttatcccactaggtaaggtcggttacatagattacacatgccataaaattaatggttctgactcctgagaaatacagacaatctatttaataagttgtcactactgatttacctcattaatcaaagttcaacactagtaaaaaaattggatgttacagatcctagcatttagttgaccatatacaccanacaatttaaacttacaatacttacantgaagtttatactctctacttctaaa

SEQ ID NO: 12410 - DNA, 256 bp, Glycine max
tgcaccccaatatcggtgtctgatgctaacttactcctatatctactcaatagtgcaatcataacctatgccacggttcctcaaccttcatttttctgaggatacaacttgaacgcaacgtgcttatcatggaagggtctcatggcattccattgagcattgtatgaccttgaaacataacgtgcataatctaattgatgcatgctgtctaaaatttgacgaggatcatcgcttgtgatttgtgaattctgacatt

SEQ ID NO: 12411 - DNA, 402 bp, Glycine max
  unsure at all n locations
cttctncctcataaccttctttntagtctaatcattacttgcaatgatcatatcatccacatagagtaagagtgtgaatttcccatcatgcgagtgttttatgaaaaaggtatgatcatttgtagatgtgtgtaataccacacttcaggatgctttatttttaataaagatatcatataattaaggatacaatgaaagaataaaaatccctaattcctagttatacacctttccatatttccctatttacatacaagaaaatcatatctttacaatacccctcaagttgaagcatatatgtcatacgaacccaacttgtcacgaatgtagtcaacatgagaacccttgagagatntagtgaacatgtctaccacgtggtctttggagctaacaaagtcagtg

SEQ ID NO: 12412 - DNA, 447 bp, Glycine max
  unsure at all n locations
tctgatgctatatccgttggagtgtatatttataatgttaatttaaacagacaaaaaaatgagcttgaacctgtgaacacanactactaatacccttagagtggcaccacactagccttacttttaaattgcaaaggccagttgacaccccagtcttaaccaaccgtacacagtctttaggataaaattcaccactggtgaattcagtgagaggacatactgtgatgtgaataattggttattatattgaggaattttttttggcgagcatactacaaaaagtagtgatggaaaacataccgtactgatagacttaggggtccaatttgaaaagtaacattctatgtatcaaggaaaatgctcacagatgctgatatggcaaatggttttaacagcacattatgtgtgctatttgacagtgttttattattaaacttatgatgaccg

SEQ ID NO: 12413 - DNA, 304 bp, Glycine max
  unsure at all n locations
acgatgatagcacttatcgcaacatggtctgcttagcgcaatcatcataaatcctaaaatattntaacagttgcaatgaataggctaagtgcagtaagcgcgcttagcgcgctcatcgcaattcccaaaaataaacacaggggttttcaaccctttcagctacattgcccctaatgggcttcaaaactacctaaaagtctaaaatacctaacctgacaacaactaactacgaaaaccataaatgaactatcctaaggtttgaagcatgaaaagtaaaaatagaaatgtgctaacttacttggat

SEQ ID NO: 12414 - DNA, 307 bp, Glycine max
tctcgtagtacccctccacgtcattcccaaacaccgacgcgagccccatcccgtgataaccacgtgcttcttcgggtccttctgccactacggggcggacaccttcggcgccactgtggcggacacgaagaacacgcgcttcgcaaaggaggcgcatcgcttggcggcggcattgttggggccccgaagagggtccaagggagaaccgcggagggtgatgatcatggaaggccaggttgttcgttagagcctcgatggcgccgccgcctcgcatggtggttcccgcggtggtttgggggttggagat

SEQ ID NO: 12415 - DNA, 496 bp, Glycine max
  unsure at all n locations
atactctctactcccttgtttctactccgttctatacttgatctcatacaccnnccggnngngttttgtgccccgttgtgggagtgtaaaaaaacacagctcgccgcggggagactctagagacccgcgggcccctctctatactcttatagagagccgttaacataaccgggcggcgttttacacagcgtggattgggaaaaccggtgttaccacattaatgcctggagaaaatcccttttccctggggataacaagaaggcccaccattcccttccaaattggccacctatgtgaatgggcctatgcggttttttccttcccactgtggtgtttacacccatatgggcctctctaacaactgtctgtggccgtatttagccagccgagacccgcacacccgtgagcgaaccattgggggggtttaatatttttttaatgtttttttgaattcacaccttacctctgctttcttgtgcttcccggaacaactacg

SEQ ID NO: 12416 - DNA, 580 bp, Glycine max
  unsure at all n locations
atgaacctgagacgtgnactnaccccgccttgtaactaacccctctccggttaaggcgctatccgcatacttatgaatctcccttgctgtcaaacagaacgacactccgtatgttaaaagattcctttcatatcgcgttggagcaatttgctcgagcactttggttggcggcagtgttatgtccatagtcgctaagacaatgtgaggcgatagttgttattccccgttgtgctcatagtaccacaataggctgtgagtgtcgtccttttactacacancttatgctcttaaccactgtcaagattatacagcgcccctctatacatgtacccacacagatattgagtcactatgtnctcaccatattctatagccaccacanaggtatgactcagacatggctacgcatggggaaanacttactacactccttctggttngtaatacgtaacttgatgtgattgcgttaagaatactcaaaatacgtatctaaatcgtggccaaaattgggtctgggtgaggaaataaacgcaagatttgtgaatcctctcgtttagaatgtagggggcggtgtgacccg

SEQ ID NO: 12417 - DNA, 447 bp, Glycine max
  unsure at all n locations
agagaggaagcttcatggaggaagagaatgagagagcggtgtgagcgtgtggcctaccgcttagtggcgcaccatgtcttggcttgttgatacacactctcgactctattatgttcttccaccactatacataatctcttgcatggatccctcccacctatatgaacagtggaatactccatattctctgggcctcgactctcagatcttatcttcttcccgcctgttgacccaccatcgagtctctttgcacttttatccaactcctattaaggccttatggggaagcattaaattctatcaggctctcttttttgctcctactctaactatttcctccaacctacagacctcctttaaatcccctctcttaaatcctctaacaagacaacttctgtccttactatttcttccaatctgttggcaccccacttctctttgtcttcn

SEQ ID NO: 12418 - DNA, 508 bp, Glycine max
  unsure at all n locations
ntgaaacctgatacgtcgcattcgtgactatgaccctagctggccgtgtggactacataatatggttttgcttgaagtgtcaaatctgacattgatgtgtcaagtctcgtaatattatcatagaacaacgaaaagatagtgtcattattataacccaagtcatttacacacatgcataatacttaatctagactcacacgatgttggacaaagtacataaatactctgtgtacatacaatatcttgaccatgtcataatgtgatatcagattaacattattcaacgtagagcagatgtgtaaaagaattatcatgtctgtttaactccactacttggatagtaactataatagatgaaatgtagctgtattatcacatggataaacatgcatattaatgacttgaataaggataggctaagatgangtggacagaggtggaagggacagcctagtttatgatagaatacgtatagataagaggatacggattgcgttgagtgactaag

SEQ ID NO: 12419 - DNA, 440 bp, Glycine max
  unsure at all n locations
tggtacaactagtattctttaatctaccaaatcactattggttctaacacanataagaagatttattggtttgattgcacaatgactaacactttatcagcttacagatggataagtaatttcaacacttagtcacttttctcaagatgaacaaagtattttgagagctttgttaaactctagaagaatttccataaagatgcctttacccaaagaatgaaataatgagcgcttcaaatcgagcttcatattttcaaatctcttggtatatataaaccctcttcaatcaagtatatgttggctctatacggacatatttcctctcttatgcttgagtctgaagaaaatggcattggaggcattaatgcatgtacttttcatgctgagaaacactcttcttgttggtgtgttgacactccacaagaaacacttctttttat

SEQ ID NO: 12420 - DNA, 455 bp, Glycine max
  unsure at all n locations
tgagtcttagcataattgtctcatgcgctngctaattatttattatgaaattgatgtgttattatgtcttgatcagagcatgtgatttgtgtgtaatgtgattgatgattgaaaagtgtgattgatggatgaaaagtgaactttgaatgacaaagtgatggaattgcgtgaattacgtgtaagtaaattttatttggtttatatgatatgtatatctagttgtcttgtttctctattagttaggaatgtgataactcactccccgtgtgttgtttgtatttggatcctgtgatgatcttgaactttgtgttcggnggagcagacgactaggtgaattgatttaaggaaccttgtgctgaaggacgtcgagacacaacgctctaatangatgtggcattgnggtataggattntatattaattgtatgaagtcttagacgggcttgtttaaaccga

SEQ ID NO: 12421 - DNA, 418 bp, Glycine max
  unsure at all n locations
tgttcccatccagctgtcagattcttttccacctttgaacgttcctcttactgctaagtggcaccaaatgtctgcctttgtgtaagctctttntctttctttctttctttacactaattaacaatcctcttgtatggatcttacgtacctattaaacactggatttccaaatattctatggcgccgtacgttcagttttctttcttcttcctgcatgttaatcaccaattgttgccactctgtcatctatatcagtcactaattaatgctgtaattggtgaatctatatcattagtcaggttatttattcgttggatcattaatcaaatgatttctgcatgttaattaggatacttcttctaacanacacctttttatatatactcttgacatgaagtcactctgtgtccctattata

SEQ ID NO: 12422 - DNA, 389 bp, Glycine max
  unsure at all n locations
tttggctttacagctcactccttgataccattgtattgggtgtatcttggtngctgcatcttattacatttgatatctattttgcattgtgcataatcatattgtgtgtgaagaaaacttttaaattagacaaatttcttagaggtaaaactttctgtttaattgatacacctcattgaatccatacaataagtgtctgaagtttgtaagttaagtcttgataggttaatcattataatatctctaatcattcactgttgttgaacaagatgattagtatgagtcttcttaatcataccaaggaataacgatactctctttattgatgttatggggacaagatacttaatgatactagatatcaatcattacttgtcttgattgttcta

SEQ ID NO: 12423 - DNA, 389 bp, Glycine max
  unsure at all n locations
aaggaatgttttgagagatgtccttgcaagcacgccttctttatgaatttaagagaaagtggtaatattgncattgttattctttacatttatgatttgacttttactggcattgattataatatgttgaaggagtttaaaatgcgtaacactgattttcataattttgattaagtgttttaattagattgcaagaatcctctttcccttcctattgaagttccattntcattttccttcatagagcacacatggggttcatganactgctcatttcttgggttttaatgtggtttctatttgttgatgggttatgggtggtgactttgtgtgtgatggttgagtaatagtgggaaagctctcatctttggacccaatccctctcattt

SEQ ID NO: 12424 - DNA, 436 bp, Glycine max
  unsure at all n locations
tcaagatttagtcttcatgttgttcatgttgttctccctatctctaacactntgcccttataccaccacctnctccatcttcaccaccacattctcaacctccaacaccactgcctgctcaagattgactatgatgttcgtcattgtttttatcttcaaacccttttttgcttatgagaaaatggggagaaataggaattntgattgtaaaagaactaatatttttaaataaaagttggtttggaatattntcatatgatctctcattagttattaactattattattatgttgtcacatatgtcatatataattntactgtcatatattcttcccatgattgaacttanngggaagttaacaacattacatttttttcactttcttataactctaattacttttataaatcanaatttatattggttgtcatcat

SEQ ID NO: 12425 - DNA, 403 bp, Glycine max
  unsure at all n locations
ntgaagggtgcgcagcccaccatttttcatagtagagtatctataatgtgtctaccatcacgatcatcgtctccctttccatcattgggggtaccacctgngccgccagatccctccaccttttgggcgtgttctttgaaagatccgtccccctttttgcaaatgttctgtagttgcatcctatccggaaccatatcaaaattgtactgatactggctaacaaaggcaaccattaggtccttcctagaatggactcgggaagattccaagttaatgtaccacgtaacagctaccccagtaagactttcttggaaggaatgtattagcaattcctcatcttttgcgtattcccccatcttctgacaatacatctntagatggttcttgggacaagtagtcccct

SEQ ID NO: 12426 - DNA, 508 bp, Glycine max
  unsure at all n locations
ntgaaacctgcatcacggacacttaaaactcagcttaacattcaactgtgtgcgtctcgatgtattaccggactctttcttacttctccctttaaaggccttgacgggagaatcggctaatagcttagacattcaactgtgagcgtcgcgctatattacaggactcgatctgacattcgacttaaaagttattgacgttagaattggctcacatgttcaaaattcaatgtcgaggcagctcgttgtattacgggactcaatcagcattccgagtactaagtatcgtctttgaactgggcacatggtcgaattcaatcttgagcggttgaatatattaagggacttcatcacacattcgatgtggaagctattgccgtttacatgggcatgaggtcaacatccatttccatccgaccgacttattacggtacttaatcacacattcgagtaaaaatgattgccgtgtgaatgagtcagatgttgacatcatgcccaactcgcgtatatn

SEQ ID NO: 12427 - DNA, 243 bp, Glycine max
taagaagcagtgtgcatttaccgaagaagtatttccgtacgctgtgtacggaataactttatctgtaacaagtcttttacagttacgaaagaactctttcgtacaaaatgtactgaacacgaacttcttctgtatgtaacagatctacacataatagcggtaaaatgcgtacctcttgcgaaacaaaagtagctatggagggcggccaccaccattatctgacctgttccaaatgactacctc

SEQ ID NO: 12428 - DNA, 650 bp, Glycine max
  unsure at all n locations
cgtagctactctcttccgcgtatagtgaacgcgtgcaatgatgagtattcaaatatacanacttctattggacgaanaganngatttgaaccttggtacntcgcgaaccgtgaccacatgacactggaacttcgtctggacgctgaacaggcaacgaactcctttttctaaaccatgctacgtgctcgcgaccggtccctatctttcttacgcaacttgagtccacctattgctactcccataggagcatgagccgaatatttgtgtccgcgccatacgtttacactctgccgagcccgtcttggtcctcttgtgtcaaaggcgtcttgcgagtaatagcaattcttctgtcccgaaaaccacggcagcacgtcactattacgaacaggtgtgtatgcaggngcaacttagaactatccctctggcaaggattaagcctttcactatctctgctctatgagagctttgtgaattctatcgtccacttgttccgatgcttcaanaccattgtctttgctgacgaccgtttaacatcgcgagcgcatctaaaccccggtttgaactttaacccttcgcggaccccaccatgatgccttaccaatgccctaagcccttgatcttttgtaacgggattcccaccctcaggaccn

SEQ ID NO: 12429 - DNA, 408 bp, Glycine max
  unsure at all n locations
tgtcagatgagagacaagagnnttgagaaaaagttatagcatcacatagtctccctcaagagactccaacagagattgctcccagaaatgaccacgagcaactcgaagctgaagtgcaacctgtagaagaagttggtatgtgtccttttcctctaaaattatgtgtttcaatttgcaaaatcaattcttacattttaatctaaatttcattgactaatgtgtttgttatttatgatcttggtattcatttattgcttctttgttttcgatattcagacttatatcanagttattctatgagtgagggggacaacgatgatgatggtgatgaggatggngatgaagatgacgatgangaagagtatgttaatgtgatttgtcatcaaaaattctctagtcatttcaatg

SEQ ID NO: 12430 - DNA, 513 bp, Glycine max
  unsure at all n locations
caacccaaccccgcgacaactaaagggaagaaannaaaaaaaaagaaagaaatgacctgaacccgcacacgcacaacaacacgagccagaaggacgcccaacaggacgcggctgtacattcaccacgacaaacacgaaggacaccgggaacctacctcacacacacaacaaacagcacccgcccgacacggcgcccgagggacacagcagggaaacaacgacacggccagatcacacgaaggcaagaagacactcaccacaccaaaatcacccacaaccaccacatcgcagaaagagggncccacaacaaatagcaaagcacaccacaacccggcacgaaccacaacgaaggccaccaagaagaagcggcnnncatanncataccatncctcattcaacgaagtaaccacacccccccaacacaccaaacgaaaaaaagcagcactaaccaacgcacacctccgacaatgagcgccgacgaaccacaagagaacccaacaccccgaagcaacc

SEQ ID NO: 12431 - DNA, 693 bp, Glycine max
  unsure at all n locations
gggtcttgagagatgcgtcgctcgtgcatgcgattacgaaagcttgtgttgttccantacntacaaaagtcataggacgagncgaactttgggaccttgaataccgtcgccccctccgagacaccacatnanactaatgcttatgcacgcccagttcgcggcatcaaggcagcatgtatgcatgcttacaactctgaacatgcacggctggggtgattactctancttgtgcgtgtcactcatcgcgcatcacctgatagaagcgctctattccagagtgcngacagatcacaatnattgatgagcaggtcactgtatatccacgaatatgtgtgagtagcgaagatcggacgagacaatgggaacacaatcgacacttcgttatcacgtcatcgtcgctancgttcttgattggaatctctctgtactgcacgcttcgcttacgccgtcttgtcttacctttgtggtaggaagacaccaagtatgagttgtcatgacaagctgactctatccctcttagcgtcgatatatatatggtattattagtagtgatataatcgaatgctagtgagtcgaccagatatctctctcacataatcaaacctactcacctgcatcataacttggtttcctgccaccatatcctctgcgtcgactgcattgacaaccaccgtacccaccgttgtcattccg

SEQ ID NO: 12432 - DNA, 553 bp, Glycine max
  unsure at all n locations
ggcttacctcctcgtctccgcgacgtctcatctgcgttactcgtcgtcaaattgagacgaagtgaacttgaactgtcgcctcggacacaagaaactcaaactgtcgcaagagcgtcagcttggcancaccttccgttctttgagattagatagtggaccacatgctcctcctagtgggaaaagcccaactgaaaagccatttttgttactgaatgagcggacatgggtgataccacagagagactcttttgtgtgggactaccagctgcaggtcctcaatatagatgggcgggagacaatcactatgacgttggcacactcaccacagagtgtgtctcaaatcaccactgctgaataattcacccgtggatcaaactgagttgtggatggcaaagtactacacacgttactattctaattgtttggatggattatcaagaagacatccagagatggagataagtgattcacactctctgctctggatatgacgaatatcatcatgctttctagtgaagcattgtgctctatttgttagatattggagcagccn

SEQ ID NO: 12433 - DNA, 461 bp, Glycine max
  unsure at all n locations
cttgataaactggtataattaattttcaatattaaaagtatatttaatatctagaataaaaaataacttaccttgattntataaattctataaaaataaataaattattgttatatatatatatacacttttttaaaagtttaaataaatgcactctaaatttctaattagcctttagagtgagctgagtatgaaagtaaaatatgtttcttctaccaatgaggttcagtatccttaaagctgttgacagtctcatgatttcccccgctttgaagatatctttctttggaaaaaacaaatcttcttataacaatcgcggtatttatgcatgtgtttcatataatactactataatatttttcttataataattgngatataaatttagcattcgagcaactgcaatgtgcacaacctattatttangataaacaattactttgtgtttcaataggaaatga

SEQ ID NO: 12434 - DNA, 384 bp, Glycine max
cactgtatagactgctggttttatgtattacagaccaagcgatgtgaagtgttaaccgcgcatattggtaagactgacaatctcttctcttctttttcttctcattcctctcagtcgaattcttcaactgaaaaataataggaaaaattccgtcaatacaaatttgcaaggtagaagagaatatataaaaaggttgttgcttaacgatcagactcaccataataacaagaatccggacaaaaactgcgaccaaatcggtaaacaaggtcaaggcatgctgtacatagtccagatcgcccaagtgtgccctctcaacctattcttgggtgtctactacaatgtaacctacaaacaccaatagcccaaagtacaactgcaacacca

SEQ ID NO: 12435 - DNA, 442 bp, Glycine max
  unsure at all n locations
actgatatgtcagatgaatttgaatattactntcatctcaacagaggacaacgtcaatggataataggtgtgcttttattcttatgccgaatataaatgttattgctattgtcaactgtttggctatcaaaatataaggtttatttgattcttaaagtaatttctatgcttttgcttctcacaccctctctttaatttggagtatatgcattaattntttattttttatttttggtaattcttcctgttccttttcatcattactcatcatgtgtttttgaattgataggccggacttaagtgtcattgacctctgattctccatgtggactctcagagcaatggctctgaatcatcatgaaacctgcattggaaatcagcattgcctcttcaagtcgcccaataaacagactatgtggtatggacctatctttaaatttcg

SEQ ID NO: 12436 - DNA, 552 bp, Glycine max
  unsure at all n locations
ctctgaaactcgtcttcttactatcatgctttacacatatatatacaaaatgaagaanagannnttganccttgtnactctngaatctccaactcagctttctttccttgcttacgaatgctgagtcctgcaatactagtttaacaggccccattttatattagaaataattctgaaggcatggatcaaccaacctaattaacttggataggagacaaacaaccaatgttttacgatccacaattgaccactagatgcgtcatgtactggtaatcttacagcccctggtataacggtaagcgtgctcactgctgttattccctttttgaagtggaatacaatcattcctgttgacctctccttttttcatataaaatttggatataaaaggaaaaaaaggaccttacatggcttaattggtcaaagaaagactactccaataatgggtttccatcatttgaatttggggaccataaacctctctggctaccaaataaaattgaataaagaaaccccattaaccattaaaccagagaccaccttttttagttg

SEQ ID NO: 12437 - DNA, 439 bp, Glycine max
  unsure at all n locations
tagaatanatgtgaactgcgtacnctntggtaagaacctccataagttgactntgtgaaggtgcatatggagtacaaatcaagcagcaattgagcttttccttgataaaatgtttgtaaacttctacatgctttgttcgagcatgctaaacaggattatgagctatgctgatagttgatttattatcacagtatggtttcattggtccatcccattcaatcttcaagttctttatggacacaccaaattgactttttaatcgttgagaagatattntaaaagacattgctttcttcagatttttgtttaagaacaaaacccaagtgatctgggtacaatcatcaataaaagtcataaaccagcaagcccctgaatattttgaataggagatggccctcanacatcagtatgaacagaataaagaggaaatatacttttc

SEQ ID NO: 12438 - DNA, 250 bp, Glycine max
acagagtggtaccttggagatatgtcgcgggggtcaagagaccttggggacgtcaagtggggtgctattgcccaaaaccaaacttgaccaatcccgacccaacctatgcatagtcagtcagtgagaacctgtgatgtacctaaacaggcaagctcctggcagtcaacagattaaaggaacaaagaccacaaagcatggaggcttgtgtggtggtttggcagctgtgaatcttgtgtgatatatggggtat

SEQ ID NO: 12439 - DNA, 425 bp, Glycine max
  unsure at all n locations
tcatcaaagactatcaaaagtgcacaaccaacacctaagccataagctttataaaaaattgtcaaaagtgccaagtctgcaccaccaccaagttcttaatcacaacctgttacacatgtctttgaggattagaaagttcaccaacttggtgagatttcaagtgatgatgaacattatgttgtatgtgacattaattttgttagtttatatttgtagggaatttttttttttgggcgaggcaataactaacaaaaaagtcaagtgatttgaaagatcaatacctgttacatgaatagcacttaaggggatccaaagtctgaaaaagttaaactattactaatgtaattcanaggaaaataatgcaatcgacaagattgactgaattatgtgcgagattggttttctaacacaagcaacatctgatg

SEQ ID NO: 12440 - DNA, 383 bp, Glycine max
tgagggaaaacttgatgcattggtcaacctagttactcagctttccatgaatcagaaatttgcatctacgcctgttgcaagagtatgtggtctatgttcttctgcagatcaccatacagatctctgtccttctttgtagcaatctggagtcaatgagcaacctgaagcttatgctgcaaacatttataatagaccctctcagtagcaaaaccaacaacagtagaataattatgatctttcaagcaacagatacaatccaggttggaggaatcatccaaatctgagatggacaagtcctccataacaataacagcatgtcccttcctgtcagaatgctgctggtcctagcaagccatatgttcctcctccaatgcagcaacaac

SEQ ID NO: 12441 - DNA, 186 bp, Glycine max
gcggacagaacccgctctgatgccaacttgaagctttgatattttaatgagtaaaaaagttaactcacttagcttaattttattgcctttaacacacatccatatatacacaatacaagacttgatgagaaaacagcttgatgggacatcacaatgttgtcttctgaaacaaattaaacagaaaat

SEQ ID NO: 12442 - DNA, 64 bp, Glycine max
ttgagcctagatactgactcaccatacaccttgtatcccggtgagaatgcgcatcgttaccctc

SEQ ID NO: 12443 - DNA, 462 bp, Glycine max
  unsure at all n locations
tcaacatcagaccacttccagggtgctggaactacttcacatggatttgatggngcctatgcaagttgaaagccttggaggaaagaggtatgcctatgttgttgtggatgatttctccagatttacctgngtcaactntatcagagagaaatcagaaacctttgaagtattcaaggagttgagtctaagacttcaaagagaaaaagactgtgtaatcaagagaatcaggagtgaccatggcagagaatttgaaaacagcaggttcactgaattctgcacatctgaaggcatcactcatgagttctctgcagccattacaccacaacagaatggcatagttgagaggaataacaggaccttgcaagaagctgctanggtcatgctccatgccaaagaacttccctataatctctgggctgaagccatgaacacagcatgctacatccacaacagagtcacact

SEQ ID NO: 12444 - DNA, 442 bp, Glycine max
tgaaggacatgcacaaagtgtgactatatgatgtggcaatggtgtgtatcaagcaaatgctcacctcccccttaggctggaccaaactttaattgggttgggcttctcccaattcaattaaatttatctcccaacacacatcaaatagggcacttaatgcatgtgaaattacaaaactacccctaatccagaaactagtctaggtgccctataatacaagagctaaaaaatcctacattactagggtaccctccctacactatggagccctaaatacaagtcccaaaaataatgaaatcctaatctaatatgtacaaagataagtggtctcatacttagcccatggacccaatcttcttggagtcttctatccaataccctcgagggatagtgatgtagctccatgtggagcttgagaaccttgatcttcttcatcaatgga

SEQ ID NO: 12445 - DNA, 445 bp, Glycine max
  unsure at all n locations
acaacaagtggagcaatatctgtgctcactacacgttgtcgttgaccactatcactaccctccctacatgagagcctagacgatgggactctgacacttncttggatgagtacaagaacacgtctctgtacgtacatgctatcaacagatgaatggcctcatgaagattacactgaagatgcattcatctggatataaactgcacaaggcactctacacgtgtatgcggaactgtatcagactaccaagatgatactcgtgatgggagtgccattttcgcacgcatatataggattactacgatggaccttatccacggatattacttgaccgccataggatgaacaatttgtgtcttgttaagccatgatagcatacgtattgctgttcacctcaattacactacttgaagaaccaacattctttgtgtcagcgcaatattatg

SEQ ID NO: 12446 - DNA, 428 bp, Glycine max
  unsure at all n locations
tctggtgggacatcttgacttgctgtccaatctgacattcaccacagattctgccttcttctattttcagattgggaatgcctctaacagcacctttgtcaatgattttcttcatgcctcttaagtgcagatgtccaaatctttgatgccatattttgacttcatcttctttggagaatagacatgtggaggagtaactggtttcttgaggtgtccataggtaacagttgtcctttgatctgctgcccttcattaagacttcactcttctcatttgtcaccaagcattctgactttgtgaagtttacattgaatccttcatcacacatacgactgatgctgatcaagttcgcagtcagtcccttcaccagcagtactttgttcagactangaagtccatcatggactagctttcccattccagtgatc

SEQ ID NO: 12447 - DNA, 317 bp, Glycine max
cgccttataacggtcctctttgcttatattggttaaaatggaccattcaaagcataaaatcaacatataaatttatcgcttttgcaagaactacgtaggtatgattttctcatcacaattgaggatacgtaggagcaaaagccccacttttgtcgaccaccccaagagatcgttaattatccaacgccttaacgcttctctcatttcaaaaatcaagagatcattaatggtccaacgccttaatgtttctctcctttcaaaaccaagaaattgttaatggtccaaacgccttaacgtttctctccttttcaaaaatc

SEQ ID NO: 12448 - DNA, 509 bp, Glycine max
  unsure at all n locations
ntgaacctctgcacattgaactatgatactcagctatcactggagttgaagagttttgtcattgccgaaatcattcactaccacagatggcactttttcgcccttgtgttaaatgtgtccaccggaggcgtcattcgctggatgaccttatatcgcatctgatatgtgatggctttaacccgacgtacaccaagtggatatggcatggtgagttggttggtcatacagcaacatgtccaccttatccggttgatctacaaagcggagatctcatggaagacatgattcgtgatcttgggccaaagggctttcgggaatgtcatgcagatatttacgatgctcttcanacagatgcgcatacgccatttgttggtggatgccatagctttactatggtatcagctgtgctaacttttgttaacctacaagctcgattcaggttgagtgaccaaagctttacagagttggtttgttatggaaatatgtttcctgacataacagcttacccg

SEQ ID NO: 12449 - DNA, 364 bp, Glycine max
  unsure at all n locations
tttttttttttatctggtttatttcttattttcattntttttatttatctcatgaatctctgcatcaaatcaaattaaattaatttttttcttaatttattattcaaaatagtaatttctactttctattcaaatgtttaggtttcttccatggatattaattatctttaaatattaatttataaatcaattgatttatagttacaaattacacttattatatatatatatatatatatatatatatatatatatattaatttcatttattaatttatatatatatatatatatatatatatatatatatatatcatagtaatacctggccttaatttaaaaaatttattttcgcatcttttaa

SEQ ID NO: 12450 - DNA, 429 bp, Glycine max
  unsure at all n locations
tcttttaccgtaagagatgtgttccanattatctagctatcacaatcatgttgaaagctaaccaattgattctgaacatgtacttcccaatcagtggtgacaagggtgacagcattaaagcatcatacctccatcatctggatctattgaagaagagtgccgcagttgcagagatcacgagaaagttctcaacaaatgagaacactnttacagtangagggtcttttgctgttgaccctctgacacaggtcanagcaaggctcaacaatcatggaaagctcggggccctcctgcagcacgagatcataccanagtcagtgtttactgtttctggtgagattgacaccaanggccctgataaaaatcccaggtttggattgcaattgccctcaaccttgaggttttattcatttttagaaagtgatcgag

SEQ ID NO: 12451 - DNA, 488 bp, Glycine max
  unsure at all n locations
ctcaagcttatccatgatgtccttcatcaattctttcaccttcaaaccttctgttttttttntactaatgacaaaagggggagaagtttatgaaagaaatttttttaagtaaacactagtcaatcaataaaataaggcgttttgaaagatatatttgtgtctacggctacatccactcatgcacatacatattatacttaaggggagctaaaagctatcaaagatagcattctgatgcgtagacattattctcatatatacttgctatattcactactcacaatttatacagcttgtcatcatcgaaaattgggagattgttagacaccagacgatccatcactagaagacccaaccatcttttacgatcttgatgagaacaaatatataatattatgttaaccactttgttgcatgtgagtcaacacgtttgatgactggaagctacaccaggagaaacctattcactactagataactcacctact

SEQ ID NO: 12452 - DNA, 249 bp, Glycine max
  unsure at all n locations
tatgcttgtttcctaatacaaaaaattgaaaccaattattgtaaggattaatagaataaaaatgcataatcgtgataaccataaccgaatgaaaaattctaaaaggtcatgagcttcacttctcgaaaaaactaanacaactttataagcattatagtcaccatttggaacacataaaaaaacacttagtaaggaaatcataaagcaacctcgacattaataaataggaaatatacttcacaaaatgat

SEQ ID NO: 12453 - DNA, 428 bp, Glycine max
gcacctcttaatgaaattgtttaagaaaaaatgtggggtttaaatgggggagaaacaagagcatgcatttactgcactcaaaggaaaattgactcatgtacctattcttgtattacctaattttaccaaatcttttgaaattgaatgtgatgcatccaatgtggggataagggctgttttaatgcaagaatgacatctcattgcttattttattgaaaaattgaatgagggtgtgcttaattattctacatatgacaaagagttttatgcattggtaagggcattacaaacttgacaacattaccttttgcctaaagtatttgtcattcatagtgattatgagtccttgaagccattaatacgacaagacaagctgagcaagagatatgtcaagtgggttgagtttcttgataatttcctacatgatc

SEQ ID NO: 12454 - DNA, 381 bp, Glycine max
  unsure at all n locations
cgtcatttaagagcttcacatatatttggngattttcgcactctaccccaaatatcattctacattgttttcaagtcctcataatcattgtgtgcctgtgaacattctcaccataaatcataccttttctacattgagatcttttaactccttttgtatagcctcaatttattttctaaaatattaaagttcctcatcatagcatcccattttttggaaactttgtcattctctagaacaagctctctctcccttgatatcaacgttatataagcttcactgttttgagtaggtggtatcacagaacttatatttttagttcgatgggtctatttaagcttagtattatctttggacagtttcttaaattcttctcacaag

SEQ ID NO: 12455 - DNA, 274 bp, Glycine max
tgaaggacatgcgcctactgtgaatatatcatgtggccctgtcgtgaatcagacatatgctcaccttccactcatgctgcagcacactttaatagcactgggctactgccaattcaattatagttatctactaacacacctcagatacggcacttactgcatgtgagtatcactaaactacccatagaccggagactactctatgagccctatagtaccacatctaatggaaaatacattactaggcgaccctccctactctatggagccctag

SEQ ID NO: 12456 - DNA, 346 bp, Glycine max
  unsure at all n locations
taatatatcgagactctcgaaattgaacaacggaagctatcgagaaattcaaatggtcaatacttcgaactcggaggtcctattaaggtgcataatatatctaaacgctcaaaattttacaatggaagctctttggctatacaaatggtcataacttttcactcgaaggtccgattaaggcgcataatatatcgagacgctcagaattgaacaatggaagctcttgagcaattcaaatggtcataacttgtcactcngaggtccgattcagctgcataatatatcgtgacgctcgaaatngaacaatggaagctcttgagcaattcaaatggtcataacttgtcac

SEQ ID NO: 12457 - DNA, 465 bp, Glycine max
tgtccaaagattggttcattaacttattcttggacaaaaactggttcttgagccacaatcattagaggtgataacctttatgttaacttcaaaacattaaaggtcttttagtgtccatcccatgttcgtgatttgttatttaattggaaacttgagcttcatcaagtttaatcatttttccatgactagctctacaagaagtttcctttttagaaatgttactcgtcttgccacaagcactgtatggtcagaaggttggtataaacaatatttcataatttctttgggatacccaatgagtctacatttctcataccttggctcaagtgtgtctatttgcaatctcttaatgtaagtgggacaatcccaagccttggtgcgtttgagattcattctagccctttccatatcacatatggagttgtacatatacttttctaagacatgatgtatcacatacacttt

SEQ ID NO: 12458 - DNA, 367 bp, Glycine max
  unsure at all n locations
gagcttgacaagctgccatagcagcaacaacatattctgcttcacatgttgacaaaacaactagactttgcttctttgagcaccaagagattggtgatgttccaaatttgaaaacatacccagcagtgcttttcctgtcatccttatcaccacaccaatctgaatcactataaccaaacaattttccttctatattcttctgactgtaaagatataaaatgccaagatccaatgttcctttcacatacctcagaatcctctttgctgcctggaagtgaggtgtcttggtttctccataaacctgcttatcaacccaacacaataggcaatgtcaggtctggtgttacatangtacctcaatgagtct

SEQ ID NO: 12459 - DNA, 390 bp, Glycine max
  unsure at all n locations
cccatcacatgtggtactatgtggcggtcgggcgatggtgcacaacaagtgttacacattcacaatgcgcgcataaacccaccatcctctgttggccacctgcaactgagctcacgtactcccacgtagcccatattctcggttctctcaacaccgggtgcccatcaatccttccaagctttcacaacattcaagcaaaacaacattcaaacagcacaaactaccacagccaagaaaacagggcaaaggcagaaaactctgctcaaacaccaaccaaaaatcacagcttttctcacttatagaccccagtaacaattccttcgatccaattcggtaaccggtggatcgactncaaaattttactggaagtctctagtacataagcctaca

SEQ ID NO: 12460 - DNA, 465 bp, Glycine max
  unsure at all n locations
tcttggggttgcaacagggactaggactatggaccaattccatatttggcaaaggcatcataattggaattctggacaccggcataacccctgaccacctttcgttcaatgatgaaggaatgccactcccaccggcaaaatggaatggccgctgtgaattcactggggagaagacttgcaacaacaagctcattggtgcaagaaattttgtcaaaaacccaaactcaacccttccactggatgatgtangtcatgggacccacacagccagcacagctgcaggaagacttgtgcagggtgctagtgtctttggcaatgctaagggttcagcagttggtatggcaccagatgcacactntgtaatttacaaggtttgtgacctctntgattgttccgaaagtgcaatactagctggaatgggcactgcaatacctcacttggaggaccatctgttcctttctttga

SEQ ID NO: 12461 - DNA, 123 bp, Glycine max
gctgaagtttcttttggtgaaggaaccatggaaaagcagagcgtttggaatggtttaaccaatttctgagaactgttgggggatgctgaaaacgagattatcacgaatatataagtttgaatg

SEQ ID NO: 12462 - DNA, 465 bp, Glycine max
  unsure at all n locations
tgccattcactngnacttttatattattctattctattaagtttttnttagaagattgttttattaaggttaatttagtggtaaatgaataattttatgaattacaagtttaaatttctgccataatatacaaaaaagtatatatattttattagagattntatgtcgaattgtaatatacataaaataaagtatataaattgaaaataacttttatatttagaggtaatttttaagattaagctagaatcaatccgaaattgttggattgtataacaatttatcatagtaattattgtttggctaataaggctcttccccttattggattattattagatcactctcgattgtgtaatcttataatttcacgctctaaatatnttttttccacgtgaaaatagtgtatgagagagctcacattaattagtaatgtgattagagtanaacatatatgtagaggat

SEQ ID NO: 12463 - DNA, 474 bp, Glycine max
  unsure at all n locations
tgtagatcaatggagtcctttngaattacttatgattcagaagatagacactatgttntacctccatcaagagtactcagttgaaattcatagttcgttggagaatataactacccaactggaaaacatttaaactaggctaacccttagcaacctccttaaccctaatgaggacgacacttagttgtgttataagtgattgtcgcaacctacccttcaacgggagggcgaggcgaaacgtaatagtgtgtcttctcatgatgaaaacacatggagtccccaccaacaattattcaaggaaaacgttagaaaaaccaaaaagagggttgtaaatgatgaanataaaggttcgggagttgtttacgcttggngaaggtattagcaccccacacgcccgcacaagagactgcagcctttaatcgagtgtgcataacatgnacttcaaaatattacttttcttctttatatttttat

SEQ ID NO: 12464 - DNA, 423 bp, Glycine max
  unsure at all n locations
tgaaccacaaaccggtaagagtgtgaccttaaactatgagtgaacgactagttgtgagtaataatctttgcatgaatctctgaattntagaatgaaatgtataaatgaggacatgatgaaggccatggttgtacatacacaagttctctgaccaaatagcttaccttgaatgatacttgtatcttttgctcctgtgtataaagcttattgatttgtcattaactgaacgctgaactntaaatgattatctcctaataccttgtttagattctaggagagcatatgcttcaaggaaaatttactctaaatttgggggagaaaagttgaaaagaatgaaaagaaaaaggttaagcatcagcacacacaacacataagttgtatgttaaaaaaaaaagagaaaaaaataagttgtgctggtacaat

SEQ ID NO: 12465 - DNA, 474 bp, Glycine max
  unsure at all n locations
ttaacacttcttggcaaaaaacttanatgatgtttaaattccaattattcacataaaaaggaagaattaagagagaaaatttaacaatttctacataatttaatcccaaaatatacctatacatagcagttatcagtgattcaaaatgcaagaagaatgataaagaaaaggttaaagatgatgattacgactacaaacctgaagatgaaggagaaattggttcaaattgtttaactaaacaagatagggatgaaataggtgatggttccatcattgaaaatgcttttgggtaccaaaaaagaaaggttagtcttgaaaaattgtcaacattgcttttcttctaaactatctttttggaagatactttnttttcttttctanattgtatattagaaaagataaagtcctgtgttactattgtaaattctaggtatctcattattacataattntatcatacaaaacatacaacat

SEQ ID NO: 12466 - DNA, 402 bp, Glycine max
  unsure at all n locations
tgtgtaatcgggagattcaaccctctggctcaataatattttaccaggaatgttacgacccttgagtaaccttcacaaaggagaaatataaaactataaattcccataaattgtataaggcatgtgcttccatgaaatgcattttcaaagcaacaataatccataacactacgaaaagaaggttcccaatttgactgaacggaatacagtcacatcagcattggattcaatcagacacacataaaccatttccaaccatttcttagaatttcacccttcgaaaattcgtgatcttaatgccaaaaaaattcaaatttttttaaatgggttgtctaaatccgacggatgaaaacattangaagtgaagatcagcgaatcangcattgaaattcttgagatcac

SEQ ID NO: 12467 - DNA, 465 bp, Glycine max
  unsure at all n locations
tgcttgtagggcttctatggaggctggatctttgagcttcaatgaggtccttcaatggtgattntacaccatggagatgcagcggaaggcaaaggagaagaggagaagggaggcaccatccactatggaataagccaaggaagaaggagcttcaccaccaagaattgtcttggataagaagcttgaagaggatgctttaatggagaaaaagaaagagagaaggggggagcacgaaattgaaggaataatagagggagagaagttgatctttgagttgtgtctcacaagactatcattcatcaaagttccaacaagtgttacacatgtttctatttatagactangtagcttccttgataagctntcttaagaaaaacttcttgagaagcttctttgagaaaaattccttgagaagctagagcttagctacacacacccntctaataactaagctcacctccttga

SEQ ID NO: 12468 - DNA, 448 bp, Glycine max
tccactccagttcccatacgagtacctgacgggtgtgattttcaaacgttaaaaaccagaatacacaatacccttaagctaaccgacaagcaatttttggatgaaatttactatcggcagcctttcacgtatgcaggtaatcaatttcggtttcaatgtatgcaactgatagatgatgctgatgttaacacaatgttaatgtgtaatcatgaattctcatttgttggttcgattgagttattatgtagcattgctagaaccccaaatggtattttaaacatacttgaagctactatgacccctactcatgatgccctgctatattacaatgggaggtggaacatgtcacgccaaaatgagtatgttggttactcgctcacaggaaaaaatcccaaaactctgacattccatcggatgcccatggtgaactgaaggattgatcacaagt

SEQ ID NO: 12469 - DNA, 440 bp, Glycine max
  unsure at all n locations
agcttctatataaggtttgttcctaatttctctacaattgcatcacctctcaatgagctggtgaagaagaatgtggcatttacctgtggtgaaaaacaagagcaagccttttctttgctcaaagaaaagcttactaaggcacctgttctagctcttcctgacttttctaaaacttttgagctagaatgtgatgcctctggagtgggagttggagctgtattgttacaaggtgggcaccctatttcttattntagtgaanaacttcatagtgccgccctcaactaccccacctatgataaagagctttatgccttaataagagccctccanacttgggaacattaccttgtttccaaggaatttgtcattcatagtgatcattaatcacttaagtacattagagggcaaaacaagttaaacaagaggcatgcataatgggt

SEQ ID NO: 12470 - DNA, 439 bp, Glycine max
  unsure at all n locations
agcttctatgtgatcaatgtgtctatcatgtgttcaacaatatggatgaggactccaagcataccttaatagttaaaggttcaatagttgctaaaaaacaaaagtttagcaaaactaacctgaaggctatgaacgtggccttggaacaaacctggaaggaggctctagaagtgggcgtggaagccatcagatatcgaaaacaaaaaagattggccaagtccattgttgaatntgataagatagaaatgaatattccaacatgtacgatgcattagataaagagtntgtgtgtgtaagtataggataatattgtattaaatattatggttgtacaatgaacaaaacatattctaagttttacaatgaattatatgttntgatgtaacatcctcagctctacatcttagtcatcaagctgatagtataaacgcatatgata

SEQ ID NO: 12471 - DNA, 204 bp, Glycine max
tttgctttgcatgctcggtccactgcagtggacggaactatgtgggtactgatcgacgcatgctcgatgatcctagtagcatgacagatactgctgacgcctcttgagagagcctgcaaactggagatgcccatactgtgactgttgttcatatactgccaagatctgcacatgaccgaggaatagtgtatctctgactttcac

SEQ ID NO: 12472 - DNA, 405 bp, Glycine max
  unsure at all n locations
agcttaggatttcattctcttatcttcaatgcaaggaagtatgacttatgcctaanaatctaaattttggttttgaaagtggaaaggcgtgaaaattaagacatgcttgagagggtttttactagaatttggctgccccatgagggatactttgcatctaggtagcatggaaaataccttttaatggtatgtatatatgtgtgtgaatataggtagcatggaaaatacctttcaatgatgtgtatatatgtgaatatatgtaacaccctgatatatatatctatatattattagtaattaatgttgatgtttgattatttgttgcgttattttcatcccgtaattattttaagggaagttaattagttaatagaggggtttggatagataaggatctaacttctc

SEQ ID NO: 12473 - DNA, 442 bp, Glycine max
  unsure at all n locations
agcttgtcatcttgttacatcagaggctagtattttaataaatgtgggtaggaaaaattcaccanattgatagagaaaaatctaaaatcatacatcttaggcaaataaggcatgctagcccccaacattattgcattntgattccatctttggacattcaaattgttgtttatttttcctgttatcttttcctttgccttagtctaaatttcaaacttacaattcggtatctctttcttcttttgtttctcctcatttcttaataattggatttgcatcacttaagtacaaccaaagtccctctggattcaacagttgaacttcaatttcaatctttactacttgtgataaaattaagacactngtcaatctattaacaagtttttggcactgttgatggngactntggttntcgtacttggttgttacaaatcccaatttg

SEQ ID NO: 12474 - DNA, 442 bp, Glycine max
  unsure at all n locations
agcttgcattattcacattctccccctttgtcaagcaaattctttnttatatcatcaaaacctgcatgatttacattctccccctttttgatgatgacaagcattatccaaggcttgatctttttgacatcatcaaaatcttcatgatttacattctccccctttttgatgatgataaccacctataagttaggagcaacaacaaagaanaaatatctatttgcatatagtttactcccccttggttntggaatgtttgcttatatgagacaattgaagatttcatatttttcatatataaaaagttgtctcataaagaatagacattnttccttactaatttatcttgtatatttctctccccctttgtcaacatcaaaaacaaatcatgaatagagaggagaaaaatgttaccacttgttgtaatgtataanaatcaagt

SEQ ID NO: 12475 - DNA, 431 bp, Glycine max
  unsure at all n locations
agcttagagtttctggtagttcattaaatacttgtttcatttcctccaagctcatattttccaaaacggagggtctaggggcaaccctcacaatttcactaccttttggttcctgaactcgtgcgtcggctttaatgactagttcggaattagagtttgcaccacattttattataaatggtgaggacgagcctgtattaaattggagtacattccactgtgcaacgtcagtttcagatccagagcccagatctgttgatggcttgcgaccatgaganatatcttgaatggngtcatcttcttcaggaattgactgtatgataacaaaataaaggatttgggcatcaaagaaaatcaatccanattcattntcatcagtgcagttctttagcatatacctaagctatagtcacaaacagcaaagtaatcaa

SEQ ID NO: 12476 - DNA, 436 bp, Glycine max
  unsure at all n locations
agctttatcttctttaggaatcttcttaaggaagcttctcaaggaggtgagcttagttatgagaggggtgtgtgtagctaagctctagcttcccaaggaagttttctcanagaagcttctcaaggaagttttctcaagaaagcttctcaaggaagctacctagtctataaatagaagcatgtgtaacacttattgtaactttcatgaatgagagtcttgtgagacatacttcaaagttccacttctctccctcttttattccttcaatttcgtgctcccccctctctctttctctccctctntcttttcctccattgaagcatccttccaagcttcttatccaaggctcatcttggtggtgaagctccttcttccatggcttattccctagtggatgacgcctcctctcacctcttctcctttgtctcccgctgca

SEQ ID NO: 12477 - DNA, 426 bp, Glycine max
agctatgatttgaacatgcttgaataacctgcacttgtgaagcatgcacatgcatgaatagtatacaagtaaagctttgtacaagaaggatgcacatgctagtaaatatcagcctcctgaatattatatagggtctcttacatgaaatgaggtatcatacttgtggaatcttagtaaaaaaatagttgggtgaaagactacaactcgtatatagctagtgaataataagttgtcatcacgggccactgaaacgattaagtgcgtgaggtccaatcaagctgaaatatcacatcatgatgttgataggcgcgtgcttgatgccggatacatcacgtgtaagagttcattttatgtatcttcctctattatcaaatatgattgtggcaagtcattacagttgtggtgcagcagtattagcatcccttt

SEQ ID NO: 12478 - DNA, 432 bp, Glycine max
  unsure at all n locations
agctttgtacttcaccgattccagagcgtggaacatcaatagtgtttcaaggccatcaaaggatggttattcctcaaacagagacaggggcagctgagggatgatgaatttttgcacttccttggaggaggcagagccatacaactaggatcggcaaacttgtgatctatccatcattatttcttttagttattctattattctgttatttcccttgtgatctgacattatctgcttccaaatattatgtccattgtgattgaactgcacatgcagttatctgtcgcattgtgagtaatttaaccgctttggcatatggtcgtacttactntacgatgatttgtctgaaacacanaaatgtgtaagtctggtgtactttcgttcacacactttntttcaataaaatgtaatctcgggtatcaaccgtaccca

SEQ ID NO: 12479 - DNA, 319 bp, Glycine max
  unsure at all n locations
agctttgnatgtatttttgtgacccggtgctgagaggaacgatgattaaggctacatgggagtacgtgagcttagttgaaggtgggcaactgaggatggtgggttcatgtgtgatttgtggatgtggagagttgatttgtaccatcgcccgatcgccacctattaccacatatgacgggtaccccataatcctacaagcttgaagtgatacagtgtggaagagtcagtcttcctacttttattcgtagaccacagagtggtacctggagatatgtctcggcggtcaggagaccttggggacgtcaggtggggtgctatt

SEQ ID NO: 12480 - DNA, 381 bp, Glycine max
  unsure at all n locations
agcttttcttcttgagaagctgccttgagaaatatccttgagaagcgtccttgagaagattcctagagaagctagagcttagctacacacacctgtctaatagctaagctcacctccttgagatgagaagctagagcttagctacacacccctcataatagctaagctcaccctatgacataatagatgaaaatacaaaagatgtccctactacagagactactcagaatgccctgaaatacaagatcaaacagaatggcaaaatcaaggcccaaagatggaatacctattcgatatttcaaagagagagggtccaccttggccatggctcagnatctacctgagtcatgaaacctaggcctcttatagcttagccatcct

SEQ ID NO: 12481 - DNA, 420 bp, Glycine max
  unsure at all n locations
ttgcttatgctatactttcgtaagctacttgagctgagtctagtcttacatgagggatttgcagatgaaactcagtttaagttagtctaaacctaagagggctgtctaaatcgagcctagtcttacatgagggatctgcgaatgaagcttggattaattcggcctaacgagggattgaaggtttagtaatttacggtataacatagaacacaagagcatgattgattatagaaatatatttctatgcatcaacttatttgttataaagacccaacatttctacccactgctgtcattttatttaccttgcattgtatatgctttagcataatagtttagtctaaattctgtttganattatcactcttacatgttctctcaacatgcttcgattctgaacttaattcaagttaacattag

SEQ ID NO: 12482 - DNA, 425 bp, Glycine max
  unsure at all n locations
tagcttgtcttatgcgtttatgtgagacagagaccaacatgttagctatcatcagcaagtaccaagaagaattaaatctagccatggcccacgagcacaaagtggcgggcgagtatgcccgagtgtacgcagaataggaggctagaggaagggtgatcgactcgttacatcaagaggcaacaatgtggatggaccgatttgctcttactttgaacgggagtcaagaacctccccgattgctagccaaggccaaagcaatggcggacacctactccgcccccgaggagatccacggacttctcagctattgtcagcatatgatagacttaatggatcatataattagaaaccgctaggaagttngtattgtcactcagatcttttataactntctgaataanatgagtttatcccacgtttttact

SEQ ID NO: 12483 - DNA, 440 bp, Glycine max
  unsure at all n locations
agcttgttatttatataaccaattatcggtccccttagagacttagtgaagatatctgccaacttatcattggagaaattggggtacatttgtttcatattgaggttacgagaattttgattgaaaatatcctttatgatttttccataatgttctattttagtttggcctataaatccttgagcttgacttgattttattcattttttcttccataaactactttcaggttcttatctcttcattntttatttgttgtttctctcattctctatcaatgttgtgagtgtgtattgatatttttttctattttatttatttatattntattgtacgtttatgcttatcattntctacatctacaacttcatatttcatcaataaaataagtgttntaatgcatgatgcanattccaaatcacaatntgctttattctaac

SEQ ID NO: 12484 - DNA, 439 bp, Glycine max
  unsure at all n locations
agctntgagcttattcatacgacaataactntntactcggatgtctgattgtgtctcgtaatatatcgagttgctcgaaatggaattccgaagctctgagcanattcaaacgacaataactntttactcggatgtctgattgagtcccgtaatatatcgatttgctcgaaatggaattccgaagctctgagcaaattcaaacgacaataattttttactcggatgtctgatttagtcctgtaatatatcgagcttctcgaaatggaattccgaagctccgagcanattcanacgacaataattttttactcggatgtctgatttagtcctgtaatatatcgactgtctcgaaatggaattccgaagctctgagcaaattcaaacgacaataactttttactcggatgtctgatttagtcctgtaatatatcgagattct

SEQ ID NO: 12485 - DNA, 439 bp, Glycine max
  unsure at all n locations
agctntgtccttgttggtataggactgggaggaacaacctcggnggctcttcccaaaggaagctgggcttcaggcctggccaccttgtccagaaattnttccatggatactattggcctattgtgagctaactgttgttggttgtatacaatcaccagctgccccctgaataagctctgcaacataggaattatgggtggtgcatgttgggcatctggttccatggttgctgtcggaggaggtgggttggatgatgaagggatgtcttcagctcttgctctctttcttgaggccatctgtaagaaaagaatgtgaacatttacaaaaattaagacaacagatagataaaggccgcttagtgaaatagcagttgcttagtggtcctcacanaacaatatatatcgcttggcgaagtanaagtcgcttagcgaagtttcaa

SEQ ID NO: 12486 - DNA, 441 bp, Glycine max
  unsure at all n locations
agcttaagcttgtcttgcattataaatagaggaatgttatcttttcatactatcctatgtataaaaaaagtagtaaataaaaaataatagaaaattttagaattattttaaaattatgatattctcatttatttaaacaggtcaaattcaaagtttggatttggcttgttaaaaagcataatacttacatttgacttgtttatcttatttataactttatttttatatttatcaaatacattcttaattgtaagtgtattaatataatatttaatagatgttttcatttagaagatgatatgaaagaaagagaataacagaatggttaaaaattcaaaagatatatataagtaacttnttatgacgaaattgtaatttatttattaaaagagaccaccttcatcaagcatttaataaccctacattaatacactgacaaag

SEQ ID NO: 12487 - DNA, 432 bp, Glycine max
  unsure at all n locations
agcttttgattggagcagcatcagataagtaccattcaaggtaagagaacttagaagcaagctaacatattgtagccatattatctgtgtgtgactntgtagctttctgttaaccatgttttactttcacagttntgaattactatttctcaacattaacattcttagctatggagcttaaccttgatctctcccctcttgagaatttttgtaacatcttctacccgacatatatataaataaataaaatatataaaaatattaaacaaattcacatggataaaaggttcacctatcacattcacttcactattaccaaataaaacttattanaaatatatttggctcanaacaagggccgtcaaaattacaaaatattntgttaaatcagtgaggtaaaataanatagactaacatcatccaattaatata

SEQ ID NO: 12488 - DNA, 436 bp, Glycine max
agctttcttctttcatggcttattctctagtggatgacgcctcctctcacctcttctcttttatcttccgctgcaactccaaggctgaaaatcaccattgaaggaccttattgaagctcaaaaatccagcctccatagaagcttctcaagcaagcttccatctcctaaacacttaatcaatccaaggatccattccaagcaaggttgaatttgagttctaatttaatatttctaatccttgtgaatgtttatctttttcttcaatcctatttttgattttcatgaatatattatgcttaggattgaaaatggattaggttatggatttatttcctaatttcacaatttaatcacagaatgtatgaatgattcttcaacctaatttgtgatttcaaacaattaagggaatgattcgattgaactatatctaatgcat

SEQ ID NO: 12489 - DNA, 416 bp, Glycine max
  unsure at all n locations
agcttattcttatggcttgccttcggacttcactccccgtgccactctggaagatttaagccaagcccctacttctgaggggcaactcccgccttatgacgactatcccgggcaagacgatgaggaaggagatacccatctcggccccctgctccacctcanagatccgtccncacatgaactaccccaaccgaacatagtctgccatatcccggcctcacccacacccgtaaaagaatctgttcccttcgcggaagataagggaaagatagaggcgcttgaagagaggttaagagcagtcgtgggccttggcaattacccattcttagaattagcggatttatgtctcgtgcccaatatcggcattcctcccaagttcaaagtgccagactntgatacgtacaaagggacgacat

SEQ ID NO: 12490 - DNA, 428 bp, Glycine max
  unsure at all n locations
agcttcttattactcttggtcactaggtcacaagatcaactaggctctaataattcttctaacctagggtggtgactcactctttagaccgataattcttttaatcatactcttaaaagagcaaacaaatttctaatttataaaatatatctttaattctaaacaacatcctanaagtaagacaatatctttttttaaatctacataatattctagagatttaaaattataaatttaaattatttcctaaccgttatgacaagattatagattggctatttagccatggattgattgccaagacaatattactattgaaggagaaattttttttacaaaaatactatgattccacatcttaatcataataatttaatttaaatattctttaattnttaattcttgtttctcttctacacgaataaatc

SEQ ID NO: 12491 - DNA, 403 bp, Glycine max
agctttattgtctaacaagccaacttacaacagcaagccccaagagactcagcataaggatgcacagaccaaagttgcgtatgtaaaaaaattgtatgaccaagtgaaggtgcaaattgcaaagaagaatgaaagctatgccaagcaagcccaaaagaaaaggaaggaagtggtacttgaacccggtgatgatcttggacatttgaggacaaatgttttccaagaaggagggaatgatgagaatcatgaaacaggccaaatacagtctaaaggcccaagtggagaaggacgaaggcccaagtggagaaggacaaagcccccgagtggagaaggatgaaggcccaagtggagaaggatgaatgcccagaggcagagacactatcaagactattaattgatgctg

SEQ ID NO: 12492 - DNA, 384 bp, Glycine max
  unsure at all n locations
tagctttanatgtccttagtgattgaattgtgtgtgcttgaattttgttgaaattgcgaagtatagcataattgaatggtgcaatcccaatgtgtgattaagagacaaacacttgaatgcacttgtgagtgagtgaaacacttgattagtgaggagtgtgttcttcttgcatcaatgatgaattgccatgcttgttgttctccttgaattttgagcttgtgtatccttgctatggtctcctaaagaggacatccctgtgaataattgagtccttgtcccattcacttttttttatagaaaatacatgtgttggatatgttaggatggaatcgatctcaactcatgtcaatggtttaatcttagcactagtagttatcatttaac

SEQ ID NO: 12493 - DNA, 372 bp, Glycine max
  unsure at all n locations
agctttagtgtttgtgtacaaccatagattntacattgagtgtcctcattgataagttctatagttgattttgcatgaatttctaattatcataacatatgattcatggatatgatttangccgtctttctttctttacattttaagccattggccaaaaagctatcccgatgtatattgttttatcatttgcaaaccctttgagccaaacacttcataatttgttggaacactaacctangataagaatttcctaccttaccttangttgagagcaaaggtgttttgttaaggatttctatcatttggtggctaatgtgatgtaaatactatttttaaatgtgggtattaagggaaattaaatatttaaca

SEQ ID NO: 12494 - DNA, 429 bp, Glycine max
  unsure at all n locations
agcttgtagaattcttcccaattccagtgtcctatgctgacttgctcccatatctacttgataattcaatggtagccataaccctagccaaggttcatcaacctccatttctccgagaatacgactcgaacgcaacgtgtgcttgtcacggagaagccccggggcgttccattgagcatggtagggctctgaagcgtaaggtgcaaggtctaattgatgcgggctggctgaaatttgaggagaattgcgtgtaaatcctgacattgacaagagatgccacacatggggcaattttgaaagctgttgttaggtgtccctaatgactcatcagggtttccaagtttatgccattattgtaaaccacagctacaatgttaaatganatggataaagttgatatctntgtccctcatcctctcacaaacgcat

SEQ ID NO: 12495 - DNA, 431 bp, Glycine max
  unsure at all n locations
agcttgtgcgaatcttatcactcctgcattntatctctagcatgcattctttctttctttacccactcctcacgtttggttttttagggaaaaacaccataactaaacgcgccacaaggcatccctatcgcaccagatccaaatctagaacgatgggtgatcaagaggagacacaggaacagatgaaagccgacatgtcggctctgaaagaacagatggcttccatgatggaggccatgttaggaatgaggcagctcatggagaaaaacgtggccaccgctgccgctgtcagttcggctgccgaagcagacccaactctctcggcaaccgcgcaccatcctccctcanacatagtaggacggngaagggacacactngggcacgatggcaaccctcatctgggatacaaccgagcggcttacccttatgga

SEQ ID NO: 12496 - DNA, 441 bp, Glycine max
  unsure at all n locations
agcttgctaaaccatggaagttcctaatatctcccacattttttggggtgggccattcttggatggccttgattntcttagggtccacttggaccccatttttaccaactacaaacccaaagaaatacacaaaaggtacacttctctatatttgcatagagggtgtttttcctaaggactgaatgaacttgcctgagatgtcctaagtgatcatctangctcctgctgtacactaaaatatcatcaaaataaaaaactacaaatctacctatgaaatcccttaagacatgatgcataagcctcataaaggtgcttggtgcattagtgagcccaaaaggcatcactagccattcatacaaaccanacttggtcttgaaagcagttttccactcatcaccctttntcatcctgattnggtgataaccacttttaagatcaatt

SEQ ID NO: 12497 - DNA, 439 bp, Glycine max
  unsure at all n locations
agctntgtccttgttggtataggactgggaggaacaacctcggnggctcttcccaaaggaagctgggcttcaggcctggccaccttgtccagaaatttttccatggatactattggcctattgtgagctaactgttgttggttgtatacaatcaccagctgccccctgaataagctctgcaacataggaattatgggtggtgcatgttgggcatctggttccatggttgctgtcggaggaggtgggttggatgatgaagggatgtcttcagctcttgctctctttcttgaggccatctgtaagaaaagaatgtgaacatttacaaaaattaagacaacagaaagataaaggccgcttagtgaaatagcagttgcttagtggtcctcacaaaacaatatatatcgcttggcgaagtaaaagtcgcttagcgagttttcaa

SEQ ID NO: 12498 - DNA, 232 bp, Glycine max
agcttagaagtttatggagaacccatcacatgtgagactgagtggcggacggacgagtggcgcacaaaacatagctgacatgcgcgatgcacgcataaactcaccatgccctgttgacgagctgcaactgagctgacgtactcccacgtagcccatatgctagtaaatgaagctccgggtccccgtcactgcttacatgcttacactacgtggaagctgaacaacattccca

SEQ ID NO: 12499 - DNA, 421 bp, Glycine max
  unsure at all n locations
agcttgactatgcgagttgattntagccttagtttcactttagttattagtcgattcaattaagaatgagaaatcccaaagagaaaacatccgattgatttttcgctttattttactaaaagggtatttttttgattattatattattattttacctcttttttgatttccaacgtggttacggcacgaccgaacggtcggaattcattttaaccgaaattaacggatgatacaattcaaacgatcagtggaaatttattntatttttagattacgcgagaaatgacttatataaatgactaatgcatgtcataagggggtatagaaagcgaatgatcacgaaaataaaaatacatgaaacaaaatgtggaccaccacgggtacatagaatgaattgaatagctcggtttgaagtacttac

SEQ ID NO: 12500 - DNA, 581 bp, Glycine max
  unsure at all n locations
agacaccaccgtacaacaaactctagttacgtaatgcgatatgtattcctcagcgagagcgaggttgatgcaatcgtatccatcccggcgaatcngctcgtgcccgggatactatagaaataacctcgatgcatgcaagcctgctaattctgttatacaacatatgcacacactaagcgtgatacacatgcgcataaggcgcgaactacacgcactgagcgagggggtgtcaggctaaacgcgcctacgaatgtctaaaatccacatttacaactattaatataaaatcaatgcaaggggggaataccctacacaccacgaaagaaccccctcgtccaggagattcattaactcactatctgtattcaacacctcacatagaaagccctctatgcgcatgactggctcaacccttcactcaaggcatgcataacctaaacaacgaccaccatgtatgacggacattctactatttatcaaagcaaaaccatgctatgcaaatcgtaanatatatctcgatctaaaattgccaacacatacttaatattccgctacgggctataatccctggagaagctacg

SEQ ID NO: 12501 - DNA, 410 bp, Glycine max
  unsure at all n locations
agcttgctaattccgcgatacaacataagcacacactaagcctgcaacacgtgcgctaagggcgcgatctacacgcactgagcgagggggtgtcgcgctaagcgcgcctacgaaggcccaaagcccacttcaacagctataaatattgagtcaatccaagggggaatacgcaacacaccacgaaagaaccccctctcctaggagtttcatttactctctctctttctttcaccccttctcattgtaaagccctctatggtcatgagtggctaaacccttagttagggtctggcagacctagaagccaacgcaatgtatgatgtactcttcactatttatcaatgcnataccacgcatttctctcctatttacttctctgtgattatctagcatactcatctatatattct

SEQ ID NO: 12502 - DNA, 433 bp, Glycine max
  unsure at all n locations
agcttcttattcaaggcactctcttagtggtgaagcttctccttccatggcttattctctagtggatggcgtcttctctcacctcttctcctttatcttctgctgcaactccatggttgaaaatcaccattgaaagaccttattgaagctcaaagatctagcctccatagaagcttctcaagcaagcttccatcaccatacttnttatcaactttaacaccattntttgggtcanaccaatagcaacgcagaataatgactctgttttgatatccaagatatgacaattccaatatctcgtcaacaattccataatagtccagatcattgtcaccatatatatgtcccctaacacatatcccactattcatggtggctgtattttttccatatttcttagtatgaagcctgtccccttaactattaaaagata

SEQ ID NO: 12503 - DNA, 428 bp, Glycine max
  unsure at all n locations
agctntatcctctccaatttgggtactggccctagggattctaatcccttttagaggtggctaagaaggttgacttaggtttttcttttgatcgttctaccaatgcttgtctttatttcattatgactcatatgaaggcgacaaccactgccttgggtgcagaacacaatgtctttcttctatttcggttttgtaagtattttatttgttcttcttcaaaggttattgtttttgaatatcccccccatgtcactctactcaaatcggataaccctaaagccatatgagtgctattcttgttttctctctacaaatctatttttttccttttagaaagaataaggactaagcataatcattaatatctatnnttctatgtttgcgactgagcaaccaacatcaactaaatcacttgatcatcatgctaa

SEQ ID NO: 12504 - DNA, 399 bp, Glycine max
  unsure at all n locations
agctctatatgtgcgggtctgggagacgaaggtcaagtgttcgcgatatgtggagatgatgttccaagtacttcggatttggtccgaccatgccctcctgatttccagctgtgaaattggcgagtggaggaacgccccggcatttacgcaacaagcataatgtaaaccttcacggttttaaaagctctatagntgggcctatgctttagagttttctttttggtaaggctctgtgtcttatgtttttgaattgttaatacaaggatctctcttcatctgttcctgagctctacccattctcattcatttgcatgttacttcttgttttgacacgcatattcgataccagtcccccgatagactaatacctggacccgttattctctctagcagatatga

SEQ ID NO: 12505 - DNA, 429 bp, Glycine max
  unsure at all n locations
agctntgcctttagggcttgtacctcatcactttcttccgaagctttaacctcattgtctctcacagtctttagatttgggagccaatccaatccttgtgtccggactctcagccacttatgatagccgccgatgatcccattattgcttcccctaagctctttgtcctttcttcacgccgcatcccatgccttgcgaactccttggagtaccctcgcgttgtggtcactgaaaccccgtgcgatgaaaggcgtgatgctttcgtctgatggcactcctctcatggggtagccaagctgtcttatggcgaggacgggattataattaatacaaccccttgtcacatcaagagaacatttggacatccttcgcatgaagatagaatcctgattcttccttccttctagcaagggaaccaattaacagacg

SEQ ID NO: 12506 - DNA, 439 bp, Glycine max
ttaacaatatatttaacagacgtatacatcatgtgatcatgaattccgaaatatatggggagtaaacgcatgcactaaataactatatacaatcgctcgtcgtttgctcgaatcttgaatacatgcatagtattgccatcatcataaagggggagattgaatatgcaatagcctttgatgtgatgaatatgatcatgatgatgtgttgcaattgatgcaaatgggcgtttcaagattaaatgtcagacaataactcaagattaccacgtacaacatcaagatgatcactagaataatatgaagggaataactatatgcaatagcaaaggtttgtccaaatgatgtataattaaacaaagattcataaaagtattactctctggtgatatatcaccagaagatgtgaacgatcaccatggtccaatacgtcaatactgcg

SEQ ID NO: 12507 - DNA, 406 bp, Glycine max
agcttctacctcaattttctataaataggggaagaagtgaagtgaaaaagggttcagccccttacgcccttctctctctttcgaatttgcttggaaaaattgattccgtgaagaaaatccaagccgaggcgcttccgaaacgtttctgtaacgtttccgtgaggaaattctcgaaggttttgaccggtcttcgacgttcttcattcagtcttcaccgttcttcgatcttcaacgggtgagtacctcgaaccaagcttttcgatacattctatgtacccgtggtggtccacattgtgtatcgtgtattgttattctcgtatcatttactttttataccccactttgacgtgcttaagccatattatctaagtcattttcttgcttaacctaaaaataaaatatattt

SEQ ID NO: 12508 - DNA, 308 bp, Glycine max
agctttggtctctacagatcttcacacaccataatctctcagactctctggaactgggaccttactctctctagaatctctcacatgcagaagctccttgagaaaatggccaaactccctctctaaatctgatttcaggcttaaattggtggatttgttcgcgctcgtgcgcttagcgcaactctggtccgatcagtgcacattaatgaatatcgacttatcacgtggttttctcgcatcaacggatggactgaagcgatgcgcttagtgagatgaccctctgctcagcgaacatgcatagctcatcc

SEQ ID NO: 12509 - DNA, 437 bp, Glycine max
  unsure at all n locations
agcttcagatagcttgttgtaatcaattacgatatacctgtaattgattaaaacaaatagtttttgcctctgaagaaacttttctaacttagaaacttttcttctcactaaccatgatgatgaataattcaaaatagatatcaatgtactaagatgcaacatacaagataacaaccaatacaaatgtcactcaagggagttaggcatgtaaaagtcaaaacatcttcaagcttttccttgagcttcaagctttggcctttatgttgttcaccatgttgctcccctatctctagcatcttccatagacaataaatgactagcanatcatggttactcgcttcttggagtgtgccaactcaatgcaacacagagtggcatgcaattcagtgcacaattctcccaaagatgtcatgaattggattaaactctcatcatct

SEQ ID NO: 12510 - DNA, 349 bp, Glycine max
agctttttgtatttgaaacatgggaccaactcattgtatttctaaaaggaagtcgtatctagtcaaggtcttagagaccatacaagtttcctaccgatttctaattatgtgggccattaagtctatcatatgctgacaatagccgagaagttcgtggatctcttctggggcggagtaagtgactgccatcgccttggccttggctaacaatcggggaagatcttgactcccgctcaaggtaagaactaaccgatccattcacctggatgcctcttggtgtaaagagtctatcactcttcctctagcctatctgtccgatatacttgggcgtacatattcgcgattctat

SEQ ID NO: 12511 - DNA, 400 bp, Glycine max
  unsure at all n locations
agcttgttatgtccattcctaaggccacatacgttgttatatatttctttcatatataaatatattatatatatttaataatcatctaacaatcatttatatcactcatcataaatcatatttgatataattntaagaataattatcataaaaattaataaatctatcatacatgatataattaaataataatatataattattttacactatcaatacataatctattttatcatattatattatgcccccataatatctttatactcttttccagcgggcacacttaattctggttttcaatagacatgaggatcagtggacgtgcggaataagtgtcattcccttactctcaggaaacagccatatatatcgcgatgatccaaactatcatatctat

SEQ ID NO: 12512 - DNA, 423 bp, Glycine max
  unsure at all n locations
agcttgccactccagctcgcccaggcgagctcagctcgcccaggcgagcaaggttgcttcctccagaagcaatatccttctggaggaatcttctggagggcccaagtgagcctggttgctatttgcactcccatttttactaaatacacccccctgccctttntttggtgattctttnttcgtaaaattacggaaacttacgaatttcgtaacgatacttgttttctttccgtaatgttacggaaccttgcggattacataatcatcccctctttgacttacggaatgttacggaacctcactatttgtgcaacgatgctttcttttgatttccagtgtgtcacggaaccttacggatngtgcatcaatatattcttttgatatccggcacgtcacggaatttcacaaatggcctaatgatgg

SEQ ID NO: 12513 - DNA, 271 bp, Glycine max
  unsure at all n locations
agcttcggtattccatttcgagcgtctcgatatattacgagactcaattggacatccgagtaaaaatttattgtcgtttgaatttgatcagagcttcaacattcaatttcgagcatctcgatatattacgggactcaatcagacatccgagtaacaagttattgtcgttngaatttgctcagagcttctacattcaatttcgagcgtttcgatatattacgggactcaatcggacatccgagtaaatagttattgtcagttgaatttgctc

SEQ ID NO: 12514 - DNA, 409 bp, Glycine max
ttgctttgaatgttcatcattgtaacaaacctttattggttctgaggtttggagaaagtaaaattctttgaaagaatcgaaatgctggaagtaaattgacaagggataggtaaattgcagaatttaaaggctcaacgagttcattcgatcgaatgaaccatttaaaagacaggaattatataaaacgaaacgtaaattgcattgcattcgaaatataaagtttacagaattttaatatgggtcacaatcatacattctccttgtgtactcgttctctctgcgctgggtactttgagtgtataatgattcgtacaaatgatttgcgacctcgaaatctgactaaaaactgctttatatagacattctaaaataaactggcctaacggtcgaacactattctaatgcccag

SEQ ID NO: 12515 - DNA, 411 bp, Glycine max
  unsure at all n locations
agcttgcatgatttacatctccctctttctcaagcaaattcttcttgatatcatcaaaatcttcatgatttacaacggcaaccctcatctgggatacaaccgagcggcttacccttatggattgccgcccaactactcaccacccgtcctgcaagacgatgcgggcaatattgcttctcctgtccttgaaagagagcctcctcaacagcccgacgaggtccacgaagaccctcaagactatgctcgaagggatgtcgagttctatcccccgattcccgaagggccgacacccagcatgttgcctcagcccaacatcacgacacaaccaatagttntgtccatggaaggactgcccccggcaactgaagaaaggaggaagctcgatctcctcgaggagagattgagagcagt

SEQ ID NO: 12516 - DNA, 441 bp, Glycine max
  unsure at all n locations
agcttgcctttagttgtccaggaaggacaaggcagccgaaggaactagttccgctccggagtatgacagtcaccgctttaggagcgctgtacaccagcagcgcttcgaggccatcaagggatggtcgtttctccgggagcgacgcgtccagctcagggacgacgagtatactgatttccaggaggaaatagctctacggagttttaaaagattggctaagattttgttaaaacataagcacttagacaatgaaggaaagctggagttgctgcacatgatgtccaacgttatgtcaaggaataagatcgggctgcacaatgcacaaggcaagataaaatgtcaaatgaagaattgaagttgcaggatccacgatgtcggatacaatgtcctgacatcctgcccganaatactggagttgctgacaatgcataagtcaagata

SEQ ID NO: 12517 - DNA, 427 bp, Glycine max
  unsure at all n locations
agctntgcttctacacaaatgattaaatgcatganaaacaaactaagataacagaaattataattgggttgcctcccaggaagcacttctttaacgtcattagcttggcacttttacctcactgngtgatcttatgttttggttcgtactttcagaacctcttgacctcttaccattacctgtaagcaaacattgtgttttggagcaggcttatcttcaaaaaataaatcaaaatcaattttatgatcttcaaaacctagctccagcttcctcttccccatatcaactatgcagcttgcggtcaacatgaatggccttccaaatattacagggatgccagtatctntagagatatccattaccacaaagtctgccgggaagataaaatgttntactctgaccaacacatcttcaattactccatatg

SEQ ID NO: 12518 - DNA, 436 bp, Glycine max
  unsure at all n locations
agcttgtgcattattaatgtcaatgataaaaaacagaatatgaatcataccaatttcaaaaccttcatactcaataattgaatcatctggccttttattagccctgtcttcaaaatccattgtgtatgacataccagagcaccctccctgtttgacacctattcttaaacataaatcttgatttcgttcagacctcatcttattcaagtgcttcagcgcattatccgtaagtgaaactgcaggggccagagaaccagatgctggtgcagctganagatattgaggtgggggtgagtgaaagcaaagattaaaaaagtgctgagtgtggcagaaaaagtatttcacataacanacaagtatataacanaattcaaaatatactgtntagctgttgcaatctggttaatgatattaaaacagagtgaatgccaataac

SEQ ID NO: 12519 - DNA, 447 bp, Glycine max
agcttccttgtgaatcttctatggaggctggatctttgagcttcaatgaggtccttcaatggtgattttccaccatggagatgcagcggaagataaaggagaagaggtgagaggaggcgccatccactagggaataagccatggaagaaggagtttcaccaccaagagagtgtggaagcaaaacttcatgatgaatcaacaatgattcaaaggtgttttgatgataacaatgatgacaacaaaagatgatgacaaaagtgatgaacaaaaagctcaagtgaatcaaagaacatccatctcaagaatcaagattcaagattcaagttcaagaatcaagaagaattcaagactcaagaagaaagcctacaaacaaagattcaagatctcaagaatcaagatcaagattcaagatctcaagaatcaagatcaagaatcaagactcaagat

SEQ ID NO: 12520 - DNA, 431 bp, Glycine max
  unsure at all n locations
agcttgtttgttggttntgtaagtatgtatttgtagaagtaatgcagaagatgtaaattggtttgatgcttttcctctaagtcctctctaacttgctggatggttgtaatacgggattctattttgttatttaatttaacttgcattcttttgtattatatttatatcatcaatgtctgatcaatggcatgagctgagcatcattcaggatcttactgaccgtatatcactctttgttttttaggtcttggggactgnggagacagaggataactgaagcagcacttgatttttgtcactcttttntatattatggttagtcatatcgacagtctggagagtgaagtaaagataatagcangttagtcatatgttacaggatggctntctttangaacttttcanatgatacagtctcacatggtgtcatg

SEQ ID NO: 12521 - DNA, 432 bp, Glycine max
  unsure at all n locations
agcttttactttcaatatanaactaacgtgttctcaaacatgttatatggaattggatcaggctacttgtcagaacttacaatctaactctgattaggcagagatcatatttagaccagtctgttaaataaataagtcacgcaagacttttctttttttaacttagttagttttttctttgtacataaaagacttattcagtttaaaaaaagtcaaattttgaattataaaatcttttacttccaacaaattaatctattttagaaatacaaataatatagcaattagttaaaaaaaatacttcatcaattattaattctctttttccctactttgttttttgtttctttntattcttttctataaatgattcttggaagagagccctcaacgtaatccatataggagccttcatcaacgggaaactcactc

SEQ ID NO: 12522 - DNA, 430 bp, Glycine max
agcttatttataagagcttatatataaacctacaacaaatagtttcatctaacacttctctcaaaagtgctctattttttcattctgaggcaatttttcacagaaagaagagcacatttaattgtgaggagtcgatgcttcagatggactacttgaggagtcacctgaggatggattcaatggtgaaccagctgttagagaaccatttccaccctcactctcagccaccactggtatcttgacagtggctgctctttccatctctttctcgagttcttcctctttacgcaatgcagtaaactgggtatccaaggatttcgccgcagctagccaggcagatacaatcagcagaagtattcctcccaagtatggggttgaattagctagtgacccaaaagtcaagatcataaattgctggataagggcacct

SEQ ID NO: 12523 - DNA, 423 bp, Glycine max
agcttctgttttcaatttcgagcgtctcgatattttacggggctctatccgacatccgagttaaaagttattgtcgtttgatttttctaagagcttcccttttcaattacgagcgtctcgatatattacgggacacaatcggacacccgagttaaaagttactgtcgtttgaattttctcagagcttctattttcaattacgagcgtctcgatatattacgggactcaatcggacatccgggtaaaaagttattgtcgtttgaattttctcagagcttatgttttcaattacgagcgtcctgatatattacgggactcaatcggacatccgagtcaaaagtttttgtcgattgaatttgctcagagcttctggtttcaattacgagcgctctcatgtattacctggacttcatcggacatccg

SEQ ID NO: 12524 - DNA, 566 bp, Glycine max
  unsure at all n locations
ccgaagcgacaccactacanacgccacattagtaaggagcaaacattaacatacttnnnccannnnnaaatacaagggagggagntttgattgatatcgatngcaangcgaacncaanncnacannggacccggggagacagtagagncgaccggcaggcaggcaagcttttccatatcctgacactgaacaaccccaaaggcgagcaggaggccaccacacgaacgccaccaccacgcacaagacgcaaccgtcacctagcgaacagcgaaaaggaaaggcagcaaccagaaaacgcgaaaggaaacagtaacatacgaagacaagcagacaaacaatggaccaacggaaggataggaccaccgaaagaggaacggaccggatacgaaagacaacaagaaagacaaggcaggaacagagaaagaaccaccgaccgacaccggacgaggccccgataaaagaagcaaaaagagcggcccaaagcaccgcaaacggaccagaagaaaaaagacacgccccagaagcaagaacagcaaccaacacgaacaacacaaccgggcacgaac

SEQ ID NO: 12525 - DNA, 421 bp, Glycine max
agcttgacattcatataaaaccttataactaagctgattactatattttagatcgaacttagcgaaaagaatcaaaaagcgaagcagtgtatgtattgaatcggatccgggttacacccatgtcttcgatgatgcacctatcgcgaaagcgaattatctgctaatattaataatttggagctaaaagtcgacagtttgtggaaaaacgcaatagcaacaaacgccgaagatgaatcaaacaagcccaaaaccaaattctgagaaaaattcattcagacccaagctaagaacccaattctcaaaatattaaaatagactagaacccaacttgtaaaaaggggtgttgcgagaatcgaactcgcgacctctcgcacccgaagcgagaatcataccactagaccagacaccctatacaaattct

SEQ ID NO: 12526 - DNA, 424 bp, Glycine max
  unsure at all n locations
tctgcttgttattaacggaagaaaagaaaccgaaattgaacaaaataaagatgaaagccaaaaaacaagaaatgaattaaaaagtctcggatttggaaacttacccgttgaagaatgaagaacggacgaagaacggtaaagaacggaggaaaaccttcacggatttgcttacggaaacctctcggaagctttacggaagcacctcggcttggattttcttcacagaaacaatttttttttacccaaaacagctgaaatgcatagccagnggaatcaggcacccttagaacaacccccttttgcctttntataggaaaaagggggaggaggttgccgcccagctcgcttangcgagctgggttgcttccaccttaagcaagaaaatgcctagaaacctctagaagggcctagatttgaaaatact

SEQ ID NO: 12527 - DNA, 428 bp, Glycine max
  unsure at all n locations
agctntagtattatttttntatattaaaaaaaaatttcactacaaataaaacataatttagagactaaaacaatcgatcgctaaagtgataacttcagtcgctaaattgaaaattcagtcgctaaaattgttagcaatcgaaatgacgaccgaattctctgtgtcgcaaaaccctagtctctaagtccttaatcaccaaattcttattcatttccgtgcatgtttggttgctattttgtttgggaccagttcaacaaccgaaattatcggtcgctaataagtaataaaactttaaatataacataaattaanataatattccgtcactattgaataattaatttgtaagtaaaatttaagagaaattacattcgatcactaatttggtgactaagtttaaaataaaatgtattaacaaatataaattg

SEQ ID NO: 12528 - DNA, 432 bp, Glycine max
  unsure at all n locations
agctntgagttaaaatcctgactcaccataaaccttgacccagggtgagaatgtcaatccttaccctcggaagcaaaaaaagaatagaagggaaatttccaatcaaagaaaaagagaaggaaaatttccaatgaaagcaaaaaaagaaaggaagggaaatttccaatcaaagaaaaaaagaaggaaaattccccaatcaaagagcgggagaaagcaaaaagaaaagaaaggaaattcccaatcaaaagaatgggagaaagtaaaaaaggaagaagaagaaggaaagaaagcccctgatcggngatcgaagganaaacagaagaaatatgcagagaggtctttggaccggacaatatctgaacaatacagaattgtcaccaaatgaacaaaaaagaaggaaaggaaaccacgacctanaatggtcttctccct

SEQ ID NO: 12529 - DNA, 429 bp, Glycine max
  unsure at all n locations
agcttgaccattccctanctatcccgggcatagtcagtcagtgagaacctgtgatgtacctaaacaggcgagctcctggcagtcaacagataaaaggaacaaagaccacaaagcaaggaggcttgtgtggtggttggccagctgtgaaatttgagttatatatgggatatggcctctggtaatcgattaccaagggtgggtaatcgattacaaggcttaaaaatgaagacaggagactaagatggtctctggtaatcgattaccacggngtgtaatcgattaccagtcttganaacgaggtcaggaagctatgagggcttctggtaatcgattaccaagggggtgtaatcgattaccaggcttataaatgaatgtagcaagttgtggaggcccctgttaaccgattaccagtctgtgtaatcgattaca

SEQ ID NO: 12530 - DNA, 439 bp, Glycine max
  unsure at all n locations
agcttaattgttacttctggtgtggctaaaccaaataatacgctattctcctaaatattctttattgtcatgtaactgtcttaagtaagggatcaaataaattttgttagctgaaattctatgttgaggacaccaacagggaattggcagggaagattggagttgtgatattgggcataggctagcaatgaaaagtgttgcaggggcaagatggtggtgattcaaggcaaagagaatgaaaaaatctgttatggttcgcgacaaggtggcgcttatggttagcaagaaacaattgtttctttatagggaaggaggtaagtgttgagaatgttgttgataggaataaggttgtttcctgacaatggttttttgtataggaatgtcaccaactcgattntattctcctcatggtgcacgaattcgttcttgtgcgcatgat

SEQ ID NO: 12531 - DNA, 430 bp, Glycine max
  unsure at all n locations
agcttcaagattaattcaaatgacaataactttttccttatatgttcgattgagtctcgtaacatatcgagacactcgaaattgactacagaagctctgagcaaattcaaatgataataagtattgacttggattttcgattgaatcccgtaatatatcgagatggtcgaagttgaaaatggaagctcataaaaaatgaaaacaataataattgttaactctgatgtccgattgagtcccgtaatatatcgagacgctggtaatggaaaacagaagctcatagaaaatgcaaatcacaataacttttaactcggatgaccgattaagtcctgtgacatcctggaaatttctaacccggaattttgtaaatggtgcattntgaatggctatatatataagtattattcagtggatgtatataagtatatat

SEQ ID NO: 12532 - DNA, 419 bp, Glycine max
  unsure at all n locations
agctttctcatgttttaagttcttcctcanaactgtcctaagcaaagttcccaatgtcctattagcaacttccatttgcccatcggtttatgggtgacaagtggttgaaaataacaatttagtgcccaacttgccccacatagtcctccaaaaatgacttaggaacttaagtccctatcactaacaatgctccttggaaaaccatggagtctcacaatctccttgaaaaacaaatcagccacatgggaagcatcatcaactntnttacatggaataaaataagccattttagaaaacctatcatacgaccacaaaatggagtctctaccactgcttgtttttggcagccctataacaaaatccatggataaatcaatccanggatactccggaattggcaatggagtatacaatccatg

SEQ ID NO: 12533 - DNA, 384 bp, Glycine max
agcttctagatgagttatgtctgcgaatcggacatcctgtgaaaagttatgaccatttgaatttctcgagtgcttccgttgtttaatttcaagcgtctcgatattttatgtcctcaaatcagacatcggagcgaaatgttatgaccattcgaatttgccgagagcttccgttattcaatttcgagcgtctagatgagttatgtcaccgaatcagacatctgagtgaaatgttatgaccattcgaatgtgtcgagagcttccgttgttcaatttcgagcgtctagatgagttatgtcaccgaatcggacatccgtgtaaaaagttatgaccattcggctttgtcgagagcttccgatgttcaatttccagcgtctcgatatatta

SEQ ID NO: 12534 - DNA, 378 bp, Glycine max
  unsure at all n locations
agctttatagtttactgtcactcacgtgcccatacgtaatagaaccaaatatcttcaaatcagaaatagttacacgttataaccaggtcgtaccttgtgtagaatcttcatgtcaattgcatggagatctgtttgctaggtatgaagttatatggctcatctttgcccaaaatgatgtcgaaaatacaacattaattcacatacatcgtgcaccctacaacagaagtgttctagtcatctactttccaagtccatttttattgtaatgtcccacattcaaataaatgatgcctcataattaacatttctatagtactcctcanaatcttaatttcaaaatgttcccaacattgtcagttctcaatctcttgattaatc

SEQ ID NO: 12535 - DNA, 401 bp, Glycine max
  unsure at all n locations
agctttaactctgattattgagacactcataagagctcaagcttaagtccccattactacacatccattcctagacctgtgatagatgtgggattgtgcatgggctgggagaatgcactgttaatgatgagatacctacagccatgaatgagattaactttgtttggggaagcaactattcttataatcagtaccccaataatttcaatcaacgatagggcttcaagaagaatcacagaatgtttaggtcttaacctatgcaaaattagaggcctacaaaagaggagacaacccactcttcaagaaatcatgcttcaatatatgacccanaatgatcaaagaatgaagtaggttgagtcctaattgaccaacatacaatctctcttgtcacaaagacaact

SEQ ID NO: 12536 - DNA, 394 bp, Glycine max
  unsure at all n locations
agctttgtgtttgagatgttgatgttaagtgggaattgcaaccagaaattaataatgcaggggattattgtgtatttggagtgatgcaactttcaaaatggaaaagaaggtcaagggaaatggtttcatatatttggaaggtacttgggttggtgatggtggaaaagtgactataatcaatatttactctccttgtgacataacttctaaaagaattctttgggatgaagtcaaacaacttagaactgccaacaatgggggtttatggtgtattttangagacttcaatagcattagaaggaaatttgaaagagtangattgtgtcagaggattcagaatggaggcagcctgaaggaattcataataggattgttgacttggatgttgaggatg

SEQ ID NO: 12537 - DNA, 389 bp, Glycine max
  unsure at all n locations
agcttttactattaggttcatcaagtcaggttgaaatatggaagtaaccatcctgcaaacttggggcaaaagatgaatcgagtcacatcactgcttcgtctactgccaaacatatttaggattattgatgtccttgttacttccagtttcaccttgacaaagatgtcatggaccatgttgaaaatctaaattgattcaaccccatatcctgcgtaaaaattcgcaatacttcgactgtacatcattcgcatgcatccatgcttttcattggttgcattgctcattgcattctttccttgaaaaataaaataaaataaaatgaacttatcaaanagaaaaggaaacgctttacggcgcccttaccgaactcgtgctagagctagagtaat

SEQ ID NO: 12538 - DNA, 425 bp, Glycine max
  unsure at all n locations
agcttatcattatcaaacttggagaaagagttcttggggtcaagacatgagaagcaatcaagtataatgttacttccttcactaaagcggtgatccatctccacacatattttatcaatagcaacataaaaaatctctgcacggtaatgatgaagattagtgatagtcctcccttctgctcttgaacgaccccgaactggtatttcgtcatccatatttggtaccagaatacttttagcaacacaaaatccttggacatcggcaaaaaaattattccagccactctctctcattgtgcccaaccgagctntgacaacatcaactaattccatgacattcacaatattaagatcttttctttgcaatatatttgaaagctcgtttgtgataccaaacaactntaacattaacctcaaaataaaagc

SEQ ID NO: 12539 - DNA, 443 bp, Glycine max
  unsure at all n locations
agctntaagatgaacttctgtacaatgggggagtttctgtaatttggaaaaagtagaattgttaaaatggtaaaaatgtgtttaaagagattaagatatgaaagtcaggttaccaggggttcaggatcatccagcatttcctgagtaagttgaagagtccagatgtgctttctggatgaatgtctctgcctgccgcaagtttgccgctccagtggtggtatgaaatgtatgtcaaaaacagagtgatggtcacatgcaaaaaaattgatgttggttgactcgtagattntcaaatctttcctgaagttttggagtccatatgctaaatacactctgtctttgtgttgtctgactcgtatttcatagatggctccattgtatctgagatgaacaaactcangatagtgtggtgcccattgtgtatgatagaacactagaagttg

SEQ ID NO: 12540 - DNA, 438 bp, Glycine max
  unsure at all n locations
agctntgagctttgatcacccacgagtgtttcagcaccctagtaccaagactgtatgtagggttttcttcaagccacacttccaaaagcagtgtaggggcttttgtgggttcgagcaaagggtttctggcagtattgaaaacaatgtgggacaatgtgggtgtcgagggagcggtttccgatagatttcangcaggaggagaaagagaagagtgactgcaaggttttcgagcgcgcgggttatgaaatgccaatgttttaacttataaacataacaacatcggttgtttaaggataaccgatgttaactgaatatagttaacaaccgatttggaaaaattgatgttaacatcatataggttacatcggtttttcaaaaaatcgatgttaagatcaactccttaacatcagttntgagaaaactgatgttaactctatc

SEQ ID NO: 12541 - DNA, 434 bp, Glycine max
  unsure at all n locations
agcttttaatctttatacattattcccgctctgataccacttgttggaccttgtggcctcaataatcttaagagggataggcttagaatacagaagaaacaacaacaatcaatttaacaatgttctttanacatgcaagacacaattgattgcaacaaaataaataagataagggaagagagaatgcaaacacagttntatattggttcggccacaacccgtgcctacgtccagtactcaagcaacccacttgagagttccactaacttgtaaattccttttacaagttctaaacacacaaggacaacccttcctttgtgtttagagattctntacaacaagagactcacagtctcttaaccaatctcattgaataagaagaatggaagaagaattctctcttcaagagaagaatattacaatgaagatcatgt

SEQ ID NO: 12542 - DNA, 444 bp, Glycine max
  unsure at all n locations
agcttactctgtcatattccttgattacgtcatgcatctctccatggcatcgtaaataggcatatcattcctgcatcatatttgtgcattgcattttcataaatcactgcattatcatacgccttcatttagcatgcttttgttcggccaactacatatattctacttccatcattcgcatgtcatgttcactcgtgcatgatcctggcatcttcctctgcnnaaaaaaaaaaaaaaaaaaaaaccccngaacaaaaagaaagtcacaccacattcttagttacatgtgttgggtaccatgatgatggctataaaccaaccatgttgggattatacaccaatttatcaagaaaaaaatgattgaaaatcatgtgaaagggctacctaatgcatggttaactaggaaaatggtggtcctagggcatctcatgtcaatctcataat

SEQ ID NO: 12543 - DNA, 384 bp, Glycine max
  unsure at all n locations
ttatcttatgtttctaacatctacaatagacctcctcaacctcagtagcaaaatcagccacaacagaataattatgacctttccagcaacaggtacaatcccgagtggaggaatcatcccaaccttaaatggttgaatccttaacaacagcaacaacaacaaccttattttaaaaatgatgttggcctaagcagaccatacgttcctccaccaatctagcagcaacaacaacaacagcttcagaaacaacaaacagttgaggctccttcgcaccttcccttgaagaacttgngacgcacatgactatgcaaaacatgcagtttcaacaagagaccagagcctacattcagagctttactaatcagatgggacaattggctacac

SEQ ID NO: 12544 - DNA, 402 bp, Glycine max
  unsure at all n locations
agcttggttctaggtacttacccgttgaagatcgaagaacgatgaagaacgaatgaagaacgtcgaagaacggttgaaacccttgcgaaattcttcacggaaaacgttacggaaacgtttcggaagcgcctcggcttagattttcttcacggaaacgatttttccaagcaaattcgaaagagagagaagtgccaaaggggctgaacccttttcttcttcacttcctcccctatttatagcaaaataggggaggtggttgccgcccagctcgcccaggcgagctcagctcgcccaggcgagccaggttgcttcctccagaagcaaccgccttctggaggaatattctggagggcccaagtgggcctgggtgctatntgcaccaccatttttactaagtacacc

SEQ ID NO: 12545 - DNA, 439 bp, Glycine max
  unsure at all n locations
agctttggtgcattcataatatattgtaggtagcatagagcaatgtaaatgtccatccattttctaagctccccttgtgttatctttggctttgagctttgtcctcccttgcatagttactataatttccaagcaaacaagacaagaattagtcatcaggattaaagctaaggaaaacaaaaaagagagtgagaaggggtaggtggccgcaaagagaagagatgagagataggcaagaagagttgtgcaacatataatgaaaccctatagtgattagaatagcttttatacttaggcatttcttatgttatattgatataatgggccgggttcgggtacttatggataaaaaaaattaaactaagcccaactagatgtaccaattccttactctntcctttaatctaactacccgctcatctaatatagacgggctaca

SEQ ID NO: 12546 - DNA, 429 bp, Glycine max
agctttgcattctaaattgtttctcttgaacatagatgatttgtaatgagtgcttttttgtttggaatgagattcataatgaagaaatcaactacaattttgcataagccaaaggttaaagcagagagaatgttccaaaacagtagtcaaatgctaaaatctccctaggtcttcgcaagctcacaagattccttcatcaacgtctaaataatgtatccactaaaaaggaaaccgtcaactagtttctttccttccaaaagcgtacgtgtgcaatatatatctgatagtgacacaattggtgatgtttcacggcggctgtgcgaccaccctttctcaatacaactccacaccattcaaatatatgcatatgcaagacaaaaatgaaagtagatacgttacaattaacttatcatatcctcagatactacc

SEQ ID NO: 12547 - DNA, 432 bp, Glycine max
  unsure at all n locations
agcttctcatggaagctacctagtctataaatagaagcatgtgtaacacttgttgtaactttgatgaatgaaagtcttatgagatacacttcaaagttccacttctttccctattttattccttcaatttcgtgctccccccttctctctttcttttcctccattaaagcatcctcttcaagcttcttatccaaggcaattcttggtggtgaagctccttcttccttggcttattccctagtggatggtacctcccctctcctcttctcctttgccttccgctgcatctccatggtgaaaaatcaccattgaaggacctaattggagctcanagatccagcctccatagaatcttcacaagcaagcttccatcaagtggtaatcagagcacaagagcttcaagtaggtgctccttannacctccattaattt

SEQ ID NO: 12548 - DNA, 394 bp, Glycine max
  unsure at all n locations
agctntgtgttggagatgttgatgttaagtgggaattgcaaccagaaattaataatgcaggggattattgtgtatttggagtgatgcaactttcaaaatggaaaagaaggtcaagggaaatggtttcatatatttggaaggtacttgggttggtgatggtggaaaagtgactataatcaatatttactctccttgtgacataacttctaaaagaattctttgggatgaagtcaaacaacttagaactgccaacaatgggggtttatggtgtattttaagagacttcaatagcattagaaggaaatttgaaagagtangattgtgtcagaggattcagaatggaggcagcctgaaggaattcaataattggattgttgacttggatgttgaggat

SEQ ID NO: 12549 - DNA, 432 bp, Glycine max
  unsure at all n locations
agctttgagtttattcaaacgacaataactttttactcggatgtctaatcgagtccagtaatatatcgagacgctcgaaattgaatgttgaaactctgagctgattcaaacgacaataactttntactcggatgtccgattcagtgacgtaatatatcgagacgctcgaaattgaatgttgaacctctgagccaattcaaacgacaataactttttactcggatgtctgattgagtcccgaaatatatcgagacggtcgaaattgaatgttgaacctctgaggcaattcaaacgacaataactntttactcggatgtctgaatgagtcccgtaatatatcgagacgctcgaaattgaatgttgaagctatgagccaattcaaacgacaataactntntactcggatgtctgagtgagtaccgtattatattg

SEQ ID NO: 12550 - DNA, 659 bp, Glycine max
  unsure at all n locations
cctcatctcactccgctacatctcgtatctacaattctctcactancctgntntattatanaaaaaaannnnccgaggggcctgattcattcgaaaacactcaattaanatatactctacaatactcantnttgttattatatgttaggtagacattacactattatattttatatattctacacctcaccaatacgctgcggactgatctatgagctaactaactactcacgttattacaataacgatcaatatgcgtcgtcacctaatacaacatcacaatacctaacgacggacactgcattcgtcgacgaacatctccgcatactcgaatatctcactagtactgactgtttcagagctctatcatctatacatatcatgtcactacgactaataaccgtatacccactacactctacctacactttgacctcacgctctcatcatctaactcaaccacgtctcatgaatcttctgctatgcgatcatcatatcacacactatccgatatacagcgacaaataacactcacatacaacactcatacactactacatacagcttaagtacatcttccgtggttcctaactctcactccgtcccataatgtacctatgtcctcaatatccatatcgaccaagttctctacaacatcg

SEQ ID NO: 12551 - DNA, 376 bp, Glycine max
cacccccacccttcccggagataaacacgaaagtgaataatgacaaaaaggagttgacctgacacaaacaaagaaccaaggcctaaaaaaacgaaagcagcgcttttccaccggcggaacagggcggaagaacgaaccaagcacaacgaagaaagaacaataacgacaccaggagaagcaggacaacagaagacgcccgaccagacacaccccaaaagcagagcaacacagacaccaccaacgaacagaccgaagaagagaaaaacgcggaagggaccagatcaccccgaagaagatggacgacaaagagacaggcaagaaccaaagaggaaccacccccacaccggagcaacaaccgccccagggacacaacccc

SEQ ID NO: 12552 - DNA, 288 bp, Glycine max
  unsure at all n locations
tgctttactgattctcatatactaattntattactaacatcttgcagcattctctgctcgtcagttgataacaatggcgataatgcttttgctgaatgttgatttgtaatctgaacggcactcgccatcttgggactctaacgtagaccttgactctccggtctcgatgccacccttactttttactgccagcggtgattccttggacaattcacgaatataatttcttcatatctttatcgccatgggaatcgttccatactcacacttagcctttatggcttctta

SEQ ID NO: 12553 - DNA, 641 bp, Glycine max
  unsure at all n locations
tcccatatatcactactacanccccctctgaaaanccgacagtcaactacaccatantnttaagtacacacanacnnaaaananaaaaggtggntttgaattcgatccantangcgacactccannatactnatacttacgagatcgccagnctataacacactattagagcctccatgatacacttgtctatagtacactcatcacaggctccattgagcgtggccctttcttcatatctaaaggacctgcgtcgcgggagaagcaaatatataaatacacgagactcgactcacaataccaagcgttagggatggatggcttatcctaacatagaataacacaaaatcacggagcacgagaaacagaggcggatccgaagcgcaattctctcagtcaccacgtaacgcaacgcaccacacgcacaaagacacgacgacagaagccacacagcctccacgcaaagcgcacgacacccaccactagatccctcgcatcaacacatgacccacactctacgcccaccacgagcacacgttaccgcacacacgccaccatcatagtccacgcggacacgcacaacatcgacgacacactgagacgaccaaaacacacacccaaacacccatacacaattaccc

SEQ ID NO: 12554 - DNA, 525 bp, Glycine max
  unsure at all n locations
cccaccgccgggcacactcggagccagccggcacaaaattnnaagcagactgagactcgaatcgccaacacngaccggaccggagcaaagagacgcagctgaagaatttctcattaaccgcacaaagaacggggccaacgagtgtacacaccgaccgcaacccccacaccggacgacaggacacagcgcgcaccaagacacagcagtactcatatagcggacgcactcgcaagacgaaatatcagcgagcgcaacgagccgccgcaagcatgaaaccgaaaacaacgagccaagaactcgatgaccccacacaataagcagccatgaagcaggtgtacctcgggacagccaacgtctacacaggataaagaggaaaggcgggttggagcacaccgtcaccaaccatctctattctaaaaacgacaacaggaaagcccacgggcactaccttagaccaacaacgaggaaccgtcgccggcaggagaacatcctcggggagaggccgcccgacccgacaaaaccgcg

SEQ ID NO: 12555 - DNA, 596 bp, Glycine max
  unsure at all n locations
ccaccaacaccacaaacacgatagcgaatgtgaacgataaacggaacaccaccancanataacnaaaagggagnntttgaatcgatgcnactgcgaaacacanacnnaaaanacgcggaaaccaaagcaagggaaacaccaccacaccaagttgcttattttaagggacaagacctgatggaggcgtaatgaacagacccaaatcgaagcagcaccacaaagaccaaaggacgaacatccgcacccgtgaaacaaccgaaagagacccacactcgaagaccacgatcagccgggacggcgagatgcgacacaccagacacgcacaaatgcggacacgaaggagacaggagatccaaccgacgcccacgcaagccaaaccataaagccagaagctcgaggtcatgggaacagcacaagaaaccccaacatgcacaggtgcggcgagaatcgaacgaagaaggaactacactggcaatccattgcggcggcgaacacgaaaaccacgaaaggacacgaggagcccgagaggacaatacgacgcaatcaccacgcaacagaatcgaacgctacgatgacacacagtcacaacgaagacg

SEQ ID NO: 12556 - DNA, 337 bp, Glycine max
  unsure at all n locations
agcttctcgatatattatgctcctgaatcagacttccgtttcanaagttatgaccatatgaatttctccactgtattccgtgtcacaagtgatgaccatttgaatttctcgatagcattcgttgttcaatttcgagcgtctcgatatattatgcgcctgaatcggacttccgtgtgacaagttatgaccatttgaatttgtcgagagcatccgttgttagaattcgagcgtctcnatatattatgcgcctgaatcagacatccgtgtgacaagttatggccatatgaatntctcgagagcatatcgttgtcaatttcaagcgtctctatatagtctg

SEQ ID NO: 12557 - DNA, 359 bp, Glycine max
  unsure at all n locations
cccccataccacccaaggattgaagaaaaacacaaaaaaannnaacggggtatctgcatccacnaannancacgaaagatgggaaacaacccgcggtcttttcaagaaaccagggggaagaacccggacaagcacaacgcacagaaaaagcacagcgaagaagaaatacggaaccaaacggcagacagaggaaaaacgcaaaacacgaagaaacgagcacaggacaacaatcaaacaaaccggagcggcccacaaacccaccaccagcaagaacaagaaaggacaagggccccggacgcaagcaaagaccgaaagagcgaacaaaaaaaaacagacaaccaagcaccccaagacagccc

SEQ ID NO: 12558 - DNA, 424 bp, Glycine max
  unsure at all n locations
tgaggtagtgtataatggtgaaacttcctgcttttattcgttgaccacagagtggtacctggagatatgtctcggaggtcatgagaccttgtggacgtactgtggtgtgctattgtccataaccaagcttgtcccatatcgaccaagccggaatattcgtcagtggaacctgtgattcttatcaggcgactttgctgtctcagatagaggtactaacactagcagggggttgggggctgcccctgaaattgaggaatatggtgggcttgtgattataccaagtgggaatcgatatcaagttcaatacaatacagacgctatatggctctggtcacgataccacggcgacgaactcataactatgcttgacaactacgtctagaaactagtgcaaacatctggtaatatctatactcatgcgcgn

SEQ ID NO: 12559 - DNA, 559 bp, Glycine max
gagagcaattttgaatcatgtctaaagcgatctatgaatctgaaattgatgatagtgtggcatacagtcacataaggctatgtagtgagcggctgttcgattgtgtacaagcaggattgcacgtccagaatatgctgctgaaccaactatgccttgatggacacctaccagtgagatcacatgcacacacagagcccattgactcctgtctgctcgcaccggatgctcatacagacaacaaagcttcctctatatctatgcatgacatcgttgaatgagcacgtattgccacaccaccaacaccacatgcactatgctttagctctgacacaacaccacccgagaatgtgcaatgctcactcttacatcccgcgacaatgatcttgctgctcgtcaatgaccgacggacagactacaaacatatccgtgagtgagtagtcatgtgcataatggtgatcgatgcatcgagtgcagacaccaacactaaatatctccgttgttacatagctagcactcactgatattgtgtgtacagccgaatacagtggactattcttcg

SEQ ID NO: 12560 - DNA, 795 bp, Glycine max
  unsure at all n locations
cacaccgcatgctctngcanncnttanaccactcaccggctcgngcacgagagaaaaatntaagtagcntcgcgcaaaactcgcnnnncnaccccnnnnaaaagagagcggcgtggaagaccctccgatagnancnanccncnnanannnnannnaanaccccancgagnacacgccaacacacnngcgccggcaacacnagacaagcancacanacaattatattttatagnacgcnacaacgactagaacagtantcagtgaggcgcgcgcacagcacgaaacactatcactatgcacaaaccaatgcgacaatacagagacatacgcgtgcagaccgacacacacaacggaccacagactgaacacgagcatcacgcacaacaggtagcagcagaacagagacaccaccacagacgagaanagccactcgcgtgcgcaacatacacacaatacagagaagacacgcgtaacaccgataatgagcgcaacgaacaatcaacgtacaccacacanacacatacacaacacaacatgcacacgaacggaacagaacaacagcaagaagcacgatgacgcggaacgcgagcgaacgcgcgccaccgctgagagacgccacaatatctacaagggagacaaaacgcagacagtcatacgaaaccaccgcacgacacacactaccgaagggacaacgaaagcacgacacacatccacagccggcatgacgatcgcgcgcgacgcaagaacgcgacacacacatgcaagacgaacacaccgacgacgaccgccacaacg

SEQ ID NO: 12561 - DNA, 445 bp, Glycine max
  unsure at all n locations
cacccccgacctccgtcattcaatagaatacaatngagactaccgagccaaactaaaannanaagaggttgatcatgcatgcaanaccanaaaacccaaaccaaggacacgacacaaagaaaagcatttttatagaacaaacacaccagagcggcgcgcaaagacacaacaccccgaacacaaagcaaagcccaagcataacaccgaaggcacagcgaaaagccaaggaaagacgacactaaaggaagaacaaaagcaaccaacagaaaacgaaagaacgacaaagaaaccaaaacgcaagacaaaaacaaactaacaaccccacggaaaaagccgcaaaacaaggaaacaaaatcaaaagaatgcagcaaaagaacacacaacacacgaccacaaaagacgaaacgcaaccaccaaaagcaaaaaagacaagcaaaaaaaccac

SEQ ID NO: 12562 - DNA, 418 bp, Glycine max
  unsure at all n locations
agcntttcgcattgcttactgtaaaatctaggacctacccttggtagaagtctccacagaggccattgcctccctcgcccagtattatgatcagtcgttgaggtgcttcacctttggcgacttccagctatcacccatggtggaagaatttgaagagatcctaggatgtcctctacggggaaggacaccatacctcttctcagggttctatccctaattagctagaatttctaagatagtccaaatctctgcgcaggaattagaccacatacagcaagtcgtaaatggggtggttggaataccgagaaaatacttggaggacaaagcaagaatcttggcacgtaaaggcgaatgggccccgttcatagacattctcgcgctgttgatcttcggaggaagtctctttccanatgtggat

SEQ ID NO: 12563 - DNA, 385 bp, Glycine max
  unsure at all n locations
agctcgcccaggcgagcaaggttgcttcctccagaagcaactgtcttctggaggaatcttctggagggcccaagtgggtcttattgctatntacaccctttctntactaaatgcaccccccttttattgttttggtaattctttttccgtaacgttacgaaactttacaaatttcgtaacgatacttaatttccttccgcaaggttacgaatccttacggattatgtatttactctttnttagctttcgaagaagttatggaaactcacggattgcgcataaatacctcttttcgacttncgccatattacggaatttcacggatcgcgcaagcctgctgtcttttgagttctgagacgtatcacgacttcatttattgtgcaac

SEQ ID NO: 12564 - DNA, 284 bp, Glycine max
  unsure at all n locations
agcttcttcctttatattctctgcaacaacataaaagnntgctagtgtcgggagaataataaatacataagaatacacgttaggaaagaaggtcttnacatgaaagagatgtgaatagattttggaatctattcgtcatacagagttgtatattggaaatacaaattactaaggagaatgtataaacacaaaggataatggaaataacaatagccttacaagtatgcgttactaacagtactcatacctataatacacatcatnttcagagtagtagctaacat

SEQ ID NO: 12565 - DNA, 485 bp, Glycine max
  unsure at all n locations
gctaataaatctatatatggttaaacacagcccttgtcagtggttccttttttttcatgggnataattctttatgtggttgtaatgataaccccatggatcaatgcatataccacaaggtcagtaggagtaaaatatgttgtcttgttttatatgtagatgatattttacttgtagtcaatgatcggggtttgctacatgaggtgaaacaatttctctctaagaattttgacatgaaggatatangtgatgcatcttatgtcatcgacattaagattcatagagatagatctcgaggtattttgggtctatcacaagacacctatattaacaaaattctagagagatatcatatgaaagattgttcaccaagtgttgctatcattgtgaagggtgataggtttagtttgaactaatgatcaaagaatgactctgagagggacgagatgaaacatattcattatgcttcaattgtcgacagcctca

SEQ ID NO: 12566 - DNA, 731 bp, Glycine max
  unsure at all n locations
ccctcctccctcacaccatcgcantcantcgttcttgtgcgtatgtggntanaantanncacncagagtgacatttgtgacacactactacatcgacnaatctagctcgtactcgtggattctctagagtcaaacctgcaagccatgcaagacaacttaactattattcttgtatcactatctgaccacacacaatacagctaacgaggtggtatgtatgcgcgagtctacattagcgagactatactcgtaatgcctctaagctatctatagatctactctctacacaggacatacctcttaaacacaacacacagataccttacacaaggtgtaacgcctgacatacatgtgaggctaacacagtcacacagaaggtaccttctcgactacatatcattactgacgagtatcggcgccacgctatcatctgacatacgatnatctggaccgagacaatccaacttctataggatacgcatgctgcccacggacaaccaaccgctgtcggagagacgagagctacgagctctaccacacagtacattcggatgtaatgacactgactgaccacacggacagacgactactcgctcaatgcatatacatctcacgccaanatgcgaaccacacactgcacacagtgcgatgacgatgcatagtaccatatacagagaggacaatacagatgaattcgtgtacangcgctngtagagcgcacaataccacca

SEQ ID NO: 12567 - DNA, 566 bp, Glycine max
  unsure at all n locations
ccccccccgcccacctaggtgtgatccgcacgcaataaattnaaaaacnnnccaggggttgatcgtgcatcctacacctaaaatcaccnggctgggggcaaacggtctataactacataattcagctcttgtttattnatgacctcaaagaggaagctgtgtgctaagagcggaaatatatagcgcattcgcccaaaaaccacaagatatggagagaaaataggacaaacaaagaggaaccgcacctggtgcgatgtaggacgtacgatacatgacccacagggatagatatgctgagatccacgaccgtggccgaaaaagaaagtcattagacactgcaacaaatagaaccggcctcggaacggcgccgtttcactacgtcacgaaacacggcgtaagtcgaacagagagaaaggttctataggagttgttaacacacatacggctaccatacgccaaccgaacgaagataattggtgttacagggaaatacatcctcacacgtcatgaagcgaagtctcatgacaggctcccaccgggtcccatcattgacagactaaacgccc

SEQ ID NO: 12568 - DNA, 317 bp, Glycine max
agctcttattttctttgatgaagatgaatccatggccacctcatggactcctctaaggacaatagcatcatttcttgcactgaattgttgggagttagaagccatcttctcaatcaaattcctaacctcagcatgagtcatatcaccaagggctccaccactggcagcatcaatcatactcctctccatgttgctaagtccctcatagaaatattgaagaaggagttgctcaaaaatctggtgatgagggcaactcgcacacaatttcttgaatctccactatgttgcctgatgcctgaaatgtcttttctgatggt

SEQ ID NO: 12569 - DNA, 484 bp, Glycine max
  unsure at all n locations
cgcttctacaatctnccctttntggatgatgacaaccctgatatcaagatacacatacacattttnttcctagtcgatcactcacttaattctccatattctccccctttgtttttgagtttaagcttcacttgaaattaagttatttaattatgtgagttcttgatttaattcctattntctttccccctttggcagcaacaaaaagccaaagttcgtaacaattataaaacatacataaatgactaatcatacacaagacatttattgaataatctaaaccaatcatgaagcaaaaacatgaataacccatattaatatataaaccacatagtcatataacataattcataaaaacttagtcatactaagcaaatagtataagaagtactagatgttcanatttcataataatataggccaatacatgactagaaatctacagtctaataatattacacataatagacatctatgatgatgg

SEQ ID NO: 12570 - DNA, 275 bp, Glycine max
cttataattagttaggggtttctctctgtattgagctgactaaacacacctagttggggatttctaatgaacagctgatgtaaatacttaatatctaattgattatgttttctatgttcaatgcttccttcaatgcttaatgattggatgcttattggctgatcatccatttgtgtgcatagttaggcgactttagcattgggaaatgtactgtagccttagaactttattgaagcaggatcgaaacttagtcatacaagagtgatctgcggatt

SEQ ID NO: 12571 - DNA, 371 bp, Glycine max
  unsure at all n locations
acaccatatgagcatgatgatggatggctcanattctaacaaaggtcaactcatcactttcaaattgagctttcataactatcatgacatgtacatgaaaatcgaggatttcacatcacgatatttcatgaaacttttattatcaaaataattacccatttgttgaacatatactataattcaaagactaacatgcacagtcgtacactcacacagaattgacccacaatattaaactatatacccaacgaaactaacaacattaacacattaacacatctaacaaattaacacacaccgcatatctagcagaaccacagaacactgcccgcccatacttaaacaacacattgtcctcaatgtagcacaat

SEQ ID NO: 12572 - DNA, 110 bp, Glycine max
  unsure at all n locations
agctnggtcctcaatggctttatgaagactctnnccaaatctaaaggtagatctgggatctctatcagagactatactagaaggaacaccgtgtagtctaactatctcac

SEQ ID NO: 12573 - DNA, 485 bp, Glycine max
  unsure at all n locations
tgtgtggagcttcaatggagaatgaagaagaagagaatgacaacgtgttggagagagagggctgtctgaaatttctgtcttgctaagtgaggagagagataagctttttggtcttaaataaaagggtttcctttntttctattattntattcaagctctgccacatgtcccgatttgattggagcaaaaagggcccactttctctttntgactgtgacccatactcagtcacaaaagagagaanaatctgacctttgaaacgctaaaatcctgcctcggtttgcgtgccgtttctctgattccaatttctcgcgtttctctgcgtccgtcggggccagttttcgaaagcaagctatatatatatcataacgctcagactaaaaccccgagcgtggtcagaggttggttctgtaaatttaagtccacgaaaacgatgatctttactaataattaggaataacccttacctcgcagtatggattctc

SEQ ID NO: 12574 - DNA, 477 bp, Glycine max
  unsure at all n locations
agcttgcagacaatataatctatcgtcacgctaaaaatgagctacttttgtttgttaaagtaaactagaaaaaatatactccatgtgtatggttgatctttgtactaaccaatatttatgaacaatgatagacgttaacttctaagggtcacatgtaaaaaaaaaaaaaaatcaagggtctcaactaaatttttcatcttaagataggcctatatacaaagaanatgaatgtaggcagtaacatccttcatttccatcatgtatacaatgctatctcctatattttagtcgacttacacaaaaactctnttgatttgcttaaaaccatttctgtgacacccacacccatatcaatttcatatnttagtttaaaaaattgaaccgagaattacccttgattacataattacacatatgccctctctgtgtttntatacatattacaaatttaaatcccatgaattcaaacattacgta

SEQ ID NO: 12575 - DNA, 382 bp, Glycine max
  unsure at all n locations
atcaagatgcggtgacgatgaatggctatcctatatntaagttattccctttatgtgacctacttgtgttacacaatactcagcacttgtaatgctatatagttntataggtgctagtaatcttgtggttagattatatactatttctgctatgacaggttaaagagagaataactaccgtcattgttattaatntgtctttaattatactagcttgcaacccggattgttagattatattattcaacaagtattgatatttttattgtatgatccattggcctcttctcgtaaggataatcattgagtcataaaatgtttttcaccaatagtcataacacattaatttgccttattggtgaaatgatatgatgctgactca

SEQ ID NO: 12576 - DNA, 332 bp, Glycine max
agcttctagatgagttatgtctgctaatcggacatcctcgtgaaagttatgaccatttgaatctctcgagtgcttccgttgtttaatttcaagcgtctcgatattttatgtcctcaaatcagacatcggagcgaaatgttatgaccattcgaatttgtcgagagcttccgtttttcaatttcgagcgtctagatgagttatgtcaccgaatcagacatctgagtgaaatggtatgaccattcgaatttgtcgagagctatcgttgttcaatgtcgagcgtctagatgagttaggtcatcgaatcggacatccgtgtagaaaagttatgacca

SEQ ID NO: 12577 - DNA, 495 bp, Glycine max
  unsure at all n locations
tctatataagctgaaccatttatcaataaacacaagtnngagtttattcttaatattagagtttatctcttttatcttagtgagagtgattctcctaaattcttgagtgattcaagaacaccctggctgtatcaaaggactttcacaacctttgtgtgttgccctcgctggaaagagtgattctttccttcctatcatctccacccttgttctttcaaaccacaattccagaaaatccacctctgcccaaaattatctcgtgaccataactcccatttcacacactcaaattaagtgattcttgagcctaaattgaatgtcaaaacgagacctttcacctcgttttggaatcacctcatttggagccctgtagcttccgttattgccatttctatatttctgtccagccaccacttagacctacgtttaccatcccattcatccatgttatgccagaaaccaccttattaagacccacgagattaaccaccttat

SEQ ID NO: 12578 - DNA, 378 bp, Glycine max
  unsure at all n locations
caaagcttgcattggtaatttttttctcatccatcaagatttagtacttcgagttatccaccatatagccaagccaacgttgagactatgttatttgtcaagttccagataccagtgaggtttacattgacaagtccagcctcacaattctccaaaagggggagaagaccaacatcagttatgcatagagtccaatcagattaatatgctgaagttggagacacaatttgaacaatcatggctaggctagcactaccaaaaccagngcacttttgaatgactaaagattgaaagactcgcaagaaaagtataacacttcatatcatatctttgactccatgtacttacaagggaaaagatttcacttcatttgatgtt

SEQ ID NO: 12579 - DNA, 381 bp, Glycine max
  unsure at all n locations
gtgcgggttcgggagacataggtcaagcgttcgcgatatgcgatgatgatattccgagtactttggatttggtacgaccatgctctcttgatttccagctgggaaattggcgagtggaggaacgccccggcatttacgcaacaagcataatgtaaacctctacggctctaaaagctctatagttgggcctaggctgtagagttttcattntgttaaggctctgtgtcttttgtctttgaatttataatacaaggatctttcttcatctgttcctggtctctacccattctcattcatttgcatgtntacttctttntctaaaacggcagattcgatgacgagtccnccgaaggtactaatacctgngacccgtctatcaac

SEQ ID NO: 12580 - DNA, 450 bp, Glycine max
agctaggcactttcttgcttgagtgaaaatccatgttctcgcccaaccatggatcaagtgtctaagaagcttatgatagggaaatcacctttagcaaaccagttccctatgaatagacttggacaacttctctaaggactaaactaattcagtattttggttttcttgttttcttatttatacaccttttatcctttatcttttgttgtaagcttgtttgatttgtcattgtaatacaccatgtataagttactagaggtcgagagtagctagattatccggttcatatactatggcgattgggagaatgaattggtacattttcttttctggaaatccttggtgtagtgtgagcatgcatatgtacaagttgttggtttgaataaaagaaaagtaaaaatgattgacttataaattattgccatacaaagtatcccattttgggatgga

SEQ ID NO: 12581 - DNA, 415 bp, Glycine max
  unsure at all n locations
tgctaatgcgacatgtggagatgcgtaagtagaagctnttctacaaatttgtacgccttgntntaattttattnnttttggcacagaaaccaccttgtaatttaccagtataattattgaatatttgttctttatatgtatattgntgcatgcagtgcattntgcaagcctggaacacttgatcctgaaaaagtaaaagggaaaatagtgcgttgtagtagagatggaaaaataacatccgttgccgagggtcaggaagctctatctaatggcgccgtggcaatgcttttgggcaatcaaaatcaaaatgggagaacccttcttgcagagcctcatgtnttgtctactgtgaccgacagtgaaggcattcaaatcacaacgccacccagatcgcagaacccctacgtaatatatc

SEQ ID NO: 12582 - DNA, 391 bp, Glycine max
  unsure at all n locations
agctttgtctgatgagtactggctaatggcaatgcatgaagagctaaaccagtttaagagaaatggagtgtgggacttagtttctaaaccacctctataagtcaattaaacaaagggtgtttgaaacaacttgataattcacccatgtacggatacgaaatattgttgaagatgattcaaccgagaataaggaatcaactatgatgaaacatgcgctccaagtgcaaggttagatgctataagaatgctacttgcatttgcatgtattatggatttcaaactttttcagatggatgtaaaaagtgccttcctcaatggacgcgttgaagaagatatgtatgtagatcaaccactanggtttttggactatgaacatcctaaccatgtctac

SEQ ID NO: 12583 - DNA, 514 bp, Glycine max
  unsure at all n locations
gcgacactactagatactaagctanagtatgcccgagtcattcatccctatgagatgttgttgaagtattgtcaatcataatttccattccttggattacggagttgaaccaagctcaagctnttacaaaaaggttcatcaagtcaagttgaaatatggaagtaaccgtcctgcataattggngcaaaagatgaatcgagtcacatcactgcttcgtctactgccaaacatatataggattgttgatgtccttgttacttccagtttcaccttgacaaagatgtcatggaccatgttgaaaatctaaattgattcaaccccatatcctgcgtaaaaattcgcaatacttcgactgtacatcattcgcatgcagtccatgctttcattggttgcattgctcattgcattctttccttgaaaaataatataaaatgaaataaaatgaactcatcaaagagaaaaggacacgctttacngcgcccttaccgaactcgtactatagctagagtaatgg

SEQ ID NO: 12584 - DNA, 183 bp, Glycine max
agcttcaacctataggtgacgtgaccattccagtgttggagaagatcgacgactatgcctacaagattgactcgcctagtgagtataatgtaagcgccactttcaatgtgtctgatctatctctttatgatgcagatggaggagtcttggatttgaggacaaatccttttcaagaatgaggga

SEQ ID NO: 12585 - DNA, 638 bp, Glycine max
  unsure at all n locations
caccccgcactctnctatatccgncagaggagatcngagtantgtcgatatagcaanaaaacattanacntannnannnnaccagagtgggtttgaattcatagcantngcgacanncannanannnaaacncaagcgtcnntgagaancntgctcgagaagacagagcggagctacactctccnctctaataactaagctcacttccttgagaagcgtgcttgataagatatctagagaagctagagcacagccacacatacatctctagaagctaagcccccccaggatgcaacatgggaagcagaaacatgcactactcacggatactcggacagtgggcaaatacaaggcgcaaacgatcgataaaccaaatctaatagttaccaagataatcggtctcatacttaacacatgggcttgatagatactctaatgcgcatgagaaccctcacgccctccgttggatgtgacaacacaaatacggaggagccgatcaccccatgcccgcagcgggtatgaatgcatcanaagcgacatgacctgacgcattacatctcacgagagcatccaatgcccgaatccactgtatggaacacaagggccacaaccgacatccgtgcgaatgttatcacacc

SEQ ID NO: 12586 - DNA, 449 bp, Glycine max
  unsure at all n locations
agcttgncatatcttgntttatcctactaatcattggttagaaaaaggtgcaacagttactaaggaggataagttacaaagtgaactgatcagtcgtgatgctcattgtggaaccattgatcctaagtatgatgtaaaggatggattaatatttagaanacagtaaattgatgattcctgaaaattcagctctgagaaacaagaatttacaagaatttcatgacactataatagggggccatgcttgaagaacaaaaaccatggctagaatttgtagtcaattttattggcctaaactgcaagaagatattaagtcctatatcaaatgttgcagtatctatcaacacgctaaggtggatcaagcagtacctgcatgattgctgcagcattacccattccacaacatatctgagaggacattgctatggacttcatcactantctaccat

SEQ ID NO: 12587 - DNA, 484 bp, Glycine max
  unsure at all n locations
tactcagcttanacttgcacanaggagttgagcaggtaacanagaatcgtcttcattctcttagaggtgactntgagcgttcgtttatggaggagtccgagtcaatttctgattattgttctcgagtattggccgtagtcaatcaacttaaaagaaatggtgaagatgttgatgaggtgaaagtcatggaaaaaatacttcgaactttaaatccaagttttgacttcattgttaccaacattgaagaaaacaaggatttaaagaccatgactattgagcaactaatgggttccttacaagcatacgaagaataacaaacgagacaaattaaacaataggaggctacggagcaactactacaactcaacgtataggaagcaaactatgcaaattacaagagccaaacaggacgatgtcgctgccaatatcgtggacgtggacgaggacatggatgagaatgaagatgtggttacaacaaccactc

SEQ ID NO: 12588 - DNA, 420 bp, Glycine max
agcttgatagcacgcatatactaacgtcgtcttctgcgcccttcgtcaatcgcggccgacaagcccgttgacacgcggtgatttacgtcatcttccgcgctcacaagatctgtcatactgattcttgagtcacgctgactggcggaaatacccgagtggttatccgtataaacttgttgctatctgtaagacgaaaaacttgatagcacgcagagactaacgtcgtcttctgcgcccttcgtcaatcgcggccgacaagcccgttgacacgcggtgatttacgtcatcttccgcgctcacaagatctgtcatactgacttttgagtcacgctgacgggcagaaatacccgagtggttatacgtatcaactttttgcattctgtaagacgaatagcctgactacacgcagagactaacgtc

SEQ ID NO: 12589 - DNA, 369 bp, Glycine max
  unsure at all n locations
gttcgtcttacagtatgcanaaagttatacggataaccactcttgtattctcgcccgtcagcgagactcanaagtcagtatgaccgatcttgtgagcgcggaagataacgtaaatctccacgtgtcaacgggcttgtcggccgcgattgacgaagggcgcagaagacgacgttagactctgcgtgctatcaggcttttcgtcttacagacaacaaaatgtttatacggataaccactcgggtattgtcagccgtcagcgtgactcagaagtcagtatgacatatcttgtgagcgcggaagatgacgtatatctctgcgtgtcaacgggcttgtcggtcgcgattgacgaagggcgctgaacactacgtt

SEQ ID NO: 12590 - DNA, 417 bp, Glycine max
agcttccattgctcattttctagcatctcgatatattatgcgccttaataggacctccaagtgaaaatttatgaccatttgaattgctcaagagcttccattgttcaatttcgagcgtctcgatatattatgcacctgaatcgtacctccgagttaaaggttaagaccatctgaatatcttaagagcttccattgttcaatttcgagcgtcttgatatataatacgcctcaatcagacctccgagttaaaagttatgaccatttgaatttctagagagcttctgtgtgtcaatttcgagcgtctcgatatattatgtgcctgaatcggacatccgagtgaatagttatgaccatttgaattgctcaagagcttccgttgttcaatttcagcgtctcgatatattatgcgcctcaatc

SEQ ID NO: 12591 - DNA, 480 bp, Glycine max
  unsure at all n locations
tacagtatgcccgagtcattcatccctatgagatgttgttgaagtattgtcgatcagaattgccattccttggattatagggttgaaccaagctcatgcttttacaaaaaggttcatcangtcaagttgaaatatggaagtaaccgtcttgcaaaattggggcaaaagatgaatcaagtcacatcactgcttcgtctactgccaaacatatttaggaatattgatgtccttgttacttccagtttcaccttgacaaagatgtcatggaccatgttgaaaatctaaattgattcaaccccatatcctgcataaaaattcgcaatacttcaactgtacatcattcgcatacatccatgctnttcattggttgcattgctcattgcattnctttccttgaaaataaaatanaataaaatataatgaacttaatcattggtatcacaaagaaaaaacatgctntacggcgtcctcaccgaactt

SEQ ID NO: 12592 - DNA, 467 bp, Glycine max
  unsure at all n locations
agcttcaacattatactcacttccagggtgctggaactacttcacatggacttgatggggcctatgcaagttgaaagccttggaggaaagaggtatgcctatggtgttgtggatgatttctccagatctacctgngtcaactttatcagagaaaaatcagacacctttgaagtattcaaggagttgagtctaagacttcaaagagaaaaagactgtgtcatcaagagaatcangagtgaccatggcagagagtttgaaaacagcaggtctactgaattctgcacatctgaaggcatcactcatgagttctctgcaaccattacaccacaacagaatggcatagttgagaggaaaaacaggactttgcaagaggctgctacggtcatgcttcatgccaaagaacttncctataatctntgcgctgaagccatgaacacagcatgctacaatcacaacagagtcacact

SEQ ID NO: 12593 - DNA, 377 bp, Glycine max
  unsure at all n locations
nggagaggatgcttcaatggaggaaaagaaagagggagagaatgagagatgagggagaacgaaattgaaggaagaaaaagggagagaagttgaactntgagttgtgtctcacaagactctcattcatcaaagttacaaaaagtgttacacatgcttctatttatagactaggtatcttccttgagaagctttcttaagaaaacttccttgagaagcttctttgagaaaacttccttgagaagctagagcttagctacacacacccatctaaaaactaagctcacctccttgacaaaatacatgataatacaaaaaanagtccctactacaaagactactcanaatgccttgaaatacaaggctaaaaccctatacta

SEQ ID NO: 12594 - DNA, 447 bp, Glycine max
  unsure at all n locations
agcttgttcttgatttttcctaagttctataacaagcttagaacaataaacttggccttctcttaattgtctttgggcttggcgaccacgatcaacaaagtactttcgacacctactatatgttgacttgaccaacgctgttattggaatgctgcgacaatctctcaacaccttattcacacattctgataggttggttgtcctgtgaccatatcgtcatccagatgtatcgtaagccatgctccatttttcctttgaaatgcgatcaatccatcttgctatggctggactcagttgacgaaatatttctaagttttgatcaaacacatgcttgcaaggagtgtacgttgcatcanatttgttatcatcaaaatntgtacgtagacatcaaactcaaattaaattaatgtataaaataaaccttacccaatttcttgaacatctctt

SEQ ID NO: 12595 - DNA, 414 bp, Glycine max
  unsure at all n locations
ntaacanagtatccagtntgagtggtttggtcataatatcaaccacttgttcttgtgtcccacaatgcatcatcttgatagctccagtctttgtaagatctcgaacgaaatgaaatcggacatcaatatgtttataacgaccatgctttactggattcttcgaaagcttaatagcagagctactatcacaacaaattacagtagcctggttctgcattttacacaattttcccaacacccttttcaaccatatggcttgacaagcacacgatgctgcacctatgaactctgcctctgtagttgatagactcacaattggttgtttctttgatgaccaagagacagcagctgaacacaataagagaacataacccgaagtactttgtctatcatccaaatctcttgcataatcac

SEQ ID NO: 12596 - DNA, 193 bp, Glycine max
  unsure at all n locations
cgcttatttatcctttttnttatccacatctacacccangacaaagaattcatctcacataacatggtataatgcgtcctcacaattcactttcagatgtagctaaaattaatctctcacttttatcaaaggattcaagatttttgctccgctgatatccgacttcaatctttaacagaatttactattgatc

SEQ ID NO: 12597 - DNA, 453 bp, Glycine max
  unsure at all n locations
tcatctatctntccacacacacacattccctcaattatttccttgtatgttgtgacatcaggaagacagccactgctaatcatatgccctataagtttaaaacactcctccattctatcatgttgggcaagagccacaattataattgcataagtcttggcagtgggagaagatatagatgaaccttttgttctcatgaactcaaaaagatctacagcctctggtaccatacctgctttgcagtatgtatcaatggcagtgttgtacgcataattgtcatgcctatgacccagttcaaccatttcttccagtaatgtcatccctctagtcnggtgtctaaccctacaccacccataaacgaatatattatacgtctccgcattaggcttgactggtttactcattatcttatacagaagttcagcatcctcaaccaagcaacacttgcacagt

SEQ ID NO: 12598 - DNA, 412 bp, Glycine max
  unsure at all n locations
agctntgaatgctctattctatggagttgacaagaatatctgtagactgatcaacatatgcacagtggccaaggatgcatgggagatcctgaaaaccactcatgaaggaacctccaaagtgaagatgtccagattgcaactattggccacaaaattcgaaaatctgaagatgaaggaggaagagtgtattcatgacttccacatgaacattcttgatattgccaatgcttgcactgccttgggagaaagaatgacagatganaagctggtgagaaagatcctcagatctttgcctaagagacttgacatgatagtcactacaatagatgaggcccaagacatttgcaacatgagagtagaatgaactcattggtcccttcaaacctttgagctangactctcggataggact

SEQ ID NO: 12599 - DNA, 428 bp, Glycine max
  unsure at all n locations
tgctctnagntacattgatgtatatgggaggaggttgtatgccattcttgttntattagtagtgtcccactggtaaaactaactatccanatgttttccttcgcaaaaaatggccccaaggaagcttgcctcaaagaggtccaggaaggacaaggcagccgaaggaactagttccgctccggagtatgacagtcaccgctttaggagcgctgtacaccagcagcgcttcgaggccatcaagggatggtcgtttctccgggagcgacgcgtccagctcatggacgacgaatatactgatttccaagaggaaatatggcaccggcggtgggcatcactggttactcccatggccaagtttgatccagatatagtccttgagttttatgccaatgctttgccaacagacgagggcgtgcgtgacatgagat

SEQ ID NO: 12600 - DNA, 420 bp, Glycine max
  unsure at all n locations
agcttctacatagaactggcatgcctttaactgcacataagttatccatagtcaaatgttggtttaaagggacaccaattagtgctgctaaagcttcgtcataatactgcccaaaatattgcatctcaagtgaaagataccctctttgtcccttcttataagtatcttttcaagttgtttttgcattaattattttttaacccaaatacctttaattactttacaataaatgttatgcactaaaaagataaatgcatgatctctcttataaggattagataagaagactagtacacattaattaggcgggaaagtaattaagtgaataaagagagcttgagtcccaataattctaaggtagttntggttaaataaaacanattgttaacaaatataatgctactaactatattaactaac

SEQ ID NO: 12601 - DNA, 417 bp, Glycine max
  unsure at all n locations
acatgcttatggctatgaatctcttatttggttntagaattagaanaacatgacaattaggatttgcttgtgagagtttatgctcgaatttgggctgccccatgtttgatactttacatagaggtagtgtggaaaacaccttgcaatagtgtgtatacataggtaaatataaagagcatgaaattcctagcaaagtgtgaatgattgtcttcctaaatgaatgtatgatagtgtggaatacctttttgaatgcaaatatgtgcaggatgtaattagctttccaatatgcatataaataaatatgagtgaaacagtaaaaatttgtatggtgtacttcacatgtatgtaagtagtttgtgatagcaaatgtttangatataaattacgtgtaaaagttgacgcaacactttgagcatg

SEQ ID NO: 12602 - DNA, 467 bp, Glycine max
  unsure at all n locations
agcttcaccttctggtcctcctcatagttgttgcatgagaaaacatgctctattttcatctcccactccaagtaggcctccggatcattctttcctttaaatggaggaatgttgagtttaataccatcaattcggttttgtctaggaacaccatcattccctcttctcctcctttcttcttcattatgatctctattctccatttgatccaacctctcatggagcgcatcatctcgttgtttcattaacctctccaaatgttgcatcaaagcttgcatttggaattgcgaaagccccactccatcattaggattagtacctgacatctcanacaaacaaatcaaacgtaacaagacaattatagttgctgtttgaatacctcacccactcaagtgtatcacacaattatggctnttctctaatgaaacacttcttgcttntaccactctaattccncttgagttctt

SEQ ID NO: 12603 - DNA, 406 bp, Glycine max
  unsure at all n locations
gctctagatgagggttcactgtaatcaagcaagtcggagacctatcatgatcccagattcacctncgctccttatgttcccatgaacccgggtatagggccctttttcactcacagtgtgtgcaaatagtgttggtgtttgtgtgcatcaaatgaataaatatttaccctatgcatacattntaaaatgcactaacagcaacatagagtttatatacataagaacataatgaagggaaaccaacaaagggataagtcatggtaaaacattgcacaagattaaatggcctaactctctaaaaacaatccccagtggagtcgccaactgtcgcaacctacccttcggcgggagggcgacgcgagactcgcgggatgcgtgttccacgaaaggaatacgcgcggagtcg

SEQ ID NO: 12604 - DNA, 519 bp, Glycine max
  unsure at all n locations
gaactgtnntttgtgacggtcgtcgatacgccaaccagctcggacccgggatcctcagagtcacctgcggcatgcaacctgcactcattgttttggctaattatccattactgggccccgcctgtcttaataaaacattagttctcntccggagaaacaacacataattcggacttgtttacaccgttcattaatatacagatgcacatgcccactgtatacgagtatttttttgttccctgggccttcttatatcgtcaaacagtatactagaagaaagggtgcatctaccatattatataacgnggntatttatatcttgggatctaacggtcgatataagacgcactcacatattgcttcatccgtcccgctttttaaccaggaaacgtggcgactgttcaaaaacggtggcgactattttttccttataccaccatccagagaaatatcgtgaggagaacctcctctctcactaaactattgtcgcacaacaacctaaacgagattttggaaagg

SEQ ID NO: 12605 - DNA, 522 bp, Glycine max
  unsure at all n locations
nggtagattctttaatatcattgaagaatataatgatgtttatattagattcacatttaccaagttccatgcatacattngtaatatatatctttgtaatgttntatattttctgttggtcccttctaattattntaattgtttcttgattgtcagttgactgaacaaaaattaacacgaaaggaggaaggtatgtcagtggtttgttaaacttatatatatatatatatatatatatatatatatatatatatatatatatatatatatatatatatatatatatatatatatatatatatacatgtacttacgtgcatgtntattgttacatttagagagagatagagaactgatagaaatcatacttgtgttctcattattgatctgatgatcacaacanatgtctatatatagagcagagttcacaatgaggcctatctctgactctaacactcactatctgagtgtgtgagtcactcacagactcacagcatactatctaattaagaagagacagcn

SEQ ID NO: 12606 - DNA, 384 bp, Glycine max
  unsure at all n locations
agcttgttccattgttgtatcacagtgatagatcatgatcttttcattntgtagaacatccaacccctgatgttgatatggtttccaaaatagaatgtataaggagttttgcttcaatttttctgggtattatattattatttcccccttctggttcagttttatgtcatttaaagtttgggaaaatagtgggtatgaagcatatttatgctagagggtggtgtttggttgtgttatcttttgtatggcttctcctttatattgaacttcagactaagaagtatttgaagcatatgagtgatcttaaatntaacaattttnttcataattattatagccaagtctgcattggttttaattttttctaaactatactaatttact

SEQ ID NO: 12607 - DNA, 481 bp, Glycine max
  unsure at all n locations
tttgcaagctggaatcatttatcatacctctgatagccaatgggtgagttccgaagaanactggcctcccgtgataaanaatgagaaggaggagttgattcctacttgngtgcagaacagttggagagtctgcatcgactataggaggctgaaccaggttaccaaaaaggaccattntccactgcattcattgatcagatgcttgaacgcctggtaggtaaatctcactactgtttccttgatggttnttctggttatatgcaaatcactattgctcctgaggatcaggagaagaccgcattcacctgccccttcggcacttttgcctataagaggatgcctttcggtctgtgcaatgcccctggtaccttccagcggtgcatgatgtagtagtttagtgatattttagaaaattgcatagaggtgtttatggatgatttcactgtatatgaatnctcttttcatatttgtttggatagtc

SEQ ID NO: 12608 - DNA, 462 bp, Glycine max
  unsure at all n locations
agcttctaaactttgtacaagaatgaagctctgataccacttgttagacangtggcctcagatatcttaagaaggggggggttgaattaagatattcgaaactttttcccctaattaaaaatctatcttactttntacttaagttatgaattcccttaatgacaatcttcttaaatattaattcaaatgaagcaacttgaatatgaatataaagcaataataaataaaggagattaagggaagagaaaatgcaaactcagttttatactggttcggccacacccttgtgcctacgtccagtccccaagcaacccgcttgagagttccactaacttgtnaattccttttacaagttctaaacacacaaggactaccctatctttgtgtttagagattctttacaacaagagactcacagtctcttaatcccttanagaatgagaagaagaagaggaacaaatc

SEQ ID NO: 12609 - DNA, 497 bp, Glycine max
  unsure at all n locations
atgagaatcatganactggccaaatacaggctaaaggcccaagtggagaatgacaaagcccccgagtggagaatgatgaaggcccaagtggagaaggatgaangcccagaggcagagacactatcaagactatcaattgttgctaaagggcccaaactaattgaaggcccaagttaaataagttcttagttataatttatttttattgtaattntgacccaaactgtttagaaggcccatgtctatttttatctttttgttcagctacactataagtattggtttttgttntgaataagaaaacttttggcatttgataaagttgggtgagagtttctctctgggttccttgttgaaccaattatcagacttatcaaggtaatccttgtggtgtctacccagacttatcttccttcaccggaagtggcgtctaccctgacttatcttccttcaccggaagtggtgtctaccctgacttatcttccttcaccggaagt

SEQ ID NO: 12610 - DNA, 414 bp, Glycine max
  unsure at all n locations
agctntagagcttgtatatagtttatctttttacatgcctaactctctgaatggcatttatattaatggttgcatcttagtctctatcttttcatatgtacatcatgcatcatcatgtagaggtaggaagattgttcactgcataaaactctatgttttaatcaattataaggctgattgtaatcgattacacaagtgtttgtagctcgcaaagagattttagttgctgtttaatcaaataccagttaaccataattgattacatagttcagttgagaccatgtctggtttttcatcagtctctactctaatcgattaccaggggatcattatcgattacttcattcttgaaagtggtccagaagtgtcaataacacttaaccgactacatcaagaattaatcattacattgtc

SEQ ID NO: 12611 - DNA, 437 bp, Glycine max
  unsure at all n locations
gagatgaannaaattatactagatcaaatganattgattattttttataataaacatcaacacatatatctcaagaaagatatattatataacatcttatcagacacaatctctataacttggaagagaattccataaacccatagaaccatcacatatagacctctaanaaaaacaaaaatcaagactaaaaaatttcaagatagatgtanaactaatttttattntcatatgactatttgatacatgtaaattaaaatgtcattatatattaataatcaagacagtaatttaattacaataattagtacattntatggaaataaatattcaaaatgaanacaatatatntacaagtgttcaaatcgattggaatattntttcttttctaccgcctaatcntaattccgaatatttaattgatttgaatatttata

SEQ ID NO: 12612 - DNA, 381 bp, Glycine max
  unsure at all n locations
tgctgcagcttgtagtttattttctttggcanaaggatcgaagtgggtcagaaaagaggcaaatatgatcatcctgctttgacaaataaaaagcctatggcaaatagagaggatgataaggaggaaggaacccatgttgtgactgtcgtttctacatgtccaaatttcctagcaactcaacagtgtcattactcaaccaatatcagcctttctcattacccaccactcagtcatgcacaaaggtcattcctaaatcagcccaaagcttgcctttcgtgcactcaatgccaaacaccacccttaacacaaaccaaaacaccaaccatggagggaggtttccagtggaaaagtgatgcaatcctaccccgcaagggcattggc

SEQ ID NO: 12613 - DNA, 376 bp, Glycine max
  unsure at all n locations
gcgcgagaggagacaacatccttgctggacgggctggctgctcgctgagtgcacaaacctttgatntagtctcttctanggttntgcatccgctaagcgagttggctgcctcactaatgtgaatgtataaatacatgattctgatgatgtcaaagaagaatcaaacaaggtggttgcttcaaaggataagcattgcttcaagattaatacaaggttgcttcaacaaacaaagccttgcttcaagattaactcaagatcaagccttgcctcanaacaaagtgtttccaagacatccaaggctctggtaatcaattactangcagcgtaatcgattaccagaagagaattttgaaaaatagctggtaaaaagggtttt

SEQ ID NO: 12614 - DNA, 562 bp, Glycine max
  unsure at all n locations
ngcccatgtttttttgatgactttcgttctatacggccagcgagagctagctcggcgcgggtcgattctatagagtctacctgcatgcatgcattgcatctatgagtgtatcttctatatgtatcacatagaagttggtgccgatctctattagtgatgacattagagctcattcgtgagaaacactctctgatttcggacatgatgatctatcgactttaagaatgagatacagatgctcactttgtatcaggaacattttcttgctcgagacgtcttatgatgtcttaaagcatgactcaagattcatgggccttgcttacatgattctagatgaagattcatgactcatgatactagagtgcagagaagactcaatcaagatattgctgattaggtcctactttatatagcgtgacacatggatgcttctctactcatcgttgatgacgagtcattactctctggaatcgacactagatagtctaatcgtgtgcagtagctattgctcttactatgtntcgactgaactacaccgtccaattgatttangaagctcttn

SEQ ID NO: 12615 - DNA, 467 bp, Glycine max
  unsure at all n locations
acgcgacactatgaaactcagcttctcaggaggtgagcttagttattagaggggtgtgtgtagcttagctctagcttctcaaggaagttntgctcanagaagtttctcaaggaagttttctcaagaaagcttctcaaggaagctacctagtctataaatagaagcatgtgtaacacttgttgtaactttgatgaatgagagtcttgtgagacacaactcanagttcaacttctctccctttntcttccttcaatttcgtgctcccccctctctctttctctccctctttcttttcctccattgaagcatcctctccaagcttcttatccaaggctcatcttggtggtgaagctccttcttccatggcttattccttaatggatggcgcctcctctcacctctnttcctttgtcttctgctgcatctccatggtggaaaatcaccattaaaggatcccattgaagctc

SEQ ID NO: 12616 - DNA, 458 bp, Glycine max
  unsure at all n locations
agctntacaaagcatttatgaagctccaccgcatgagtgataagacctttaatcaagttgaaatcaaacctgagatgatttcacgtcatttacttttctatttcacaagaccactaaagtcttgcctccacattgacaaggtcttgcttnctacgctgtcaaagatttcacgctcaccatgatggcctattcatactaccacaagtaacagagcattgcatanacaaaggcaaacacataagacatacatactgtgcanaatntgtcaatgaaggaaaagcatgtgcattaaagagaaataataattgccaccattacaaggcctatgcagccaacatccaacaatgtagaaaagaaggaaataaagagagtgaagcctaaacttaagcgtcatttgccttgctctcggcaccctgcttctcatctgtaagcctactcttcacaacaacttcttcttt

SEQ ID NO: 12617 - DNA, 408 bp, Glycine max
  unsure at all n locations
tcttgacttcaagtttcatagattngctnttaactntgtgtggttattccatctaacgacactcaccaatattctagagtagatcaatatatacacacacatacataactactgatatttagtttcttctttgacacaatcttaacgtgaataatactgcaggaggtacaatgctagagatagtcaaaagttgcatacgtaccaaattcactagtcaatttgtggatctagttgctataagtaccctctactccatgggcaagattattaaatgtcaaatgtgtctttgttcttttatctttattctaagttgcgaaaattcattgcatgaggctcccacctacttngggttggngaagatggatgtacacaaccttaccctanataaataggcccaattcttttaat

SEQ ID NO: 12618 - DNA, 398 bp, Glycine max
agcttataatatatttatacgctcgaaattaaacatcggaaactctcggaaaattcaaatagtcataactattcacacggatgtccgattcaggcttataatatatcgatacgctcgaaattaaacatcggaaactctcgcgaaattcaaatggtcataacttttcacacggatatccgattcgggcacataatatgtcgagaagctcgatattgaacaacgaaagttctttagaaattcaaatggtcttaacttttcacacggatgtccgattcaggagaatcacatatcgagacgctcaaattgagcaacagaagctcttgagaaattcaaatggtcataacttttcacacggatgttagattaaggagcatcacatattgatacgctcgaaaatg

SEQ ID NO: 12619 - DNA, 419 bp, Glycine max
  unsure at all n locations
tctacttatgtggcagggcgggcttccttcactttcttgtctccaacgctagctctgaccactgtccttccttcccgttatgcttcttttcatgtccgcctgagtgggcttatagcctanaccatacttcccacgatttccttgggtttttatcaggctagttatgccgccattgtctttgcctaaacccatcccgggttcataaccgttccccaacataactcgggccatcattaccgccgcatcggacagacaaggttgcccaaagagggagtccacggaggaaatgctgaccacctcanaagactggaaagcggtttctaacgattcttctgcggcttccacataaggcatggaggatgggcagcttaccaagatatcttnctcgcctgacacgatgaccaagtgcccctccacta

SEQ ID NO: 12620 - DNA, 753 bp, Glycine max
  unsure at all n locations
actcaaagtatgtccactcancatngtcggggtgtantcagcancacntgagtcacnanantactattngtgttctagacgcannnnncntcnnnnnaagagagancggatggattgttgacgatctnttagaagagacccgccacgaataangaaataaatccattaactaacataatagagttaatagtnatattaagaatatgatttgttatttgnnaaatattagggagatagaagattagagcgagagatgaagacttagagaagtaatagtgaatagagtgataaagctaatgttctaatgagtgtatgcacaacgaggtatgatacaggtatagtgagaagaactaatgaatgtgcgtggtgtatcagaatagtggaagcatagtaagtacatgtgtcgatggaatattatatagatggaatataggaagtagcggagtgggaggatggacgagatgatagaagtacgagtaatatgttagaggtggacagtggttgtgacacatagcagatagagtactgtggattgagaatgatatagcgactatatgaggcgatatataatctgagagttatgagtatatagatatgaanagactgaacatgatgaagagaaatgagagataggaggacggctgagagtcaagcgtagtatctgagtatagaagacgaggtgcagggcgtaatatggtgcgtagaatcaactgtcgatgatagagtatattgtcgggagatgataatgcgtag

SEQ ID NO: 12621 - DNA, 401 bp, Glycine max
  unsure at all n locations
tctcccccaattntctataaataggtggagaagtgaagtagaanagggttcagcctcttatgcacttctctctctttcgaatatgcttaagaaaattgtttccgtgaagaagatccaagtcgaggcgcttccgtaacgtttccataacgtttccgtgagtgatttcgcgaaggttttcgaccgttcttcgacgttcttcattcgttcttcagtcttcaacgggtaagtacctcaaaccaagcttttcaattcattctatgtatccgtggtggtccacacttggtttcatgtattcctattctcgtttcattcactttntatacccccttttgacgtgcttaagccattttatttaagtcatctctcgcttaacctaataataatatagatgtccaccgatc

SEQ ID NO: 12622 - DNA, 396 bp, Glycine max
  unsure at all n locations
agcttgtgaagtatgttttttggatgagtcgtcttcaatcactgataatagtgaagttgacgctgaacagagggacaatctatgtatagagtgatgatgatgaggggaaaagattangatgccttttctcatgtttttatgtcgtgttttttgcttggaactggattgtcttcatttattgctatagagaccagtagaagagatacgcacataggttttgtgaaatgtgtttatgtctctcctactagaccatgccataatggagaggaagttaactctctttggtcgaatgtgtttcaacacacattttgggaagagataacacgagtaataggttgggtctcacagataaagtatttagcttatcctaatgagatgaattgagctatgtactcc

SEQ ID NO: 12623 - DNA, 393 bp, Glycine max
  unsure at all n locations
cttaaactactcaatatatntattaaaggtaaagaaaanagatattgaatggcatacacatgttcttgtgaagtaaccactaggcactaaccaacatagatgcaaacaacatcaccactgatatacatatatttctcgctttcttaatatatagtagctagccaacaattgtcaaattatgcaatcaagataaatggattcttgaatcacggaagtgcttgtgcttacacctatcaactccttgtatctcacgagcctctggtaaataaaggtgataaccacctgtanaacacataatctaaaccaatcaaagactttggattgaagcatatatgagcaaacattcagaatgtctgaacaatgacatacaacataaataatattgatatgcat

SEQ ID NO: 12624 - DNA, 450 bp, Glycine max
  unsure at all n locations
agcttcttacaagcctgtataatgataaacactgcatgaatcattnttgtttaacaccgcataaagtttattacatctatataaaanaagtaaggcctacagagtcatacaacgagatttaattttatttggagcttaagagcccataaagtctcagctaggctttctaaaacctagatggaatgatacattgatactagctgtcaaattgtctaatattaacctgttgctcanaaagtgaagcaactaatctggtagcaaatatgtttttttaaagttcttcacattgctgcagcattgtcaactgagacagacatgatttgcatattaaacttcanacaggcaacactaaccagaagcatgcatagcctcatacatatgtataaagtataatctaatcttgtcaaatctttcagcagcatatctaaaaattcaacaagatatatgaac

SEQ ID NO: 12625 - DNA, 353 bp, Glycine max
  unsure at all n locations
tgtggcgactgttaaggatagcaatatatttgatacacttccatttagcatactggtttctcattgagtgttgcatccccaccaacaaagatttccttactatcatcgttcgaggtatgtatgtgattctcacacttatgtgcttaagtattataggcaatggttgacatgttactgttctttagtagtacattgtaattcattgagtgagccatagttccccgtttgagattgaatacaacgattaatacagacagtntggatcaattggtgtattcaatcttgaattgtccgtttggacagtttgggaagacaaattgtttttacttcattntgacttataagttaagtat

SEQ ID NO: 12626 - DNA, 470 bp, Glycine max
  unsure at all n locations
agcttgtgcaagggcatgatgtattgaagaanattgaagaagtgggtgatgaagaaggacttccaagtgtaactgttaaaataattaattgtggtgaacataatgagggtgagaattcctcagccctttatggagaatactaagttctacccttaatatgaaatatgattatatgaataattaggagtgtaagcaggtgcgggtcacctgcgaacctgaattgatccaaaccaacccaaatagtttgggttgggtaattnttttgtttgggtcanacccaaactggaccaatcaaacctgttgagttntgggttgggtcacgggttttaatacttgaaaatgctgactcgctgacttggcccattgacccattaatttgtattanattattattattattattaatatatgtaatatataatatatanttttaaattttaagaaatcaaatactatngactattgattac

SEQ ID NO: 12627 - DNA, 347 bp, Glycine max
ttcgtcttcttgtttagtccagtcttcttctggctttctttcatcagtgggctttccttctgtgtgcagcatcttgggatgtacccagcctttgatgacagctttccaggttctgctatccagggatttgaggaacggcaccattcttgctttccagtattcatagttggttccatccaaaattggaggtctgttcactggtcctccttctttctccatcgtcatcagaatgcatctccctagatctcactctgtgatttcgagtgttggctctgataccaattgaaattctgataccaggggacagatgtcgtaccggatgtcacgacatcacgcttcagaacatg

SEQ ID NO: 12628 - DNA, 401 bp, Glycine max
  unsure at all n locations
agctntgagcaaatcgaaatgacaataactttatacacggatgtccggttgagtcccgtaagatatcgagacgctcaaaatttagatccgaagctctgagaaaattgaattgacaataactttatacacggatgtccggttgagtcctgtaatatatcgagacgctgcaaaatgaaaacggaagctcgtaggaaattcaaacgacaataactttttacttggatgtccgactgaatcgggtaatatatcgagacgctcaaaattgagactagaagctctgagcaaattgaaatgacaataactntatacacggatgtccggatgagtcccgtaatatatcgagacgctcaaaatntagatccgacgctctgagagaattgaatcgcaataactntatacac

SEQ ID NO: 12629 - DNA, 482 bp, Glycine max
  unsure at all n locations
tttcgaccatctcgatatattaccagactcatccggacttccgtatataaacttattgtcaattaaattgtctcagagctttggatcaaaattntgagcgtctcgatatattacgggattcattcagacatccgagtaaaaaattattgtcgttagaatttgatacgagcttccgttttcaatttggagcatctctcgctaaattgcgataggctatcgggcatccgaganaaaagttattgtcgtttcatatttctaagagtttccgttttcaatttggagtgtctcaatatattacgggactcaaccggacatccgtgtataaagttattgtcatttcaatttgctcagagcttctagtctcaattntgagcgtctcaatatattatcccgattcaatcggacatgcgagtaanaagttattgtcgtttgaatttcctacgagcttccgttntcaatttggagcgtctcgatatattaca

SEQ ID NO: 12630 - DNA, 404 bp, Glycine max
  unsure at all n locations
agcttggaaggtattcataccacacaaaatatatatatgtatgtttaggtagaaagataccttagatatgcatgtatgtaaacaaaaacacacttcacaaaatatatatatatgtatgtttaggtagcaagataccttagatatgcatgtatgtagcaaaaagatacctcacaaaatatatatatatatgtatggtagcaagataccttggatatgcatgtatgtagcaaaaagatacctcacaaaatatatatatgtatgtttaggtagcaagataccttggatatgcatgtatatagcaaaaatacctcacaaaaatatacacatgtttaggtagcanaatacctcatgaaaaaaaaaaaaaaccaacaagattaagaaataaacaaatgataatgataaaa

SEQ ID NO: 12631 - DNA, 395 bp, Glycine max
  unsure at all n locations
tatcatttcagcaaatattgtgaataatgttctagtagagtatttgtctgctattnttgtcactaattagctaagctctgtatgactaaatccaaaccaagtgacttgcatccatattgtcctaaggtagataggacatttcataggttgagtagaaataatacgagtgttatagctctgctagaaagtgtaatgcatagtcatttcatctctgattgtgtttgtgagcctagttatagttntagtgcttctgagtcagaaattagtgctgatacaattgcagataacaaccaaactcttaatgaattggctacgcttaatgttgtgtattaaccatggngtattcaatatcttgaggcagaggttagttatgagctaaagtctagactaatcca

SEQ ID NO: 12632 - DNA, 440 bp, Glycine max
  unsure at all n locations
agcttggaatatattatntgaattctagtcccccttatagactctgtgaagatgtttgctagttggtcattagaactatcaaattntgtaatgagttctttggaaaaaaccttttcctgaatgaaatgacaagtaaatttaatatgcatagttcatccatgaaacatcatattggtggctatatgaagagctttgcttgattgtcacaacataatttcacctattggatgtctctaaacttcaattcttgaaggagatatttaatccaaacgtgtgcacaagtagctgtacacatatccttatactctacttctgcacggtgcagtaacattttgctttttactcttncaagagacaatattccctccaataggtacacaataccccanaatacagcatttgtcaataggcgagcttgcccaacctatatcacaatatcc

SEQ ID NO: 12633 - DNA, 325 bp, Glycine max
taagacagccagtaaccaatagaaaagatcaagcctgtcctggttaatgtcgttgttgtgaagccagccagcagctgaagaagaagaagttgaagtgatcttattgaccaaagaaaccaaaagtgtgctcaagtaaaagccaaatgagtaagagcaatatgtgatggctgtaaagaatgcttgcatccctttcaaggactgtttataaaagaactcaaggaggccaatggctgtgaacatctctgacaagccaaatatcaagtattgtggggttatccaaaagatggacaaaactttgtgatggttcacagctgcgtcccttctc

SEQ ID NO: 12634 - DNA, 397 bp, Glycine max
  unsure at all n locations
agcttggcctcatactttcttataatangctgccatacagtccagcttttagcacttacccctactggaattccaagataagagaaaggaaatttcagttgactaccattgagaaattgagttgcatccctgcaccaaccctctgatttgcccaggcagccaaaatggcttntagaataatttatcttaagaccaaaaaccttctcaaaacaccttaggatacactttaagactctaacattatcctgagtggcacaaataactaaagcacagtgaatttgggtaattctctgttgcccttgtggcttgttgggcatggtctatangtttagtatttacctacctacaagaccttgatagaaaaactttntagaacattgaaaacttagtcagatga

SEQ ID NO: 12635 - DNA, 243 bp, Glycine max
tcctatgaatgtagataagcattttgtctctactctctaaccattactgtcactacattctgggggttcttaatcttgatcgactactctatgtgacaccaatactgaacttgtgaaatcactgaatcttttggactgactcacttattcttttgctaattcatcataagtctcttccaaaagtgaaagatttagtaaggggtaacaattatatactcacgtaattattatgcaatataatat

SEQ ID NO: 12636 - DNA, 466 bp, Glycine max
  unsure at all n locations
tgaagatattctcattgaacggcaagagagtctggtgtgggggaagtatctgctgctcatactatacacgactgaattgaaagggtgataactgtgccagtgtatccgaggacataataanatgatcagacaccgtgctatccaacacaagagatgtatatgacaaacgtaccgcatatactccagcgctgaacacttgcccacgacaagtgacacacactgataatgagtgggtgcatccttcatattatccattatcattaactcttggttgcaccagtctaacatgatgcactactggacacgatacacagctcaaactcaatacatacctcactcatctgcggtacgaagagacacctccctttcacaccaccatctaggccgttctaaacaatcaaccgcaccgcacgatccgatcactccagacacctctacgacaacggagctcttaccacatcgctcg

SEQ ID NO: 12637 - DNA, 429 bp, Glycine max
  unsure at all n locations
tattctgtgtaattgcttaattttcagaagttaattaataattaataatattntctcattagatcaacaatccaatttcacaactcattgtagaaaaataaggcctcgatattggcanatgtaggcccaaatttcagctgttatggacctagcctgttcatcagacttataacttgcatatctttatgcaatcatttttgcttgatgcaccccagattctgtaaagtctccatcttatcgaatcttcttgccacagccaataatccttgtccttgcacctctgcctaccanagtttgtgaataatgacaacatatcactaatgtttattaatatctaattgttgctaacataaatattggctaaatataatagaatctcttctcttaatcatactcttttatctataagatcanatatgacatcttact

SEQ ID NO: 12638 - DNA, 470 bp, Glycine max
  unsure at all n locations
agctntaaggaagggtaaaatggtcatttcatgaaggtttctaaccataaanttgcccagactagcatttggctcgcttgagctaaaaagaaaacttcagccataagcaaaccactcgcctgggcaagctgattccttcagacctaagtaaacaagctcgcctgggtgagttccccctgcactagatggctttttctataaatagccatgtaggagaagagaaaaaatatataccagcaacatgaaagtatagaaaaacatagaagaagaagaagaagaagaagaagaagaggataaatagagtcgaggcgctgcagagatgtgactgtggatcactctcttcgttatttctcctgggagtcttgtgttatgcacaatggtcgattatttnttctaaaggataggatgtaatctttgtacccttacgtatctcttttgatattatatatggacttaatctttctactcat

SEQ ID NO: 12639 - DNA, 453 bp, Glycine max
  unsure at all n locations
ctaagcttattagttgtgcatttaatattattgtctcttatggaagaacggtatgcatttcttgcattgcatacttgcttgattgttgtataactattgacattgtgttccttcaacgttagcagaatatttcttggtttcaccattgactttgtcatatcagcaataataattnttttatccttagtcaattgaccagcgtataaatgtccaactaatgacttggccaattcatgattgtgactctcacacattcacttcaccatccatccttcgcctccaaccactggtttcccacatagcttatagggacacccatattttctactatcagtaactgttcttacaaaatctttcttcctggtcctatactgactactcctttcacaaccaattaagacatatggcactccttctctcataccaggtattgtggttgacctcataatcact

SEQ ID NO: 12640 - DNA, 460 bp, Glycine max
  unsure at all n locations
agcttgtatgattatggtgtacccatcacatgtggtactaggtggtggtcgggcgatggtgcacaacatgttttccacatccacaatgcgcgcataaacccaccatcccctgttgcccacctccaactgagctcacgtactcccacgtagcccatatcctcgtttctctcaataccgggtccccatcaatcctcccattcttccacaacatccaagcaaaacaacattcanacagcacaagctatcacagccaagcaaaacagagcaaaggcagaaaactctgccaaaacaccaaccanatcacnagctttctcacttaaagaccncagtaacaattccttcgttcggttcattaaccgttggatcaactcgaaaatttactggaagtcttagtacataagcccacattntgaaccgtgggatctactagcaaacatccagaactcactctacattactc

SEQ ID NO: 12641 - DNA, 426 bp, Glycine max
  unsure at all n locations
tctacttatgtggcagggcgggcttccttcactttcttgtctccaatgcgagctctgaccactgttcttccttcccgcgatgctccttttcatgtccgcctgagtgggcttatagcctataccatacttcccacgatttccttgggttattatcaggctagttatgccgccattgtctttgcctagacccatcccgggttcataaccgttccccaacataactcgggccatcattaccgccgcatcggacagacaaggttgcccaaagagggagtccacggaggaaatgctgaccacctcanaagactgganagcggtttctaacgattcttccgcggcttcacgtaaggcatggaggatgggtagcttaccaagatatcttcctcgcctgacacgatgaccaagtgcccctccactacgaatttc

SEQ ID NO: 12642 - DNA, 401 bp, Glycine max
  unsure at all n locations
agcttctgacagtatgtcaaagaaggaaattcttcagattgtcggcgagtagtgaaggcaatttaaatctgacttgaccaggaaataggcacttgcagtcgacaaggacggtgtggatgacactgtctgtgagaaatacagcattagcaaggagaaatgggcccaattntgtcagaaccgcaaagacccctcgtaggaggtatgtactttgtcattntagttgttttctacacaaaaataacttcttataattcattntagtaatcattntctttattgttcgattnttgtaggatgtgcggaanaaggcacaggccatccagaagcaaaacactgccccccacgtgttgtctcgtgggggttatgaatatttagaacaaaagctaatggctgagaagata

SEQ ID NO: 12643 - DNA, 453 bp, Glycine max
  unsure at all n locations
ntgagaggacaagttctgaaccttggagctataannatttgtgatatacttttatgcttctcaacaatagaattttatgctagtgtattaaccatatactagcaaaaattgaaaacttgtagttgcagttttaagcctatgacatgatttttctaatgtagtctnttgtttgaacagtttgagttgaatctattattaagggatttgggctacgtatacnagtatttatatcaaatattttagttgaaatgcaaggganaaaggccaattttcagcatttgtagttcatagaagaaatttgtgtttaaactctacagatggttcattgatatccaaatcatgtattgagttctcatggcttattcaagtgttaaaataattntatggcttctttctttaatggatgttctagagtatctggtcaagtttaattgttcatttctgatcactgat

SEQ ID NO: 12644 - DNA, 314 bp, Glycine max
  unsure at all n locations
agcttctntgagagttctttcttgagaagctagagcttagctacgcacacccctctcataactaagctcacctcctagagaagattccttaagaagctagagcttagctacacatacctctctaatagctaagctcaactccttgagatgagaagctagagcttagctacacaccccctataatagctaagctcaccctcatgaagaaatacatgaaaaaacataaatgtccctactactaagactactcaaaatgcctcgaaatacaaggcctaaacgaaggataaacctattctaatatttacaaagataag

SEQ ID NO: 12645 - DNA, 393 bp, Glycine max
attgtgtatttaagagtctggagtcaatctagacactcaatcctatgccataattcataatatgtaagatcgatatgatgatagtcattggcacaaatattgacttctgtgactgctaactagcttgcaatggacgatattcgttatatagtaatgaactctccattcagtaacacaaatttgtgtaattagttcgctcaaatctattatcttgtgtgtgcaactataaatcttataattctatttgacatccttacatttggcattatgtaacaaaagatgcaagaaaaagttactaaacgttatatagagatggcattggatgttatatatagcttgtctgcacacgccaaatcttatttgattactctgtccgagatacaggtgtatata

SEQ ID NO: 12646 - DNA, 318 bp, Glycine max
  unsure at all n locations
agcttggatttactttgttgattatctttaagtcctttcaaagcactggtgaatacaaacatagatacttattgtacaattaanattttgatgtacctacgtaatgctaatgcaaattgtttgaaaaacaacactaacatgttaattatgcctttgaggtaattgtctaacctattatgcaacgaacaaaaccaaatgacaacattttccttaagcaaaatggcgaccatatttctatgtgcactgcattggagaccaacataggttattatactattatacattaattaaattcattttgtcagcttaacttaccca

SEQ ID NO: 12647 - DNA, 344 bp, Glycine max
  unsure at all n locations
ggctntagataatacattattattgatctaaagtatatccgggcatgtattactattatttatactgttaaanaaagtacaactcatactcgtggtgtgaataacagaggctcctcctacaaacactttgttagtggaccccactatctggaaacttaaagaaaggttgaagattgcacgacacttcactttcttataatctgttaaagctgtctgctnttccacatcatccacacacaacacaaccaacatcaacatgctttagattttgaattccaaatttgaatgtatagtgtaggcgcccacatacaaacggccacatacataaaacaaagtaaaatata

SEQ ID NO: 12648 - DNA, 463 bp, Glycine max
  unsure at all n locations
gcctcattctgtttatctattaaaggtcttgaacgaagctcatgtagcatcgaacatctacgtacaaagctangtgcgcgactcgtcaataacgatcacccgtcaactgactatcatngcctntagcagaagaagacatgctcgacgaagggagagggcataacagggcttaccatgtgccagccacacgcatggaccacgtcgtggccaatgtatctctcgctcacggcaccaagtaaaacgtgatgcaccaaagcacgttggagacagatccgtttaacgctccccaacaaacgccaacgaccatggtggacacggcactccacggaacgccgctagaggtgatgagacagaatgcctncctgtgcaaacaggcaccctactcgacaggatacgtccaagaatggatgtcacccagatacactgccatcggacccgcggcactccccgtcgcgactacccc

SEQ ID NO: 12649 - DNA, 249 bp, Glycine max
  unsure at all n locations
ctcttgaggatcaatcctcatcctcgtgaatttgaaataggtangcaatgtctcaccctcctctaaaactattggagtctctaagaacgtattcatgctatcaacatcaatcttgattaaatgtcctcttaccctcacttgcttaaggctctggtcttccgggctatataagttagcataaaactccttcaccatagctacatctatgcttccatcttggagattggcgagacgtttgtgtaagttatt

SEQ ID NO: 12650 - DNA, 455 bp, Glycine max
ttatactatgttcttcgattattacactgtatttcgcattaatgccatctataactactcactgcgcacgtgacatatatataataaacaaaacatcacgttgtgcaaaatcaatatacatctaagacattcgattttgctagccaaacacaagcgcatatatgattcatcagtgtgcatctcatttaacaagtatttgaatatgtcaccactatattcgatatctgctaccataattaactatgaaatgccacatataacataatccaatcactataaacaaatgcctgtctataataccccgtatttactatcccataagatcaacatacgaaacactctaatatatctgcggctcccacattattggcgcactgtgaccctcattcacacaacacgtacgttcttacttcttctcctacaaacaccaccactatcacgctaacacgactccg

SEQ ID NO: 12651 - DNA, 212 bp, Glycine max
attacatgcatctttagagtcgatgttcctattctatcttgttgaacaagacaccagtgtgtactgtcttgtcaaagcttgtcaagctgtctctctcctatttcgatatatatatgtcatttgaatgacatataagctctgcaagtgagtgaaaagtttctcctctcacatattcaaatgcttaagtctttttacatgcactatccattata

SEQ ID NO: 12652 - DNA, 193 bp, Glycine max
  unsure at all n locations
agcttagcccatctgctatctattgaattcataacatagcattntttccccttaaaatgcacagatttcatcattaaatccaatggaaatgttctagagatagcgttaaccataaaataagatttattttcaaaaatcactacaaaataaccattaaatggggaactatacaagctttggaaaatgatttatg

SEQ ID NO: 12653 - DNA, 371 bp, Glycine max
  unsure at all n locations
tctatagaaggttcgttcctaatttctctacaatggcatcacctctcattgagctagtgaagaagaatgtggcatttacctgcggtgaaaaacaagagcaagcatctgctttgctcanagaaaagcttactaaggcacctgttctagctcttcctgacttttctaaaacttttgagctagaatgtgatgcctctggagtgggagttggagctgttttgttgcaaggtgggcaccctattgcttattttagtgaacaacttcatggtgccacccttaactaccccacctatgataaagagctctatgccttaataagagcactccgaactcgcgaacattaccttgtttccaaggaattagccattcatagt

SEQ ID NO: 12654 - DNA, 572 bp, Glycine max
  unsure at all n locations
ccaacgcgctccntcnctaccgcaagcccngactaccaacgcatgtgttgaaattnnntaccttaggaacgtgctgtctacctactataacgccattccactcgtcccgagacctctcagtcgactgcagcatgcagcttgtttactttttttttttcataggcatacacttggggagcctttctttcttctttaacactgcttactaccgatgtaaggaacttcttcgaaagatgatccacccgtgatcacgtcatcagaaaatgtaccttccagaatcagcatcgacgaatcccttgcttcattgcggaaatagatctcttaatcgcttaggagtattcttctctcttaccttaatgcaaaagcgcatcataactcaacaacggaagaattaattctagacttgaaagagaaatgactacacaccacgcttgcatcgcaaacgatgaactaaacgacattatcaccttaccttccactgtaataagccacccaccttaccagctgtgaaccgtaatatatgtgtgcaactgaaccaacaatgactactgggtaagaacacacgcatatcc

SEQ ID NO: 12655 - DNA, 653 bp, Glycine max
  unsure at all n locations
cctacctcactantaccattactcacaccccctcnntggccnatcnctcatcgaattcttgntcanctatcgaattctacacnananaanngaaacnnnnnnaagagagcancttgatttcgatggcattcgcatatangcgacactatacaatactcatactcgacacaacaaggtctaacatactcattctcacactaagctgtgtttattggtttagaattcgtcttgtgcatcgttatatgcagacactctattatgtaggcagcataatgcttggccttaactcacactctctcttattgctatatctgtagaactacactctgggatccctgatcattaaatncttatctatgagcctatggcccatcatcgtacagatgctacatccttcttggccctctattattcgtatataacatagttgcgggtgtatcaattttctaggtttattagaacgttatatcgctagctctcttcgataatagaaagataatatgattctctggagctgcctctctgatgcgtaagatccatactcaatgtcgcacactataaaggatgttctggacgttataacccatcgtctcgaagatattaattaacactcaattgcgatctctccacctcgttgctcatgctatcatccg

SEQ ID NO: 12656 - DNA, 437 bp, Glycine max
agcttaagaattattttctatcaactacttgtttccgagggaaattctataaataaacctcccatctttaatggagtgggtaccactactggaaaacccgcatgcaaatctttatagaggcaatagatttaaatatttgggaagccatagaacaaggaccttatgttccctctataatggccggaagtgcaacaatatgaaaacctatagcagattggactgaggaagaaagaagattagtacaatataatttacaggccaataatattattacatctgccctatgaatagatgaatactttagggtttctaattgtaaaagtgctaaagatatgtgggatacactacaagtaacacatgaatgcacaacagatgttaacagatctatgataaacactctaactcgcgaatatgaactctttacgatgaaataaatg

SEQ ID NO: 12657 - DNA, 385 bp, Glycine max
  unsure at all n locations
acttctttactctcctcgcgaattgtagcctctttcccattcactctttatagctntgagagccaagttatcccttgcgttctatactacaaccatttgtgatagctgccaatgacgccattgctacttcccctaagctccttatcttttctttacactctatttcatgctctctggattctctaaagtatcttcacattagctctattgaaacctcgcacaatgaaaggcgcaatgatttcctccgacggtgcacctctcattgagtaacctaactgtcttatggccagcacatgtatataattaatacaagccctcatgcctatcaaagggatattggggaatccttacatgagcataacactactgtcttctcttctttcac

SEQ ID NO: 12658 - DNA, 308 bp, Glycine max
agctatgtaagtatattatttctaatgcatttgaaaggaattatataaagatttaaccaatataattaatattctaatgttaatacaatattttattttagataaacaaaaataatgtatgatattaacattcgaaagcatacacaatattcagaccaaaatacaatcaacttattaaaggagaatttcatggatgattcaatctaataaactatgtgaactaaaaattattaatgtgttctgtatgtaataattaatctatatataatataattaaattatatgatatgggttgagttgagtctagt

SEQ ID NO: 12659 - DNA, 367 bp, Glycine max
atcacccccattctcaattatagagctgcaattgaagtcttagttctagagtcacacgctggaaagtgagaaattgaatccattccacaaggcatataccagttgtctgctgttatttctccggaggaaaaagagaacattgtaatcttataacatacttatagcgcttggtacttacggatgttaattaagactgaatgatcatttcatgatacatacaatacctaccacgatattaataatgatacagctcttcaatttcatagataacataaactcattgaaacaaaatatacgatacataactgactatacaacaatatgactacccttctgccgatattggcacaccttcttactttgtctt

SEQ ID NO: 12660 - DNA, 158 bp, Glycine max
acaggaagatgacatgccttgccaaagacaacccgatatggtgacatccctatgggtgccttatgggcagtcctatgcgcgcatagagcatcatctagcctggcgctccaatcctttctgttaggctacactatcttctgcaggacccttttatctcc

SEQ ID NO: 12661 - DNA, 299 bp, Glycine max
tgaccaatcccgacccaacccgtgcatagtcagtcagtgagaacctgtgatgtacctaaacaggcgagctcctggcagtcaacagataaaaggaacaaagaccacaaagcaaggaggcttgtgtggtggctggccagctgtgaactttgtgtgatatattgattatggcctctggtaatcgattaccaagggtgggtaatcgattacaaggcttaaaaatgaagacaggaggctaagatggtctctggtaatcgattaccaagaggtgtaatcgattaccaggcttgaaaacgagatca

SEQ ID NO: 12662 - DNA, 434 bp, Glycine max
  unsure at all n locations
ngctctataaattctttctcacttgatacactccatggatgaacagcagggacttttgccgaataaagagtggtggaatttgcaggaggattatgcttgtagatcattgtatcaagaacggggtcaaaattctgaggagaatctatggagacacagaacataggaattgcaaccttctgatggatttctacgtcgcccacaaggttaacaagctcaacaaaatcactgataaggcgctgaggaacatagaacacctcagaactgcatattatgagggttttatcggtgtcgcttgtttctttgtaactgactcgaaagtgcgctggcatcgtgctaacaaccttctgtaccattcttgcttgttgtgaaacccatctgagtcctcaccatttgtaatatagaagaccgagactcngatacctgaatcccagtaa

SEQ ID NO: 12663 - DNA, 310 bp, Glycine max
  unsure at all n locations
cgtcagagcnatgatanaattagtggcaatgtgacagataagagccatttatagtgtgaattgagtgttgagaggtcngattntgaataggtggagattctaccttaatattagcttgagcaagtctaattcaatgttatatacttgatgaagatgagagtttaccccacaattacccaattttcattgtcactgtttaaaccttgaaaattcactatatttggcgggttatggatacctataattcgctctaccttgttttggagtttgattatggcttgaacatgatttatacacggtttaggacctg

SEQ ID NO: 12664 - DNA, 448 bp, Glycine max
  unsure at all n locations
agcttcttttggactctgaacaagcaatgaactcctctttcagaaccatgctatgtgctcgcgactggtccctttcttcccttcgcaacttgagttcactattgctaccccatagagctccgcgaaatttgttccggccatactcttccttgcgagccctcttggtctcttgttcaagggctcttgcggtaattgcattctcttcccgtaacccggcacactccttccgaacgtgtgtagcagccaacttgaacttctccttggcgagttttgcctttcctaactcgctcttgagagctnggacttcttcgtcctcttccggtgcttcataattctcttcgctgacgacttttaacttggcgagccaatctaaacctcgtatgcgaactttcagccattcgtggtacccaccaatgatgccattacgaatgcctctaagctcttgatc

SEQ ID NO: 12665 - DNA, 450 bp, Glycine max
  unsure at all n locations
ctgagacgcatgtgaaactctggcatcatcaatacattcatctttattctttgtccacaatctccncctatttgatgatgacaatccctgaaatcaagacaagctatatacaagatgatagcacgttcacacaacccttactctccctatcttttggcatgtatgcataactgtacttaatgataaatttctaatagataattgatttctaacccaagttctcctctcaagttctctctccctctggcaacatcacaaagaactaacgcacatatatctatatccaaacagagccaacaataaaccacaataaactcatacattgtcataaccaaccaaatcacagccaagaattataacataagtgcatgactacgataactaacgcctaagaagccaaatacacggcgataaaccaaagtactactaatacttaattactaataatac

SEQ ID NO: 12666 - DNA, 511 bp, Glycine max
  unsure at all n locations
ccctccgcctcgacgtcaacctattcaacaaatcacacgtggaacgaactcatnagggntcncnaagcggggctggtgtgactccatgacaaacnaaangacgcagacccatgatcaacgaagctaacagcataataaataccatttatatactcgaaccgtccacgaggagcggatgagctaggaacgacaacgcgctcggtaagcaggaacattacctcacgcatgtgcccaccaataggctggaagacacggagaagagaagaaacagggacaacgcggacagccatgcgcgaaagcaccactaggaagcaaccaaaaaaatgcgcgaagcacgcgtggaaaaaccacgcgatgagtggcgaggaccatagcaaaacggagtattaacagggagacgaccaaacaagactaacggaaaaccagcgcgaaacgggagcgaacgacgcgaacagccgggaaacgaaccgagcaacacccaggcaatacacgggaacaatcgggcgggacc

SEQ ID NO: 12667 - DNA, 450 bp, Glycine max
  unsure at all n locations
agcttctttttagacctcgatcggtcatctntcctggccgacgccgactgttantttttcgatcaatatcggtgaataatattgttttgccgaggtgggctaatgttctcctggctgaataaatgagaacatgccattttcggccgaaacgaaacatcggttgagctcgcacgataaaacctagccgacctacattgtaagttgtttatgcaacaccgaaacaagaaaacttcccctgccgtaagaaaaataattatgggccagccagcgtttttttaaaataaataattgcgcagtgtcggctgaaaaatatcagtccgggccatttcacgaccgatgtcggctattgagtcttctattcaatccctgaatgataatgcatgatgtcgattangaaatggttgatcggcgtcatccggtgatgcttcttttttagacctcgatcggtca

SEQ ID NO: 12668 - DNA, 474 bp, Glycine max
  unsure at all n locations
agcttgcttgcggatctttatggaggatggatctttgagcttcaatgtggtccttcaatggtgatttttcaccatggagatgcagcggaaggcaaaggagaataggagaggggaggcaccatccactatggaataagccaaggaagaaggagcttcaccaccaagaattgccttggataagaagcttgaagaggatgctntaatggaggaaaagatagagagaaggggggagcacgaaattgaaggaataaaagagggagagaagtggaactttgaagtgtgtctcataagactctcattcatcanagttacaacaagtgttacacatgcttctatttatagactangtagctttcttgagaagctttcttgagagaacttccttgagaagcttctntgagaanacttccttgagaagctagagcttagctacacacacncctctcataactaagctcacctccttgagaagca

SEQ ID NO: 12669 - DNA, 408 bp, Glycine max
  unsure at all n locations
cagatttagtaatgacccactaacctagaataaaataacttattgccattaacctanggaattaanacaaactaaatggctgagtgtaactganattgttggcaaccaaaagtcaccctcaacagccaacaagtcagccaccatttggtctcccaaaaggctgatgcctaggttgccaattgggcccttattacaacttgaactaaagcccttttagttgattaacccaaaacatattattggtcagccaactttacaaggattgggccattatttagacaaactaaacactctagacatgaaataaagtggtgtcatttagtcctccatttgcgccatgatacaactcacaaccttggacttttctccttgaaacttgtgcttgtattcaaatagtatggacagcac

SEQ ID NO: 12670 - DNA, 331 bp, Glycine max
  unsure at all n locations
agcttgcttctacaggttccctgttcccaattatggtatcaaaagctggtaacaaacaataaactaccctcacctatctatatctctctcttagctccttgcagagttgttctaagatatcttaggttcacgtccgttcattcaaacgcagaactctatatagaagcaaaaactttgatgttntggtgatgccaaaggatcatgcgcttcttaagtttaattcgaaggatcatgcgcttctcaagtttaattcaagaggatcatgcgcttctcaaggttaattcaagacaagaatccaagaaattccagatatatgatcaagataatctct

SEQ ID NO: 12671 - DNA, 626 bp, Glycine max
  unsure at all n locations
ctctctacactctcctgtccanctttcagantaccacatatcgttctcactacattgtctcannnncancaacaaannntacagtggaattganttcattgccctgcgacacgcacactactcactctgacctacacacgtngataatggaatcctgagtgcctggatgacatcgattcatcgtctgttgggtcttatatgaaatggtggcacagatgatgatgcgctacgaatgattgaataataactattttgcacagaatgtaatgcatgaatatactgccagtcagacagaacacactctgttgataattgttagccggacaccccaatcttctgaacacacggtgtttgcacccttcttggacgagcacacatagcagataagccatcgccctctttactgccaatgagcaaagaccaccctgcatatgataacccaccctagacccaaacacaatatatcaatccttgatcggaaccctcaaacatcacaatttnaaccttcgacctgtatgcacagagttaccaagtgcatactttacccctcagatgtacacaattttcttcggacgaacaaccaagttcgcatgcattatgctcaacctttgacaagcatgaatccc

SEQ ID NO: 12672 - DNA, 473 bp, Glycine max
  unsure at all n locations
agctntgagctntgagcacttacgagtgtttcagcaccctagtaccaagagtgtatgtaaagtttcttcgagccacacttccaagagcagtgtanggggttctgtatgttcgagcgaggggtttccggcagtattgaaaacaatgtgggacaatgtgggtgtcgagggagcggtttctggcagatttcacgcgggaggagaaagagaacagcgactgcaatgttttcgagcgcacgggttgtgaaatgccaatgttntaacttataaacataacaacatcnggtttttaaggataaccgatgttaactaaatataagttaacatcggtttggaaatcatataggttatatcggttncttaaanatcgatattaagatcaattccttaacatcggttctcaacatncgatttgagagaaccgatgtttactctatcaagttaacatcggttctgccaaaaccgatgtatcatat

SEQ ID NO: 12673 - DNA, 337 bp, Glycine max
  unsure at all n locations
gaaagcacaccccaaggtatagatgcantaatttttcaagagtgtgagacagactcatgactatggatctggccttttcctcagcagcagacacaacttctaatttagactttgctctcaaaatcttggaatctccattttgaactattgagtctagtttcccttccttctccttcaacctatctgtctcaacagtgacatgcttcaactaatttatgatgacatccaaagaggccataaactagaaaccttcttctctaaccaaagctaattctttcctagctggcctcaattcttctgttatagttnggaacactatagagtcttctgattcctc

SEQ ID NO: 12674 - DNA, 374 bp, Glycine max
  unsure at all n locations
agctcgaggattgtgtaccttccacattggatggttatcgttctcaatgacttagtctctacgcatttcgtccttggaggttgtgtaccctatgcgttggatcattcccaatccatagcttatcccttccgattcgtgccttgagtcgaaccttgcctcatgatatctatgtctaatctaattatctctagagggctaaacgcaccataaaatcgtgatatacacaattaatcacacctcgacaatcttgagatatgggagaatattntgaaatgtcataatgcattgactcatgaatataagagaggatacgcatagtcaatgatgataaatagacatctctctgacctaagaagacatgctgagcaatacaa

SEQ ID NO: 12675 - DNA, 475 bp, Glycine max
  unsure at all n locations
tactaagcttgaacagatgatttgagacagcatgtacaanaacaacaggagataagtgtattttacatgaaagatcaccatgttcttccataccagaggcgcaaggaggagcaagaagtgtgagccatgtangtgtgtgttggtttagatgatggaaatagagaagatggaaataaaagagaattnttttaattaaaatagagtgtaaacagtatgggtcccacaaaaaaggtacaaagtttcacctcaatattatttatctccacctacccgtagtgatggtagtgtaacagagcaggaggtggagtaacaattgactggatatataaattgcacaaattaacttatggcaaagtttgtcanagaattcatttcttatggtaagtagatataaacaaacattataatcagatntcatataatttcaatgtttcaagagtattngttagttgggtgaagttgaaaaaatgaactg

SEQ ID NO: 12676 - DNA, 456 bp, Glycine max
  unsure at all n locations
agcttgtaaagctcattcacagaagcagctgcaacctgcgctagcaccatcaacatggcaggcttcaactcttgcactcctttccatgtgtatttcatctttattgcctagctgctgtaatatactggtttgaatttgaataaggaanaagagaaatataaggatatatagaacatgcatatcattgccaaaagccaacacagcaatgcatatatataggaaattaataatactcgatcagattatttctaggttaaaaaagcttgcatttcgttttagtntactatatataaactaaggacaaaacttatagtgacgcatctcaagagaattaatttgtcttattcttcaataaaaagtagagtnttatggcgatttacatattttctcgttgagttatatggngatctaaatatattctcgtcgagtaatgtaataagttatatcattattatt

SEQ ID NO: 12677 - DNA, 658 bp, Glycine max
  unsure at all n locations
cgctcgcgcgcantcccncaacgtanncngactggtnaacttgtagtgtacggtctcttacctacgctctanacgnanantnancaanacagcgtgggtttgatttgatagcacttcataagcgcactataaaaactccagcttgactaccgagttgatccaactgtcagctaagcatccacctttttctagtccacacaaggccaaataatgtcgatatcatccagctgttagccacaacactaaagatcgcattacccttaacgataaaatagaaaagtcgatccaacaagggtacttgcagacgtttgtcacagacctatcacgtgataggaagtgagatagaagccaagaatgtatgaagagtcgcgaaacaatagaaacacttttgtcacgataagaatcccccacccgaaactcgacttccagcgataataaatgcactaaacaaatgctgtgcgaggggaggacagtgacactcgacacacacaggctatatctgtagctttatgtccggcgacacatcgcctacacgaaacgaatgtcacaacgagcatatcgcctatctcctgtaccgacgacgtatctgacgcgaatcaacgaggcctcaatgatctaacgtgaaccacgactaaggtcgtaactctaatcatgcacg

SEQ ID NO: 12678 - DNA, 423 bp, Glycine max
  unsure at all n locations
tnttttatcngtaatgcacgcacaagacgcacaagtgaggggggatgagtatattcctacaacaatgtaatctatccatgacccacaggcacaaagaggtggttgagcattctntcgtgacaatataatagacgataagtgaagtgtgcacaactatttacattaacaagaatctatggggataatagtatacgccttacatcgaacgaaaacgtgaacctcctgattgtggacaagcccaacaaagcggatcttactccgcctctaggagatctctgagttatagcttagccagttatggagactcattaccatcatagtagaatcgtagtaactaatttgcactacatactatagttttacttctcaaatcgagttaacccattgaatctaaattgggcaataaatttctccatattttcc

SEQ ID NO: 12679 - DNA, 392 bp, Glycine max
acccgtatatgtggactaggtggcgatcgggtgatggtgcaagtcgactctccacatccacagatcacacataaatccaccatccgcagttgcccaccttcaactgagctcatgtactcccacgtagctcttatcatcgttcctctcaacaccgggtccccatcaatgcctccaagcttgcacaacatccaggcaattcaacatccaaacatcatgaactatccgaaaccaagataacagggcagaggcagagtactctggccaaaacacataccaataccacagctttccttactcagataccctagtaacattctctgtgatccaattcgttcaccgctggagtggactcacaatattactgggggtccctagtacataagtctacattt

SEQ ID NO: 12680 - DNA, 469 bp, Glycine max
  unsure at all n locations
aggtagtcttacctcacanaatatatatatatatatatatatatatatatatatatatatatatatatacatatatatatatatatatatatatatatatatgtttaggtagaaagataccttggatatgcatgtgtgtagcacaaaaaatttcacaaaatatatatatgtatgtgtaggtagcaagataccttggatatgcatgtatatagcacagatatctcacaaaacatatatacgtatgtttaggtagcaagatacctgtgacacacatgtatatagcacaatacctcacanaaatatacgtatgtgtaggtagaaaaatacctcatgagaaaagagagagcgagcgagacacgattatgatcaaaataataatagagagacaaattatactacgatatcaaaaatattagcggttgtctagctagaacacaacatgcttgtgaagagagatgactttcagctg

SEQ ID NO: 12681 - DNA, 376 bp, Glycine max
  unsure at all n locations
actctcatctcaaacaagtctataacattaatttaaacttgctcaaactgggtntncnaggaaaactccaccgattcaaaatttgacccctcaacacccaattgnncntagaaatggctcttgttttcacctctgtcactcatntttttctcatttgctctgcccaagctntcctacnngngctaattgacattgtaaactaggatcaactcactttagactgcgngnacggtaaacccaaatctagtttctctaaccctcacaatctcacactgttctacctacaacattgtcatcctcacatttaacccctaagttaactttccccgtcatgcataccagttgtctatcaacaatttcagcacacacacatcac

SEQ ID NO: 12682 - DNA, 413 bp, Glycine max
  unsure at all n locations
agcttgccacccagctctctcaggcgagctaggttgcttcctccagaaggcaccgccttttgggaaacttcctggaaggtccaagtgggcctggttgctatttgcaccctcctgtttactaaatacacccctttccttntttttgctgattcttttttcgtaacgttatggaaccttacgaattacgtaacgatactttgtttctttccgtaatgtcacgaaaccttacggattatgcaatcatcccttctttggcttccggaatgttatggaactttacggattgcgcattaacacttccttttgacttccgagatgtcatggaacttcacagattgtgcaagaatgcttcctattgacttcangcatgtcacggaacttcacgaattgcctaacgatgggtgccaagtacc

SEQ ID NO: 12683 - DNA, 181 bp, Glycine max
tcatacaattaatatagaacctatatcctaatatcacatcctatcagagtcgtgtgttcccgtgtcttctaacatgaggttcttcatagtcatccacctattcatctgctcccccgaacacaagttcaagatcatcacaggatccatacacaacaacacacatggagtgagttatcacatt

SEQ ID NO: 12684 - DNA, 441 bp, Glycine max
  unsure at all n locations
ctcccctagtttgctatanatagggggaagaagtgaagaataatagggtttcatccccagaagtacctttctctctttcttcaaatagctcgggaaaattacattcatggagaaaaattcagccgaggcgctctcgtaacggttcccgagagaatacaccaataatcttgaccccgtttcaagagataatggtccgctttcgtttctttcggctctaaagggggaaagcctctaaccaaacgtttaaattaatttatgtgcacgcggggggcacacattgggtccgtggnttatactcgggttacatcaatttatacccccctttgcgcgcgttgacccctttttatancgtattcgcgctatatataaaaaaaataactccccacgggcgtgggagttgatcaaccataatggggagaaaagattcccgcgttgtgagcg

SEQ ID NO: 12685 - DNA, 423 bp, Glycine max
  unsure at all n locations
agctgtgtaatgaagtatacaggctatgtttatttagtggcattgtttataactcgtccaagagttcttcctctttaattacctgttatatattcttttgattctatattttcaagcatggaattaaattgtatatacaggatcaatttgacactatgcgtaaaactttaacacttgcatcacttaataatttacacgaaattaactaattccaccattgattaagtttaaacaattccatacaaaacaaaaactaattgatacttaatcaatatgctntattttgatagataatatattatgtcttttatgtgaaataagtaaaatatttagttagatgaaatttcaggaatatgtttaatttatgtgatatttgatatacatgatagagaaagtaaatattatattaattcgcttaatctt

SEQ ID NO: 12686 - DNA, 402 bp, Glycine max
  unsure at all n locations
agcttgtctcagcgtttatgcaagacagagaccaacatgttagccatcatcagcaattaccaagaagaattaaatctagccatgacccacaagcacaaagtggcggacgactatgcccgagtgtacacggaaaaggaggctaggggaagggtgatcgactcgttacatcaagaggcatcaatgtggataaacctatttgctcttactttgaatgagagccaagaacttccccgattgctggccaaggccaaagcaatggcggacacctactccgcccncgaggagatccacagacttctcagctattgtcagcatatgatagacttaatgacccatataattaggaaccgctaggaagtttgtattgtcactcagatcttgactagttataactntctgaat

SEQ ID NO: 12687 - DNA, 510 bp, Glycine max
  unsure at all n locations
ngcggactataccttcgaccaaacacggtcgtgtttctgtctcggcccggatttaaggcgggctgcagcaccggctccgcttccctaaccgtactggaggcggttgccgtggccttatcctctatagttntctggagttttaacatgacctccgagatggaagccatttgatcttttaaagccaatagatcggccttcatctgttcctgcacaccctcttcatcatccattnttctggatcgagtgttataggggtgccttggtgttttcttagttatgatgaaattcctaaagagataaacaatggggagtatgccaccaaaacatgaatatgcaaatgaatgattggaacacttggatccaccctaagggttntttagataacatgatgagttcagaacttctcattntatagaaagaacanagctntcatctagccaagattatacaaaggtgttataagagaacctaacggnttctaattatgtgggccatcaaatctatcatgtg

SEQ ID NO: 12688 - DNA, 382 bp, Glycine max
  unsure at all n locations
agcttgccatccatctctcccaggcgagctatgttgctttctccagaaggcaccgccttctggagaacttcctggaaggcccaagtgggcctggttgctatttgcacccccctttttactaaatacacctgttgcctttnttgctgattctttttccctaacgttacgaaactttatgaatttcgtaacgatacttgntttctttctgtaatgttacgaaaccttacggatcacgtaatcatccctctttttggctttcgggatgttatggaactatacagattgggctctatacacttcttttgacttctggcatgtctctggaacttcacgggtcgtgcacaatgctattttaaacttcctgatgtcacggaactcatga

SEQ ID NO: 12689 - DNA, 422 bp, Glycine max
  unsure at all n locations
ggttacaactagtattctttgtcataccaagtcactaatagctctaatacaaataaaaagattcatttgtttgtttacacattgaccaactntcaatcgtcttataaacagatatacaatcccaacacgtagtcttttctctcaagatattcaaagtgttttcaagctattcaaaactttataagcatttatagacaacttatttacaaaaagaaattgaatttgagcgtttcaattggttcttcatgtcttcaaagcttttggtatttatagaccttcttcaacaaatgtttgttgtctctaaataacaagatttcttttctttatcttgcggctgaagaatatggccattggagcatttaatgtttgcattanatacacatacttcttcatactagaactcgactcttcttggatatcat

SEQ ID NO: 12690 - DNA, 456 bp, Glycine max
  unsure at all n locations
agcttaattctgagaattctttgaaaaataagcattctagagtcttttatatgcaactagttggtaacccgtgcatacgcacgggtcacttgtaatttattntgtatgaatatttatttattctataatacagtattaaaatgaaaaatagtacgaaaataaaaaaatatgtaacattaataataattagattgtttgcataaacaaaaaaaaagcaagattactcattgaccaaggtaatgttaataaacaaaacaaacaacataaacttaatttagtcactatcactggtcgtccaatccttttgacttctaataataatttcccaaatttgttcatgacgcttgtagtagaatgagatttcatcaccataagaaaaattactttctttaaggaatntatatcaaggttgcacaacatanntttttccaattttaatatcaagaacgataacat

SEQ ID NO: 12691 - DNA, 440 bp, Glycine max
  unsure at all n locations
gcttaatgcaagaaaacatactcatgactaggaacccaaagtttggttntaggattagaaaagcatgagaatagggacttgtttgtaagaatttgggctgccccatgattggcactntgcgcctaagtaacgtgggagatgcttttcaatggtgtgtagatatgtgtgtgtcataccctaatttcgtccggggaccttngcttgatgacatgcgacctttctttggtccttgtgaggtgcttggcatccatcattgggcaatttgtgaaattccaggacatgccgaataaccaaaaaaaatatattgatgcacaatccgtaagtttccgtgacacaccggatatcaaatggaagcatcattgcataattaagtgaggttccgtaacattctgtaagtcataaggcggatgattatgtaatccgcaaggtttcgtaacatt

SEQ ID NO: 12692 - DNA, 277 bp, Glycine max
agcttgggaggattgtttagttttccggtgttgagagaaatgacgatatgggctacttgggagtacgtgagctcagttggaggcgggcaacatgggatggtgggtttatgcgcgatttgtggatgtggaaaacttggtgtgcaccatcgcccgaccgccacctattaccacatgtgatgggtaccccataatcctacaagctagatatgaggaagtgtacaatggtgaaaacttcttcttttattcgttgaccacagagtggtacctggagatatgt

SEQ ID NO: 12693 - DNA, 344 bp, Glycine max
aatggcttctcaacctgtgtgtggagaatgtcatcgtcgagtctaactgcatttaggtatccaacagcatacattaaggggccaatgatctctttgaatttggctgcaccatatggatatgctgctggaacctcttgctctttagatctgacatcaaagtcaacttcattcgtcgtggtgcaaactcggtggctcacggattagtatgatcttttggacactctgctgatcctcgttcttcttatctgttcatgctcgattctttatcaatatcccgtgactaaataaatgagtatatatatatatataaatcacacttttaattcgacaagaagaatattcta

SEQ ID NO: 12694 - DNA, 103 bp, Glycine max
  unsure at all n locations
agctntaatcttttgatcctactatgtgactaatcattgatcttggacttagtcaaacttaaagttcatctctcgtttgtaatagtgtattatgttgggatga

SEQ ID NO: 12695 - DNA, 432 bp, Glycine max
  unsure at all n locations
gatattcaagatggatgatcaagatagtctgtatagtcttagaaagggtatattaaataggaagggaattccaattgaagtagcaaaaggtttggccaagaaaattaagttaaaaagtcttttacaagaaatttactctctggtaatcgattaccagaggatgtaatcgattaccagtggccaaaactgatttacaacagctattaaaatttgaattcaaaatttgccctgtgtaatcgattacacatatatggtaatcgattaccagcagtttctgaaccgtttaattcaaattntacagcttgtaatcgattacacatatactgtaatcgattaccagatcagattntcagaaaatattctcaatagtcacatctttgtatgtggttcttgaatggctatcanaggcctatatatatgtgacttgagaca

SEQ ID NO: 12696 - DNA, 465 bp, Glycine max
  unsure at all n locations
agcttaacaaacttagaaatcatgtggtcataaattccgaaatatagggggagtaaacgcacattntatctatatacaattgtttgttgcttgcttgaatcttgatttcaggtattgtattgtcatcatcaaaaagggggagattgtagatgcaaatgcctttggtgttttgatgatgatcatgatgatatgatgcaattgatgcaaatgggcttttcaagattaaattcaagacaatgcttcaagattacaagtcacaacatcaagatgatcactagtaaattaggaagggaattcctaattgaattagcaaaaggtttggccaagtaattntaattaanaagtgtttttcataggttntactctctggtaatcgattaccagaggatgtaatcgattaccagtgtgcaaatattatttataacagctactganatttgaattcgaaaatttagactgtgtaat

SEQ ID NO: 12697 - DNA, 305 bp, Glycine max
  unsure at all n locations
aatctcttccacacncaagtttggaccaattagtaaaagggtgacaaaagagttaactacaattccaattcttcattaccagtcaaacaaactattgttttcttcgatagaccaaaatcattntatatgttggatacaactgttggtcacaaaagctgattctctccacaagatgaacaacaataaggaaaacatactatctcaccaacccactaggagagaaccaatcattgtcaatcaagttgctagggatgcatcatgctctatttaccttccactatagacatatatacatgcatgctaat

SEQ ID NO: 12698 - DNA, 353 bp, Glycine max
  unsure at all n locations
agcttaagctgttatgtgtttacttatgaatgatataaataattgaatataatgtctaacatgcgatatgagccttttgggctttgagcaaaggctgagccaccttaccttgtgctaaaatttatcttgttttattgtgaataatggagatataatgtgtcaaattctctgtcctgaacacttggtcaagagtctctaataccatgtcagcaaccttcgctattgaaaagtcaagttgttagttaaaactcatgaatggctcgagctgaattaattatatatgatatttattatattcttanaaattataattaaacctaattgtataattatagtttaatatacttaaatta

SEQ ID NO: 12699 - DNA, 505 bp, Glycine max
  unsure at all n locations
taatactattgtggcatgaactctgatatttgattctgtgtctcttgactgtcatttanatctgaggcattagactcctctctcataccattattcatcannaccatttgattcttgtacaatgttatctgtttggcaagtgtaccaaatgtccaagtaataaagtctcggaagcccgagtgtcgaattccattggaattntgtgttgtacttatcttggatacttttcaatttataagtggaaaataataaaagagaggggtagaagagagaataggaacaataataggaaattataagtaatggaaagcaaatgaattanaagcagagtaatcaaaaagggaattcaatggaatgtaagtgttangacctaacatgccctatntgcctaggatgtatgattntatgaattttctttaccaattcaagtgaatttatcctacccacatctattcatttacttgtccctgatgcctcacgatgaacangcctatttatntatcta

SEQ ID NO: 12700 - DNA, 454 bp, Glycine max
  unsure at all n locations
agcttgcttctacaatctccccattntgatgatgtcaacttctgaaatcaagaaacacacacacacacacacacacacacacactttttcctagtcgatcacacacttctacaatctccccattntgatgatgtcaagaaacgcattcatacaacattcatggaaaaatataaaccaaatcatgaagcaagaaccatgaatataaaaaccacatagtcaaataacataattaatatttgttcaaacatatcatgcaaataaagaaatagtaaattgttcaaatgtcataataatatagattatntggataagtcactaacatctatcagtcctaattctcttctaatggtgtaaaaggtatctttacttagtggttntttaaaatgtctgcaagttgaattttagtatctacaaattctaaaacaacatcaccttntagaacatgatgtctaat

SEQ ID NO: 12701 - DNA, 422 bp, Glycine max
  unsure at all n locations
ngagctcactggtgctgccnctacanagccnctcggaacttgtttcggtctcatgcttcctttcangccctctntgtttcctgttccaatgcttcggctgtggccacattgacgtctctcaactcattgcattctttntggaccttgatggccattgtcttgaacctttccttgactgcttgtgcctattcaagtttggcattcaaggcttgcacctcttcactctccttaagggtttcagcctcttcctcacttgaaacctttagctttgggagccaatctaactcttgcatccgagccttcagccacttgtgatagccaccgacgatctcattgctgcttcccctaagctcattatcctttctttgcaccatgctccatgcctttcgaaccctttgaaatatccttgcattgngatcact

SEQ ID NO: 12702 - DNA, 457 bp, Glycine max
  unsure at all n locations
agctnttaactgtatttgcagcgttccaattgttntttaaatggtgtaatcgattacaatatattggtaatcgattactagagtatctaaatgttgaaattcaaattcaattgtgaagagtcacatcttttcataaaatgctttgtgtaatcgattacatggttttggtaatcgattaccagtgacaagttttgaataaaaatcaaaagatgtaactcttccaatggttttctcaagattttctcaaggttataactcttccaatgttttcttgaccagacatgaagagtctataaaagcaagaccttgacttgcattntaagtacttgatataacttttcatatatacttttacaacctttgaatctctntgaaccatcatttgaacttcttcttcttcttcttcctttgtcanaagctntctgagttntctgatttccaaaccttgttatttcac

SEQ ID NO: 12703 - DNA, 440 bp, Glycine max
  unsure at all n locations
acattgaaacagttaaatctattaggattcctgaaactcgntatgaccaaacacggngaggtaaaggtacataaggatacaatgttgtcacaatgactcaacaggaggtctcacaagcacattttatatattaaacaacacaacatgatattttccgtacatagaaacccacagacaagttcttagagttacacacccaaaaatgaacatgatgagggtgttgcaagagcacaataaaactttcattaaatnggttagagaaacaatattagcttatgacaatgcttcgaaaactttaagattgttagttgttgcgccaaatctcaatgtctctacttggaagggatatgatatcaacaattattccttctacacanaatcacaagatgataaaattgtcgtgcggaacagcgtggtcagtggtcatgcttaattttatc

SEQ ID NO: 12704 - DNA, 454 bp, Glycine max
gcttgtgcttgacttgcctgtgtgggagttttacatatatgagaaaggggcaacgcgttatggttgaaaataagaatttgggtcttaaaaaaaatataaatttattaaatctggagtacagttaaacaagttaaagttttaaaaaataggtgaggtggaccaatcgggaagaatgtattagcggaatctaatgatatttactcctattatattctttcttttggcttgactctgctaattattaagtttcttttaaagatgtcaccggattgtttgatgggagagaagagaaaggtgtaaaactcacaaaaatttgaaaatttcttcatcttttcttcctatttgatctcaaccaaagactctgatctaaaccagatcaaggccacctgatccacacatcctctagataagggaaaaacgaaagagaagagaaaatgagaaatgcatgtgaatg

SEQ ID NO: 12705 - DNA, 489 bp, Glycine max
tagtaacgtgaataagaaaataataagtggatgccaacatattaattgttcatttgaaatcttcatcacaattcactgacagacctcaactaataggaatatataaatatgaataatctctttattattaattaataggccatagacaagcgcctaactggccttgccttaacaagcctggtgtcttttacagtaaatatataactcctattttatacaacaacaaggttttaaactacccaaacttttcagaatataaatacatgtatataaagaaaactacccagactttgcaagatataaacacatgtatataaagaacactacccacgagcaaaactaataatataatcacaacttatgtattggatgggtcacacacgaaccataacataacgtacacaagcacacatgcaccaggctattcttacaaataatactacacctcttcgttcggcggcctgcattctataattggcatctcatgat

SEQ ID NO: 12706 - DNA, 440 bp, Glycine max
  unsure at all n locations
acgctttaagtggaagaatattctccgtattcctacgtgatattggcttcatcgtgagatgtttcaataaactcatagttttgtctgctactcttctcaatcaaatgaaatagttaagtttgttcgcttaaaaaaaactcatacttttgtcttattattaattttcgtattagaagttgatataaaagtatgttggaaaataaaataaaatatttaaatttgcaatgatagatagtttttaacgatcaaattataattatatttaattaattatttggtctttataattctataatttatacattctagtttctatagttcgaaattaatctttctaagttttataatttatatcttaattctctggttagttttatagtctaaaattgatttatctagttcttggaattcatattctaattctnttttagctcttatga

SEQ ID NO: 12707 - DNA, 372 bp, Glycine max
  unsure at all n locations
attgcgaaagccccactccatcattaggattagtacctgacatctcaaacaaacaaatcaaacgtaacaagacaattatagttgttgtttgaatacctcacccactcaagtgtatcacacaattatggctnttctctaatgaaacactcttgccttttaccactctaattccccttgagttcttaggcaattcaagagattatggccacaacaaagaacaattcaccaatatgtgtaaggtaaggctagagagacaaggaaaaggttaaccaagaaaaaggctaacaatgtttttaggcacaaatgaaggaaataaaattcagaatttaggaattcaagtaacaatccttcatgcaaccaatatattacctt

SEQ ID NO: 12708 - DNA, 463 bp, Glycine max
  unsure at all n locations
agcttgcttatgtctttacctattcctaagcatgtatggcaacacatcaccatggacttcattgaaggtcttcctttctcttttggtaaacaagtcatttatatagtagtagataggcttagtaaggcaactcatttcatggccttatcacatccttatactgttgcggatgtggcccaatgcttccttgataatgtctttaaattgcatgggtttcctgacaccattaccagtgatagggatcctgtttttgttagtcacttttggaaggaatntatgtcctttcaagggattcaggtatagctttctatagcttatcacccacaaactgatggtcaatcagaagtggtgaataggtgccttgaaacatatctcaggtgcatgtgtagtgactcttcaacacagtggtcccaaatggtgcctcttgcggaatggtggacaattccacttaccacacattatt

SEQ ID NO: 12709 - DNA, 507 bp, Glycine max
  unsure at all n locations
gtagctntagttngttccatgttgttgcttcccttatctctaacatattgttccaacagatcttggtcgagttaaaggtgatcctggtgcctcatctctaacacaatcaaatcctaagattgngtccaataatggaaatgaaatgacaaaggataaatataagccatatttgaaacacattgtgaatgggtctagttctaccaatggtatagttgttgttaacgtangcccacctaaggttaggaaaacggttgtaactaactctaaaggaaaccttccatagcctcaacaaggcatacacccctaatcaggagttaattctaaaaatattatttagataaggtcaaataaagtctttggtaagactaattacatggagattgaanaggtgtttgtcccaacctctaatanggaacttcttgcccatatgatcgcctctaaggagaaatgattcggtcccaagatatgagggttcgacttatctacaccccacgtttctcatggata

SEQ ID NO: 12710 - DNA, 460 bp, Glycine max
  unsure at all n locations
agcttcgatcttgctatagagcaatcagcagaaaaccagacaagcttcatccatctctaagcccaaagaaaaggaaaaaggggactgggaaccatgctcaaagcaatacaaggggcanaggtagagagagaataaaaatctaacgtgccccggtgccagaatgcttcttgctatgtgaaggtatgggggagggtcattatacgcagccttagccttgcatatgcaaagagactgtttccggattctaacccatgaccaaccagtcactaaggtgcaactttaccattatgccagggctcttcctcaaaggtagagggagaataatcagaagaaaatcactcaagtttactccacctctaagccaaaagaacagaggaggaanaaataaaccatgctcanagaagtgcangtggcaacggaagattataaaaggaaacatattttagacagtaagtagata

SEQ ID NO: 12711 - DNA, 390 bp, Glycine max
  unsure at all n locations
ntccctctntgaacanatacccctcagccaaatagcattcatcttgtgcctttntcccacaactctcgtaaatgggagaaaaatgttcatctaaagcatacaagtccctaatattatcaattcctaaaatttaagctcctagggagcaaaacaatgtgtgtctcctagagagggcatcagctaccacatttgtttttccctttntgtatttgataacatatggaaatttctctaggtactctacccattntgcatgcctcttgtttaacttgctttgccctctaatgtacttaagtgattgatgatcactatgaatgacaaattccttggaaacaaggtaatattcccaagtttggagggctcttattaaggcataaagctctttatcat

SEQ ID NO: 12712 - DNA, 617 bp, Glycine max
  unsure at all n locations
tcaccacacaacntncacttcgctnantatactctcatcgncgntngntgantgtgcgacgcataggacatataacgtccccacgctgagcaactggttgtgtcgacgctacgaacggcgaacngngctcggacgcggcgatcggtatagatgactgcaggctgccagcctggaattactcttatttatatcctctccatgctcaacaataccccctccatagtgagcaacaccatcaccatcataccgtcaattagcactattctcggggaaggtagtcctataaatcgttgagcaggcaagaatggggacaggggctgatcgcagaagaaccgggtaatcactggaggaactaccaccgctgctacaggtagaaantgggatcattctgctaaaccaggcctaatgaaggataatacaacttcgccgaaggtgacaatacgntccctatgcttgggcgatacgggacatcccgacacagctgatgggtagacataggggcgctaccaatcaaaagaattgaggctacaacacgcacgccgatgagacgacgagcagcatgtctgtgactccttacattcatcattgctacggcttaattccgcatcggacaggcc

SEQ ID NO: 12713 - DNA, 463 bp, Glycine max
  unsure at all n locations
tttcgcacaagcacgatcaatatcgaggtgatgggaggtttcaaaagtggagcagcatatgctacaccaagagatgacagtgcatcccctcttaatacgatgttcatcattaggcattcaggtatgaataatcctccacgtgagaaaggactaagaacggggaagggcagcactccgaatcttggaaccccgtgaagcattatatcgaatgagagcacattatattcatttacaacgagtggtaggatcaacctgatccaaactcagattccagatttcaaaactaagccaagattntcaagctntagaaggctattctcagctcaaggcttcaccatacatatataggctgggctatattcaactcaatangcctttcaaatatgctcgatacttgattgaagcatcatttgaagatgcaactaataattttatacaaagtagaatttatataaacatgtta

SEQ ID NO: 12714 - DNA, 463 bp, Glycine max
  unsure at all n locations
agctntgcagcccaatcctttctttaagtaggtacggtgttttctagtatcctcttgatctccctagtctaaactccaacttttccatttgtttacggatgataaggtgatgctactttgtgtcaaacatcatagtgttgaaagacctttgagaattgagcaatacaaaagtgtgtaccttcatcactaatcaagagtctaggcaatcaaaacctaacaaaaatgtttctctttaagatattaatcatcatctttacatcattggttggactagaaatttcttccacccactttaagacatagtccactactaccaagatatatctgttgccacgtgaggatggtaaggggaccaaaaaatcaattccctaacaatcaaacacttctacctcctgcatgttctgtaatggcatttcatgtcgtctagatatgttgccgattcgttgaccaatattgcatgatc

SEQ ID NO: 12715 - DNA, 472 bp, Glycine max
  unsure at all n locations
gcgacactatgatactcagctctccccatttcttataataggaggagaagtgaagaggaatttcgttcaaccctcttggtaattcagaatcacttanaactagagaaaaaaattggtttcgtgaagaacatccaagccgaggttcttctgtaacgtttccgtgggtgatttcacgaagactctcaaccgttcttcgacgttcttcattcgttcttcgtcattcttcggtcttgaactggtaagttccctanatcgaactnttcaattcattntatgtacccttagtggtcctcatttgttttcacgtgcttttatttacgtttcatttacttttcgtacccccttttgacgtgctttagtcatttgcttaagttattttctcgcctaatcaagaaataaaatanatgtcaacctatcatttgaattgtaatacccgttagtttctgtaaaataaaatccaaccgttcggtcg

SEQ ID NO: 12716 - DNA, 419 bp, Glycine max
  unsure at all n locations
agctntagctntagttatacattatggtaattaggggtatgcaaaaattaattcagtaaaaaaacagaactagattcatttcaaattgttttaacggttagattttatatccaagtaatcaaattgattcaaaatcgaattagttttaaaaaacaaaactggtttagagataaactagattatgtattggaggtgattccagtatttgtggcaaagcagggagaaacatgtccttccaatacattattagtgattatgttgctcataatatgttgcgctagctaaatttgagggatatataacaacctttgcttcaaccattntgaacaagccacggaaacgatgtccaagtccttggagagtttanagttgaacgttgagtgagtctgcaaccattgctagctnttaataatgcacag

SEQ ID NO: 12717 - DNA, 491 bp, Glycine max
  unsure at all n locations
tcctctgaggcaactccggtataaactggataaaccctntcttcaacacacctaatggaaccgtgcacaatgccatatcaccctcaaacacctgactccctgcagtcacctgcactccatcgccactatacctaatcatatgcacagtcttctcatacaaaatcggcacattctctgacaaagcctgaaccagcttcccatttcccccaggcaaaaagcaatggtctccccccatatcatatggatcatcctggtcccaaaacgcaagcgaaagatttgacaacaaccccgcattcgcatactccaaatttgcgagatgccaattaaacaaattcatttcctcatcactcactgcgtccttataaacctgactgaatgtctncagcgcagccncgagcgacacantccaccgaaacctccncatcagctgcctcagcctactcgccttatcaagcaaccgattaaacgcagactccaccttcacatccata

SEQ ID NO: 12718 - DNA, 473 bp, Glycine max
  unsure at all n locations
agcttgtcataccgctccacccagtgaaacttcagttgactggccccataaaatgacaacgctactagcgaagtcatcacagttattgtgctgtaaatgcaatgtgtgaagcttggttagtaatgaatatctaaacaatttttatttgcaaacttaattggcatctaaaccagagtagcatcaacccagattaagaaactcagggcctttaagattgtgaatcttttagtgcagaacagcattcaaaattcaaatacaagacagaaataaggattcctatatgttccatcaaccaacctgaatttcaaaanagtagtcaagggatctagctgaattgttaaccatctttgtttagcttggatggcatctcanaattcaagtagtttgtggtaccaaagagaggtttgtcagacagacatgatgtcttattagaagtcttagcataagttgtcatgaaaaaggtatacatgatg

SEQ ID NO: 12719 - DNA, 487 bp, Glycine max
  unsure at all n locations
atcacaagtaacatgattaatgcattgtgacgtctcctacgtacataaaacgctgtanactatagcgtcttggtcttggatgtgatgtgatattgcgtgctcattgcttcttaactttcttttcgagttataaatagaagttagtaaattgaattgggtgtatccatatcaaatcctctctatttttgttcttctgtttaaaaggatgaatatctataataacaatctttgctggttctactcccatactntatcttcctttnttctcttccttattcttccttctctttctacaaccaacctgactgcactgttttgctatttntcanaaactcactaacactcctttcanactagaaacttgganaaatggcaccgattggtgtaagtggcatggngtcgcgtgcaacaccatctcaggtcatgtgattggtcttgatgtngacatttctccacaatcttttggtgatatttcctctataatctc

SEQ ID NO: 12720 - DNA, 426 bp, Glycine max
agcttctacattcaatttcgagcttttcgatatattacgggactcaatcggacatccgagtaaaaagttattgtagtttgaatttgctcagggcttcggtattccatttcgagcgtctcgatatattacgggactcaatcggacatcagagtaaaaagttattgttgtttgaatttgctcagagcttcggtattccatttcgagcatctcgatatattacgggactcaatcagacatccgagtaaaaagttattgtagtttcaatttgctcagggcttcggtattccatttcgagcgtctcgatgtattacgggactcaatcagacatccgagtaaaaagttattgtcgtttgaatttgctcagagcttctacattcaatttcgagcttttcgatatattacgggactcaatcagacattcgagta

SEQ ID NO: 12721 - DNA, 480 bp, Glycine max
  unsure at all n locations
ntgagcanattcaaacgacaataactntntactcggatgtctgattgagtcccgtaatatatcgagacgctcgaaatggaataccgaagctctgagcaaattcaaacgacaataactntntactcggatgtctgattgagtcccgtaatatatcgagacgctcgaaattgaataccgaagctctgagcaaattcaaacgacaataaacttttactcggatgtctgattgagtcccgtaatatatcgagacgctcgaaattgaataccgaagcgctgagcaaattcaaacgacaataactttttactcggatgtctgattgagtcccgtaatatatcgaaacgctcgaaattgaatgttgaagctctgagcaaattcaaacgacaataactntntactcggatgtctgattgagtcccgtaatatatcgagatgctcgaaatggaataccgaagctctgagcaaattcaaacgacaataac

SEQ ID NO: 12722 - DNA, 460 bp, Glycine max
  unsure at all n locations
agcttggaatcactctcatcattntcctctccatcctcatcactaccccctccatagttagcaacaccatcaccatcaaaccttcaattagcactattcttggggagtttagtcctataaatctttgaccagtcaagaatgttgacaggtgctgattgttgaagaaccgtatattcattggaggaactagcactgctgctattgctagatcttgggatcattctgcctaaactaggcctagtgaagtatattacaacttccacaaagttgtaatatacttccctcatgcttgggctatcgaggactatccttatacttctgatgggctagagatatgggatgctatcaagtctaaaggatattgaacctacaaactagttagtcaggatgatgacanagatgcangcattntctctgcacttctttagtattcatcaattgcctacaactctaatataca

SEQ ID NO: 12723 - DNA, 489 bp, Glycine max
  unsure at all n locations
tacacaggcagttntaaagacataaagggaatgatatnntgagtttgaaatgcttgagtgcattcgaaactctcatcaganaagaaatccatatctatgaacttagggtcaatgataaaatgagaggagaagaggtttgtctaccgtatacgtttttcttccgatgagaacaatgaggaggagaaaatggaggaaggaattggagtatcctgaacctcggagtgccgttggcttctacttgaagaacccttgtgcttcttcaatggtttcgctatttgagagacttattcaaaatttcaatcggttgaaatgaaagaggatgaanaaagatngaatttgggctctgtgggatgtgatatggataagaaatgagtaagttatggctganatacgaattgngaatgagggttcgcgagaggaatgagagggttcagaattcagaatttgaatctgaattataagaganggatgcgttgaatcgatacaaca

SEQ ID NO: 12724 - DNA, 451 bp, Glycine max
  unsure at all n locations
agcttgcagcaatttgttattgctcatgtgtgatgtagaaaggtttagttagtgacatgtcttgcatgggctaaaataggtaggacaacttattaggcatatgaagtatagattctcatattctaagcgccaaattttggtaaccaattattcttgacatacgcgtactccaaatacttctatttttgaataaattattttttattattaacacatcgttaaatcatgagtatgataaatagtacttaatctaaagntacttgggattcatgaaagatatgtaccttattttgattgaactcatttgctcctgttatagttagtttcttggtaacagccattagctntccatatntatcaacacatggatcttntttgaagtagtaatacatagcatctacaacatcagttaatttgataggatatctcaatgaagatccaatatggtaca

SEQ ID NO: 12725 - DNA, 446 bp, Glycine max
  unsure at all n locations
ctctnttctctctntntctctcaaccattcttcattcttcttcctctnttcactnttgntcttcctttntcttgcacanattntgtggctcgtccactagtgatgatcatggaaggttaaatactcaatcagtccaaggattcattccaagccaggttgaatttgagttatggnttagtatttcaattgtgtgaatgctcatctttntctttaatcctaatttcaattntcatgattataaataagtttaggattgaaaatgaattangttatgaatttatttcctaattntgaaatttaatcacaggttatctggatgatattctaacctaatttgcgatctcaatgaattttgggattaattcaattgaaataactctaatgacattgattgaactcccacaatgatcattctntgcaaaactgtgataattcatttgcattga

SEQ ID NO: 12726 - DNA, 436 bp, Glycine max
  unsure at all n locations
agcttaagaaatatatatttatagtataatcccttcatagagtgcagaagcatcaagtatgcaagacatcatattatctgagatttatgaaacaaataataattcacgatggttagaaaaaattcaaaagacaaaaaagggcaaaagttgcacgaaagtgtgtcattntcccatccccgtgaagtcaattgcatgaggattacttcccgagggagcaacaaagtttgtctaatacatcatgtattaccatcagtttacagcacaatcatttttcccataatagcattcccttaattatctatgtagcatgtgattgtgagtatatcaaatgcatacacaagtcgagtatacaggacatggaacactccattaaccaacatagggaaccaaatacctgcagagagacattatgttcccttatgccagtataataatg

SEQ ID NO: 12727 - DNA, 327 bp, Glycine max
  unsure at all n locations
ggaccggcgaaagcaagtcgtaaatggagtggttggagtaccaagaaaatgtctggaagcataggtgataaccttggcaagtcacgaagaatgggccccgatcatggatgtccttgcgctcttgatcttcagagtggtcctttttccaaatgtggatgggttggtggactgcgcaatgattgatgcttttctcgccttttacaccacaaggaaagcccggttgtcgctatcttatccaatctatatgacacattcgaccgaagatgcgagaagaactgngcatggatcgtttgctatacaccggccctctacgtatggctggttcac

SEQ ID NO: 12728 - DNA, 456 bp, Glycine max
  unsure at all n locations
agcttttcgattcattctatgcacccatggtggtccacattgcgtttcgtgcatttttactctcgttttggttacttttcataccccctcttgtcgtgcttaagccgttntacttaagtcatttctcgcttaacttaaaaataaaataaatttccaccgaacgtttgaattatattatccgttaacttcggttaaaatcaattccgaccgttcggtcgtgccgtaaccacgttggaaatcataaagaggtaaaaaaataatataataatcataaaatatcttttttagtaaaataaagcggaaaatcaatcggacgttttctctntgggatttctcattcttaattgaattgattaataactaaagtgaaactaagggctaaatcaactcgcctagtcaagctcgtccacaataatagggctttgaagttcgcatttcaatttctcactaagtaaa

SEQ ID NO: 12729 - DNA, 379 bp, Glycine max
  unsure at all n locations
ntgagccanaatcctgactcaccatanaccttgacccagggtgagaatgtctatccttaccctcggaagcggaaagaatagaagggaaatttccaatcaaagaaaaggaaagaaggaagatttccaatcaaagagaaagcaaaaaaagaaaagaaggaanattccccaatcaaagagtgggagaaagcaaaaagaaaagaaagaaaattcccaatcaaagaatgggagaaagtaaaaaaggaagaagaagaaggaaagaaagctcctgatcagggatcgaagganaacagaagatatgtgcagaaaggtctttgaaccggacaatatctgaacaatacagaattgtcaccaaatgaacaaaaagaaggagaggaaacca

SEQ ID NO: 12730 - DNA, 469 bp, Glycine max
  unsure at all n locations
gcactgcnntttgatgtgtcntacatcgactaacggcgaatgcagctcggacccgggatgctaacagacgacctgcngcatgcacgcaggttttgctatatatacagaagatgacccgcgctgcttaatacaacacgagatagtgccacgatataaaagcccattgtgcagacttgtgcgccacacgacaattatctacccaggcgctcgcacactttatgtgaggttatatttcttctccggaaccctttaaatatccaaagggaactacaaccaacgagcggtaagaggtgtaagagggggaattattaacaaccatactggcgttaaggaacatagattgcgcaaccggggcttgttaaacgaaggttggggttcaccacgagcgagttaatttctataaaccacctagaaattgtggggaatgcctcccccttcatattgccgggaataatgaaattagagggag

SEQ ID NO: 12731 - DNA, 443 bp, Glycine max
  unsure at all n locations
tcacaattccacaattcctataataggcctaactcacaattaggtccncagtggagtcgccaactgtcgcaacgtgccctttcgcgggcgagcgagggcgaggctcacgggtgcgctttccaaatgaggaaaggtgcgcggagtcgccaccaacgatcatttgtggaaaacgtcgggaaaaccgaatgacaccggtcaaaatgaaaattctaagttcgggagttgtatttacgttcgaggaaggtattagcacctctcacgtttgtctcaaaggataacagcctattntttagaattgtgaaattgtgttatgttaccttttatttcttttttatttgtgaggtcgacaaaagcggngctnttgctcctacgtaccctgctttggagaggaaatcagaccgacgtagttcttacttangcacgaatcaagtgattctttttac

SEQ ID NO: 12732 - DNA, 390 bp, Glycine max
  unsure at all n locations
agcttgagtagataattgatttgccttctatttgatatctttgataaatgaggcaactgcatttgtaagttgaaaattttcaccattggattggatggaaattttgtctttatatttccagctggcaggagtcatattgggagctcaattgctcattgaaataaagtggcactatgagccgtaatatctaaatcaaaaccaaaatgctaagacttgtattaccttttacttcatgctttcttgatgctgttgttccctgtgtctgtccctgttttatcttggattaaaatgaaaatggctgtctgctactacgctgttcgcttattctttntttttttaaataaagtaaaatagtagaatttatgctgtgtattttactttatcatctac

SEQ ID NO: 12733 - DNA, 470 bp, Glycine max
  unsure at all n locations
aagcttcacaatgctaatctgaactcagcctttntctccacattaattaagcttttatcgttccttgcttttttgcaggattntgcatataaatggaattactgtttattaaagtttataatgcatgcactcgatcggtatgtattatatcagcaaagcgtaccttaggtttgattcttatgggagccttgactaattgactttntcagcatatataagaagatattntatatgtaaataattnttgtatcagaatgtggcattagttgaattaaaacataattcgctgacatataattntatctagaactgaaataactcaacattaacttcggcagttgggttgatgtattggcgaattgatttgaaactggatattagatttgtgtgtcactcagaananaaaaattaacagaagttngaaattccacaatntacaatcatnnttggtgtatntacttattntctta

SEQ ID NO: 12734 - DNA, 354 bp, Glycine max
agcttgccacccttctctgccaagtgagccagctattttgcaccccctgtttactaaatacacccccttgctctttcttggtgtttctttttccgctatgttacgaaactttacgcaattcgtaacgatacttgttttctttctgtaatgttacagaaccttacggatcacataatcatccccttttttggcttctgggatgttacggagcttacggattgcgcactaacacttccttttgacttctggcatgtcacggaacttcacgggttgtgcaacaatgctttcttttgacttcccgcatgtcacagaacttcacgaattacctaacgatgggtgccaagtacctcgaag

SEQ ID NO: 12735 - DNA, 446 bp, Glycine max
  unsure at all n locations
tctttgggaccttgaacaggcaactaactcctctntcagaaccatgctatgtgctcgcgactggtccctctcttcccttcgcagcttgagttcactattgctaccccacagagctccgcgaaatttattccagccatactcttccttgcgagccctcttggtctcttgttcaagggctcttgcggtagttgcattctcttcccgtaacccggcacactccttccgaatgtgtgtagtggccaacttgaacttctccttggcaagtttcgcctttcctaactcgcttttgagagcttggacttcttcgtcctgttccggtgcttcaaaactctcttcgctgacgactnttaacttggtgagccaatctaaacctcgtatatgaactntcaaccattcatggtacccaccaatgatgccattacgaatgcccctaagttcttgatctt

SEQ ID NO: 12736 - DNA, 414 bp, Glycine max
  unsure at all n locations
agcttcttatccaaggcacattcttggtggtgaaactccttcttccatggcttattcccttgtggatggtgcctcccctctcctcttctcctttgccttccgctgcatctccatggtggaaaataaccattgaaggacctcattgaagctcaaagatgcagcgttcatagaagctccaaaagcaagcttccctcaccatattcatgcattgcattttgcataagtcatttcatcaccatgcatatgcatctaataggttttttgcataccatttgttttcatgtttagtcatgcatgatccttgcattntcctctngcaaacanaagcaaaaaaggaagcatgaaaattcatgctgcattcttagttgcatatgttcggtaccatgaaccaaccatgttgggatcataaaccta

SEQ ID NO: 12737 - DNA, 320 bp, Glycine max
  unsure at all n locations
cggttatctccttcttcactacatcaagaatcaccgggttgtgtcttctctgtggctatcttactggtttagctccatcctctaaatttattcgatgcatacatttggatgggctaatgccaggaatgtccaccagggtccagcctatagccttcttatgattcttgagaatagacaacaacttctcctcttgctcatcagcaagggaggcaaatataatcactggaaaagttctgctatcatccacataagcgtattttaaatntgatggcagaggcttcaattctggtgtggcccgctggatagtggtagaaagagat

SEQ ID NO: 12738 - DNA, 363 bp, Glycine max
  unsure at all n locations
agcttgaattatttgttgtttaatttgcctgttccattangcttttaatgtctctagaggttacttcctcgttgacatcttttgtcttgaatggaattgccatgacaggtatgttgttactgtctttgatatttggtagttgatattgtgttgtgggaggtaattccgactggattaactcaccatccttcacttgccaatttgttatgacatttgttgttggattacctatgatgtcttgtttccaagggtagtctatatcctttctgatggcataagcatgacaccaatcaaagaaaaggacattaattntgactctttcgacaaattcgtagaacttgtcttggatctgttttctgtttg

SEQ ID NO: 12739 - DNA, 477 bp, Glycine max
  unsure at all n locations
ntagattctanaatgaatcanatcattattgttctaacttttatttgtgaaatgttgtcaaaatgttaaacaactaagaagcaaattaaagcagacctcacattttcaaaaaaaagattcgaaagaattgaaagttttgaagaggcaatatgcggcactaccaaaacaagaaaaatgtagcatttaccagcagtaattcttattagctnttgtttatttgatttgggtaatatagatagctaccaagataagcagaattttattacaaaagatttatctattgaagttctatttatttttctttacataattatgcatcatctttcttgtttttcgtactttagaatttcataccgtatagcagtatttttatgagaaaacatattaacatctgaattgttaaacattaaaaacatgtacacatgtatgaactntntgcgtgaaagtattttgatatttgaattgctaagatatata

SEQ ID NO: 12740 - DNA, 424 bp, Glycine max
agctttagccttaggttgtttcatgttgctgctccccttatctttaacagtaacaagcacatttccattcacaggtttagcgacatcaacatcatcacttgagccctcactttcaatgtttccattatccagtaatatcatgcctcttttatttggacattgagaagcaatatgaccaactccttgatacctgaaacatttgatatcatgggatctagaagatgaattaatttccattttacctttaggtgcagcacatgaatttttggacttagcttcatcttttgactttgtcatagaatttctgttttgccaatttgacttccatgaataagtggaatcaaatttggaagtactcttagctatcaattgcctctccacttgaatagatttatgcagcaagtcctctatctccacataatga

SEQ ID NO: 12741 - DNA, 475 bp, Glycine max
  unsure at all n locations
tgtagactggctagacatgatacatgtcagggtttggtttgtttcaaggataaaatttatgccccacattatttccatgacacaaatgcaaaaatgatgatttggaaattttatgcaaaactggtcatgcatgcacctatgtggacgctcaagtgtcaaatttttatggtcatgtgatgctagggctcaagattcatttcctctattttaaatcaacccaatgtttccaaaatatgttcttttatcaatttgtgcattcatccgagtccatttcgggcgtccggagaaatttcacagcattcacccttcaggtgtagacacattttccaaaaattggttatgatcaatgaattcttttcaaagaaaagttggaaatcatctcttttcaaaagcatgtcggttnttcagctagacaacttattattctttcntctctcttttttttatcattatcatgtggttatttctttctctt

SEQ ID NO: 12742 - DNA, 389 bp, Glycine max
  unsure at all n locations
agcttatttttatatttatatagcttgataaaatagcttcactttctaccacacattaaatttaacaaccttctggttcagggtttcaacttttcacctcattaaaactcgtcctttttgcttttctcctacttgatagatttaatcctatagattgngattagttgcttggtttttaatttcttccaaaacctttaaaattctggattgatgtctaggagacaaccattttagttatttcaagggcaacttatattgtacatgccaatatcagtcttcttacatccagggtcttaagtagcacattatagtgctgttatagtggctttacggcccatggctgctgccatagcatagcangtaagtgtattggcccctgcagacagtat

SEQ ID NO: 12743 - DNA, 472 bp, Glycine max
  unsure at all n locations
gcttcttcaggttgtgttcccacgaccaaccaaattgtantttttagtcgtaagggatagggactaatttatgtagccaaaagatttactttttaatatatacagagaataagattacatcaaaacttttctgcaaaaaatccacataaaattcagcaaaactgcacatgaattatcttggtttttagccatttcataaacaaaatgtgctagcaaaggtcatctaccaagctttgggtgtgtaaagactaaagaaaatagatctatttcattacttaattcagagttcccaaacaatttcaagcctcagcaataatcaagtaatcaactataactagtatacatagtttaaaatatgcggccatgtgataccataattgtgtcacatacttatccactttggatacttagtatctaatactctntaaatactnttaattgcttctttgtttcctagctcctaattaagtgt

SEQ ID NO: 12744 - DNA, 388 bp, Glycine max
  unsure at all n locations
tcaagctntgatattctcccacctaatggactagtcttctcaagtagtttattctactcaatgtgagacttctaacagtatattacttttctagtgtataatttacaataacatgcatgtaagaagttttattcatgctcaaataaaaagtagaaaactaaaacttcttggatgtggtatcatcagccaagaaataaagtcttttaaagtcttgttttttatggaaactattatgcaactcaaatatgaagtaatctatagctgttatggtcttccttgcataatctgcctcccacagttgttattcaagagccagacaatgtactcattttctgtaaattcttcacgtggtgattggatttggtctttctgactgtcgaccttattc

SEQ ID NO: 12745 - DNA, 361 bp, Glycine max
  unsure at all n locations
taagtgggagaaagatcttatattggacctaaagtcttcttctttcattattccttcttttcaaagctagtttattgagtttggataggtaagagaagctctactttgattgaattctttgtttaagtgggtgctacttgaaatgcttgttttgtgtgtgcaatgatttgtatgtatggtatatgatgtgtaatttaaattgggttaatttagaagtcatttgacgtcttaagaaaattgaagttatgcaaatgtttacacttaagccaagagtgattntcgcttaaacgaacatgtctattaagaaatatggttgttggattcaagcttaacgtagatgaatataggcttaacatgggtg

SEQ ID NO: 12746 - DNA, 414 bp, Glycine max
  unsure at all n locations
agctttaggatcaaactctcttctctctttttctctcaactgttcttcattcttcttcctctcttcaattttgttcttccttcttcttgcacaaatttcatcgctcttccaatggtgatgatcatggaaggctaaacacttaatcaatccaaggatccattccaagcaaggctaaatttgagttctggtttagtatttcaattttgtgtgaatgttcatcttgttcttcaatcctatttttgattttaatgattatgaatatgcttangattgaaaatgaattangctatggattcatttcctaatttcaaaatctaatcacagatngtttggatgatattccaacctaaattgcaatctcaatgaatntaaggatcaatttgattaaactatttctaatgacattgactaaac

SEQ ID NO: 12747 - DNA, 462 bp, Glycine max
  unsure at all n locations
ntagggttgaggatctatataacaacttcaaagttntagtataaggagactgttaatagaggagagaatattctagggttttgcattttcagtttcgtgttactgttcacgtagcaatcataatttcattttttgcttcaaattgcaatttcgttttctacttctgcctttgaattcgttttcatttctgctgattaatggaaggctgagtttccagtgttgttttctcttgaggatcaagcacaactctctttgagggtttgctattactattgaattctgatcagtttttccccttcaccaattgctctgtatttgttgctgttaattcatgcatgcttaatgcttcattaattgtctctgcgcttaatttacgttcatgcttaatgatcagtttcgttcatgcttaatggacatgtgagacggattaattggtggatgtgttacttactcacataatga

SEQ ID NO: 12748 - DNA, 418 bp, Glycine max
  unsure at all n locations
agctnttctaatgggtaaaaggctcacattcactttcttctacatcatattcaaacttgtccaaataaataataaagtcatctcgactcanagaaagtcatataagtctcatacaattaatatagaacctatatcctaatgtcacatcctatcagagcgtggtgttcccgtgtcctctagcatgaggttcttcatagtcatccacctattcatctgctcccccgaacacaagttcaagatcatcacaggatccaaacacaacaacacacagggagtgagttatcacattcctagctaatagagaaacaagacaattaaatatacatattatataaatgagataccactngcttaaacatagctcacgtaacttcaccacttcgtcattcanaattcactgttcaattatcaatcacat

SEQ ID NO: 12749 - DNA, 460 bp, Glycine max
  unsure at all n locations
tcacctgcaactccaacccgctttatatcctaacaacaggttatctttatgtttaactntaatgtttgtccgacccataaaatatgaattatgtacaacaaaaatgttaagaatcttttatagtgttcaccattgaaaatgctcttaaaagtgaacatatttagcatatataattatgttaccaaaatataaattttttacaaattaaaggtttactcataattctttaagacaattgtgggaagggttttgtcatgcttttctcccttgcaaatccaatacatataagatctctttcgatataaagtagaagtgtttttgagagtttttttaataaaataatttatatttataatagagaaactttcaaaagcatgtatgaattgtatccaaacaaattcctaatgggttctagagtgcacaaggttgtaatgtcaagcacggtacacaagttttctta

SEQ ID NO: 12750 - DNA, 415 bp, Glycine max
  unsure at all n locations
agctntgctgatttggtcttcgccggcaaaaggatcgaaacgggtctgaaaagaggcaaatttgatcatcctgctttgatgaatgagaaaactggggcaaatgaagaggatgagaatgaggaaggaaaccatgttgaggttgtcattcctacatggccaaacttcgcaccagcccaacaatgtcattactcagccaatattagttgttctcattacccaccacctagtcacccacaaaggtcatccctatatcaaccacaaagcctgctcgccgcacatccggtgcctaaacaccacctttagcccaaaccaaaaatgaattttgcagcaaatagcctgtaggattcaccccanattccggtgtcatatgctaacttgctcccatatctactcgataattcaatggttgctataa

SEQ ID NO: 12751 - DNA, 451 bp, Glycine max
  unsure at all n locations
tctccgaagggcatggttatttccagtttcctgaaaatatctaagaatctctccaaatggtggtccttctccttcttggaaggtaccacaggatatggtacttccacaccttcattcacagctntttctttnttcttctctctagcctgttcacttctactcctctcgtcattcttatttttttcattntttttcaatttttttattttctttttctttttctacttctttntctttntctttttcttggtcattaaattctgttttcttgaccattatttgtttttctttttcttgattactttcacatatcacataatctttcttttcatcagtgcctttcttttcagcagctntcttcttgggcacaacactntcctcatcctccgcctccacaaacctcttactccttgtcatcacagctntgcatttctccttgggaattttttct

SEQ ID NO: 12752 - DNA, 372 bp, Glycine max
  unsure at all n locations
agcttgtataaagtttccacttccccgtgttaccggcaaagagatatatttagttagcggtcaaccacattgcaattataagtgtatttttggaagaagaaaaaatgtttttttaaataaaaatattatttctcatacacgagtgagaaataacacaagttcttgttcccctttttatttatattgcgtgactgtgacttagccgcacatgcaacagataaggaagagcaacgtcatgccttcacttttcaatactgcttggattcagaaaaaaaaaagagtgcanatattcctgttttggagggagtggaggtttcacctgattagcagtttaggttcggcgaaacagccagaaatgaaacacagtgaaag

SEQ ID NO: 12753 - DNA, 417 bp, Glycine max
  unsure at all n locations
tgtctcttgtgatgtgaagacacataggaagtccattgngtatttgtaaacattccagcataatccattgactctagatcactttcagaatagtctacttgtattgcatttaaatggtttgcagcctccaagctccctgcactagctgagcttctcaattgagagggtgcatcagacgatgtgcatgttagcattgcatgccacctgcttgcaacggaaacaatattttgagctctgtgagaaattcttgtcgcagcatgcagacaaataatgatgcccaccacctgaacaagtgtggatacctaaaagaaacaacagtacaaaaagaaatggtgaaatgaaaggaattagttccttcaatctaaatgcgtattaatactttgaacataaagagttggacttacagcanaatctcca

SEQ ID NO: 12754 - DNA, 348 bp, Glycine max
  unsure at all n locations
agcttagccaactaatccaaacttttgtttccatataagaagtgcataaggatgaacatgagggactccttcattgatgagtaacaatgcattttgagaatccgactcaagatgatggaagtgtagccagtatcatacgcgatgcaaagcctatgataaatagcaaacaatttttcattcaaattaatatttaatgtanatccacgattatcattactagttaatcactattggtgatgctatatgagttataagattaacgtgatgatggttgaaggaagaaagagacaaaaattgtcggttaaatacattttttaactaaactatcaattaacaactatattaata

SEQ ID NO: 12755 - DNA, 458 bp, Glycine max
  unsure at all n locations
tctcttttccaccacatgtcgtcctcaaaccgatggtcaatctgggcataagaatgctcaggctaaagttgagtatgagaaaagattgcatgagcaagtgaagatacaaagaagaatgaaagttatgccaagcaagccaacaagaacaagaaaaaattggtacttgaaccaggcgatgattatgaacatttgagggcaaatgttttccaagaaggagggaatgatgaaaatcctaaaatggcacaaatacagggacctatgaccacgagtaggaccaaacagtcagtgaatataccctccaataattggtatcagacatacttaacaaggcccaaatggganaagatgaaggcctagaggcaaagacactaccaagaatattaattggtgctaaagacccaaactaatntgaaagcccatgtcaaatatgttcttttttaattatatttttttcattt

SEQ ID NO: 12756 - DNA, 421 bp, Glycine max
  unsure at all n locations
agctntctcccaagtcctaaatgacatttcaagctagtattaactcactntaacctccatttaccacagaattcagacttaaccttccaactctcaaagcctcactctttntccactcataacaccacattctcactntccaaccctaggttaactctacatttcatctctaacagttttccatgggcaatttcagcatacaaacatcataaacatcatcacaaaaccctaaaacagaatgggtatgtctaactcatccaaacatggcaatttcaacaagctttcaacaagtttcttcacaaataactatcatgaagcagaaaactagcaagactacccatcatatctnccanagccccatacnccacgaaattaagagagaaagaagtncacccaaacctgaattttcgaagtcccactc

SEQ ID NO: 12757 - DNA, 461 bp, Glycine max
  unsure at all n locations
tcgattacacaagtcttgtaatcgattaccagaggagattntcagaaaataatttccaagagtcacatctattcaaatggtttatgaatggccatcaaaggtgacttggaaacacgaatttaaagagagttttcattgcccaaaaagttttatcctctcaaaagattaagagtttttctgaactgaaatgtcttatcctctcaaaaagattccttggtcaaccacttgcatattcaataaggaattttgattgatcttcattgtacaatctatcttttttaagagagatttcttcttctcttcttcttacttctgaaaagggattaagagactgagagtctcttattgtagaggattcttgaacacaagggaagggttgtccctgtcgtggtcagactttgtaaaagntgttttacaaagagagtggancatctcaagtgggtttcttgaggactggacgt

SEQ ID NO: 12758 - DNA, 416 bp, Glycine max
  unsure at all n locations
agcttgtatatgaacaaaattataatcggaagctngaagttaaaacacaagttgaaccaaaatacacctagagcatattcgtgatagatagattatgtggggtatttcagttaaattttaatttttttattagttgaaaattttatttaattgtttaataaataaattctttttaataattcttaatatgttttagaatgttaattcaactaacatttttttattagctctttatattttcttcactcttatcttttatgtatttattcatttttcttattactttgtttaaatacatcataattttattattttacgtgtttcaactactttaaccgctagtgtaattaaacacttttaattttataagctagcgttataacattgccgttattaacttttaagtaccacttgac

SEQ ID NO: 12759 - DNA, 445 bp, Glycine max
  unsure at all n locations
acaatttattgtgaattttgttaagtacatgatgtatagtatanttttattttgtattntcaaaacaaaaattaaatacataactaanatatgattctactgtgatctttgttgaaacataatcatattntggttataattaaaaagagtaataaaaaagataatgtgtgtcgttattaatataatttatatcaaaattaatttaactagaaaaaataatttaattctacagctaattttttgtgaaaaaatatctaacgggaagacgttttcatggtataaaaaaagtgcaaaaaaactacacaatgaanatttgtttccattttggatttatacacagaaacatgtttttgcaaaatatatttcctcatgtatttttttggacctccttcttatacaacgganacatgtattcattgttatgtttgagactgacnaaatatac

SEQ ID NO: 12760 - DNA, 405 bp, Glycine max
agcttttactcttttctcttgcatacttgttacataattgtgggacattgcttttcttgtcagttgtaacattgacatatatatatatataaaagatgtaacaagttaggcttttatcaaccctatgattggaagaatagttgtgcatcatattatattatatctactacttccactttatccttactagttatgactactaatagtaaacgtgatattgccaaattcaactgatataagcattgctcagatctgagtaacttttcatccctgcgttcagtctgagcccaataatgaatcaaatatgagagcacattgaaattcgactgaatatgaagcatccgtattcggtgcagtggtttacagagactgaaatgccacgaatagctggatattttattccac

SEQ ID NO: 12761 - DNA, 458 bp, Glycine max
atgccttgccttgtctttgcgaatcatctatcttatctaataacaagaatattacaattgtcactgcgtatgttgtccttttcggaaaaatcatgacctgatgcatggttgatgccgtaaatactatgcttaacataaacttatgtgcaaactttctagctaagaagggtgtgtctcaatatgttaatttcatttcttgaaactctctacacagagtgtgagattgaggcttgcggtcattattgttggtaacttttcggggttgttgcagttcctctaaatggcatagctaatactactattttctagtaggaactgctaattcatgcttattatggaaaacaattaaacagtactactatgaatctatgatgtagtggagaccttaagaactaagttgcggttcttgacgttgctgaatgtcataaattcagtttataatgatatatgagatgtta

SEQ ID NO: 12762 - DNA, 401 bp, Glycine max
agctatgtgttcgatggttctataacatctatcccccacatggaaaaaggccaaggtgcagacataacattcagaggatgtggcggaacattgacattgtccgcgtatgcttgacatttatgacatttgcttacatgggcacaacaatcgctttccatagtgagccagtaataaccggctctaaggatcttcctggccatagcatgcccattggcatgtgtaccaaatgaacccccgtggattacctcaatcatgtagttcacctttttggcatctacgcattgtacgacggtcatgtcggggttccgtttgtaaacgatggtaccactcacatagaccgcctggttcttacgtaataacttgaaaatgggctcacatgtaggggtgagtagtgagataaa

SEQ ID NO: 12763 - DNA, 478 bp, Glycine max
  unsure at all n locations
nttcanatgggtaaaaggctcacattcactttcttctacattatattcaaacttgtccaaataaataataaagtcatctcgactcaaagaaagtcatataagtctcatacaattaatatagaacctatatcctaatgtcacatcctatcagagcatggtgttcacgtgtcctctagcatgaggttcttcatagtcatccacctattcatctgctcccccgaacacaaagttcaagatcatcacaggatccaaacacaaacagcaaactgggagtgagttatcacattgctaactactagagagaaacaacacaacatatagtagccaaatacaatttacttagcatatctcacattatttcatcactttgtcattcatcaatcacacttttcatccatcaatcacacctttcaatcatcaatcattatacacaggaatcacacactccgatcaagacataataacacatcaatttcat

SEQ ID NO: 12764 - DNA, 377 bp, Glycine max
  unsure at all n locations
agcttgtaataagctttaaatgccttcatgtcatctgtaacctttacaagttcaacagttggcttctccctcacaataggcaagaaagcaccctggacttgtgttgcatttgcaagctcctcgggagtagaatcaccagcctacaataaaacaacagtttcacatgacacacaaacatctttcatttcgaccttcatcagaaatgaaaatgcctaccacaatcaaaatagataatggaacatctgaattaccttaaccttgtgtgcccgtcttgggaacacaaccaatttggccttgtatgttttcagcctctgcacattagctggcagactntccaaagaacggttcttgcgacgatgatcaacagcaatacctat

SEQ ID NO: 12765 - DNA, 479 bp, Glycine max
  unsure at all n locations
atgaaacgtatagattctaaggtttttaataatattacaatatttggatgcattagacttgtactgtcctctggacaaatggaattagtaatatatagcatgagtgcatgaggtgacagttttgatatataaataataaaacctaaagggtacatcatataaaacaaaacaacaaaaaagcccccctcanagtggacacatgcatgccaaatatatatatatatatatatatatatatatatatatatatatatatatatatatatatatatatatatatatatatatataattgtcacatagatattagttaatattatagacatgaatctatctaataatctctccgtanagttcagaagacagatggtanagaagagatacaactaacattttatttntactgtctgcacataagtaacagagaacaattgtatattataagttaacaattatgtttttctctatataaccacaag

SEQ ID NO: 12766 - DNA, 644 bp, Glycine max
  unsure at all n locations
cacaaccccaagcaaccacattcgcgacgcgagacaacgtgaaacacnacaaccgacacaaacacattgaacatgtgaaccgtgaaaccacgcgaacacgggtacgtccagaggagacttgagcgcagacctgcttgcatgtcaaactactattcaaagcgaccccaacgagcgagaacatcacgcgagacacctcacgcgcaaccgaacacatacactacaccagacggccgcaaccaaccggacacactagcgcaaacagacgcgtcaggtcaatcaacacaatggcacatcctacgaagcatggcaagggagccaaccgtgcgtcccgtacacattgcaccgatagctcacagtncgagcagtagcacacgctcgtgagcacagtcgtacacgaagtctctaggaacgtgagagggggcctcctaacatccaacaagcccgcggacgcagaanacaaagcacatgagcgngcaccgccgcacccaacacagcggacactccacacagaaataccgaggcactcaaccgcacactcacaaaccaacccatacgccgncatccacaaggatcgacgaacgacaagcagacggaaccgcccagtcagcgagacaataacacgagatcctaagcgacgcaaaccg

SEQ ID NO: 12767 - DNA, 391 bp, Glycine max
  unsure at all n locations
agcttcttatatcagttntgatctattntgtagtttccatttaatctaatcatatatatttgtcaatttatgatttatacacttgagtcttggaatttatctgctgctgtaacatgtggtcatttttgttcatgtctttttcagatttttgagaaatatgttaagaattgggttgcaatttgtgcgccattccagggtaagtaattcttttctatatttataagaagtatggaattataattaagggtatttgatgaatgattcttttagcatttcaatgatgggtctatntaattttttttccatgtntaatatattggaagaacgcattgtcatcttttcttcataggctaaagtagttgatggacaaaaaaatgtgcaaaagcatgat

SEQ ID NO: 12768 - DNA, 465 bp, Glycine max
  unsure at all n locations
tcaagttggcaacaacaatccattaagtcaccanaatacacttattagaacatatttcanaataatcaagttccctattctttctatgatagtatgtatgatgcaatatgaaactggcttttattctcttctagaagggtacattactccaaatcaaatctcatttgtacagcatcacttcaatcacatgtctctttattctcttgttaagttacagacagaatggagaanattaagagactctttctttagtcagaaatgggggttaccaagagaaattatcttggtaattgggataaattntgcaagcctaaaatggcagggcctacatcgcctggctctcttggaantaatttagttggatcttactagttataagtgaatattgatcacgatcgcatgctnttattaattttatgattattgctttaatttattttggtacattatcaccatttaatatct

SEQ ID NO: 12769 - DNA, 385 bp, Glycine max
  unsure at all n locations
tagcttgtgtcagataatgctgggatggattctcgacatgttagatggctgctacacgaagaagtctgttctgtgtagaacatcggtgatgtgctggtgatcatgattagtgaggtccttactgagctgcgtccactgcctgngtctgagtccaagctgcagctagatgagctcttcattgggctttaggcctctatccgaagtgtcatcatgcggatctgtactgaattcattgtcctgacttgcttggtagacgatcagggcttgtattggaggcctttcatccacgctcatgacttgagtgccttcatccacagtgggatgaggcttggctggctccctgttgggacgacagggtgctacctctatgctttctgcatagcgt

SEQ ID NO: 12770 - DNA, 429 bp, Glycine max
  unsure at all n locations
tctaaactntatacaagaatgaagctctgataccacttgttatacaagtggtctcagatatcttaagaaggggggttgaattaagatattacaaactatttccccaattaaaattctatttcactttctattcaagttacaaattcccttaacaatgaacttcttaaatattgattcaaatagatcaatctgaatataaatataaaacaataataaataaaagagtttaagggaagagaaagtgcaaactcggatttatactggttcggccacacccttgtgcctacgtccagtccccaagcaacccgcttgagagttccactatcttgtaaaatccttttacaagttctgaacacacaagaacaatccttcctttgtgttcagaattcttttacaacaagagaccctcggtctcttaatcccttagag

SEQ ID NO: 12771 - DNA, 414 bp, Glycine max
agcttgattaacattctgtttcaacccatctgatggatctccatccctattcctatctgctacaaatttaaaaaattagtcaaacttgtgcacaaattgatgggccaatattgtgacattcgtgtcagatacataacttacatgcatttctctctattttaatcaatttaattggttacttcttaattcctattgttacttccttcggcggtcgtagattattgtggtcttaattaatctttatatgacatgtaattgttattaactattttcaaaatttacaagcttaaatacatcatttaaaaattggccaagaccaagaatacatgctatgggatgtctgcatgtcaagaccatgaatacaatactgaacttaaccatctctttatactcttctaagatatttctctatgc

SEQ ID NO: 12772 - DNA, 444 bp, Glycine max
  unsure at all n locations
gtgtacatgtaaaagcaaattgaagaacttcacattgcatatcatgctaattctgacttacctattttcgtataggtgttagatagcttcgatctatacttggaatgaaaatagcaagcaatctgcaggtagtcatatatatcttgttttaaaataagcatagtcaaagaaaacaaacttgaaggtgtattcagttgcattagaagtagatcataaaccaacatgttggtttaagtggaactgaacttaatctcctttaagtaaggtctcaagttcgagttttgtaaatgaaaaaaacatagttaggaagggagatcccactanaggtaacaagtcatgtttctagcagagattaatcatcaataaaattgacggatactctatactaatgtcatgacgacaaacaaaaataaaataaaacagatcataaactatataacttac

SEQ ID NO: 12773 - DNA, 340 bp, Glycine max
  unsure at all n locations
agcttagctcaagacccactaaaacctattttatgaataagcctattttaagttttttttcaataacactaatccaccaaggaatatgatttgtttcagttttgatatagaccatggacccaaagcagttgagtatatccagatatgctgtattatttcccatcacttggtttcacaatgcctttctgcttgttacacctccagttnttatgcagccaanattcaacaaaacatcaattctttaatatttaagcgcaaataactgttacataattatttttanagacaatgttgccttattctctattatcagaatacaattatttagcagttatcactg

SEQ ID NO: 12774 - DNA, 449 bp, Glycine max
  unsure at all n locations
tattaaactcaatannaaaggcaacgtataattcatgcggtaaatactttttttcttttgtaccaaaagcaaacaaaagtaataatttgatataatgaaatagtacattgcctaatgatgtctcgaccatctgagaggattgttccacagactgcaagaacctcaaaactcgcttccaatttcctccacatctatcatacagctccctctgagaattcaaacccatccttgcaaaggtaacatgggaggcacacaattgaaatgcagcaaagtcaaccaaggacttgaacttgaaagggtgcaaaccatgactaccaccaaaagttttggaagtcaattctaaacanacaaggtccattgcactgagcctgcccgagcacagaatttctaataccaaatgtgatggcaattcctcaatggaaaaatggtctgcaacggtctccatcctc

SEQ ID NO: 12775 - DNA, 586 bp, Glycine max
  unsure at all n locations
cccacagccaaggcgatcggtgaaccggacggcaaagcgaatgcaaacacacacccaaaccaaaccacgacccgttgatccantgtagaaccntnntgaanaccntcggcacacncaagggacgaancagacgcggaaccgcgagagccacgagagacgttcagcaggcatgtaagcccagcaatagaccagagcagcaaggaggcataggaaggcaacaacagcacccgcagtgcacacacgcgataacagcacgacatgcgagcattgaacatagcgacacccgacagacaggaaagccagactatacaccgcaagaacaatcccccgaaagacacaaccaagacgagccacatacaggagaaaacccacgcaaggcacgaagatcaaccgcgcgagagacaacagacgacagggtgacaaacgaaccaagctaccacaccaagcgcaaaaagaaaggcgattacgcccagggagccaaccaccgaaagcaacaaagcatacacgtgatacagctgggacgaggcgcaaaaaaaggagagtcatagcctgaaaaccaaaccacccaccatgaacgaagcaaccg

SEQ ID NO: 12776 - DNA, 329 bp, Glycine max
  unsure at all n locations
tggtacaataatgattgatacgaaaccgacattgttcgaaattatgatgaaagccacaaaaacacgaattgaatcaatagtctcggatctggaaacttacctgctgaggaacgaagaacggatgaagaacagtcattaacggaagacaaccttcacggattcgcttacgataacatctcagaagcgttactgaagctcctcagcttggattttcttcacggaaactatttttttcacctccaacagttgaaatgcatagccacggggatcatggacccttagaacaggccccttttttgcttcttatanagaaaaagtgtgaggaggtt

SEQ ID NO: 12777 - DNA, 275 bp, Glycine max
cgcgttctagcttgttttaagtataacaatataggagattgttcttggttgattgataaagacttacattttaatcatgggttaacgagttatacaactgatggagatatattacacttagttagggatgcttttgaaaatgagaacgagataaatgtttattctcatcatgaagtcaatatccaattttaaaagaagtcccacagatgttgtacttggaatgtgattcaattccagatactgttgagaatgaggataacttatatgatgtacct

SEQ ID NO: 12778 - DNA, 452 bp, Glycine max
gtacatatattaaaggcattcgctggttaatcctgctatagtactctcgcaatgcgattcacagtttcaggaacatattcaagtacaagattcaagtaaacttcttctttgtcagtcgttgaaaagaaacaatgccttagggcaacaatatttggatgatccagcatttgcataatttgtaactctctattcttgtatcgcttgtcctggagaactttcttgatggccacaatttctcctgtttctctacattttgcctaataaaagcattgataaaacgaagaaggtatcatcagtatgtcatacatcaacagcatggtgtttagaagagatatgaaaagcaaactcacctgaaaaacaacaccaaaagagcctgtccccactacatgctctgcaatataactaacattctgtcaactcacaaataaaaattatgtcagaggaagtattag

SEQ ID NO: 12779 - DNA, 419 bp, Glycine max
  unsure at all n locations
agctntcttcatttgtcgatatggatgataatgtttgagaaatcttcggtgccttgtgtatactatcttctttccatgttttagttggaagaagctcatatttttctcacatataggacatgtatgatggcctttgacactataaccacttaaatttccatatgttggatagtcattaagggtgcaaaaaaccattgcacgcaacctaaaggtctgctgcagattcccatgccacacatctaccccatcttcccacaattntgtcaagtcttcgatcaacgaaatcaaatagacctcaatatcattccctggctgtcttggagccactatcatcatgcanagcattatgtacttttgcttcatgcacaatcaaggagggaagttgtaaatcattagcanaacagactatgaactgtgat

SEQ ID NO: 12780 - DNA, 474 bp, Glycine max
atctacatagagtagaagatagatcattgatccatcctccaccttgttgcgataacacaacaatcatagagacttctctagaatccttggctggtgataaagctatcaaacctcatgtaccattgccttggagattgtttcaaaccatacaaggacctttgcagctgacaaacatacctttcttttacttgaacttcaaacccttcaggctgtttcattagaatattttcttccaatcttccatggagaaaagcagtcttgacatcaagttgttcaagttccagatcttggtttgccactatagcaagcagaaccctgatggatgtatgcctaaccataagagataaaatttcgttgaaatctattccttctttctagctgaatcccttggcaactaacctagccttgtatcttatcccttccttttctaaaagaccacgtttcctcttgaatatccacttgcaacctaccaca

SEQ ID NO: 12781 - DNA, 408 bp, Glycine max
  unsure at all n locations
cataacctatgaaaacacatttgatagcccgaggatctaactttccccaatggggaccatgaacatgaacaaagacagaacatccaaagacatgactctgaagattggtcataatgggaacagacagataaaatgtggtcatgagttgagtaggactaacaccatttaaaacacaagaagttaacctatttatcaagtaagtagcggttagaacaactttccccagtaagatttaggaatagacatttggaagagtaaaactctagcaacctcaaagagatgtcgatntttcctttctgtaacccaattttgttgaggggtgtccacacaagttaactcatgaacaataccattatctttgaggaaattggaaagggttttattcacatactctctcccattattagn

SEQ ID NO: 12782 - DNA, 429 bp, Glycine max
  unsure at all n locations
agcttctatggagactgaatctttgagcttcaatgaggtccttcaatgatgatttttcaccatggagatgcagcagaagataaaggaaaagagatgagaggaggcgatatccattaagaaataagccatggaagaaggagtttcgtcaccaagaatgtgccttggataaaaagcttggagagaatgtttcaatggaggaaaataaagagagagagagagagagaaaaagagagaaggggagcacgaaattgaaggaggaaaagggggaaagaagttgaactttgagttgtgtctcacatgactctcattcatcanagttacaacaagtgttacacatgtttttatttataagcctatgtagtttcttgaaaaacttccttgagtaagttctttgancagctagagtntagttataaacacccttctaat

SEQ ID NO: 12783 - DNA, 464 bp, Glycine max
ctctcttccatggcttattccttaatggatggtgcctcctctcacctcttttcctttgtcttcttctgcatctccatggtggaaaatcaccattaaaggaccccattgaagctcaaagatccagcctccatagaatccctctttgtaaacaaccaaaatttctcaattgattatttttccttgtttgttgattgttgcaattctcttagtgtagtactagttgaatgaaatagtgtgttaatctctcctctccatttctctagtttttattttcgacttgaatcctttacgaaccctattctacaagttgttgaactatattccaaatttctaccttgtgcaactatggaacataaaattattaaagggattttagaattgttaatgcattctgtgtcaatttatgattgcaatttgagtgtttaaccatatagcctgctaccgacgcaagatagacggacaca

SEQ ID NO: 12784 - DNA, 417 bp, Glycine max
  unsure at all n locations
agcttgacatgctgccattttatcaacaatatattctgcttcacatgttgacaaagcaactacactctgattcattgagcaccaagagattagtgatgttccagaattgaaaacatacccagcagtgcttttcctatcatccttatcaccacaccaatctgaatcactataaccaaacacttctccttttatattcttctgactgtaaggatataaaatgccaagatccaatgttcctttcacatacctcagaatcctctntgctgccaagaagtgaggtgcctttggtttctccataaacctacttatcaacccaacacaatatgcaatatcaggtctagtgttacatacgtatctcaatgagcctacaatttgcttgtacaaggtaggatcaacttctttctcatccccatctat

SEQ ID NO: 12785 - DNA, 472 bp, Glycine max
  unsure at all n locations
ntacattcaaatgcaaggataaaaagacttgattgaatggacctctcatggtctcaagtgtgtttacaactcaataatcatataaccttcagataaactttgcttaagaaacaaaaactgaggtttgtaagttgtaaaagttcattcaaacatttattggatctgagaacacaaggtgggtatatatagagaaaatagttataaccatctgtaattgattaaattggcaatgtaattgattattacgtgaaagtaatcaattatattttccaattaatcgattaaagtgttcttccccaattctagaaaatataattgattattttcacataataattgattacattgccaatttaattgattaaagtgttcttccccaattntggaaaacattcaagaacaatgtaattggttaaagttttcttaatcacttctaggaacactttcaagaatgatgtaatcaattactata

SEQ ID NO: 12786 - DNA, 403 bp, Glycine max
agcttcaccggatgacgcttatcgaacatttcctaaccgacgtcatgcaaatttcgttcacggattgaattgaaaactcgttaggcgacatctgtcgtgaagtagcgaccgatatttttcaaccgacattgcacaattcttttgataaaaactagctgggcgataatggtctttttacggcagagtaagttttcttgttttggtgttgcataaaaaagctacaatgtacttcggctaggtttttcgtgcgagttcaaccgacattttgtttcggccaggataacattatcccacctctgcaaaaaaatatttgctaaccgtgtgcatgcatatgtcattcaacgattgaatagaatactcaatagccgacaacggtcgtgaaatagtcccgactgatattttt

SEQ ID NO: 12787 - DNA, 446 bp, Glycine max
  unsure at all n locations
ntgatgcaacatttggagaggttaatgaaacaacgagatgatgcgctccatgagatgttggatcttatggagaatagagatcataatgaagaagaaaggaggagaagagggaatgatggtgttcctagacaaaaccgaattgatggtattaaactcaacattcctccatttaaaggaaagaatgatccggaggcctacttggagtgggagatgaaaatagagcatgttttctcatgcaacaactatgaggaggaccaaaaggtgaagcttgccgccacggagttttccgactatgctcttgtgtggtggaacaagctacaaaaggagagagcaagaaatgaagagccaatggttgatacatggacggagatganaaagatcatgaggaagcggtatgtgccggctagttactcaagggacttganattcaagcttcanaaactaac

SEQ ID NO: 12788 - DNA, 417 bp, Glycine max
  unsure at all n locations
agctntctgttctttaaggtaaaggcaagttaaaatgggctacaaaacaaacactttcaatgaatggcaagaaaatcaaatgcttgtttgactacttcaaatagcaaacccctttggtaagtcaagggatgcctgagttgtaaatcccttcaccctttgattctcacggataaaaaaaaaatcctttggtaactntggtcgatttgttttatctaattatctctctttgttagtagtggtgcttgttcagagttacacttgaagctaaagtcatgcttaacaagacgtgcgacccaacaaaaagatactgctatatctgataagtttatattntgtattaattnggtaatggttaccgtccaatggaagttatttcgtgcgaaaaataatccagaaagggacaagagcatcgctacg

SEQ ID NO: 12789 - DNA, 466 bp, Glycine max
  unsure at all n locations
taagtaaatntagtactaataaactttactggcatggccaatttaacccncaacaagagctaggggtctatgggaaaatgctacaaaaagaagtgaatccagtatgttttatttctagaatctctggcttgaactaagcaaaattcattaaaattccagaaaggagtaagcacataaataatttttagaaaggaacctacaaactcaactagctctaatcaaggaaacatgaaaccgcactatggggatattttaagaaagaatttcctgttaagaaatttgcacactcaagtcaaagcaatgtcaaacttgtaaaagggtagtggagctgatacctggaagaagtttanaaaacctcatccttaaaccaattcctatatggnagttcacaaagccttacagacatggtgattaanaaaactgcctttccactttatatagtagtttctcatcanacatttacaat

SEQ ID NO: 12790 - DNA, 411 bp, Glycine max
  unsure at all n locations
agctntgtgtatcacactgctttcgatggtgttgcattgggaattgtaagctgtttctaccctttaacatcatctatacttgtttcatttttattttctttcattatgaataaatatacacaagattaaataatttcttcttggtataaggttagacatattgagtgaaaacaggattttggaatataacactcaattagagtcatagacctaaagatgtccttggctgttttagttttgtaattgaccagctctagacattctagtactggcagcaccagatcagaatttaaaatctgagtgctattggggctatatctgatcgggcttgaatgttgacttcactgagttggatttgtattcactttaactagcttacaactaacattctttcctttgttgcatatagta

SEQ ID NO: 12791 - DNA, 464 bp, Glycine max
  unsure at all n locations
agtcaactgtcatttatctatcaatcttcattccactntgtttcttcttcttttacaatatctaaatcaatttcccgagtttgataagtaatgaatgaataacgtcaacctgcaaatgaagaactgatacaaatgtaacatattgtgaaataatatcaaagtagtttacgttgcatcaggctaaaaaaatatataaccaatttctttaaattatattaaatgaaagctgaaatataataaaaatatagaattcttattaaaattctattattatgaatttttcgcttgagaaattactgatacaattcaaaagttatagcacanatagctaagaaagatacttgactacaatctccaatgaaaagctacacgtacacaccatgaaattgacatttatatatacttataaattcccacgaactacttataccnggctaaaattacacagactaattaattaacct

SEQ ID NO: 12792 - DNA, 414 bp, Glycine max
  unsure at all n locations
agcttataatatatcgatacgctcaaaattaaacatcgaanactctcgagaaattcaaatggccgtaacttttcacacggatgtccgattcgggcgcataatatgtcgagaggctcgaaattgaacaacggaagctcttgagacattcaaatggtcataactcttcacacggatgtccgattcaggcaaatcacaaatcgagacgctcaaaattgaacaacggaagctcttgagaaattcaaatggtcataacatttaactcggatgtccaattcaggcgcatcacatatagtgacactcgaaattgaacaacggaagctctcgagacattaaaatggtcataacttttcacactgatgtccgattaaggcttataatatatcgattcgctcgaaaataaacatcggaagctct

SEQ ID NO: 12793 - DNA, 437 bp, Glycine max
  unsure at all n locations
tgaatcggacatccgtgtganaagttatgaccatttgaatttcacgagagcttncggtgctcaatttcgagtgtcactatatgtgatgcgccacaattggacattcgagttaaatgttatgaccatttgaatttctcaagagcttccgttgcacaattctgagcgtctcgttatgtgattcgtctgaatcggacatccgtgtganaagttatgaccatatagatttctcaagagcttccgatgttcaatttcgagcctctcgacatattatgcgcctgaatcggacatccgtgtgaagagctatgaccatcttgatttctccagagcttccgatgctcaatttcaagcctatagacatattatgcgcctgaatcggacatccgtgtgaaaagtatgacctttgaatatctccacaacttccatagtaatttcaacgt

SEQ ID NO: 12794 - DNA, 406 bp, Glycine max
  unsure at all n locations
agctttgatggtgcgtagcccaccatcttttcatagtagagtatcgataatgtgtctaccatcacgatcatcgtctccctttccatcattgggggtaccacctgngccgccagatccctccaccttttgggcgtgttctttgaaagatccgtccccctttntgcaaatgttctgtagttgcatcctatccagaaccatatcaaaattgtactgatactgcctaacaaaggcaaccattangtccttccaagaatggactcgggaagattccaagttagtgtaccatgtaacagctaccccagtaagactntcttggaaggaatgtattagcaattcctcatcttttgcgtattcccccatcttctgacaatacatctttagatggttcttgggacaagtagtcccc

SEQ ID NO: 12795 - DNA, 455 bp, Glycine max
  unsure at all n locations
tgcaatgaaagatattgtgtatttaggagtctggtgtcaatctagacacacaaaccaaggccataattcaaaataggtaagatagaaatgatgatagtcattggcacaaatattgacttctgtaactgctactaagcttgcaatggaagatattgtatatatagtaatgaactttccattcagtaacacaaatttgtttaatttgtacgctcaaatctattagcttgtgtgttcaacttgaaatcttaaatttctattttacatcttttatttggcattatgtaacaaaagatgcaaaaaaaagtttactaaacgtttatatcagagatgggcattggttgtttatatattgcttgtctggcacaccccanattcttttttgatntcctttgtccgtagattagagttgttntatatagttctagtttgttgaggtaaaatcaatattatacttg

SEQ ID NO: 12796 - DNA, 378 bp, Glycine max
  unsure at all n locations
agcttaatctcaccagctcgcctgngcgagttgggcggcaagctcctcctccatttttcctataaaatggcattgggggcttaggggaaggggttcatcccctttggcaatcagatttcacttaaaagtagtgaggataagaagaaagaaggagaaaatcaaggccgaggcgcttccgtaatgcttccatgacattntcgtaatcaattacgtgaacgttcttcgtcattcttcattcgttcttcgtcgttcgtcaatcttcaaccggttagttntttatttcgaagctttgaattcattctatgcacccttagggggccattcgtgcattatatggtttcatcttcatctcgtctactttcagtattctttttcttt

SEQ ID NO: 12797 - DNA, 399 bp, Glycine max
  unsure at all n locations
tgagtatctcanataggggaaaccttctttctatatccattatccccttctcctcctttatccatctctcctcttcttctatccccatcaacccgtaaagtgtaaagcctttcacagttgtgagaggctaaaccccattgtttgaagcctagtggccaaactcttctaatgtaatactttcctattatctatttaatgcaattatggnttttattggtcttttttgtgctttattgttgctgattgtggtttgatcacccatactcatgcattgtttaagaagtaatgcattggaaaatggttattntctaaagaactgggaaatggcatctaaatgaaatcatgtctaggaatagagtgatgctttgttagcctatttcttgcatctttaatcttaat

SEQ ID NO: 12798 - DNA, 377 bp, Glycine max
tagctttgttgctgaggacctatataacatgcaccgggttgtagtatatggagtctgttaacggaagagagaaaatcttacggttttgcatttttcagtttggtgttactattcacgtgcactgttcacgtagcaataaaaatttgttttctgcttcaaattgcaatttcattttctacttctgcccttgaattcgttatcttttctgctgattaatggaaggctgagtctccagtgttgctttctcttggtatacgactaacttttgatagaaatccttttccaagcttgtatagttcccaatttatggtcattgtgaagtaaatttggtaaataaatcttggtttatggttaatgttgtctctagaacatttcca

SEQ ID NO: 12799 - DNA, 457 bp, Glycine max
  unsure at all n locations
tcgtgtccaaggatgacaaggtgcagtacatgcaaagagatattacattccgctaaaacttaaatagtgtatgggcaggatatccagaaatcatgcatattgcattgtacataaagtcacaaacaagggtactcaagcatgttaatatctgcaatgtccatcacattntaaacagatcaaggaataaagtcaagagggttacagcatccacagaggcttcagctgcgcctttgaaatagccaatagatccctcaataagtcttctatatccttgctctggagcaattagatgtggctgataaccatccgcttccataacaactttttcgacattctttaacgaaagatggcgattaaatgggagctctcttaatgcagctggtaattggtggtcaaaaacaccatatattctatccccgccaggacgtctaatatacaagttggtacttagtcaaat

SEQ ID NO: 12800 - DNA, 377 bp, Glycine max
  unsure at all n locations
agcttctccttccatggattattctctagtggatgacgcctcctctcacctcttctcctttatcttccactataactccatggttgaaaatcaccattgaaagacctcattgaagctcanagatccagcctccatagaagcttctcaaggaagcttccataattntatttcttacataaaattacctttntgtccatgagaatcatntgtaattggtgaccatgaagatctttgtatgcttaaaatatttatgattctcacaacanattttcaagtttctttggagttctcaatctccttaatggaaattagtttaaaaaccatccttagttgttccaaaactggtaaaaaaagacaaaattcaccatgtgagacta

SEQ ID NO: 12801 - DNA, 391 bp, Glycine max
  unsure at all n locations
tcatgtagtgtcagtcgtgtcaattaggaaaacatgttatgtcctcttttccaaatagaactgaaacaagatgtaattatgttctttacactattcactcttatatttggggtccaagccgagtcacatcttttggtttcaagtattttgttacctttattgatgaatactctagatgtacctgngtttatttaatgaaagatcaatatgaacatttacctatattcatgtctttctttaatgaaatcaagacccagtttggaaaagtaattaagattcttgcgagtgataatgccaaagaatatttctcctctaatctctctttggtttaaccacacaaggcattttacatcaggccacatgtcctcatacaccacaacaaanatagtat

SEQ ID NO: 12802 - DNA, 427 bp, Glycine max
  unsure at all n locations
agcttattatcatgtagcatgtgagatccgaanactataatccctaataaaatcaagtggctgtgagtttgttggaggacttaaattccattcgcacacaaaacaaatttagaaaggaatgaagaactttaagtgagactaaactcatagtcgacctaaaaaaaatcaaagatcaagggatcttaatggaaagccaaaagatagttacagaaacctacacacaacacatttttagaaagggataaagaacttgtgagactaaactcatatganagattagcctcataagtgacctanaataccanagctcttgngatctcacccgagagccaaaagatagttaccaaaaccttcgcgctacaagcttagcacgtaacagtgagatcctaanactataatcccaaagaaaatcaagcagacgtgactc

SEQ ID NO: 12803 - DNA, 452 bp, Glycine max
  unsure at all n locations
agtatcntttatgatgaagcagctatgaagtattnttcactatgtgaggctagctgcataaatcanaagacaccattgttttctatcttcaactaaaccctttgctagtccatttagataaaatataaacataaaaaaaaaatccaggttttcatgtctactctagtcatgatgatcaggttttgggtaatgaaacacaaataactctgaaattttttgagagaactaaataagaaaaatcctaacaataaggggaaaaaaataattaagaaaatcaagagatgtacacattacagatgtacaagaaagcaggatagtgagacccctagatcaaccaaaaaaaggatatttagatttccaaatgtttttattatagggtttaggagactcagatttccaaatggttgtgcccctgatgttattcctattgagtaccatggtcaagtttacaa

SEQ ID NO: 12804 - DNA, 414 bp, Glycine max
  unsure at all n locations
agcttgtaaagtaaaatacttcttagatagaagtgtgatattgtaatagaaactgcaagacacacactaaaggggggggggttgagtagggtgtttaccgaagataaaagctttttgcaataacacagatagtatgaatcatacaaagataaacattggtcgtccactgaaaataaaaaattatgtagtgaagaacacagtaattgtctagtgacaagtaaaaagatctttaaagagtttcaaaataagcacttggtgtaaagtgatgttagaaaatataataagaatactcgataaaacaatatggagagaagtaaaaacacttggcttatactgatttgctcaacctgagctacatccagntctcatttactcactagtaaagggtgcactattcaagaactgataacaaac

SEQ ID NO: 12805 - DNA, 476 bp, Glycine max
  unsure at all n locations
tgtggaagataatgcttgngtggatttcgggcatgtcagatggctgccaagcgaacatgtccgtgttcctgtgtaggacatcagcgatacacctatgctcatggctggtgtcgcaacctacccttcgacgagagggcgaaggcaaaatagataagccaaatagttcgtctcccagggagaatacgagcgaagtcaccaccaacgtttattcgaggaaaatgttagaaaaactaaaaaaaggtccgcaaattttgaaaagaagggttcagaagttgtttacgcatagggaaggtattagcaccccacacacccatcacaagggacgacaaccttttaattgagtgtgcaaaaacgtgacttcaatattatttagtttcccttntatanttttattnttttagggttgacaagggtgtttcccttgctcctacgtatcttcaggtgcgatgagaaattcanacctatgtagctcttta

SEQ ID NO: 12806 - DNA, 422 bp, Glycine max
  unsure at all n locations
agcttgatttgtgagttgattctagccttagtttcacttggttatttctcaactcatttaaagggaattttcaatgtaagtgtccggttgaaacttgcctttntttatgattaaccgaggtcacggcatgaacaatcggttgaattttactttaaaggagattatacaagattacaacacaaatgatcgattgaaattcatttaaacattgattaagtgagccttaaaggatgtcccctccattatgctcagtgtaacaccaagtggatgtacgctccacttgaactaatccacaagagatgtactctctcttgttctcagtattacaacccaagtagatgtacgctctacttgtaccacaaaggatgtacgctccaatgtgttaagacaaagatatctcanngcggtagtcctttgaaatc

SEQ ID NO: 12807 - DNA, 471 bp, Glycine max
  unsure at all n locations
tgacttccatctacaggtaacagggatcatgaatacttgtgtatttcctcacgaaacaccttaacatgactggaaaaggtaaaagtctctctattagtgacaaaacaatgacatgatgcatttacggagcagtttaacgaggcgtgagtggaagataaccagcccacaataagactaacacttgattaactaggaggcaataattttgaatcaagaaggatcactaattcagaatcaacaacaaatattccaaatgaattctagaaaaaaaaacatgaccacaatgtacacacatatggagacgtcaaanatcgcttgattgggatagaaacatcagtaatcaaactgtttgacgtaggctctcaacacagagaatgaattatactcgggcttgcaagtataattgagttacttgactttagaacgcaacacaaagaaatgggttgaccagaactggaaggttagtcaaaa

SEQ ID NO: 12808 - DNA, 427 bp, Glycine max
  unsure at all n locations
agcttgcacttcaggatgtgtaatgctggtaaaaaattatgatactgaactacttgaataatcctcaagggtaatcctctggtcattctcttctgccatggtaatggctttaggtaattgagtggcagattcccttgatgatggtgaatcangtgataataagtcggaggaatgagtctcctcaagaatggatgcaactgttctatcttgcagaagtttccttctcctctcggtcctgttccttcgcaatgtagcttcaatttctaagtccaaaggaactaaattgtgtgtgggagatctatgcatatacaatactaacagaactgtggaacagacaaatagaaattatgagcgaatattcacaaaaacaatcaaagaataacaaataaagaatagacacctataaacgagctaacttcccaaataa

SEQ ID NO: 12809 - DNA, 473 bp, Glycine max
  unsure at all n locations
tgtgcatataggctntaatttactgctaatttggctttgttttttttgaaacaagatcaagtggaggaggagaaacatatatacatatcctttaaaaatggttaccatgcttgtcaaaaatacatatccttcatacacactacattttgtcaaattataacctgaccatacaccattttttgagaaagcaacttgaggctattgtggttcaagtgccctagtattttgcatgtgccacattcaaacagtcgttaaattcctttttttgtcatcaacatgaattttttctcataattaaaggatagaggaaatctcatggtctttgatattgttgccatagtaattcatttcaacaaggattgctgttagggatagtttggtgcttgaagaactgngtattgttgaatttgatttatttcctttttccctcattgccacactatcatnntttgttatgtactgtcttgtaacct

SEQ ID NO: 12810 - DNA, 413 bp, Glycine max
  unsure at all n locations
agcttctgctaccaganaagtgaccctgtttaagcattaaatgtacacatgaaactcaaagattcaatgtgagttgtcgggaccaagaagcttaacatgaataaagacataaaaaccacatattgtagagtaaaaaaatatttttaagctggttacctttgaccatatttataggcaaaaggatgaggggttatgtacgttataaatcaaacaattacaccgttagagatggggcatatgatgaaatctccaatgattagtttcactagagtaacaaaagcatacatttgaagcatataatattcctaatcctaccacaatattttagcttcttcaatatcagctgctaagacaaaatagatattctcgggtaagaattaagaattcttaccaagaagatagaaatatataat

SEQ ID NO: 12811 - DNA, 425 bp, Glycine max
  unsure at all n locations
nggattgattcagtctaactagggatcaaggtttagtaatttatgctacaacatacaacacatatgcatgattgagtagagaaacatctttatatgcatcagttggtttgttagaaagacccaacacctttacctactgctgtcaatcctacttacttgcatttttactgtttttagcctagacttagtttaattttattttaaaccatcaattatcaatgtttctttcaacaatgccttatttttgaatttaaccctgtctaatactagttccctgagttcgatactcagattcatctgtcttaattttaaatacttgacgatccagtgtgctttccagcaaaccgaattttccttanacatatttgtataaagaaaaattggaccataaagtaactgtaggggacatccaacacagtacttat

SEQ ID NO: 12812 - DNA, 408 bp, Glycine max
  unsure at all n locations
agctttcatcaaattcaaacgacaataactttnttcctcagatgtctgattgagacccgtaatatatcgagacgatcgaaattgaattctgaagctctgagctaattcaaacgacaataatgatttgctcggatgtctgattgagtcccgtaatacatcgagacgctcgaaattgaatgttgaagctctcagcaaattcaaacgacaataactntttactcggatgtctgattgagtcccgtaaaatatcgagacgctcagaattgaatgttgaagctctcagcaaattcaaacgacaataacttttttcctcagatgtctgattgagactcgtaatatatcgagacgatcgaaattgaattctgaagctctgagctaattcaaacgacaataatgatttgctcggat

SEQ ID NO: 12813 - DNA, 340 bp, Glycine max
tcagaattcaatttcgagcgtctcaatagattacgggactctatcagacatccgagcaaaacgttattgtcgtttggattagttcacagcttcagaattcaatttcgatcgtctcgatatattacgggtctcaatcagacatctgaggaaaaaagttattgtcgttggaatttgctgagagctcaacattcaattttgagcgtctcgatgtattaccggacttaatccgacattcgagttaaaaggtattggtggttgaatttgctgagagcttcaacattcaatttcgagccgctcgatattttaccggactcaatcagacctccgagtaaaaagttat

SEQ ID NO: 12814 - DNA, 381 bp, Glycine max
  unsure at all n locations
agcttcatgttgctcattgactccaaattgctgcanagaaggacaaagatttgtatggcgatttacagaagaacatagaccacagactcttgcaacaagtgcagatttctaattcatggaaaactgagtgactaggttgaccgaggcatcaattnttcccttaagccttttattttcagtagatgaagatgaatctgtggccacctcatggactcctctaaggacaatagcatcatttcttgcactgaattgttaggagttggaagctatcttctcaatcaaattcctggcctcagcaggggtcatatcaccaagagctccaccactggcagcatcaatcatactcttatccatgttgctaagtccctcatagaaatattg

SEQ ID NO: 12815 - DNA, 420 bp, Glycine max
  unsure at all n locations
tgaagtgagacagtgtggaagagtctgtcttcctacttttattcgttgaccacagagtggtacctggagatatgtcgcggnggtcaagagaccttgaggacgtcaggtggggtgctatttcccaaaacgaagcttgaccaatcccggcccaacccgggcatagtcagtcagtgagaacctgtgacgtacctaaacaggcgagctcctggcagtcaaccgataaaagaacaaagaccacaaagcaaggaggcttgtgtggtggctggccagctatggattttgagtgatatatggaatatggcctctggtaatcgattaccaagggtgtgtaatcgattacaaggcttataaatgaagacaggaagttaatatggtctctggtaatcgattaccaatggtgtgtaatcgattaccaggcct

SEQ ID NO: 12816 - DNA, 403 bp, Glycine max
  unsure at all n locations
agctntataagcgcgggtctgggagacaaaggtcaagtggtcgcgatatgcgaagatgatgttccgagtacattggatttggtacgaccatgccctcctgatttccagctgggaaattggcgagtggaggaacgccccggcatttacgcaatgagcataatgtaaacctttacggtttttaaaagctctatagttgggcctaggctntagagtttttccttttgttaaggctctgtgtcttttgtttttgaatttctaatacgaggacctttcttcatctgttcctgcgtctctacccattctcattcatttgcatgttcacttctttttttgaaacggcagatccgatgacgagtcccccgaaggtactantacctgggacccgcttatcgacttcgagcaa

SEQ ID NO: 12817 - DNA, 384 bp, Glycine max
  unsure at all n locations
tgagatgaggaagtgtcgaaaggtgtaacttcctgctcttattgttgaccacagagtggtacctggagatatgtcgtgggggtcatgagaccttgtggacgtcaggtggngtgctattgcccaaaaccaagcttgaccaatcccgacccaacccgggcatagtcggtcagagagaacctgtgatgtacctaaacaggcgagctcctggcagtcaacagataaaaggaacaaagaccacaaagcaaggaggcttgtggaggctggccagctgtgaactttgtgtaatatgtggattatggcctctggtaatcgattaccaagggtgcgtaatcgattacaaggcttaaaattgaagacaggaggctaagatggtctctggtaatc

SEQ ID NO: 12818 - DNA, 420 bp, Glycine max
  unsure at all n locations
agcttgcttctacactcaggaagcattatttgccatcaacatgttgtggtaggttttcaattccttgcgtcttctcctctttttcgatgcctctatccttcttcgtttgcctcgttttcattgcaggagaaattccttgagcaattcatgcaggaagcttatgctttttgtgttcgggaccgcaagaaatgcctcangtatgatcacctaggtaatgttntatccataagtgagttcaatgatatttaaaattgggtcgatactgtagtctagtagtgtttgttgtaatgtagtgtataattgtgaaccctagaaagaacataattgttgcctgggggtgattttgtanattagtgtgtatatatattntgctgcaatcaanttaatgctntataatgtatcattctttttacatctgat

SEQ ID NO: 12819 - DNA, 447 bp, Glycine max
  unsure at all n locations
ntgatgcaacatttggagaggttaatgaaacaacgagatgatgcgctccatgagaggttggatcaaatggagaatagagatcataatgaagaagaaaggaggagaagagggaatgatggtgttcctagacaaaaccaaattgatggtattaaactcaacattcctccctttaaaggaaagaatgatccggaggcctacttggagtgggagatgaaaatagagcatgttttctcatgcaacaactatgaggaggaccaaaaggtgaagcttgtcgccatggagttttccgacgatgctcttgtgtggtggaacaaactacaaaaggagagagcaaganataaagagccaatggttgatacatgggtagatatganaaggatcatgaggaagcggtatgtgccggctagttactcaagggatttgaaattcaagctccaaaaactaacc

SEQ ID NO: 12820 - DNA, 253 bp, Glycine max
acgcatgtagctttgttattgaagttggtttctgagtcaccaactaatattttaatgacaaccacagaatataacttcgatctgatccaattaagtcaattattagtaacaaatttgctttcaactccagataaatacgtattatatatcatacggtgaaatgtgtagtctctgctgctaaatcaactaattaataccacttacgtgtatggacgtaaagaataattatataataatctatatggaaactatg

SEQ ID NO: 12821 - DNA, 435 bp, Glycine max
  unsure at all n locations
tgttgacaccttccncggccaatctataggtatgtttcctattgggaactcaagaatcctttgctttgcaaatgatctatatgtttcacaccccaaacatttgggtaactcattgatatttaatacaaacttttattatgcagattagcagggtgaagctccaattatgattaaaaaacagcatgaaaaaacatttaagacactacatttaagttttgtccatgtaattaaactttcatatttgtcccttacattataagcaacaatcactttaatcctgattctttttaagggtaataatatgtggacacctttacagactatttctctttatatctcttatcctatcacatcatatatctcagctatcatgcctacacttttctctaggtgtcatttagctcttagatgtccttacattacaataagactaat

SEQ ID NO: 12822 - DNA, 402 bp, Glycine max
  unsure at all n locations
acttgttttaagatgaatatataaatcttacttatcaaccttaaaatttgtcatgttgattntatatatatatatatatatatatatatatatatatatatatatatatatatatatatatatatatatatatatgtcgtgtctttgtgtcctttgttttgaaattttgttgcgctctggtttatccgcgctcgtttcgtgttgtgtctgagacaatgcattttgttacaaaatcatccacatacaaaatacaggaaaccatctgtccactctcccattcacacacacacacacacacacttactntatagccatganattcggaagagagtgagaattgacgctcgcttcacagctccctgtgatggcgcttgagtgatgacactcatagaggtgactagg

SEQ ID NO: 12823 - DNA, 424 bp, Glycine max
tatagaatatataatattaataacaatgacaattgaagaatctatacatgtttcctttggtgagtctaattccattcttccaaggaaggattttttagatgatatttcagattccttagaagatacacatattcatggaaatgactctaaagaaaaagatgaaggaagcactgaagattctcaagataatgaagttagagcacataatgaacttccaagagaatggaaagcctcaagagatcatcccctcgacaacattattggtgatatatcaaaaggtgtaacaactagacattctcttaaagattatgccatgatatggcttttgtatctatgattgaacctaaaaatatacagcacttggttcgtcagcaagcggccaaccaccgggggcaggtgcagatacatgactgtctctaccagc

SEQ ID NO: 12824 - DNA, 428 bp, Glycine max
  unsure at all n locations
agcttgaggtttcaattgctggaacacaaagctaccactctcctcaagaaaaagatgtagaatctataaccaaagactcagaaaaagggggtcattccgaaacatctcctgtggttcttcaaaaaggtgagaaattagaagattccaatgcaaatgtgtctcatttagctactgaacctgatcctccacagctcaattctagaatcaatcagagaccaaaaagggtcactaaacctcctgaaaaatatggttttgaagacatggctgcctatgcattacatgcagctgaagaaatagattcaaatgaacctgccacctacaaagaagctatcaatcatcctgaagctganaattggttgttagctatganagagganatggaatctttatataagaatcatacttggaaacttgttgaactacctaaa

SEQ ID NO: 12825 - DNA, 478 bp, Glycine max
  unsure at all n locations
tgtaggattatggagtgcccgtcacatgtggtactaggtggcgatcgggcgatggtgcaagttgactctccacatccacaaatcacacataaatccaccatccccagttgcccaccttcaactgagctcacgtactcccacgtagcccttatcctcattcctctcagcaccgggtccccatcaacccctccaagcttcctcaatatccaagcaattcaatatccaaacatcatgaactaccctaaaccaagaaaacagggtagaggcaganaactctgcccaaaaacacattccaataccacagctntccttactcaaataccccagtaacattctctttgttccgattcgttaaccgttggatcgacttgaaaatnttactggaggtccctagtatataagtctacattntgaccgtttgatctgctagaaaatgtccagaacccaatatgtactacccttttcacaaccagcaata

SEQ ID NO: 12826 - DNA, 427 bp, Glycine max
  unsure at all n locations
agctttcaaaaatattaaatacattntaaaacattccaataagcattntggccactggtaattgattacagtcactggtaattgattaccagagagtaaatatctcttttaaaagcttttgagaaaaacctttggccataacttatgcatcatcaatttggaaacttctttcaaagactctagagactaacttcatcatttatcttggatttcttggagtcttgttttggatcaaacttgagaagtccgtttctttggcatcatcaaaacatcaagatatctttgcttctacaccttgctttgatttataagtggatggaagttggaacctaattggattgtgtctctgagtcgaccttggttattcctatactacaaaattgttgaaattcacgtttgttntgagacgattcagcattgtcatcac

SEQ ID NO: 12827 - DNA, 447 bp, Glycine max
tgccgcccagctcacccaagcgagcaaggttgcttcctccataagcaacagccttctggaggaatcttctggagggcccaagttggcctggttgctatttgcacccccctttttactaaatgcacctccttctattttttttggtaattctttttccgtaacgttacgaaactttacgaatttcgtaacgatacttattttccttccgcaaggttacgaatccttacggattatgtatttactcttttttagctttcgaagaagttacgaaaacttacggattgcgcaaaacacctcttttcgatttccgtcacattacggaatttcacggattgcgcaagcctgcttccttttgatttctgacacgtctcgggacttcattcattgtgcaaccaaggatgccaagtgtcccgaagcgaccaatcaaaggttgtatatcatcaaata

SEQ ID NO: 12828 - DNA, 294 bp, Glycine max
agcttccatctctattcactcagaggtcagattcgggcacataatatgtcgagatgctcggaattgaaccactgaagctctcaagtaattcaaatggtcataactttacacacagatgtccgatcttggcgcatactatgtcgagtagctcgaaattgaacatcagaagctgtcgagaaattcaaatggacatagtatttcacacggatgtcatattcgggcacataacatgctgagatgctcgtaattgtaccacgaaagctctccagtaacttcaaatggtcataacttttt

SEQ ID NO: 12829 - DNA, 419 bp, Glycine max
tgaatcggacctcagtgtgaaatgttatgaccattttaatttcacgagagcttccgttgttcattttcgaacgtctctatatgtgatgcgccttaatctaacatccgtgtgaaaagttatgaccatttgaatttctcaagagcttacgttgttcaattatgagcctctcgacatattatgcgcccgaatcggacatccgtttaaaaagttaagaccatttgtatttctcgaaagctatcttggttcaattccgagcatctcgacatattatttgcccgattctgaccttcgtgtgaaaagttatgaccatttgaatttctcgagagcttccaatgtttaatttcgagcgactcgatatattataagcatgaatcggaccttagtgtgaaaagttatgaccatttgaatttgtcaagagc

SEQ ID NO: 12830 - DNA, 427 bp, Glycine max
  unsure at all n locations
agcttaggctaaattaggctaaacttttgtaagctacttgagctgagtttagtcttacatgagggatctgcggaagaaactcagtttaagttagtctaaacctaagagggctatctaaatcaggtcgagtcttacatgagggatctgcggatgaagctttgatattcagcctgacgagggatcgaaggtttagtaatttatgctatagcatagaacacaagagcacgattgattagagaaatatatttccatgcatcagcttgtttgttataaagacccaacatttctacctattgttgtcattntatttaccttgcattntatagtttttagcataatagtttattttaaattntgtttgaaattatcatttatacatgttctctcaacaatgctttgattctgaacttaattcaggctaacatta

SEQ ID NO: 12831 - DNA, 471 bp, Glycine max
tagggatggaacacttacttgttggtgatgaacaaaagcgcataacggaatcaaaaaatgcgaaaaatgatgaccctagggctgcaaactcgtcaatcccgtgggtatggcttttgaaaggggggaaaagaagtttttgaatgcaaaaacgtcccccctttcatcattcttataatttggtgtaggggtggctcgcccaggcaagctcagctcgcccaggcgagctaacctgcattttttttttttttgagaggaacattaaccatgtcccctccttccttatggtttagcgtcttgcttaacttgaacttacttaagttagagttaggcgttgattacttatttttaaaaaaaacaaatagtaagacaactgcgaatacaaaggatacggggctgccttgcagcgacgttctctgcttgtctagcgcagagaatagggcaacgatcagtcggtcgtgacctcatccccac

SEQ ID NO: 12832 - DNA, 426 bp, Glycine max
  unsure at all n locations
agcttctgtccctgagaatctggttcccagaagacaacagggagtgaagattgctgaaaaccctagccttgcaacaagttctagggaagtagacacggagatggacaagaaaatccgcggtattgtgagtagcattttgaaagaagcttctgtgcctgatgctgagaaagatgttccaacatcttccaccccgaatgtttctgtgcctgatgttgagaaagatgttccaacatcttccggcccaaatgctgaagccctcccttcacccagtgaagaggaatcaacagaagaagaggatcaagcctcanaggagactcctgcaccacgggcaccagaacctgctccaggtgacctcattgacctggaagaagtagaatctgatgaagaacccattgccaacaggttggcacctggcattgcggaaag

SEQ ID NO: 12833 - DNA, 476 bp, Glycine max
  unsure at all n locations
gcgagcttgtagagaggctaggctacaacaatttattggttattctaggattcaaatgtttatattntaagagagcacaaatcatagacttatcccaatgatcttgtatcatacaagtagctttctcactatcttttcctcttaagttgcttttgaccttattgtaacaacacaatttattctttttttttaacatacaacttatttgttgtgtgtgctgatgcttaacctttatcttttcattctaattgacttccctcccccaaatttagagtaactttgccttgaaccatatgctctcctaaaatctaaacaaggtattaggagataattatttaagtttagggttcaattcatgacaaaatcatttagcttatacagggagcaaaggatgcaattatcattcaaggtaagctctttggtcaaaaggcttgtgtatgtacaatcatggccttcatcatgtcctcatttataca

SEQ ID NO: 12834 - DNA, 404 bp, Glycine max
  unsure at all n locations
agcttagataagtgttgattttcaccttctcgctaagccaatctgctggcttagcgagcgtccgctaagcacaacactcatgggctaagcgcgaggaagactctggaagaagatgagttgtacaggtttgctaagcgcaccgcttcatctcactaagtgcaccgcttcagtccatccgctaagcgagaaaggcacacgctaagccaaaattcactaatatgcgctaagcggtccataattgcgctaagcgcacgagcacgaacaaggccacctatttaagctagaaatcagattttgtgaagatagtttgngctgggattcagagctntgcatgtctagagattctagagagagaaaggtccaagttccagagagttttgggagattttgttgtgtgaagatct

SEQ ID NO: 12835 - DNA, 327 bp, Glycine max
tctcaaggaagttgtctcaatatagcttctcaaggaagctatttactctataaatagaagcatgtgtaacactcgttgtaactctgatgaatgacagtcttgcgagacacaactcatagttcaacttctctcccttttttcttccttcaatttcgagctcccctttctctctttctctccctctttcttttcctccattgaagcatcctctccaagcttcttatccaaggcacatcttggtggtgaagctccttcttccatggcgtattccctagcggatggcgccgcctcttacctcttctcctttggcttgcgctgcatctccat

SEQ ID NO: 12836 - DNA, 404 bp, Glycine max
  unsure at all n locations
agcttatcttacctatttatctcccagntgtctttgcaaagattcaatagataaaaaacatgaagttctaattcaagatgttntctttgttgcatgggcataatgcaatcactctatgtctagcaatgattntattaagatgtccctacctttgagttctactaaaaattatcctctctcgagcgactaatctctaaaactgatgcatataaaaccttcaatgtatttctactaaggattaccctttttcaagcgccaaacccctaaagatgatgcaaggatgaagcatataatacatttgttggcattntgggcctgccaagccctaactaaaggggtttagcctttcattgtcatgagagactcttacactttacgnggttgatatggatggaagaagatgg

SEQ ID NO: 12837 - DNA, 438 bp, Glycine max
  unsure at all n locations
ntacttgtgatgagcaagtttccnctagccatcgntgtccttataagcaacattttgttctacagtgggaagaagaggatgatcctgcattacaaccagatccaccagacgaggttgagacagttggtgaccccagttttcaaattcatcatttgtcttataatgctttanaaggctcatcaggtcttggaataatgaagtgcagattgcgagtgcagattctactagatagtgggagttcagataacttcctccagcctatactaactcaatgcctgatgttacctgtagaaccaattcctaatttgcaagttttgggtggaaatggaaatgccttgactgctgaaggattaattcaagacttggaggtgaacatccaaggtcatacactgaagctaccagtttacctactttcagcttctggtgctgatctagtgc

SEQ ID NO: 12838 - DNA, 412 bp, Glycine max
  unsure at all n locations
agcttgttattcttcttctcttcatgtttgttgtgagcaaggaggttcatcttctcaacaacttttgttgtaggtccattcaaatcacattttagattttgaaatggttccttctcaagtgacattgttttcaacttcacggcttcttccaaaacaacaccagtggctttttccattccacagggaaacttttatccctcattntaatggacataagctcacagccggaaggatcanatatagtgtagctcatattnttaaaaaacaatgaataattcctttctagcatttgtccaacactcanaagattntgttttatctcagacactaataacacatttganatatantttgtacctgctggagtntcaacagcgacaactncttttcctttacatcaacacattcttcg

SEQ ID NO: 12839 - DNA, 367 bp, Glycine max
  unsure at all n locations
agcttgtgtaaatcaaatcactcccgcattttatctctagcatgcattgtatgtgggtctcgtcctttgtcacgggaagccggaaggtccatatcaccttcttaattgtacacatggngcactgcgcccccaaatgcgcaagtaagaagagataattttccgggctctcgtgtccgtaaaatgcattcatatcatgcatcgcataagcatctcttcataacatcataatggacatatcctgcatttgtccgttatcatattccggcctcacattttgcatgagtcatggcatcatcatgcatatgcgttcaacaaacattttgatctgcaaaattgcataccatttgttntcatgtttgctcatcct

SEQ ID NO: 12840 - DNA, 400 bp, Glycine max
actcgggtcatgcggtgaacgcctctagttcaacacccgtgttgtctaaagtacccacccagagggaaactgcccaagtgtcaactccgaacgcgactcgaccggacggaattccaacgcgacaaggaacttccctccgaggccgttgccggaattcaccccgctcccaatgacgtacaaagatcttctaccatccctcatcgccaatcatttggcccgggtaactcccggaagggtcctcgaaccccctttcccgaaggggtatgaccctaatgcaacttgcaagtaccatggaggtgcccccgggcattccatcagaaaatgctcgcgccttaaataccaaggccaacatctaatggatggcagatggctgactctccaagaagatcggccaatgtga

SEQ ID NO: 12841 - DNA, 338 bp, Glycine max
  unsure at all n locations
agctntgccgatttagtgtttgctggcgaaaggatcgaagtgggtctgagaagaggcaaatttgaatatcctactttgatgaataggaagcctatggcaaatggagagaataagaaggagggaggaacccatgctatgactgtcattccttcatggccaaatttcccaccagctcaacaataccaatactaagccaatatcagccattctcattacccaccaccctatcagccaagaacacccaatcatccacanaggccacccttaaattatccacaaaacccgcctgctgcatatccaataccaaacaccacccttaacatgaaccaaaataccga

SEQ ID NO: 12842 - DNA, 462 bp, Glycine max
  unsure at all n locations
gttcgattcattctatgtacccgtagtggtccatattgtgtttcgtgcactttntttctcgttntgtttactttttataccccctgttgacgtgcttaagccattttacttaagtcatttctcgcttaacttaaaaataaaataaatttccaccgaacgtttgaattgtactatccattaacttcggttaaaataaattccgaccgttcggtcatgccgtaaccacgttggaaatcaaaaagaggtaaaaaataatataataatcaaaaagatatcttttagtaaaataaagcggaaaatcaagtggacattgtctctttgggatttctcattcttaatcgaattgattaataactaaagtgaaactaaaggctaaaaacaattcgtctagtcgagctcgtccataaaaaataggcttttgaaagttggcatttcattttctcactaagtagaatggatcat

SEQ ID NO: 12843 - DNA, 624 bp, Glycine max
  unsure at all n locations
tgngaaaaccgtctttggananccccntttttgganngcccatttcgagtncatctactatgagcnggcatcgtcgagtctacgagtacctgcgttggattcctactacgaggtcgatcactgccacagtcatagacgcatgcattagcttgtagtanagtaagcatacgtcacaatatatgctagcactgtagcatatagctgctcgntcggtcagactgactcttaatgngatctatagcgacatcttcacgacataatactgaggcacctagaatactctgcggtcttacaaggaaaacagatgaatcatatgtcatcatactacatgtcacaagtcgcgccacgatacaccgtggatccaacagtggatgtggatttagatatcatctcactcggctcttctanacactgagacatgaaatactgagcatcagcatgctggacgctttgcttgtacactggatttagctaatatcgtcacacgaagctgacatgatacacaaacaggcatctcatctagcacccctctgttcccgtgcgctttcataatatttgacagtctttaccgtctaccgtgctatttcgccgagacagagggcatatcgacgacgccaccactan

SEQ ID NO: 12844 - DNA, 453 bp, Glycine max
  unsure at all n locations
actcagctatctgctcaaatttcaagcncttatgattgctgagcatatgttagcacctaatttcaggaaaatacacaaaagtaaaatcaggtcataattttcatgcaacaatctaggtatgagtcattgatagccaccatcatcaaatattaaagagattacttcagaggtgatcattataaaataaaactgtcaaagagaacattttgtagtgtcacaatgtataaaaatgctcatacataacatgccccagatcacatagaagaacccacagcatagaacaagcaagaaaatggtagagctatacagtcctactaaagatagtgcaagagatatctaagagaaaggttaagcacattttgaccttaaaactcgtcttacacgatacgttcctttatttccttttcaagagatagagcaacttcttaatgtgcgagagacaattgtttgtac

SEQ ID NO: 12845 - DNA, 336 bp, Glycine max
  unsure at all n locations
agcttatctaattgtcactgtgagcacctttntaagactatgaatctacgagctacatctctccctctctttagtgaaaggaacaaaagaaattatgtgtctattgtctaacatgctaccctttttcagaaacatggcaatgtctgcttgggaattctagatggcactganataggactaggaaatactaacataattggaggtgagaaaatttcaaacaccactaaattttgaggaagacttgttttctctctttctatttgataattgattgtaatacattntgttttgctcttgacagatatctctttacaagataagttagtgatctatgac

SEQ ID NO: 12846 - DNA, 419 bp, Glycine max
  unsure at all n locations
tcatattanataatatataataaatcgttgtagtagcatttctcctaacaaatatagtaatttgacaacgttgatttaatggtgccctgtgggacaagattcccatatcttgagtgttttaagaattatggaatttttttttacttaaattatcaaagctatactaagaaaggatcattgttttttttttttttactgcacaaaagggtcattattaaacgtagggagtgtgtgattttttaaaactaaaaactaaattcatatatttttttaaaataaatataaaaatgttttaaacacgagttccattttgggtgaacaaattgatacatataaaaaaaaaaatcagaggtaactgcactctatatctaagagtgcatttggatagagaattctaactaaagaaagtaatttatcaa

SEQ ID NO: 12847 - DNA, 372 bp, Glycine max
agcttatgataaacgggaccatagagtgacacgtaagcctaatcggctacgctgaatatatgaccgtcccaaattcgcaatcattgatcgaaacatctactacaatggcctgactaatacgaacactcgcaccgatgcgtgaactgatactacgatgtaaaactatcgagctcatgtgcccgtgcattcctagcgtatcagagacataataccacttccattctcaaattgtattatgtatggacaacacatatgtgtagcttgctagaaatccagggtcactgaaccatcagttaagcctgcggagatgtatgggcagcaacgtttcacaaatgcctgtgttgcccttacatagtccaagctatgataccg

SEQ ID NO: 12848 - DNA, 229 bp, Glycine max
tgcggtgtgagattgccaagttgcttgacactgggcacgaagccacggatcgcattaagggctacatgatttccatacactcaaggagacaattagcggacgccgccacatcagcgatactagatatcgagctcgcattgcgaccgacgaccgtaatacgatctggcctttgattccagactcagggatgcctgccgatcttgaaacctcgcttatgatgtacagtgct

SEQ ID NO: 12849 - DNA, 399 bp, Glycine max
  unsure at all n locations
agcttgaatggagaagacacctttntgacaatgaggtgcaagcggcagccagtttcctggatgatatctcgcggngtcatattgatcggtggacatcagactgctgggtttggaaaccagaacctaatggccagttttctacaaggagcgcataccgtatgctactagaaggagcagctgatcagactgtggatgatgctttagaggacctatggcagctcataatccctttataagcatcaacatttgcttggcgattgatcaaagagagactcccaactaaagggaatttgtggagaagacgggttcagctgaacgatttgatgtgccccttctgcagtagacaagaggaggaagcctcccaccttgtttttaactgtccaagaattctccccttat

SEQ ID NO: 12850 - DNA, 476 bp, Glycine max
  unsure at all n locations
tggatgcaagagttagcttggctcccgaagattaagacattttgtgaggaagaggttgaaacccctgaggagagtaaggtggtgcaagccttgaaggaggaacttgaaagagtgcaagtgtcgcaacgtgcccttttgcgggcgagcgaggcgaggctcacgggtgcgttttccaaaggaggaaagatgcgcggagtcgccaccgacgtttatttgtggaaaacgtcggaaaaaccgaaggaagccgatcaaaatgaaaattctaagtttgggagttgtatttacgcttgaggaaggtattagcacctctcacgtttgtctcanaggacaacagcctattntttagaattgtggaattgtgttatcttaactcttatttctttatatttnttgaggtcgacaaaagcggggctcttgctcctacgtaccctccatcagagaggaaatcagacctacgtagttcttccttatgcgtg

SEQ ID NO: 12851 - DNA, 427 bp, Glycine max
  unsure at all n locations
agctntaggagaaaccattaaaactaaagtagttcctaaacaaaaatcaattgagggagcctcgccaagtgtccccatcgaaattgaaaaacctttattcaaacctttcaaagttagtgagaaggctaaacggaaaattagggaacttagaaaaactaaatccttaactgaaggcgtaggtgacaatcatagtgaattactaaacaagattggtagtttacttaaggtcattccagatactccccaagcctcggaaaatacttctaaaatggtaacaagaagtacctccaaattaattaatgttattaatgaagatagtgaccaaaactcagataacacaactgagataggatcagtatcagagaagaatataaatccaattaattccaaaaactggaaaacaccctccaaattatattatcaacgt

SEQ ID NO: 12852 - DNA, 465 bp, Glycine max
  unsure at all n locations
tctcgagagtctgccttaaccgaaggtagtcattaggtctttgtagcctctggtttccactctttctcctacaaagccgaggagttatccacagtgtggttggactatatcagatgagactttgagcctctcgaatgtcctctagtaaagtatatccatggaactaccttggtcgataaggaccttggacaccatgaaattggcgatcatgatggagacaactgtcgcaacctacccttcgacgggaggacaaggcgagatcgaaaaaggcgtcttctcatgaagaaaacgtgcgggagtcgccaccaatgtttattcgaggaaaacgttagaaaaaccaaaaagaggtctgcaaattntgaaaataagggttctggagttgtttatgcatagggaaggtattagcaccccacacgccccgtcacaagggacgacagcctntaatcgagtgtgcataaatgtgac

SEQ ID NO: 12853 - DNA, 424 bp, Glycine max
  unsure at all n locations
agcttgcctttggtttagatgtggtttatacatgatttaggacttgtaggatccaatttgggcaaaattggatgagggcaacagtgatttcgaaatctgcccaatttgtgcagcaaaaagctgtcaaattttgtgcaacagaaaattgtgtttgtgcagaaaatgttgtgtattgctggttgtggaaagggtagtacatattcggttctggacattntctagcaaatcccaacggtcaaaatgtagacttatgtactagggacctccagtaaaattttcgagtcgatccaacggtgaacgaattggaacaaagagaatgttattgnggtatttgagtaaggaaagctgtggtattggtttgtgttttgggcagagttttctgcctctgccctgttntcttggttctgataatncatgaatgttg

SEQ ID NO: 12854 - DNA, 491 bp, Glycine max
  unsure at all n locations
ggcctataatactcagcttctaaggagtgagcttagttatgagaggggtgtgtgtagctaagctctagcttcttaaggaagttttctcaaagaagcttctcaaggaagttttctcaagaaagcttctcaaggaagctacctagtgtataaatagaagcatgtgtaacactttttgtaactttgatgaatgagagtcttgtgagacacaactcaaagtttaacttctctccctttttcttccttcaatttcgtgctcccccctctctctttatctctctctttcttttcctccattgaagcatcctctccaagcttcttatccaaggttcatcttggtggtgaagctccttcttccatgcttattccttaatggatggcgccgcctcttacctcttctcctttgtattccgctgcatctccatggtggaaaatcaccattaaaggacctcattgaagctcanagatccagcctncatagaagctccacaagc

SEQ ID NO: 12855 - DNA, 427 bp, Glycine max
  unsure at all n locations
agctttaatctataaaactagtgaaataaagcattcatcatataatagttagatgataaggttattattgaaaattaaatttgtaacatatactacttcattaatcaccgataaccgttatggcttctttatatatagaactagctatatatgggcttgggtttacagatcatttgtttaacccgttagttatacgggtttgagtccgtgggttaatgggccagttagtagacaaactactttttgtttaaaaaatattaattgctattttatacttttattctttaattaagtatttgcataattattatttggtgtttggtaatatacgtcgacctccttggtagtacttgaatatttatgatttcttgttgaaaaagttaaagatattgagttcttaatgctntatttgatttgacacttgatt

SEQ ID NO: 12856 - DNA, 420 bp, Glycine max
  unsure at all n locations
tgtatctgttgcacganaaagcaagcagaaaaatacgaacctgtgtcagttataccgaagtatgcaagaagcatatgatcaaatgcagactccattagcccgccaaataccacctgccttggtaagtataatcctatgattcccaattgacttgaatttgtgatctctctctcctttatcctatatcttgttcttcaagcaggggctaaaggagctgaaggaatccaccatccaactggcttcaagtcatggatacattgattcccctgttgatgagactgttttcgatgtggataacgatgttgatgaccttctgccagttgaagttaaagaacagcgcctcagcaatctgctgcaggcattgatggttgcggcttgtgttgctgctatgcctcttttgaagaagataccaacttcagt

SEQ ID NO: 12857 - DNA, 405 bp, Glycine max
  unsure at all n locations
agctntaacttgagtcatcaaatgattataaatatgtgaccatggcacgaatttcaagagactgatttccttttatgcataacaaatttctttcattcaattctcttcatctttctaaaagtttttgttcaatactttctctttcaagaaaagttccttgaccaaaaacttgtgctattctttntctttattccttctctcttgtcaaaagattgaaaggactaaccgcctgagaattcttttgtttcttcctttctccctcttaacaaaagatttcaaatgactaaccacttgaaatatcttttgtttcttacaaaagatttcaaaggaataaccatctgagatatctttnttccttttcccttanacaaaagatttcanaggactaaccgcttgagatatctt

SEQ ID NO: 12858 - DNA, 465 bp, Glycine max
  unsure at all n locations
tgaagtgagaaagtatggaagagtcatatttcctacttttattcgttgaccacagtggtacctggagatatgtcgcgagggtcaggagaccttgnggacgtcaggtggggtgctattgcccaaaaccaagcttgaccaatcccgaccgaacccgggcatagtcagtcagtgagaacctgtgacgtacctaaacaggcgagctcctggcagtcaaccaataaaagaataaagaccacaaagcaagaaggcttgtgtggtggctggccagctatggatcttgagtgatatttggaatatggcctctggtaatcaattaccaagggtgtgtaatcgattacaaggcttanaaatgaagacaagaagttaagatggcctctagtaatcgattacaagggtgtgtaatcgattacaaggcttagaaatggatacagggagttgagatgacctctggtaatcgattaccaa

SEQ ID NO: 12859 - DNA, 416 bp, Glycine max
  unsure at all n locations
agcttgctgtatatccacgtangaacaaaatcttaaataagatcggtccttatacaaaaaatatgatcttaaaaaatttgtggatcaacatgtttgtatttatctgacaaagtgataaaatgtaatggtgtgtagttatttgtagaactcatttaatacaatttgtaaagttaccggattagaaagataatgttcttagattattactcaagtattatatacaataaacataatacaaataatcaagatcaagaaaaatggtcaaattgaatgttatagattaatactattcaataaatttaaattttgtttctcaaatgttcttacatctaaatgttgtaaatgatatggtgatattaattttgacactcaaattcaatgcttgagtgaatacttaataaatagagttgataata

SEQ ID NO: 12860 - DNA, 453 bp, Glycine max
  unsure at all n locations
tctatgtaagataaataactacaaatatgattttctttatatatgttgccctattaagtactggaactgtgagaaagctaccaaactatgaaggtataatcaatggtctctctctatgttctccttgngattttgngattcttttcatctgtctagtcttggttgtggctacccaagaaattgggtggagctcatggctcttgtggaatggtgctggcagtctccatccaaaaccgtctccatcctgaagaatctctgtcacatttaatggctcagcctcagaanaaaaaaaaaaccatatatgatgatattttcctactcaaagacaataaattgaatgatgagaggtaactttacacaactgatttttcgttttcaaagaagatattcttatttgtattaacagacacaggttaatatttgacactataataggttaaatgtcattttaat

SEQ ID NO: 12861 - DNA, 419 bp, Glycine max
ttaagctcattatctccagcagaagaagaggagaccatggccaccgcatggacccctccaaggacaacaaccaaatttattgcaccgaaatgacgggagttacaagccatctacacaaccaaatgcctagcctcggcacgaggcatatcaccaagggctccaccactggcaggatccaacaaacagcgactcaatgacgcaaagtcccacataacatatggagaaagagaagctcacaaacctggagatgagggcaactagcgcacaacttcaggaacctccactaaggggacggaagccagaaatagcatgtccgatggtaggagccccacacgcagagaagaactgctcacaaacaccctctaaggacatcccagcagaacatggacctgcgaccaaagcagataatcaaccgtcag

SEQ ID NO: 12862 - DNA, 446 bp, Glycine max
tgtgcggatgtaacagacatcgcctttgaccttggtgatccttgaatccatctcatcgaatcgcatgtcagcttgtaactccaaagcatcaaacctttcaccaacaaaagtttgaagaccatcgaacctgaccaaaatcttttgaagaagagaggaatcttctccaactaggaagtgcccttcttcatcaatgggttgtgcaccttttttcacccaagagccatcatgctctgtacggtaaccaaaagattcaatcacaacggcgccaattaagaaggatctcttgattggaagataatgttcagaatcaagagggatgctaaagtgtcgaacgaagagagtgactaagtgcggatatggaaatggagcatgtaatcgcaatgccttatgcatgcgacatccgactaagagcgccgaatcaatttgttggagcataccctaatttc

SEQ ID NO: 12863 - DNA, 401 bp, Glycine max
  unsure at all n locations
agcttggatattcagcctgacgagggatcgagggtttagtaatttaggctacaacatagaacacaagagcatgatttattagagaaatatatttctatgcatcagcttatttgttagaaagacccaacatatctacctactgctgtcattntatttaccttgcattntatagtttttagcacacaagtttagtttaaattctgtttgaaattatcacttatacatgttctctcaacaatgcttcgattctgaacttaattcaggctaacattangtccctgtgttcgatactcggattcatccgttntaattntaaatacttgacgaaccagtgcgctttccggtgaaaactccccaatgaaatttcctcgagacatanatgcacaaaaagtaactgaagt

SEQ ID NO: 12864 - DNA, 453 bp, Glycine max
  unsure at all n locations
tcttatccaaggctcatcttggtggtgaagctccttcttctatggcttattccctagaggatggcgcctcctctcacctcttctcctttgtcttccgctacatctccatggtggaaagtcaccattaaaggacctcattgaagctcanagatccagcctccatagaagccccacaagtaagcttccatcaagtggtaatcagagcacaagagcttcaagtaggtgctccttanacctccattaattntttttctttaccttctcttccattgttgtttcttcatttttctccatgtatctcctcacatgtcttgttctaaatgctgttaacatgattctttagagtttccaccgattaaacttgctatagaagctagatttgattntctatnggtgaaatttcttgttcttgttcttgaaccatgaattgtgttgagtttaagttcctttgag

SEQ ID NO: 12865 - DNA, 348 bp, Glycine max
  unsure at all n locations
gaccgtgtgagcattgaacatgaaacgcnnntcagggaaccaggagcatgagacgtcgccgttttaccttttagagcggccaaggaataggggccgcgggaagtgacaaaacacgaggcgagacaaacaacgtacaacggaagaagcacgtcgttaatgagaagaagcgacggcatcgcacgagggatacgaacggagaaagggcagaagactccctgcagaccggtggaaagaacttgaaaggcccgtatggtgaggaggtagaccagaacagaaacatgaatggcctttgcactagcgtcgcgccgggcgacccagcagcagccccccctcaccccgaagaaaacc

SEQ ID NO: 12866 - DNA, 247 bp, Glycine max
ggctgaccttgactgaacaagatactgcggaccaactttggctacaatttgggtagaactccggcttacagctcccgaccagcgggttcggtcgatctttggctaagtgcacccgcaaaaacgggcaggcaaatatgaatgagagacggtcatgctcgcttttaaggtatgaacatttaaattcagggaggccactaagcgaaaggaggcggaggacataaagcgcttataaagagactgatggccc

SEQ ID NO: 12867 - DNA, 390 bp, Glycine max
  unsure at all n locations
tagggaacggtaatttatacgaactcgcacccaatacggggtattaaggacttggtgaagactganaagctctgtgcttagatgattaaaaaacacaccatcattcgtcagttcacgctgatctatggcaagataataatgacattcgctaagttatagcacggcactagaactcaaaaactttttaagttccttcatataatattcatgtatgattataaattgtccttgaagttcaaaatatatttaaaaaagtgaattcactatattaatattgtcctcacaagacttattcttatatagccttgttctttgagtcacacattcttaagatatttccttttacacatgttcttctaattagacatttttaatacattctctcttatt

SEQ ID NO: 12868 - DNA, 178 bp, Glycine max
cgaatccgagctcagtacccagagatcctctgaggcatctgcagcgtcttctgctcaaaagaccccggagaaatcttactactcatagaccggaaagcggtgactaatgactcctatgcagctttcacataaagcatatatgatgggcagatcaccaagatgtctccctctcctgaca

SEQ ID NO: 12869 - DNA, 444 bp, Glycine max
  unsure at all n locations
tgaggcctggtggtgttcgtggcggnggaagtaggcttatttctcactcgncctcctcttcctctctctccgccgatctccctctctcgcgccctcatgcctctttctctctcaaggtcagatctcgttttgattatttgaatctcgttacctatgattatcctgtttgatggatacgctattacttattattattatcattattataggaatggactgtgagtggagtgttgagagtttgaaacttgcaatgtcctgattctaggtggtggcactcggttatgtgttcttcgctgcagatatggacagaaagtcacaacgtgtgggctctatgtgggctcgggagagttctagattgcccatcaaggacccacacacattcctgcccgtttgcctttcaactatggtatcatttatacgggacgggagagatctcagctacat

SEQ ID NO: 12870 - DNA, 424 bp, Glycine max
  unsure at all n locations
agctntagtatggcctccgtgatagaagccatttgatcttttaaggccgataggtcggccttcatctgttcttgcactccctcttcgttatccatccttctggatcgagtgttataggggtgcctttgtgcctttttagttatggcgagttccctgaagaaacaaacagtggtgagtatgccaccaaaacatgaatatgctaatgaatgatcagagcacttggatccacctcaaggccttttttagataacatgattagtttcagaacttctttttataaaaaggaacaaagctnttatctagccaagatcgtacaaaaggtgttacaacagaacctaacggtttctaattatatgggccatcaaatctatctgtgttggcagtaattaattagctcgtgaatttcctttggggctgaacacac

SEQ ID NO: 12871 - DNA, 475 bp, Glycine max
  unsure at all n locations
tgcttgtggagcttctatgaaggctggatctttgagcttctatgaggtcctttaatggtgattntccaccatgaagatgcagcggaagacaaaggagaagaggtaagaggcggtgccatccactagggaataagccatggaagaaggagcttcaccaccaagatgagccttggataagaagcttggagaggatgcttcaatggaggaaaagaaagagggagagaaagagagaggggggagcacgaaattgaaggaagaaaaagggagagaagttgaactttgagttgtgtctcacaagactctcattcatcanagttacaacaagtgttacacatgcttctatttatagactangtagcttccttgagaagctntcttaagaaaacttcctttagaaacttctttgagaaaacttccttgagaagctagagattagttacacacacccctctcataactaggctcacctccttga

SEQ ID NO: 12872 - DNA, 421 bp, Glycine max
  unsure at all n locations
agcttctatataagctgaaccattntatcaataaacacaagttgagttntattcagaaaattagagtttatctcttttatcttagtgagagtgattctcctaaattcttgagtgattcaagaacaccctggctgtatcaaaggactttcacaacctttgtgtgttgccctcgctggaaagagtgattctttccttcctttcatcttcacccttgttctttcaaaccacaattccagaaaattcacctctgcccagaattatctcgtggccataactcccattttacgcactcaaattaagtgattcttgagcctaaattgaatttcaaaaccagacctttcaccgcgttttggaatcacctcatttggagccctgtagcttcagttattgccaattctatatttctgtccagccaccactt

SEQ ID NO: 12873 - DNA, 471 bp, Glycine max
  unsure at all n locations
ntcactcgaatgtccgattcatgcgcatcacaattcgagacttctcgaaattgaacaacggaagctcttgatatattcaaatggtcataacttttcacttgagtgttcgattcaggcacatcacatttccagacgctcgatattgaacaacgaaagctctcgtatattcatatggtcataacttttcactcggatgtgcgattcaggcgcatcgcatttcgagacgctcaaatttgaacaacagaagctctcgagaaattcaaatggtcataacttttcactcggatgtgcgatttaggcgcatcacatttcgtgatgcttgaaattgaacaacggaagctctcgagaaattcaaatggtcataacgtttaactcggatgtctgactcangcgcatcacatttcaagatgctcaaaattgaacaacggaagctctcgaaaaattcanatggtcataactnttcacttgagt

SEQ ID NO: 12874 - DNA, 426 bp, Glycine max
  unsure at all n locations
agcttgctcagtcaaaacacaatccttgtgaagttgatgcacaagagaaattgacaaattgagaaagagacacatgaacctggtaagctgaagttgatgcaccaaacacaaaaccaggaagtacgaagatcatatctaatccaatgtatcctaattacacgatactaggaatgaaatctttacaataacatcaaatgacatgcatcctacataagtccatgcaaattgaatacccttttttttctaagagtaaaaaaattgaagttactacagtatatataaaacatcagaaaattgcaaatgaattaatgatcctctaatgtatccaacatacaaagttgctgccataattgttctaattctttgatgaaaccacaggagaaatgtacttgtacataatgtaaatcanatntagcaactgcttta

SEQ ID NO: 12875 - DNA, 467 bp, Glycine max
taatgttaacaatggtgggcgtgcataaacgtctttgttaatcacaatttctaccacgatgattccaaatacaccgatgtagataacctacgttgtatcctactaagacggtccgccaaataaacgttgttgtatcagtcacatgccatgcacatgacttttaaaagtgtcaaatatttacgacaatgccaccggttaccctactacgacgggtttattacgaccaatgtaaaatgcgcgtcgtaaaaggctttttttttagtagtggcaagttcggttaggctctcaagtggttgacaagtctcgtttaggtagtctttttggccttggttaacaagaaaatcgagtgttaggtacaaaaattggaaagctccactacacataatagtggtattatttatttcaatattggtttctgcattcatggttagtttgcttattttgaccgtgtggctctctccatttat

SEQ ID NO: 12876 - DNA, 415 bp, Glycine max
agcttcaccggatgacgcttatcgaacatttcctaaccgacgtcatgcagatttcgttcagggattgaattgagaactcgttaggcgacatctgtcgtgaagtagcgaccgatatttttcagccgacattgcacaattctttttagaaaagctcgctggtcgataatggtctttttacggcagagtaagttttcttgttttggtgttgcataaaaaagttacaatgtacttcggctaggtttttcgtgcgagttcaaccgacattctgtttcggtcaggaaaacattagcccacctctgcaataaaaatatttgctatccgtcttcatgcatatttcattcaacgattgaatagataactcaatagccgacaacggtcgtgaaatagtcccgactgatatctttcagcccgcatt

SEQ ID NO: 12877 - DNA, 460 bp, Glycine max
tcatcagatgacgccgatcgaacctttcctaaccgacattatgcaaatttcgttctcggattgaattgaaaactcattagccgacatcggtcgtgaagtagccccgactgatatttttcagccgacattgagaataattttttaaaaaaactctcactggcagataatgttgatttttacggcagaagaagttttcttgttttggtgtttcataaaaaatttacaatgtatctcggctaggtttttttctgcgagctgaaccgaccttttgtttcggccgaaactggcatgttccaattaattcggccaggaaaacattagcccacctcggcaaaaaaatatttgccaaccgacttcatgcatatttcattcagggattgaatagaaaactcaatagccgaaaacggtcgtcaaatagccccgactgatatttttcagccgacattgcgcaatatttatt

SEQ ID NO: 12878 - DNA, 241 bp, Glycine max
actaggaaaagacagtaagtctgtcgtgcgtggaaactgataaaggctaaagagacttcagtttaatactcacaccctacattcttaacgatgacaattattcacgtgtgattaatctttaaaatcacagactaatcctatcatggatctatgagagaatctacacaaaaatatatgccttacattcttaatccatagtcaaaaatctacattactatgttagctacttataattaacaaa

SEQ ID NO: 12879 - DNA, 205 bp, Glycine max
  unsure at all n locations
ctcctatcacacatactgcgtgagaacggctcttcctagagggtaattatgtgtctttttgttccttgggacgatgcgtcgagggagcctatgatgtagcagctgaagcacacgattgtctcacatatagagtgtacgaatagcaccagcctttgttnttgtggcggattgagtgatgggactctcgagtaccattgtattataa

SEQ ID NO: 12880 - DNA, 374 bp, Glycine max
tagcttagtttcataggatcatagtgcatgctaactgtgtgtacttcgttaactccagtctccactcggactttcagaatagcagagtttcagtatgataaataactagaaagatccacaaatcaatattgaagggtcatagttattacaaccaaagtggggaaaattcagattcatcatagatagattagtaggctaattttgcatatctgacctgctgatgagactggaacatgataatggtgtagaactccagttgctggaagataccctttttgaacattatcagcatagattcgagcttcataagcatgacctgccatcacatacagagttataatatactgaaacttcaaggcctctaatagatggat

SEQ ID NO: 12881 - DNA, 409 bp, Glycine max
tagattgcatgctctggagcgcctcattatataaggctccatttcttcaaaaccatatgcatttttcgcccttcatccctcaaaaaagataaagtgtcgagaacaaagaatttcttggaatttggttaatgctctagtcaataaatgtggcaagccccaacattcccaaagttgcccaaaccgtagctggtttaggaatttgcaatcttagtccgaaaaggaatgaaatacataaataaatcttgcaatgaatgcatacatgcatgtttgtgtaaatgctatatttcttgactagtctgttcagaattgctagctcgaacgttttaactctaggtctcgctaactggtgtgtattttaattcttacgatattggttatagatataaaataaataactatttattaaaat

SEQ ID NO: 12882 - DNA, 405 bp, Glycine max
  unsure at all n locations
agcttggatttccttttagtagggaatctatccttcctaagatggagccaaacccagtcaccctcattaagaactagctcttttcttcctctattgcctttagttgaatacacctttgtttggttctctatttggttcttaaccctctcatgcatcttctttacaaattctgacctagattccccttctttatgtataaaagaagtgtccagtgggaggggaatgaggtctaacggtgttaggggattgaacccatagacaacctcaaaaggggactgcttggtggttctatgaacccccctgttgtaggcaaattctacatgaggaagatactcatcccaagacttatggttgcctttcagaagagcccttannagggtggataaagacctattcactacctct

SEQ ID NO: 12883 - DNA, 368 bp, Glycine max
  unsure at all n locations
tgcacagnttttattaggtattaattgttctgcatatctaacaatcgtggttntaaattgctgttgtcgttgcgatccttgacattgcgtgaaaatgtgtttgtcatgatttggttgcagagaatcgtaaaatctttatgttgcggtcgcaattgtggttatatatggatcatgatttaaaaccatactaacaattttgcgctttgtgtttatcaatcgattaattgatgattgaatgtgaaaattaatagaagtttttggcaatgtanggcaatgagaggctccaacaactcaagaaggggcttatcaaaccaatacgatggtccatgcaaggcgacaaaccccattgacaaatgttggagatgtga

SEQ ID NO: 12884 - DNA, 365 bp, Glycine max
  unsure at all n locations
agcttagttggcgggcaatataaggaatcccatttccagtccagaatatgaagagactcaatgatgggatggttcttagtgctagacggaggaaggactacaaattgagtgggtggcggtccgtgatggagtttcaatagtgaaatatgaaacgtgggatgaatcttagaagaagatggtaactggagtttgtacaggacagggcccacgcgttcgagtatttggaatggaccgtanaatcatttggccaacttggtgtaagctggcgcanatgatgtttggcgatatggtctaagacatacatacacccagttgcctactgtgaattcaagactacgacaatgagtggttgcacagttttatgt

SEQ ID NO: 12885 - DNA, 462 bp, Glycine max
  unsure at all n locations
ctttcaaatgggtaaaaggctcacgtttactttcttctacattatattcaaacttgtccaaataaataataaagtcatctcgactcaaagaaagtcatataagtctcatacaattaatataaaacctatatcctaatgtcacatcctatcagagcgtggtgttcccgtgtcctctagcatgaggttcttcatagtcatccacctattcatctgctcccccgaacacaagttcaagatcatcacaggatccaaacacaacaacacacagggagtgagttatcacattcctaactaatagagaaacaagacaattaaatatacatattatataaatgagataccacttgcttaaacatagctcacgtaacttcaccacttcgtcattcanaattcacttttcaattatcaatcacattacacaagaatcccacacttcgatcaagatataataacacatcaatt

SEQ ID NO: 12886 - DNA, 402 bp, Glycine max
  unsure at all n locations
agcttcatacgacacgtgaccccccacccatggccaaaagtagatcactatattacttcttctttaggcataaagatggttgtaaccaatcatacatatagagtggtgtcattntttcgttttacataccaaccaagactaggacctgactcttgccatctctcanaccaattcgctctttanagatttgcactanacaacatatagtttctttatagccctatactcaagaccatagtaaactagacagatttccatttaacattccctgctanggagtgcaaaaaccggttcataaaaaaaataatcgaactgttntaacanatttgattttatatctaaatagtcaaactatnttagaaaattgttccaaactagattgatttaaaaaattgattctga

SEQ ID NO: 12887 - DNA, 421 bp, Glycine max
  unsure at all n locations
nttagtattcacacacacacagagactcacacacacacacattcaaacacacacacaagcctaaaacgcagaagctgtccaaagctaattagtagtatggattgccttaaggtttgtctttggtggtactccatttttttttcttcttaggctgaacttgttctagtaccccactaattagtttttagataatcattaataaaactggttttgtttatgttggttagaacattntaaattgtgtactagcaagtcattttcaattgtaacattatctaagtccactaaaaaacataactcgtctggtagctagagttttgtcaattaaattgagtaacatggctcgaatttcctcgtacatgctagaaaattcttagcctgcatcataaacacaagtcactctgtactctagtctatacat

SEQ ID NO: 12888 - DNA, 302 bp, Glycine max
  unsure at all n locations
agcttatggtaaaatctgngacctagccatggtagaagtctccacagaggccattgcctccctcgcccagtattatgatcagccactgaggtgcttcacctttggggacttccaacaatcacccatggtagaagaatttgaagagatcctacgatgtcctctatggggaaggagaccatacctcttctcagggttctatcccttattagctagaatttctaaagatagtccaaatctcggtgcgggaatcagaccacagacagcaagttgataatggtgtggttggaataccaagataatat

SEQ ID NO: 12889 - DNA, 435 bp, Glycine max
  unsure at all n locations
ntggcagatcaaggatattggacttcattcattgatatattagcattgttggggctcgggaccatactctttccaaatgtagacggcctagtggatttagcaacgatcgacgcttttcttgcttatcaccacaataaggaaagcccggtcattactgatgcaatcctccctaggaagggacaagtcactagagccatgagcaaaaggctccaagaggattgggcaagagctgctgataaaggccctacggttcttatgaacctcagggtagatttctgagcccatgggccaaggttgggtccaattatctttgtacatattatactaggatgtcattatatgtgatccttgtatttaggagtccataatgtaagtagggtaccctagaaatatacgagtttntagcccttgtattttacggcacttagactactt

SEQ ID NO: 12890 - DNA, 391 bp, Glycine max
tagcttcttttggacctcgaacaagcaactaactcctctttcagaaccatgctatgtgctcgcgactggttcctctcttgccttcgcagcttgagttcactattgctaccccacagagctccatgaaatttattccggccatactcttccttgcgagccctcttggtctcttgttcaagggctcttgcagtagatgcattctcttcccgtaacccggcacactccttacgaatgtgtgtagcggccaacttgaacttctccttggcaagtgtcgcctttcctaactcgctcttgagagcttggacttcttcgtcctcttacggtgctctcaaactttcttcgatgacgacttttaactatgtgagaccatctagacctcgatatgaacttt

SEQ ID NO: 12891 - DNA, 455 bp, Glycine max
  unsure at all n locations
tgagctatcggaagacttgcttattcatttagtgttgatttctcttccttcacagtagtttaatgagatcatttcatattgtgtgcaagaagaggaaaggttgaagcaagaaaggactgaaagtgttcatgttgtgagtacctctaaagacaagggcaaaagaaaaaggactgaggagcccaagaatgaagctgctaatatcatgcttggcgtgaaaaaaggtatgtttcttactttggtctgttctgatgtcaatttaactttagtacctagaaacacctggtggttagattctagtgtcactactaactaataacatcagtgtttcaatgcanggttgcctaagctatcggaagccaatcgattctgaaagatggatctatgttgaagatggtaaatcagtggaagtggaagctatagggcactctacattattattatgtactgcgttttat

SEQ ID NO: 12892 - DNA, 349 bp, Glycine max
agcttgtgtgaatcacatcactcctgcattttatctctagcatgcattactttttctttacccactcctcacgtttggttttttagggaaaaacaccataactaaacgcgccacaaggcatccctatcgcaccagatccatatttagaacgatgggtgatcaagaggagacacaggaacagatgacagccgacatgtcgactctgaaagaacagatggcttccatgatggaggccatgttaggaatgatgcagctcatggagaaaaacgtggccaccgctgccgctgtcagttcagctgccgaagcagacccaactctcttggaaccgtgtgccatcctccctcaacat

SEQ ID NO: 12893 - DNA, 454 bp, Glycine max
  unsure at all n locations
tatgcgcatatttccttacgaacgttcacttgcacaagactattctatcaactaagacaaatgcacccatatacaatcaaggtagcttcattacctagattatgtacttccaaggtgtatttgttatttacatcacacacgcctccttggctgaatttacatacatgcatactcaaagcattttggggtaccaaaaactgcacatgcgctcatcttggtatttctaatacccatacatatacaaacttcacgatgaatcttgactacctacacaataaggtgctacctttcatgtttttttttcaagtntttgctacctaaagccacatgcaaattcaagcatattttcctttgctgactaaaattgtattcaaattagaaggtatatatttttttgtaatatgttctcttcacataacatgcaacatatctatatatattttttgtgagacat

SEQ ID NO: 12894 - DNA, 423 bp, Glycine max
  unsure at all n locations
agctntacagcagattntagtaatgacccactaacctagaattaaaataacttaatgccattaacctagggaattaaaaaaaacttaatggctgagtgtaactgaaattgtggcaaccaaaagtcacccccaacagccaacaagtcagccaccatttggtctcccaaaaggctgatgcctatgttgccaattgggcccttattacaacttgaactaaacctaactaaagcccttttagttgattaacccaaaacatatttttggtcagccaactttacaaggattgggccattatttagacagactaaacactctaaaattgaaacaaagtggtgtcatttagtcctcctccatttgggccatgatacaactcacaaccttggacttttctccttgaaacttgngcttgtattcaaatagtat

SEQ ID NO: 12895 - DNA, 463 bp, Glycine max
  unsure at all n locations
tcctctgccgtannaaaaacattgtaagccaacaagcgttttttaaaaaaattgcgcaatgtcagctgaaaaatatcagtcgggcctatttcacgaccggtgtcagctattgagttttctattcaatccctgaatgaaatatgcatgaagtcggatagcaaatatttttttgccgaggtgggctaatgttttcctggccgaataaatgggaaaatgccagtttcggccgaaacaaaacgtcggttgagctcgcccaaaaaaacctaggcgacctacattgtacattttttatgcaacacctaaacaagaaaacttcctctgccgtaaaaaaaaaacattgtaagccagcaagcgtttttaaaaaaaattgcgcaatgtcagctgaaaaatatcagtcgggcctatttcacgaccgttgtcagctatcgagttttctattcaatccctgaatgaaatatgcatg

SEQ ID NO: 12896 - DNA, 417 bp, Glycine max
  unsure at all n locations
agctttgatttcctttgttccgganacctttcttttctcatgtgcacccaaacccaatctccgggttcgaagacaaccttctttctccctttgttggcttgtttagcatagcttttatttttcctctcaatttgatctttgactctctcatgaagcttcttcacatagtccgcctttgcttgaccttctttatgcttaaaaacagaaacattaggcataggcaaaagatcaagaggagttagtgggttaaaaccataaacaacttcaaaaggagaacaattagtggtgctatgaacagctctattgtaagcaaattcaacatggggtaaacaagcttcccaagtttttaagttcttcctcanaactgtcctaagcaaagttcccaaagtcctattaacaacttccgtttgcccatcg

SEQ ID NO: 12897 - DNA, 477 bp, Glycine max
  unsure at all n locations
ntgagcacattcaaatgacaataactnttgactcggttgtcttattgagtcccgttatatatccagacgctcgaaattcagaacataagctattagaaaaatcaaacgataatcacttttaactcgggtgtccgattgtgtcccgtagtatatcgagacgctcgaaattgaaaactgaatctctaagaaaaatcaaacgacaataactttttactcggatgtccaattgagtcccgtaatatatcaagacgctcgtatttgaaaatagaagctcttagcaaattcaaacgacaataactttttactcggatgtccgattgagtcccgtaatatatcgagacgctcgtaattganaagggaagctctaagaaaaatcaaacgacaatgacttttaactcggatgtcggatagagccccgcanaatatcgagatgctcgaaattganaacagaagctctgagcaaattcaaacgacaat

SEQ ID NO: 12898 - DNA, 432 bp, Glycine max
  unsure at all n locations
agcttgcttgtgtaatcgaactacttgacttaagcacgcaacacaaagaataggttgtactagaatcagaaggtatggtcaggagtattctttatgaaatatatctcgatatgagtcatcgaactatagagtatcatcatcgctaagaacaagaaatcacaaacaaccatactatctatgcaattaaggcagaacaccattctacaagcatacctagaattataaggttcctataacaagtatataacgtacatataagaagtaagaattaaacggttaataaggatgtattaaggaatcacaaacttcaacaactacacacaaaataaagggagttaagtattcatgtgtttacacatgaagaaagacacactcatccaaggcatatatatacggttcanaaggttntcacaacactaatccacacatcaa

SEQ ID NO: 12899 - DNA, 480 bp, Glycine max
  unsure at all n locations
tatgagtntgtggatgatgtgaggcttgtgttgtcttatgtattgcaataccctccaaggagtgaggttcacagaactgcaacaaggatcaccgagggttttgaggtcaattggaaaactatgaaggagaagtggatgcgtgaggccgaagagacgaacaagatttgcaagagggaattacatgtgtgtccaaatgaaagaagtcaagtgagtaatcatctcacaaaaaggagcaatatttttatgtgctgattcaaaatagcttctcaccacaagtcaagaaagctatgccaataagggtcattatgagcagcatggacattacccctcttcaagagtttcatttaattacctgggttattcatttttatgtataaagtatctattgagtttcacgtaagaagtttctactgtttctattttgagttgtaagattactcctcaataacaagaataacaagaaagttctgctatattatg

SEQ ID NO: 12900 - DNA, 417 bp, Glycine max
  unsure at all n locations
agcttccacttcaagaaaaatgactataatatttaatgtgcaattctaccaactccatacactcgtattcgagattgattgctaaaaccagggtattggtgatatctgttttggtaatcccgtttacttagtggaagaaacattttcttaaataaattgcacagaataactattttaggaaatcattggagagcccagcaatgatgaataacttcttttggaaatattccaattaatgctaactattttatgtttctgaatgcattntttcattaatctttaagagacatccccatgtgcattaaacccatagtttgtgctccatgttgcaaggcctgaatgaatatgacggcacgtggggcagaagcagtatgttaaatagcactctcagctagatgatcaaagtgcacagtgagt

SEQ ID NO: 12901 - DNA, 469 bp, Glycine max
  unsure at all n locations
tcctcctcaagctgtccaaaatcccaaaaatgtcagtgccatttcattgaggtcggtaaagcagtgtcaaggacctcaacccgtagcaccttcctcatctgcaaatgaacctgcccaacttgtctctaacccagaaaaaggtaatgacaaaaatttacctaacaatttctatgcagatgaatcttccactggcaattctgatttgcagaagcagcacatccctcctcttccattccctccaagagcggtttccaacaaaaaaatggaagatgcagagaaagagatcttggaaacatttagaaaagtagaggtaaacatacctctgctggatgcaatanagcanattccaagatatggtaaattcttgaaggagctgtgcactaataaacggaagcttaaaggaagtgaacaaattagcatgggcagaaatgtctccgcattgattggtaaatctgttccccaaattcct

SEQ ID NO: 12902 - DNA, 394 bp, Glycine max
  unsure at all n locations
agcttcgatgaaaatattgagtaaaaaataaactaattagaacaagtaggagaaatatgaataaaaatcaaagaagtattatttttaaaaaattattgataaaaagcataaatagaaagttatttaatttaaatgtataaattaattcaaacgttcatttcctaatgggtgaataggtacttctgaaatatattgnggccggtaatatagtccactttcattacagtcaattgctagctgttaattaattataatttttcttttatctttttactttgatttattcaataatttttattggttaacaatttcaaatgaattctttaaaaaaaattgtcattaatattactcatcttgactcctgagttntgataattacattcctactcttgac

SEQ ID NO: 12903 - DNA, 423 bp, Glycine max
  unsure at all n locations
taacgatctttntacaaatttaatattttaaaaaaatatatttgaattcctaattaattcataatcttcttaattcaaaacctaagaaatactatggtgatactttcaaactcattacttgtttatcagttttacaggttcatctattttgtagtttttgttaaccattgttctctagtctccacaagagcaccaagatactttttttctttntttctgtctctcatactctcgcacttcaagttttttttccgtcacactaggaattgtgagctntatttcccccacacttaaatttcccaaattccccactcactggttaaagatattgtaagccctttttcactcttttggccggcaatggcacattacttgacaccaaatggaatttccgtagcagacattgaacgcatccaaccactg

SEQ ID NO: 12904 - DNA, 236 bp, Glycine max
tcaagcttgacttacaattcataagggaaaaaactctgcaacaaatataaatgtaagggaacagtatttgtcttttaaagcacaaaagaacgcaaaaaagatttgttccagaagaaccttgtcattacgtcttccagcatgatcactcccaacaactaatggaaagtgctttgacagaattgatcctctaaactgatcaacaactttcaaaacagatgttttcaagccactcttag

SEQ ID NO: 12905 - DNA, 421 bp, Glycine max
  unsure at all n locations
tggatgtccctgaaaagaaagagatcgctttgagagctttacattcggcttgaagtgtcaaaaagaattatgcgtccataacacaccatgtaccaaagaaggaaaatgggtgagcaaataggataaaacctacagcatgtaggacattatgtaagtagaatgaaaaattatcattacaaactacttgattttagactntagcttacgcattctaggataggaattactaatgatttttctgacccagcattgtttaatcattaatggctgccaactcttatgtgtcttgacttctttccccaaaatcagttgtataaaattaacaacataatataccaggaaaccactgccaccaccacagccacagctgtcatttctttcactagacatgactatagccatgattgcaccatcttcagag

SEQ ID NO: 12906 - DNA, 387 bp, Glycine max
  unsure at all n locations
agcttctttagaagcacttctaggataaaaaaaataagagaatgaaatgagctttctatttcgtttttttacttgtgatggatttttaacttattacactgactgatgataattgataacagctgctgatgttcattgatgcttattattcttactatgtaatatttattaagatccaagaagcccagatacataatatgatatggttatgatacagaattacagatagagataccgacattntaaaaaattcaagttaggacaaaaccatgatacattaccaaaaatgcatagcaatagcaacttggagaacacagaccagcacccagcgaaggagagagaaccaaaagatgagctagaaccaccagcaacttcagcaatgcagat

SEQ ID NO: 12907 - DNA, 465 bp, Glycine max
  unsure at all n locations
agatctgtttacaaagttgacaaattatttagcccncttctttgtacaagtttactcactttgtgtagcgttntagatttgttattttccattttatacaccaaaaagtatcatggggactttatctctctaaattaatcaatacaacttgactgaaattaatttaggtttaatatggttttttgacatagaagattttagaaaaggaaaaagaaatctttcagaaattcttataagtgcagtctaaaaaatgctattcatttgcatccttagttaacctgtacgtcattaataaataataaataattattntaatttaatcagtcaacgtaaagacattggatatgcgttgaaacttttccagggctaagtaaattattagttatatatcatctaattagttgaattaatgtatttctagaacatgcttcacaatctaagccaataaatatttctcttaaaact

SEQ ID NO: 12908 - DNA, 333 bp, Glycine max
agcttgacaggctgccatagcagcaacaatatattctgcttcacatgtggacaaagcaactacactctgatacattgagcaccaagagattagtgatgctccaaaattgaaaacatacccagcagtgcttttcctatcatccttatcaccacaccaatctgaatcactataaccaaacacttctccttctatattcttctgactgtgaggatataaaatgccaagatccaatgttcctttcacatacctcagaatgctctgtgctgccaagaagtgaggagcctttggtttctccataaacctacttatcaacccaacacaataggcaatatc

SEQ ID NO: 12909 - DNA, 462 bp, Glycine max
  unsure at all n locations
ntacattcaaacgcaaggataactatacttgattgactggtcctctcatggtctcaagtgtgtttacaactcaataatcatatagccttcagataaactctgcttaacaaacaacaactgaggtttgtaagttgtaaaagttcattcaaacatttattgcatctgagaacacaaggtgggtatatatagagaaaatagctataaccatctgtaattgattaaattggcactgtgatcgattattacgcgaaagtgatcaatcatatcttccaattaatcgattaaagagttcttccccaatgctagactatataattgattattttcacataataatcgattacattgtcaattcaattgattacagtgtccttctccaattatggaaaacattcaagaacaattgaactgggatagctctcttaatcacttctaggaacactctctagactgatgtaatca

SEQ ID NO: 12910 - DNA, 416 bp, Glycine max
  unsure at all n locations
agcttgctaatcacagggcatttgcaaatggcaatgtggagactcattttattgataactacaaagaagacctctttgttgatgctaacaattcagtgtctgtgaaagaagcatatgaagctgctagacttaatgcatccctggtggccgcatgcctcattgaaaaagagcatttcatattggctagaaatccacctggtaaattgtcccattcttgctgtgtaatgttgagttgtttttgtaattttccttggtatttacataagcatgttcagggggcagcagcttgctccctatatggtattcttctccacctttcagaatccatcatcangctaagcgtagaatggaacttgagtgggataatgaatatggtagtggtagctcanagatcatgaagcttaccatcacttatc

SEQ ID NO: 12911 - DNA, 440 bp, Glycine max
tccaagcctttcccagcgtttcatgttgatctgatccttctctttgatttctctttaacgacctgctttttgtgacgaaggctttggtttgaatgtgttttgcttcgactgcactgtacctgtaagttttttttttttgtttggttagaatggactcggtgttttatgcgtttggttttttctttcggtttgccctaactatacgtttttttttgtagaattagggttccgtgaaaaatgagagaggggctgagatcgcggacccgattggggacggcttctggtggtgaaggagttgatcacaagaaaacggttgctgtgaagagtgaggctgttgatttgggtgatgagggtttggaggtacagaagtcaacgattgagaagaagggtgaagttgaatgcggtgtgaaacaagaatgtggctttgatttgaatgtgag

SEQ ID NO: 12912 - DNA, 390 bp, Glycine max
  unsure at all n locations
agcttccatcaccattactttccttaactntttaaatagtgatcaagggctttccatggaccctaagagaataaaggtcattcctgagtggcctactccatcaagtataagggaaatttggggtttcaatgatttaacaaacttttacaaaaggtttgtcccatatttttctatacttgtagcaccactcattgagttggtgaggaactatgttctctcatggaaagatggtcaagaaaggcgttttcagtccttaccctactctaacatacccaacatcactaattcaatgttntaattcttttaacaggtgttgagaaaagaatccctgagtttcaagaacctctggatttgaggtcaaatcctttnttacgcattaagatcaataga

SEQ ID NO: 12913 - DNA, 428 bp, Glycine max
  unsure at all n locations
tgtagccattagaagagaatgagcgtgtgattgtaattattattgaaaatgttagtcagtttgccagattgattgtgaaggaatgcattgaccgtatcccggtgagagtgtgatccttaaattttgagagaaacgactatcatttagtactgatttttgcgtgaatctctgaagtatggactgaatgcatgaaattgaggatgatgaaggccatgtttgattgtgatagccatttaaccacaaatctaaccatgtgcttgaatgatttatcgcttacacctagttgagcagaatgaattattgattgattgaaccctgagcttatatagtgttatctcttgctaccttgactcangttgtaggagagcatcatccataggaagtgtggttcanagcaaatttgtcccanatttgcgggagtaattatc

SEQ ID NO: 12914 - DNA, 384 bp, Glycine max
agcttggacagtcctcacactataagccggtattgtggggttaagttaggccctaagcccaaattctaagcaacatggctagttaaaactggtaaatacaattctagttgcatagggaaaaaggtttacaagttaagaacaaataggttaatagtacttaattgcctatagtatcacataaagacccaaacttaccagtccgagcaggtctgaagcttgaaatatatttcctgtaatgaaagtataaaaaatgagtaaggtgagtcggaaagcctttaatatatttactatagaaggatattgaaagggggcaaacaaacaacataaaaaacataattaatagcacaccatttagtagagttgcggtgttcataattctttatc

SEQ ID NO: 12915 - DNA, 479 bp, Glycine max
  unsure at all n locations
gtgaccttagatactcaagcttaggggacttgtgtactcgtacgagacccactagtaatcattactagttaaccgactaccatgacttacacgtcatccttagtggacattaaggacagttaccaacttaattattgtcctcacttataagacgagaagaataatgggaaaaggtaagtcacattntattcaccatatacaaatactttaccatcggattgtcccctcattggaaaaagaggtcggtagaagaagaaaaaaactatttcacgtacgatataggaagattctagtaagaataataactaaattcaaaattatgggtcaaccaaagtttacaaatgcctatccacataaagttatatttattagaaccaaatattntttaacacanaagcattaatgtatattaatttatcacaatttgtgaatttattgataataacattagaaattntacattatctagataaaaacat

SEQ ID NO: 12916 - DNA, 344 bp, Glycine max
tcaagcttgtatggagaagacacctctttgaatggacaagccagtttctgtgtgtgtgtgtatgcggaagcttgaatcaagaatctgtctaagtttaatgcagcatccctaggctgcattaaatctcattacaggagcatcactacatccaacatatgggaagtcacatagacaatgggtgggattggagctttatttgtagaacgccattgtcttgacaatgaaattgatacggctggtgttcctctcaatgaggttcaagatatggcgattcaacaacatggacctgatgtgtgggaatggactgctgaccctacacgtcagtataccacaaacaatgcata

SEQ ID NO: 12917 - DNA, 454 bp, Glycine max
  unsure at all n locations
tgaaggtaaactagatgccttggttaacctgttaacccatctggccatgaataaaanatctgcacctgtcgccagactctgtggtttatgctcctctgccgaccaccacatagaccttttcccttctgtgcaacaatctgaagtaattgaacagcctgaagcttatgctgcaaacatctacaatagacctcctcaacctcagcagcaaaatcagccacaacagaacaattatgacctctccagcaacaggtacaatcccgggtggaggaatcatcccaaccttagatggtcgaatccttcacaacagcaacaacaacaacaacaaccttattttcaaaatgttgctggcccaagcagaccatacgttcctccaccaatccaacaacaaactgtngaggctcctccacaaccttcccttanagaacttgtgaggcanatgactatgcanaacatg

SEQ ID NO: 12918 - DNA, 415 bp, Glycine max
  unsure at all n locations
agcttccctccttcacatataatgaaaacctcaagctttcctctctcaccaaaagaccaaattcaatctcaagcttccctccaatactgctttgaaacaatggatcagaagattcaaagtatattgcatttggatcttatgggtagaacccatacagtatgccatacaagtagagaatagtacgaactatatatggtgtcaattgtttcatagcagtatgtgtgagaagcttagatgtaatttggtcttttgggaaaagaggaaagctagagatnttctttttatgtgaaagagggaagctcgacattttgttttttctggtcgaggagggaattatatacatgaggtanataattgaaaattccatacttaaagactttccaaatcgataattattattttttatatatttaca

SEQ ID NO: 12919 - DNA, 283 bp, Glycine max
  unsure at all n locations
ttacccacaaaaaatctattgatatcaatttatcaacgtttgtctctttgaagaaatagctnttgcaagaatttaattattaaaaaactgcatatggagaaggatacagtgccctttaanagatgatataagataataaaanaatctttaaattgcaatttatcttttaatatatattaacattattaattaaggttattgaattcaagaatttaagtaaagttgtaaaagttttgtaaatttgatttgtaagagtttactttgaaaaagatgatggaattta

SEQ ID NO: 12920 - DNA, 226 bp, Glycine max
  unsure at all n locations
agcttcnctctttcacatttattgaaaacctcaagctttcctctgtcaccaaaagaccacgttcaatctcaagcttccctgcaatactgctgtgatacaatggagcagaagagtcaaagtgtattgcatttggatcttatgggtagaacccatgcagcatgccctacacggagagaacaggtggaactatatttggtgtcaattgtttcataacagtatgtgtgag

SEQ ID NO: 12921 - DNA, 617 bp, Glycine max
  unsure at all n locations
acacacccgccnccgtcnctcatacactagtcgtatgctctctgtcgcctanatactatatcaaatctcanccaccgcacgaccgttgaacccctgatgaacccatctgaaatccgacagccaataagcacacgatcggaaatgaccacttgactcggaattcgcatgaaccctcttatactgcacagacattttacnttaccacactccatagatcacatgcgatattcgagtatatccaacgccagtgctctcatttgacagaagctagtcctatagcaaggaactataatcaagttgatcaaactcgccttatcggaaaatcgttactacggtcacttntacaaagaacgaaatccgcgataatataacgacgatcttctaaagatggcactctagtcatttatatatagcattaaacattaattaactgaggcgttatctgaagctcgagattatcaagtcaaggatgtcagaacatcttcgcaaatacttgttatagcaagagtctactctcgacacaatgatgatgggcaatatacacaatacatgtagaggtggtggaggccgatccgtgtattcggaatcaacatcaaacttcaaaatacagtctgccn

SEQ ID NO: 12922 - DNA, 200 bp, Glycine max
agcttatgtgtgataagatgtgactcttcacattagaatccgaagttcacacgtcaaaatgcactggtaatcgataaccataacattgtaatcgattacagctctttgaaattaattggaacgttgtaaattcaacttgcaaactttttctaatccattatagtactggtaatccattacaacaatcgggtaattgatta

SEQ ID NO: 12923 - DNA, 402 bp, Glycine max
  unsure at all n locations
atgtgacanaacgtggaagagccagtcttcctacttttgtntgttgatcacagagtggtacctggagatatgtcgcgagggtcangagaaccttgggacgtcatgtagggtgctgttgcccaaaaccaagcttggataatcccgacccaacccgagctagtcagtctgtgagaacttgtgacgtacctaagcaggcgagctcctgtcagtcaaccaataaaagaacaaagtccactaagcaaggaggcttgtgtggcggctgaccagctatatatcttgggtgttatctgaaaattaccctctggtaatcgattaccattcatgggtaatcgattacagggtttatatatggagacaggatgttaagtagcttctggaatcgattaccatttgtgtgtaatc

SEQ ID NO: 12924 - DNA, 424 bp, Glycine max
ctgcaagcttgatgtgtgtcgagaataaatcacatgtttgtcatcatcaaacagggggagaatgtgaatgtatgtatacatgattttgatgatgtcaaagaagaatctaacaaggctgcttcaaatgataagcatttgcttcaagaattattcaagattgcttcaacaaacaaagccttgcctttaaacaaagtgctttcaagacatgcaaggctctggtaatcgattaccatgaagtgttatcgattaccagaagacagggttgagaaatagctattgacaaatgttttgaacttgaatcttcaacatgtaatcgattaccatatgtttgtaatcgattaccaccaacgaaactttggaaattcaaattcacaagtcataacccttcaaattattactgtgtaattgattacacaaacattgt

SEQ ID NO: 12925 - DNA, 398 bp, Glycine max
  unsure at all n locations
ggggtgatgttgcgcgtactgatgggtaccatgaggtgtntgctggngtttgacccacgcgggtgttgaagagacggcatgggcatctccttccttcctttntgcccctgttgccccgattcttttggcgttcacgtttgtggaggaaacgtaatcaaactttcctctttttaatccaacctcgattctttccccggcaaacaccagatccgcaaagctggacggcatgtaacccactagcttctcatagtagaacactggcagagtgtctaccatcatggtgatcatctctctctcaaccatgggaggagctacttgtgccgccaaatccctccatcgctgcgcatattctntataggtatcaccctctntcttaaacatattctgcagttgagtac

SEQ ID NO: 12926 - DNA, 424 bp, Glycine max
  unsure at all n locations
ttataattctaacctttgttgcttaccctagaactaataaccaacctaatattaggcgttttttctcttctcatttaaactcgtacatcataacttcctttaatcaacgtgtgtgtttttctaccattaagtgacttattatacgattaatatatcacttcagaatggcatatacaccgcatatcttgtgattgtacagaccctctatgtacttgtctatctaaggtgatcgatatacatcttggctcatatccctgtggctttgtctcgatcatctgccaggacctctacattattttatgcagctacttatgcatccacttcctatgtctagaataggtagctatggntagacctaacacacctccacttttagtttcaaggagcatggagctatattgtgcacatccatttcattgtcggn

SEQ ID NO: 12927 - DNA, 379 bp, Glycine max
tgagctggccgctgagcgaggcaacgcgctaagcctgtcttgtgcgctaatcgagatgtcccattcttcaactctttcttcaaagctttatcttcaagttattgtatcaatcttcctccagagcactagtatatctcattcttttgaatactactggtcaagaattaaaatgatattaacatcctcattattccattaaagacaatagtaaagtacaggacttgtaatcattcttagtcagatatgactatcaattaaatgccaatatcacagctatcatacccattagagcttgagtcatattaaatgacgatgaatctctcactcttagcatcaagtccttctcttctcctgtctaggacatgaacatgagctatac

SEQ ID NO: 12928 - DNA, 409 bp, Glycine max
  unsure at all n locations
ttcttccncttcatcaaagtaaatcaacattcatacagcacaaattaccacagccaagataacagggcaaaggcagaaaactctgcccaaaacaccaaccaaaatcacagcttttctcacttaaagaccccagtaacaattccttcgatccaattcgttaaccgttggatcgactccaaaattttactggaagtctatagtacataagcctacattttgaccgttgggatctactancaaacatccagaactcattctgcactactctttccacaggcaaccacacacagagcattttctgcacaaagcccaaatcctgctgcacctcatttgacagcaaaattctgcataagtgcagatttcgaaaatcacccttcctctcatccaatcttgcccaaatcaaatccta

SEQ ID NO: 12929 - DNA, 372 bp, Glycine max
  unsure at all n locations
tcattaagaagctttcttcagaagcttcattangagacttctagcacactctagacatctttcganagatcccaacggtgagatcatggaccagtgtcttgtgaagttgcagacacaaattcgagaagatccaacggttaatgaaggcttgaaagcggttgtaccgacgaagcttcatgtagctttttctagaagcttcattaagaggctgtctccagaagcttcctcgtggcttctttgagaaagcttcttaagaggcttctttgagaagctagatccttatctatncacacccctctattaactaaattaactttcttaaaataattaccgatggaataacgcacagatattcaacctcaaacataatac

SEQ ID NO: 12930 - DNA, 348 bp, Glycine max
  unsure at all n locations
ttcttcatgttagagtcaatgatcaaattgagaggaanaataatagctatgctaaacaagccaacaaagggagaaagaaggttgtcttcgaacccggagattgggtttgggtgcacatgataaaagaaaggtttccggaacaaaggaaatcatagcttcaaccaaggggagatggaccatttcaagtgcttgaaagaatcaatgacaatgcttacaaagttgagctgcccggtgagtataatgttagttccaccttcaatgtctctgatttatctctctttgatgcagatggagaatccagattgaggacanatccttctcaagagggagagaatgatgangacatga

SEQ ID NO: 12931 - DNA, 280 bp, Glycine max
  unsure at all n locations
tactcagcttgaaaaatcaatggtctaactntcacacggatctccaattcatacgcatcacatattgagacgcttgaaattgaacagcggaagctcttgagaaatagtaatggtcataacttctaactcggatgtccgattcangcgactcacatatagagacgcacgagaatttaatggtcataactgttcacactaaagtcctattcaggcttataatatatcgagatactcgaaattaaacatctgaagctcttacgaaattcaatcggcataattt

SEQ ID NO: 12932 - DNA, 401 bp, Glycine max
  unsure at all n locations
agcttataagatcaaaattgtcttaatcatttccaaatatgcatgtgaattatgacgcatncacaagaatcaagccaaggctattgtgcaagcaatcaatggggccaaacacaccaaatgattataatgatggatggctcaaattctcacaaagggtaaatcatcactttcaaattgagctttcataactatcatgacatgtagagaagaatcaaggatttcaagtcacacaatgtcaagaactcttattttcaaaacatttacgcatttcttgaacatatcctataattcaaagaataacatgcaaagtcgtacgtgcacacaaaattgacccaaaatattaaactgaaaatccgacgaaactaacaacattaacaaattaacacaactaacagattaac

SEQ ID NO: 12933 - DNA, 295 bp, Glycine max
  unsure at all n locations
aatgctactcttaagacaaanatggcgtacaacctccttcaataaacacaaacatcaatgttaatttagagcaaacttatgcacatatttccttacgaacattcactcgcacaagatattcttctaactaagaaaaatgcacccatgcacaatcaaagcaccttcgttacctagattatttgtatgtacttccaaggtggactacctacatcacatgcattttcttggctaaatntacatacatgcatactcaaagcatcttggctaccaaaattgcacacgtcacattctggta

SEQ ID NO: 12934 - DNA, 382 bp, Glycine max
ttcttggaatggatgcttcaatggaggaaaaaaaagagagagagaaagagagaggggggaagcatgaaattgaaggaagaaaaagggagagaagttgaattgtgagttgtgtctcacaagactctcattcatcaaagttacaacaagtgttacacatgcttctatttatagactaagtagcttccttgagaagctttcttgagaaaacttccttgagaaacttctttgagaaaacttccttgagaagctagagcttatctacacacacccctctcataactaagctcacctccttgagaagcttccttgagaaaattcctaaagaagctagagcttatctacacacacctctctaatagctaagctcaccttcttgagatga

SEQ ID NO: 12935 - DNA, 361 bp, Glycine max
  unsure at all n locations
cttcgattcattctatgtacccgtagtggtccacattgtgtttcgtgcatttatattctcgttntggttactatttatacccccctcttgacgtgcttaagccattttacttaagtcatttctcgcttaacttaaaaataagataaatttccaccgaatgtttgaattgtattatccattaacttcggttaaaatcaatttcgaccgttcggtcatgccgtaaccacgttggaaatcaaaaagagggtaaaaataatataataatcaaaaaaatatctttttagtgaaatataagcggaaatcattcngacgttttctctttgggagttctcattcttaatcgaattaattaataactaaa

SEQ ID NO: 12936 - DNA, 399 bp, Glycine max
  unsure at all n locations
tagcttcttgtattgaacattgaaagaaattccattcctaaaggacactgttctatctactaaatgattcttgcccttgcttcttaccgcaagcataagttatgcttgttttttccttggcctttttctaatttaagagttatttatggacttttaaaaaagaagtagatccgtgtggtccttgacacttttggccttcttggggggagtagccaaaaaaaggtgccacccgatgctattgaactaacaggccttattctacatccaaaattgatacatntttgtacctactcatccttttctttctcatcatcattttccacatacctcaaccaatcatgaaggtttttttttaagttttctcttctcacaggcttccttgatgaagttccctactct

SEQ ID NO: 12937 - DNA, 382 bp, Glycine max
  unsure at all n locations
tatntattatcataccttatataattatcatactctcgaatagtagacgtttacgaccacatgttaaggtacattatgaatctgcgaatattattatttcataaccgaaagccagtncttgtgcaacggtaaagttgtgtcttggtgaattggttgtcatgggttcgaatccggagacagcctctttgcatatgcaaggatnaagctgcgtacaatatcccttctccatatctttgcctaacgaagagcctcttggcaatggggtacgacagntttttattattccataacaatattgcagccacttaatttgatcacatatttatctttatgagaacaactaattaagtgataactcttaacattgtagttattaattatg

SEQ ID NO: 12938 - DNA, 330 bp, Glycine max
  unsure at all n locations
agctntgatcttttcaaaggagatgaagaanacttctctgaggggaagttcaatgttgctgatagtgttgtttttcagattacacagaacaagttggtacttagaattattccccagcaacaggacatcattgtttgcagacatgcacaanggatgaggaaagtaactgcgacagaattcaaaatgcttgtaactaactttaatcaatagagtccaagacttttgaactccaaacttcttcatttgccatataacaagatgtgttccgtcttcattgtgagaaaaacagaagcaacccctcaaaaccctaacttctggcaaccaaaccga

SEQ ID NO: 12939 - DNA, 533 bp, Glycine max
  unsure at all n locations
ctcaccctacatacntactcactagagtatgtctaccgtttggatacgtattatattctctctctctcaccnccctcagcactaaccgttganaccattaatgacccctccntattgaggcccttctattagtgacctatagatactcaagcttatanggttgagctcggctttgagtgaatatgccaagtatgagttttgctcattacctggcgtaagcctttttctcttattacaggctcggctcggcttacataaaagtctgacttggcctaagagcttatttaacaagtttgcttaaagacgtctttgaccaattaattggttaatacctagtggaatactaactacaaaaaacttaataaattttggataagtaatgtacacatccaaaaataatttgttatacaaaatcatatatgaataaaggttgttaaacacaaacgattatcaaagaatatgagaaataatatacttaaaaatatatggattagagatgattatactaatatagccaataaaaatattaaatn

SEQ ID NO: 12940 - DNA, 330 bp, Glycine max
  unsure at all n locations
agcttgaagatctagcctctatagaagcttctcaagcaagcttccatcaacttatgaaaaaagatagactttgcatccccttctctcaaccatttgagcctagattgctgccacaataaactacacttcatacctagaggttagggatttaggggttggaggtggtggatgttttggttcaaggtgtggtggtgaattggaggatttgaatttggttggtattgagttgattggttatgttctaggttctcttttatctacggngggatgctggtgttggtgattntgagagattggttttttaatctgatatgatttccccccctcaat

SEQ ID NO: 12941 - DNA, 342 bp, Glycine max
  unsure at all n locations
gaatcacatattctaacacatagagagtgtgtttacaataaggtatagttagataaccttggtaagaaaaggattgactctataagtacaatgtttctctcttattttcttatgctttggacttaagtattggtagtgttctatgttaattngttagttttcagaaaagacttgatgccccttttatgcttacagtatgagcgaatcaatgtggggtcttgattaatcagaatatgactgttgacaatctttgattctttgattcctactaatgatagatgatgcatgtctggattgatccagaatcaatactttgtaaatttgtccttcatatatcaattc

SEQ ID NO: 12942 - DNA, 319 bp, Glycine max
  unsure at all n locations
agctttctagattttcgaatggtcataagttntcacacggatgtccgattcaggaaaataatatatcgagaccctcgatattgaacaacggaagccttcgagaaattcgaatggttataagtttgcacacggatgttcgattcggggacataatatatcgagacgctcaaaattgaacaacggaagctctcgagaaattcgaatggtcataacatttcactcggatgttcgattcaggtacataacttatctagacgctcgaaattgaacaacggaagctctcgacaaattttaatggtcataaattttcacacggatg

SEQ ID NO: 12943 - DNA, 386 bp, Glycine max
  unsure at all n locations
agcgtctcgatatattatgtccccgaatcggacatttgtgtgattacttatgaccattcgaatntctcgagagggtttcgtgttcaatttcgagcatctagatgagttatgtccctgagtcgaaaatccgtgtgaaaagttatgaccattcgtaattctcgagagctttcgcagttcaatttcgagcgtctcgatatattatgtccccgaatcggacatctgtgtgaaaacttatgaccattcaatattctcgacagcttctgttgttcaatntcgagcgtctcgatatattgtgtctccgaatcggacatccgtgtgaaaacttatgaccactaaaatttgtcgagagcttgcgttgttcaatttcgagcatctccatatataat

SEQ ID NO: 12944 - DNA, 417 bp, Glycine max
agcttctattctgaatttttagcatctcgatatactgcgggacacaatcgaacatccgagcaaaaagttattgtcgtttgattttgctcggagcttctgttctgtatttcgagcgtctcgatatattacgggattcattcggacattcgagtaaaaagttattgtcatttgattctgctcagagcttctgttctgaatttcgagcgtctagatatactacgggacacaatcagaaatccaagtaaaaagttattgtcgttagattttgcttagagcttctattctgaatatcgaacttctcgatatacaacgggatacaatcggacagccgagtaaaagttattgtcaatttattttgctcaaagcttctgttctgaatatcgagcgtctcgatatactacgagacacaatcggaca

SEQ ID NO: 12945 - DNA, 346 bp, Glycine max
  unsure at all n locations
actcgaatgtccgattgtctcccattgtatatcgagacgttaaatattcagaatagaagctctgagcaaaatctaacgacaataactttntactcggatgtccgattgtgtcctgtagtatatcaagactctcgaaattcagaactgaagctctgagcaaaatcaaatgacaaaaaaattttactcggatgttcgaatgaatcccgtgatatatggagacgctctgatttgaaaactgaagctctgagcaatatcaaacgacaataactntntactcggatgtccgattgtgtcccatagtatatcgagactctcgaaattcagaacagaagctctgagcaaaatc

SEQ ID NO: 12946 - DNA, 414 bp, Glycine max
agcttgccgtctcagctcgttcaggcgagcaaggttgcttcctccagaagcaacagccttctggaggaatcttctggagggcccaagtgggcctggttgctatttacaccccctttttactaaatgcaccccccttctattattttgtaattcttttccgtaacgttacgaaactttacgaatttcataacgatacttattttccttccgcaaggttacgaatccttacggattatgtatttactcttttttagctttcgaagaagttacggaaactcacggattgcgcaaaaacacatcttttcggtttccgccacattacagaatttcacggatcgtgcaagcctgcttccttttaattactgagacgtctcgggacttcttttattgcatgtcatcaagtaataatccccg

SEQ ID NO: 12947 - DNA, 372 bp, Glycine max
  unsure at all n locations
acccctcagccaaatagtatccatcttgggctcttttcccacaattcttgtaaatgggagagaaatgttcatctaaagcatacaagtccctaatgttatcaaatcctanaatttgagctcctanggagcaaaacaatgtgtgtctcctagagagggcatcagctaccacaattgtttttccctttntgtatttgataacatatggaaattgctctangtactctacccattntgcatgccttttgtttaacttgctttgccctctaatgaacttaagtgattgatgatcactatgaatgacaaattccttggaaacaaggtaatgttcccaagttcggagtgctcttattaaggcataaagctctttatcat

SEQ ID NO: 12948 - DNA, 413 bp, Glycine max
atcttcaatttctcctagacactcatcataccgagggtttgtctcacatactttccaaattcttcccacttcatccacctttcctaggtttgcatagaggggaagcacaattcggcatatccaccgattctgtttataagtttccccttccatctcctttaataaagtttcagccttatcttgaagcccataagagatgtaaagcctaatcaaaacaacctgcgtagtgatgtctggttcaatgcctcgagccttcatcctatcaacaatttgatccattccatcaataacttttggactggccttctgtgtctattaagatcgaataagtatgagaagaacggttgatattctcattttccatatcaataacacatcagctatttccttcctgtcattccttctatacagaa

SEQ ID NO: 12949 - DNA, 546 bp, Glycine max
  unsure at all n locations
tagaactgcattntagantcactagngatattatcattatgatctagaattgtntttgttcttnctnnctttnnnnnnnaanagaagggcgnattgaaaccattgttgagcctantngtaanangcgacactatgnnaaactcaagctatacanagagggatganagannttatantatgaattatttgggatatatttgagcattttgacataatgctgagactgatgtgacagcacctcttctggcacatttactatattatttggataatagttaaacatactcaacaagttttttacatgagaagcttgttatgattatgagggagattaacgtgacacatattggtaaaagtcaatattatcttctgtagagctaggattgagctcatgcaaatgtgaatctataacactaaattaagaatcatgcttaaaattgttgatattagaaagcattgaaggggtagcatgacttctaagattgtcccttgcacatacagtgcatagcatatatgcacataaatatgatgctaattgatattttg

SEQ ID NO: 12950 - DNA, 414 bp, Glycine max
  unsure at all n locations
tgcttccatctaaaacctcctattgtaactgaaaggtgataacttgccatggaaggctaaagctttggttgggaatttctgttgatccttgatgcaaatattctttactatctatttaatgttgttttgatgtgttcactgcttctatctgcacttaattcttgcatgcttttggtctgatcatccatttgggtgtaaagtttggattcttagcattgggaaatgttttgaatccttcaaactggatagagcagggctagataactgtattgtctggacacggagtgtanggactctagcttttaatttggtgtgaccttaatgttagatgagttgagttccatcaagttatggaaagaaaaataagagagacaagacaaaggacaacaagagtggaagatataagtcaagatg

SEQ ID NO: 12951 - DNA, 377 bp, Glycine max
  unsure at all n locations
tagcaccccacctgacgtccncaatgtctcctgacctccgcgacatatctncaggtaccactctgtggtcaacaataaaagcaggaagtttcacccttcaacacttcctcatctcaagcttgtaggattatggngtacccatcacatgtggtactangtggcggtcgggcgatggtgcacaacaagtttttcacatccacaaagcgcgcataaacccaccatcccctgttgcccacctccatctgagctcacgtactcccacgtagcccatatcctcgtttctctcaacaccgggtccccatcaatcctctcaagcttncacaacatccaagcaaaacaacattcanacagcacaatctatcacagccaagaaaaca

SEQ ID NO: 12952 - DNA, 351 bp, Glycine max
tatcttaactctattcgcattcttatctctcttgctgctacatatcgttaacctttatttcaattggatgtgaagaatgctttcttgcttggtgacttacattaagcggtgtatatagagcaatcacctgtgtttgttgcttatggggagttaggcaacgtgtgccgcttaaagaaagtgttaatggcttgatgcaatcacctagatcttggtttggagattaaggggtgtggccttgcttttgactgaagctgagtcaaagagatcatactgtaatttataacaatactaaccttggcagcatcttacttgtggatatgttatgatattgtgaaacaagaagtgatataa

SEQ ID NO: 12953 - DNA, 378 bp, Glycine max
  unsure at all n locations
tactaagcttagcacatgggnaaagtattagtaanatcaactccataagtntgagcttaccccttggcaatgatgcgagcctttaaatgagccacagacccattagaatccattttgatactataaacccacttgcgaccaatatccctcttccctgcanggagagaaatcaaatcccatgtttcaaattttctcaagagctatcatttcctccttcattgcttgtctctagccaccatgactaagggcatctaanagagatttatggatagaaacanaatctagatagcaacaaaggactttgaggtggatgacaaatgagcaatagacacatgtgagganataggataagtatgtgtacaggtgtgnttaccttta

SEQ ID NO: 12954 - DNA, 400 bp, Glycine max
  unsure at all n locations
ttctagcttctataactggcccacacatggagagacttctcttactccaacctagctcccacatgccacacctcagatctgaatatggacagagctaagttggtctatggcttggtaaccaacatggacatgaatattggagcccttatctcaggtcagatttcttctattgctcagagtaactcatctaagctctgatttctagccttgaatacttccctatgtagagctagaggagttacctctgacagtctgacctatgagagcctgagcctggctattaactnggcctacattaagaacaactattggaatgtggatgatcttatagttaacttcagaggggcaaggataccaagagtccgaccagctgatgtcccttcttttcactctaccagct

SEQ ID NO: 12955 - DNA, 364 bp, Glycine max
  unsure at all n locations
gaacaggaacattagttatctgttatttcatagcaataaaagccttctcttgttgatccctccattcaaaaacaacatttttcttaacaatttcatttagatgtgcagccaangtgctaaaatctctaacaaacctcctatagaaacttgctaagtcatgaaagctccttacctcacttatattttatggggttggccaatcatgaatggctntcaccttctctagatcaacctgcattccttgcgagctaacaataaatccaagagaaatgacatggttcatacaaaacacacatctatgcacgttaacatacaatttctcacacctaagtggcttcaagatacacctcaaatgcacaacatg

SEQ ID NO: 12956 - DNA, 359 bp, Glycine max
  unsure at all n locations
ttcttgtatttttaacaaaaaagggtacggaaagtaaacgaaatgaaagtgaaagtacacaaaacaagtagggaccactaagggtgcatggaatgaattgaaagattcgattttgggaacttaccgattgaagaccgaagaacgacgaagaacgacgaagaacgaacgaagaacggtgaagaacaatgaagaaccatcacgaaatcacttacagaaacgtcttggaaacattacggaaatgcctcggcttggattttcttcacgggaaacaattttctctctaattntgagtgatttctcaataccagaagggctgaaccttttccttcttccctccttcccctatntataggagaaaa

SEQ ID NO: 12957 - DNA, 285 bp, Glycine max
gctggccttgaatcagaaatctgaccaccatacagacctttgcccttccatgcagcaacctggagcaattgagcagcctgaagcttatgctgcaaatatttacaatagacctcctcaacctcagcagcaaaatcaaccacagcagagcaattatgacctctccagcaacagatacaaccctggatggaggaatcaccctaacctcagatggtccagccctcagcaacaacaacagcagtctgctccttcctttccaaatgctgctggcccaaacagaccatacat

SEQ ID NO: 12958 - DNA, 398 bp, Glycine max
  unsure at all n locations
tagcttcacattttgaagttctaacagggatgtgatctgataataagttatgggaacacatagtttcagggtatcccaaacgaacgataggcctaatcgactgatgccacaagtaaatacttgcgtccatttttgtctgtttctatggatcaatgcatggtgaatgtagctctggcctacacttgaaatcactccactattgtaaagtcccccatctcttagtaccatcgcccaatgatctccttcgtgagaatatcctgaagaaaacagaaagatggataaattagcacaacacagttcaagtcctttgtaacttgactcacagacaacaacttatgagatanggagggaacaagtagtgtattcgaaagcacaagggatggtgataacatcacaat

SEQ ID NO: 12959 - DNA, 210 bp, Glycine max
ctactcctctgcaaatctggatgcgtctaagtcctctactagactctcaaatccctgtatacattgctagacctatctactagaagggtcatatactaggccataatatagagaacctattctcatatttacactataaagtggatccaaccttgacccatgggctcatagatctaccctaatgttcatgagaacccttgagccttcttt

SEQ ID NO: 12960 - DNA, 327 bp, Glycine max
tttgcatgctaacattgtccatctgtgttgattggtggaagatgatgaatatacttttttttgcgtcacacacacgtgccaaatatgactaccttgattgatgtccttacttcaccagtttactgtgacattcacttaccatatgagtgattgaatcgtaaatcattattgctatgattctagagattgttattataaaatactcaattcatcatatcgtgatctctgattcgatgacattgctaaattctcttacattatcgttatatacctttgcctctctgactttacctcttaatgcacaaatggacagaatatatcaatatc

SEQ ID NO: 12961 - DNA, 237 bp, Glycine max
  unsure at all n locations
aattactattagataccgctaatatataagaatttctgcattcangaacctaatttcgtttgattctttaatattatataaggaacaagaatcctccttcttttcaccacatattgggctagtttatgagctatccctagatggctacaatgtcttaatactcaatacccaaagggagaaaccaggaattccttaatagattgtagaagcaagccttttctatagcgcgcacacaca

SEQ ID NO: 12962 - DNA, 423 bp, Glycine max
  unsure at all n locations
agcttttagctgcttcaattgttcccacaattctctcttcccagcaatatcacatggggcatagacatttacaatgtacagcttcatattttccttaatccatctccctacaaacattaggaaattcgtgcctttcaccctcctatctacctcaaaggatagattattccacatgcatagaagacctccagcagtgtgaattgaaggagcactgtcccaagacacattagcatctccccatatattctgacaagcaagcttagtgataatttctttctttgtttcctgtaaacaaactaagtccaccttatgctttaagttgagctttcgaatagcagcccacttcacccnctacccaagcctctgcagttatatgaaagaattatcattaatacctttatcatcntccttctctgcttccat

SEQ ID NO: 12963 - DNA, 237 bp, Glycine max
  unsure at all n locations
gattggagaggttaatgaaacaacgagatgatgcgctccatgagagggtggatcanatggaanatagaaatcataatgaagaagaaaggaggagaagagggaatgatggtgttcctagaccaaaccgaattgatggtattaaactcaacattccttcctttaaaggaaagaatgatccggaggcctacttggagtgggagatgaaaatagagcatgttttctcatgcaacaactatg

SEQ ID NO: 12964 - DNA, 425 bp, Glycine max
  unsure at all n locations
agcttgcggactataccttcgaccaaacacggccgtgtttctgtctcggcccggatttaaagcgggttgcagtaccggctccgcttccctaaccgtactggaggcggttgccgtggctttatcctctatggttttctggagttttaacatgacctccgagatggaagccatttgatcttttaaggccgatagatcggccttcatctgttcctgcacgccctcttcattatccatttttctggatcgagtgttataggggtgccttggtgttttcttagttatgatgaaattcctaaagaaataaacaatggtgagtatgccaccaaaacatgagtatgcaaatggatgatcggagcactnggatccaccccaaggtttttagataacgtgatgagtccagaacttctcattntataagtagaaca

SEQ ID NO: 12965 - DNA, 332 bp, Glycine max
  unsure at all n locations
tcgtcttacagatagcananaggtttatacggataaccactcgtgtatttccgcccgactgtgtgactcanaagtcagtatgacagatcttgtgagcacggaagatgacgtaaatctccgcgtctcaacgggcttgtcggccgcgattgacgaatggcgcangagacgacgttagtctctgcgtgctatcaggcttttcgtcttacagatagcaaaaaggtttatacggataaccactcgggtatctccgcccgtcagcgtgactcaaaagtcagtatgacagagcttgttagcgcggaagatgacgtatatctccgcgtgtcaacgggctt

SEQ ID NO: 12966 - DNA, 416 bp, Glycine max
  unsure at all n locations
agcttagcacattggttcgttaagcgacatgccttgagaaaccaaacgtctctgagttcgcttaaggcgacatttcgctaagcgagagagtcgaatatagcttagtgaagtgtaacatcaatacactcacacgtgcccatagcatttcacataaacattcccttttatctctcttattcaaaatctctcaatcttacatctgcacgcccaagcattttcttaccgcattatctcagtcaaaccanagcttcaacgatacaagtaagttccctactacgctttttctgctatttttctgaactntaggttagacaaccttaaatctagctctaagaattataggatattaatatttttagaagtagttagagtttaggactctgtgtaggttgtcttgtgtaaaatatgttgagaac

SEQ ID NO: 12967 - DNA, 372 bp, Glycine max
  unsure at all n locations
tactatccgtttcagacattcttctgataaattcataagcaagatccagtcttccacactttgcatacatgtctgtgatggcagatcccacattaactatattctccaatggtttctttagaatatcacaatgcaactccttccctaatttcagagcagccaaagcagcacaagctggcaaaacactagccatggttagggaattaggcaccattccctcttgaattaaccacctaaaagtggttatagcatcgatattcagcccatgaagcacataacctgagatcatagctgtgcanactgcaacatcaaccaaagtattctgctgaaaatcttgcgtgccatctccacatctcctcccttgaagtatat

SEQ ID NO: 12968 - DNA, 403 bp, Glycine max
  unsure at all n locations
agctttgggagtttgtcttgccttgatttttttttctttatcattaggttcttgtttttgttctgggtttgaactcactttgcaatgcgacggtgctagttaaaaaaaatgtaaatctgttgaagagctaattgaaaatcaaaattgaaaaacaaataaaaatatttattatattaaaaaaacataaatcatttaataaaaaaaacctatatttatcgtccttttcgaaagagtttacgtagggatagttggacagtctaaataagttaataataataaatgatagaatagattcaagttgtgaccatgaccgtgagaaatgtcaagtttgactgctctagcatttaataaaagtaagatgccttanaatttgngctgaatattcaacacanaccaataatag

SEQ ID NO: 12969 - DNA, 396 bp, Glycine max
  unsure at all n locations
gccgagttgagaacaacttaatgtgttccattagcttctcaggacgatatcttgcatacagaactcccaactcagtanagatacccatatgtgcacgctccaatcctaacccactctccattagagatatgagttcattgaagcatcctctgttctgatagtactcgctaacctcctccanatcatccaccttcaatataaaacagatagtaagtattcagacaaggtcaaaaggttagacaaagcaatcaaaagttnttctggcacttggttttagtattttgctactagctacatcctttaacttgcatttaaaggatntccaacatgggaagaattgtgtagtaattttggagtgaggagggggcaatcattcctgcaagtacaaaatccaca

SEQ ID NO: 12970 - DNA, 420 bp, Glycine max
  unsure at all n locations
agcttgaaatgtgtgcattctattgagggaggctctactggcacaagattctcgagattttctttatcaacaaaatccataacagagagtttctcctgaaatataaattaactattgtagaatataattaaaaaacaacagattaataactatgctatatattatgaagtttttgtcacacaaattatgtgcaaatctagtcggactaatataattgaaaggaaggaatcatcagtgaccaaatagcacaagatgtggatagtgaagaaaatgatcgaaggagaagcattcttgcacaatatgtgaaatgtgtttctagcacaagaacattaatccagaattacgataatccaattgaaaccaaacaagatagcattagccanattatgaaagattcttgttaagcacatacacaggtga

SEQ ID NO: 12971 - DNA, 400 bp, Glycine max
  unsure at all n locations
tctaagattggaactaccaggcaagcaggtaagccttntatttccttcatgtgttccttttcactttagtaatgtgttatttcaattctgtggccttccatcatgtgatatacaggacagagatatcatgcgggttcttgtggagtgttgcttgcaagagaaagcttttaacaagtattataccgtgttggcttccaagttatgcgagcatgacaaaaatcataagtttactctacaggtattgattttctctccctgttgtaggatttagatgagaactaaatngtggaattgtgtactatttgcctcatgagtcanaacagttacattttttaactactcacagagagggaaaatatgactagaggaacacttattatgaaatatatgagtgcatcat

SEQ ID NO: 12972 - DNA, 401 bp, Glycine max
ttcttctaaatcgcacttgtcaatctttatgccccgtgaatgcatttcaatcccctttccctctcacgtacctttcaagggtcaaagctacccctcgatgttctacgcatgtgcgtgctggaataaataatgatgttggctaaaatttattttggcttaagtctttcaactttcatcagttaattcactgatcttggttgttatacttttaaaacaatgattttagttcttgcatgtatctttttaatatatgaattagatttatgtgccctgtcaatctaaaagacatatttgagtgcattcccgtttaccttccttcaaggatcaaaaactataatgtttcttgtaacaacagcaccccttgtgcatatttatatattatatcattgctgattaaaaat

SEQ ID NO: 12973 - DNA, 151 bp, Glycine max
ttactcgcatgtgcgtcacctggaaatatctaagagaagaaagctctataagattatttatgtttgattattaatatgtgtgcagatttcaaacatacatattactggtgatgacatacttattggtgaatatatcaatgtatattggtct

SEQ ID NO: 12974 - DNA, 412 bp, Glycine max
agcttgttcttagcttcctgaacctgaagcattgcaacaaaaccaatcttaacatcaatctacctcaaagactaaaatgaagtgacaacttgttgaaaataacaataaaatatatgaagatgtcaatgtaatagtaataggcaccatccatatccctcaaccctttatagcaaaactagagtgttattacacacggaaacaactcgagtgaacaagaaacatttgatggtaaattattggtttattaacaatcagcaatagtggttatttttctctactggaatttgatcaaagcttcctccttgaatggaacacaggtgacatggttgacatctgttcatttcctactcgattttgtagtatgcctatgctttttgggcatgttttaagaacgagaaccagtctacttatg

SEQ ID NO: 12975 - DNA, 301 bp, Glycine max
  unsure at all n locations
ntcatgtttatcacacattcaatcttactatagcagannactctaaatataaattctattaaaaggtagcaacagatcttagaccctataagcctatgagttggacagctgtatntgacatatacggctcttctgggccgccctagcagtcagagttcatagaatttctattgtactgttcatacttcctagactcctccacctccactgtggactaaatgtaatgtggacagatctatcattngaaatattatgatggctgcttgtgctggtgtgttttgggatgagtttgggaattgga

SEQ ID NO: 12976 - DNA, 411 bp, Glycine max
  unsure at all n locations
tgcttatgctcacacttctttacgaacgttcacttgcacaagacattcttataactaagaaaaatgcacccatatacaatcaatgcaccttcgttacctagattattcacgtgtacttccaaggtgtatttgttacctacatcacacacatttcctttgctaaattcacatacatgcatactctaagcactttggctatcaaaaattgcatacgtgcacatcttggtatttctaatacctatacatacacaaacttcatgatgaatcttgactatctacacaataaggtgctacatttcatgcttttttcaagggttnttactacctaaagccgcatgcaaattcaagtatattctcttttgcttactaaaattgtattcacattaaaaggtatttttgtaatgtattttc

SEQ ID NO: 12977 - DNA, 371 bp, Glycine max
  unsure at all n locations
atgatgacatctctgaaatcaagaaacacacacacacacactntntnctagtcgatcactcacatanatttccattcttcccctttgtttttgagtttatgcttcatttgaaatttagctaattacttatgtgagttcttgatttattccctatatctctccccctttggcatcaacaaaaagccaaagtgtgtaacaaggtattgacacacatatactattaatcattcacaaggcatacattgaagaatataaaccaatcatgaagcatgatacatgaatagatcaaatatataacaaccacatagtcatataatataatgcataattgttcattcaaaccatgcatataaagaaatactatattatcc

SEQ ID NO: 12978 - DNA, 384 bp, Glycine max
ttcttctagattgagatcaacttgatgttctatgcttcttgaaggtggcagtccatgaggaatctccttgggaaagacatctttaaattcctgcaataagggttgaacactaggagaaacataaatagttaactgattagaattatcactctctctctcttgtgtatcactcttttcctcgggtgtatcactcttctttttcatattcctttgtggtgcctcactattttctttctcttggtctctcttttctctcattctgatttggtcatcacacacttttctatgtgatagaggcttaagagtaaacgacgaagatttggctattcgtctgtaaggctcttctttgttacggtttaacaaacgttgcatttgtgtagtcca

SEQ ID NO: 12979 - DNA, 181 bp, Glycine max
atggagaatagagatcatactgaagaacaaaggacgagaatagggaatgatggtgttcctagacaaaaccgaattgatggtattatactcaacattcctccatttaaaggaaagaatgatccggaggcctacttggagtgggagatgaaaatagagcatgttttctcatgctacaactatg

SEQ ID NO: 12980 - DNA, 386 bp, Glycine max
atcttgcatttggaattgcgaaagccccactccatcattaggattagtacctgacatctcaaacaaacaaatcaaacgtaataagacaattatagttgttgtttgaatacctcacccactcaagtgtatcacacaattatggcttttctctaatgaaacactcttgccttttaccactctaattccccttgagttcttaggcaattcaagagattatggccacaacaaagaacaattcaccaatatgtgtaaggtaaggctagagagacaaggaaaaggttaaccaagaaaaaggctaacaatgtttttaggcacagatgaaggaaataaaattcagaatttaggaattcaagtaacaatccttcatgcaaccaatatattacctt

SEQ ID NO: 12981 - DNA, 368 bp, Glycine max
cgaaattgatcaacagaagctctcgagaaattcatatggtcataatttgttacacggaagtccgattcatgcgcataatatgccgagacgctcataaatgagcaacggaagctctcgagaaattcaaatggtcataacatatcacacggaggtccgattccggcggatagtatatcgagaagctcggaattgcacgacgaaagctctcgagaaattcaaatggtcataacttttaaaacggaagtaagattcaggtgcataatatatccagaaagttgaaattgaaccacggaagctgtcgatatattcaaatggtcataacttatcacacggaagatcgattcatgcgcataatatatcgagacgct

SEQ ID NO: 12982 - DNA, 406 bp, Glycine max
  unsure at all n locations
agctntgagataattcaaacaacaataactgtttacacggatatctgattgagtcatgtaatatttcgagacgctcganattgaattcngaagctctgagcaaattcaaacgacaataactttntactcggatgtcttattgaatcccataatatatcgacaagctcgaaatagaatcttgatgctctgagcaaattcaaacgacaataactntgtactcggatgtctgattgagtcctgtaatatatccacacgctccaaattgaataccgaagctctgagcaaattcaaacgacaataacttttaactcggatgtctgaatgagtcctgtaatatattgagacgctcaaaattgaatcccagagctctgagcanattcaaacgacaataactttttactcggat

SEQ ID NO: 12983 - DNA, 244 bp, Glycine max
  unsure at all n locations
aatattgtagccgatgctctntctcggcgtcatgcattactttctatgcttgaaacaaaattgattggtcttgaatgtttgagaagcatgtatgataatgatgaaacttttggagaaattcttaagaattgtgaaaaattctcagataatggtttctttatacatgaaggctttcttttcaaagaaaacaaaatgtgtgtgcctaaatgttctactagaaatgttcttgtttgtgaagcacatg

SEQ ID NO: 12984 - DNA, 401 bp, Glycine max
  unsure at all n locations
tagcttgtgctttgaaaattatgtgtatggaatatntttgagtttagaatgctgaactgggatcatccatttctattttctagtttagttattaattcatgtggctgcggtaaaattggtttaccttacagtttacattgttggttaaaaaaagacaatgacatttatattatgggttatttaaggcttatttaaagttaagcatagggtttggttatctactgaaataatgctctactgaaataatgctctgttgctagtgacaatattgtgaagcttgtgctttgaaaattatgtgtatggaatatatttgagtttagaatgctgaactgngatcatccatttctattttctagtttagttattaattcatgaggctgtggtaaaactgggttacctta

SEQ ID NO: 12985 - DNA, 283 bp, Glycine max
gatgcccctccgacagaaaaattgcttatattgagacatcattctgctactggtatgccttggatgaaaaccagggcactaccaagctatggccggtctccaacaaaaataggatgaaatatcgaggtctatgttgatgacatggctgtcaagtcttatagcatgacccaacacatcacagtcttggaatatgtgttcagagagattcgcaagtataacatgcgcctcaacactaataaatacacatttttgggttgaagggcaaaaagtttctaagcttcat

SEQ ID NO: 12986 - DNA, 393 bp, Glycine max
  unsure at all n locations
agctttgaatgcactattcaatggagttgacaagaacatcttcagactgatcaacacttgcacagtggccaaagatgcatgggagatcctgaaaatcactcatgaaggaacctccaaagtaaagatgtccagattgcaactcctggctacaaaattcgaaaatctgaagatgaaggaggaagagtgtattcatgacttccacatgaacattcttgaaattgccaatgcttgcactgccttgggagagaggataacagatganaagctggtgagaaagatcctcagatccttgcctaagagatttgacatgaaagtcactgcaatagaggaggcccaagacatttgcaacatgagagttgatgaactcattggttctcttcaaacctttgagct

SEQ ID NO: 12987 - DNA, 403 bp, Glycine max
  unsure at all n locations
tgctaatccatggaaactcctaatatctcccacactntnntgggtgggccattctttgatggccttgattntctcaaggtccacttggaccccatttctaccaactacaaaccctaagaaaactatattatctacacaaaaggtacacttctctatatttgcatagagggtgtttttcctaaggactgaaagaacttgcctgagatgtcctaagtgatcatctangctcctactctacactaaaatatcatcaaaataaataactacaaatctacctatgaaatcccttaagacatgatgcataagcctcataaaggtgcttggtgcattagtgagcccaaaaggcatcactagccattcatacaaaccaatcttggtcttgaaagcggttntccactcatca

SEQ ID NO: 12988 - DNA, 421 bp, Glycine max
  unsure at all n locations
agcttttgatttaataacagatgaaatagttgctctgatgaatttgtggacctcatggtcccaatttctagatgagtgcatttaccatatttcctgccagtcccagcaatattttgcctataataaactctgtattgcttcctaaanttggaccactgtatatcattntatctccaaaaaccttgtaatctgttacctttgaccagtttatatttaaaattaaaataaatttggtattagttgcaattgcaaccattgcttggctagaggtctgcatttcactcgacctttaattacttggatgtgttttctactgctggttcttattntaaattagtgcttgttggtgtatgtttaagaatgcttcgcttatttattggtgtttgaatatgaacaggagcaacctctttccttttcactg

SEQ ID NO: 12989 - DNA, 391 bp, Glycine max
  unsure at all n locations
tctccaaagcatttctagcataagaaaataaattaaataagcttctccgtaggctaaaattagcttatgcataagttaaaagtgtttgtgaacatcanagaggaggtcatcaatattatggagttattctgtcttttcaaaagcattcttttgcaatttctctacctgacttaatctccttactccctgngtttctttnttctgtattttctccctgcttctctgtccctaatgtccagaanattgccatgatagatacttttgttgtgctcatggaatcacacttattttacaggtgaaaaatccaaccgcaagaattgaacatgaagctagtacatccaaaattggagaagaatcaattgtttattttcaacanaggggaatagactat

SEQ ID NO: 12990 - DNA, 405 bp, Glycine max
agcttctcattgtagctacctattctatttgtagaagcatgtgtaatacttgttgtaactttgatgaatgaaagtattatgagacacacttcataggtccacttctctccctctcttattccttcaatttagagctcccccttctctctttctttgtctgcattaaagcatcctttttaagcttcttatccaaggcatattcttggtggtgaagctccttcttccatggcttattccctagtggatgacgcctcctctcacctcttctgctttatctaccggtgcatctccatggtggaaaatcaccattgaaggacctcattgatgctcatagatccagcctccatagaagctccacaagcaagcttccatcaagtggttatctgagcacaggagcgtcaagta

SEQ ID NO: 12991 - DNA, 359 bp, Glycine max
  unsure at all n locations
tcacataccagatcaacagctttctttacaatagcctcaagttccacagaccnctctcccattgtctgaagctgcttaatcttctgctctcttgccagcaaagacaatatgcacttttgagctgagcacaattagaacccttataatgtagattgattagcaacaaaatacaagatatgccaatgccccacaacatattgtagctaagataataaaacaactaatatctaaaactaaagatagagataaacattggcactntcctagttacatagtgactctaaaccattggttatgttatgagcatacaagaaattacctctcagacgtacataatgtctccaaacctcaaacactct

SEQ ID NO: 12992 - DNA, 400 bp, Glycine max
  unsure at all n locations
agcttcatgatgatgaaccaagcaattttgatgatgtcaaaagcccaagtaattgattcaagattgattcaagacttcaaaatcaagcatcaagaatccaatccaagattcaagagaagaaatcaagaagcaacaagtcaagacttcatataggatatgtattaaaagatttttttcaaaaaccaaatagcatagttttgtgttacaaaagaattttctcaaattttctaagttaccagagtgattactctctggtaatcgattaccagttatcagtaatcaattagcagtgaccagtttggttttcaaaatgttttcaaatgatttataatgttccaaaatgattttcanatagtgtaatcgattacactatattagtaatcaattacaagtgaatatg

SEQ ID NO: 12993 - DNA, 372 bp, Glycine max
  unsure at all n locations
tgcatctataattatatcgaactaattaaagtaatggttntaatcatggttaaataggtattagttaagtaatattattttaattntttaatattatatgcaatattaagtgaaaaatatgtttgaacctatttctacttccaactaatgtttaatactattatcacttgttntttataaaaaaatattagagataatattatttaaaaaatatatattttgttaccgagtcaccaaatggttggaaatgagtgatgtgaagttcttcanaaggacccaaattgtgagtccaaaacaatgtttttttttcttgttntttaataaaataaaaaagaagaanaaagtctctttcaacaagctgctctgaattta

SEQ ID NO: 12994 - DNA, 349 bp, Glycine max
agcgtcctatttgcctactctggatacatttatgtttagacgcaccctccaacgatgagtaactatttcgtcctgaggataacaacgtggcgctatacggtggtgtacttctgcatcaaacatgtaggctcttcataccagagattgatggaccacatgttcatatagcacatcaaacgaaacatcgaggtctatgtcaacgacatggttgtcaagtcccaagcatagttcaacacatggcagacctagaagaggtcttcaaagaacttccgaaatatgacatgtgccaatgatgtgccatcattgtctcctatttcttaaccctttttgtcaccattctaattaccta

SEQ ID NO: 12995 - DNA, 310 bp, Glycine max
agaccctcgtggaggtacagcatcaagaagaacgtggaacatcattctacaagctacgagtggtgatgtaagcatactataggctgttaggattgttagttagctgttacgtaactaactacatgtataaaagccatgcacgaacccgtgaaagggattatggaaataatattgtcattctgcgcttagactttccttccttctctctctcttcacctatctctcttagagtattcagtctcgatgaaagctacctctaacagaaaatctcaaacatattattacgtttccaacattagatgttactacc

SEQ ID NO: 12996 - DNA, 184 bp, Glycine max
agctttcgatttaatatcttatgaaatagtcgctctgatgaattcgtggacctcatggtccccatatccccacaacagctggtacaatctttcctgccagacccaccgatatttcggctataatacaccctgagttgcttcctaaatttggaccactgtatattcatttatctccaaaaacctt

SEQ ID NO: 12997 - DNA, 591 bp, Glycine max
  unsure at all n locations
gcacactcacagcactcgtctttactctctgttgtttatcctgtgcgaaagtcagacngcaacgnacttatactcgcttctccctcgtncnncnacgcaagccgtgcgccattgaagcccatcgtttgagcgcattatagatactacagctcgctaaacacgggaacataccaaatancccacactattatggcgagggcctattccttgatggttcttgaatgtctcatggagcactatggacccgcactctctatcaacatacaacacctctatagaatgacgtaatatcatcctacacacaaacaggaccactcttctctaatatattgcgctaagagcggcggatctcccttaacgactcgagaagagcttgctctgactatgttcttaagagatcaatctaggctcctgactgtacactaaaatttcatcaaaacaaataactacagatctacctatgagaacccttaagacacgatgcataatcctcacagaggtgcttggagcactcatgagaccacaagggatcactaagcattcatagaccctatacgtggtctgagagcggcttagcactggtaccgctcg

SEQ ID NO: 12998 - DNA, 386 bp, Glycine max
agcttctagataaaactacatgaagctgcctcggtaaaaatgctgcgcagcctttgttcaccgttggatcttctcgaaatttggtttgcaacttcacaagacacttgtccatgatctgaccgttgggatctttgagaagatgtctgaagtgttctagaagcctcttaatgaagcttctagaggaagcctcttaatgaagcttctagagaaaactacatggagttgcctcggtaaaaatactgcccagccttcgttcaccgttggatcttctctacatttggtttgcaacttcacaagacacttgtccatgatctgaccgttgggatctttgagaagatgtctggattgtgctagaagcttccgttcccgagagcatctcttattta

SEQ ID NO: 12999 - DNA, 358 bp, Glycine max
  unsure at all n locations
tcatcaactacttgtttccaagggaaattctataaacagacctcccatctttaatggagtgggttaccactactggagaacccgcatgcaaatctttatagaggcaatagatttaaatatttgggaagccatagaacaaggaccttatgttccctctataatagccggaagtgcaacaatagaaaaacctatagcagattggactgaggaagaaagaagattagtacaatataatttaaaggccaaaaatattattacatctgccttaggaatagatgaatactttannggttcaaattgtanaagtgctaacgatatgtgggatacactacaagtaacacatgaaggcacaacatat

SEQ ID NO: 13000 - DNA, 100 bp, Glycine max
tcacacgattatatcacttaatcaggcgtactaacaggcgatcaatggcaccattatctgccgtaatagaatacaccacgccctgtcctcattgattatg

SEQ ID NO: 13001 - DNA, 405 bp, Glycine max
  unsure at all n locations
atcttgcctttttaacctgaaattgagaganaatgattattaaacacataaaatgagaatacttaatatttattacctatactcaacagaaaatacttataacactacaaaataaccataaattacgagagtttgatacaatttatacaagttttatacataaaagttagtcattttcaccaactaatagagaccaaccacacataaagagcaagtgtgcaatagacaattcttacatttctcttcttgcatctcaagctgaacgtatcatatgcatcgaccagaacaacgatggtcacgctttccttgcggtgatgataagcaagataggcattgatggcatctaagtccactagcccgtttacatttggaaatagtatagtcccaacaccaacaagctaatat

SEQ ID NO: 13002 - DNA, 382 bp, Glycine max
  unsure at all n locations
ctagagaatgtgagccanacatgcctaagttagtttaggcttatgatgggataggttaaaagtgatggtaatttctttagagaattgttaagagatggtaaattgtaagtcgagttataaccttccagctaaggaaattatgcactatctattggcgggctggcattgtctaaaataagaccgtttactctaaggaggggagtctatattaagatggtgtgatccgtgtataacccaggataaccaagatgtaccaattctcaactaactactaagcttttgtattacatcgtgtaactagttcacttatgcattcgtaatgtctaatgttngacttctagtgtttccttgattttggggtgtcagcatgatgttgtgatgt

SEQ ID NO: 13003 - DNA, 389 bp, Glycine max
  unsure at all n locations
ttctttgatgtatctntgtccagaatccctttgaaggagtctctagccaccctgtcattgatgcataagaactcccaaatattttccctaagttatgcaccctgccaaaactgaattcagtgctaatctgatctctaattctccagtaaacatacttggagaaaaaaagatctttatcttatccctgctaatcacttgaccccagctagagcagaaactgctacatctctctaatgtgactcccaagttacttgttgccttgctatagattcttttttgttcttttggggcctttaatgtttgatagtatgatggaattctctagaactcttggttgaaacttgaaatctatacctgcccttatgagaatgctaagaacatatttactt

SEQ ID NO: 13004 - DNA, 343 bp, Glycine max
  unsure at all n locations
gcatatatcctggaccagaattcatatcactgaatatgtacttttgcatctctttccctttgcaggttagattgcatgtggaggtgccatcattggtatgtgaggattgttacaagagggtcatagcacagtttatgaaacaagcaaaggtgctatggngttacacttatgctctatataattatataatattataatgtaatgtctctctcatattctggctcanagaaaatatatgcatcanattatagntgtctgtgaatatggtgcagctctatttgtcggtcacgaggaattccagtgtctaaatttgaaactataactataactataacctctcaat

SEQ ID NO: 13005 - DNA, 378 bp, Glycine max
tgcttccccctcatgatcactcttgccttttcatacactgttttgggtacattgaaggcatattcatacacccttttacaaaacaaagaaagtcagctgagtgtggaaatggcttttgctttgaaggcaatttccgaccacactgcagttaaggtttcctttatttttttttttttttcttggctcagccaaaggagaatatcattaataggtaccagaagtagccagataatcacaaaactcatgataagattcatggtcccagatacagtaattatactaacaatagaaactatcctaagtataccctgcaatcccaccatgcactgaatgaacaaattattaacacaacaaagccaagcataatgcatatcccaa

SEQ ID NO: 13006 - DNA, 297 bp, Glycine max
  unsure at all n locations
ntagtgcccttaattntgatgcaatatttgacattcccataatgtattccctgacatttccttttccttgatacttcatggaaatcaagttctgaaggagagtacttgtttccatcttatccctttttcaaagcgcttttcaatntcaacaaggaattcttcaccactagttatatcatctcaaacaatgccccgaaagacctcaagaatgtcatgcttaatgatcataagactcatgcgaattgaatgatccctcttctcatgaagtttcctttgttcagaggtactggagtccgt

SEQ ID NO: 13007 - DNA, 400 bp, Glycine max
  unsure at all n locations
agcttttgttcttcagccaccaatccattatcttgaaaggtttaggtccccaatcattggttctagacctcaataggatggggcaatgatcagagaaatctctatccaacacgaattgagtagtatctagccattgggacagccagtcatcagaaagaaggaacctatccaatttgctcatgacagtcccattgngtctacaccatgtgaaatatctcccaacagacctaacctcctcaacctccatatctganatccaagaattaaactcagagatgctagtaagttttatcatacttcatcttgtccttacagtngtttttatcagcataggacacacccaggtctctagcaatctccctatgaagatcctcctcattctcanaataactattattga

SEQ ID NO: 13008 - DNA, 349 bp, Glycine max
  unsure at all n locations
cggagatgcctgccctagagacctgngattggtatcatagttagttagtataatataatatctaattatctattcatatcttctgagttttcaaatgggaggagggagtcaactcagtcaagtttagaaattgtaggctcatcttaagaaagaaaaagaaacacaactcacatggagccagtcaatacagcaaatattacagtcaaaaccttgccttcagtatatcctttctctattatcattgttgcaccaaaccatacagccagaccataactgcagataaaaacaaagtagagcaaaccatatcccanaccagaggctagtgcctcttgcactccagtcttatatg

SEQ ID NO: 13009 - DNA, 402 bp, Glycine max
  unsure at all n locations
agcttattggaaatctcatgaaccggtggttgcttgnggactggatgtangcacgggttgtttccgaaccagtataaatcttgtgtttgtcttcttcttccctacactctttactttcctgctgtgcattntttatttccgctntacttttatctaagttattgtttctgttctttactttctcataacttagtagtaaagccttattgaatctagtaacattaagaaggattaatttttaattagtcaagacacattcataattaattcaacccctccttcttaattattccgaggccacttgatccaacacgaattatggaggaggaaagaacaagcatagttaggttccttcgtgggcttaatatggaagtgagggaacaaggtgaactccttccatat

SEQ ID NO: 13010 - DNA, 325 bp, Glycine max
  unsure at all n locations
gtggtaatcagagcacaagagcttcaagtaggtgctccttatacctccattaatggttttgctntaccttctcttccattggtgtttcttcattnttctccatgtatctcctcacatgtcttgttctaaatgttgttaacatgattctttagagtttccaccgattaaacttgctatagaagttagatttgattntctatggttcaaatttcttgttcttgttcttgaaccatgaattgtgttgagtttaagttcctttaagttntgtcttgttattttttggggctgaaacctaaaccataaaattcttcaaaaatattaaagt

SEQ ID NO: 13011 - DNA, 401 bp, Glycine max
agcttctagcttaatggacttacctagaattaattcctttgataacccttttgagccttgtttccctttccttgttttgaagctcactacaagccttaagtgaaaaaccatgatattaccatatccttaaggaattttggagctctggaattgttttgggaataagtgtggggagtttttgtttcattggacaacttgttttgttggctaagcttcatgatgtaatttgggccatactcgatgtacattgtatattgagtaaatgttagacatgctgaatgaaattatgtttctcaaagaccaaagagtaaaaaataataaaaaaaattcggataaagaaaaagataagcaataatgttgagtgaataagatcttaaatggcacacgattgatgaaactct

SEQ ID NO: 13012 - DNA, 338 bp, Glycine max
  unsure at all n locations
tcctcttttcttcagttgccgagggcggtccttncgtgagacaaactattggtngtgtcgcgatgttgggttgacgcaacgtgcttggtgccggccctttcgggatcggtggatagaactcgacatccctttgagcataatcttgagggtctttggggacttcttcaggctgttgaggaggctctctttcaaggactggagaagcaatatggcccgcatcgtcttgcaagacgggcggtgagtaattgtgcagcaatccataacggtaagccgctcggttgtatcccaggtgagggctgccatagtgccccagtgtgtcccttccccgtcctactatg

SEQ ID NO: 13013 - DNA, 350 bp, Glycine max
  unsure at all n locations
agcttcattgtctaacatgtcaacttacaacagcaagccccaagagactcagcataaggatgcacagaccaaagttgcgtatgtaaaaaaattgtatgaccaagtgaaggtgcaaattgcaaagaagaatgaaagctatgccaatcaagcccaaaagaaaaggaaggaagtggtacttgaacccggtgatgatcttggacatttgacgacaaatgttctccaagaaggagggaatgatgagaatcatgaaacatgccanatacagtctaaaggcccaagtggagaatgacgaatgcccaattggataatgacaaatcccccgagtggagaatgatgaatgcccaagtgga

SEQ ID NO: 13014 - DNA, 337 bp, Glycine max
  unsure at all n locations
agatggaccattcaagtgcttganagaatcaatgactatgcttacaaagttgagctgcccggtgagtataatgttagttccaccttcaatgtctcagacttatctctttttgatgcagatggagaatccgatttgaggacaaatccttctcatgagggagagaatgatgatgacatgaccaagaacaagggctaggatccacttgaaggacttggaggacctatgacaagggctagaacaaggaaagccaaagaagctcttcaacaagtgttgtccatactatttgaatacacacccacgcttcaaggagaaaacgtcaaagttgtgagttgtatca

SEQ ID NO: 13015 - DNA, 403 bp, Glycine max
  unsure at all n locations
agctntntgttttagaatcttgggatcaactcattttatttcaaaaaggaagtcgtatctagtcaaggtctgagagaccatacaagtttcctaacgatttctaattatgtgggccattaagtctatcatatgctgacaatagccgagaagcccatgaatctcttcgggggcggagtaggtgtctgccatcgccttggccttggctaacaatcggggaagttcttgactcccgttcaaggtaagagcaaaccgatccatccacatggttgtctcttggtgtaaagagtcgatcacccttcctctagcctctttgtccgcatatacttgagcatactcatccgcgattctatgctcgtgggccatggctagacctaactcttcttggtacttggcgatgatagct

SEQ ID NO: 13016 - DNA, 357 bp, Glycine max
gccacattcttcttcacgaactcatagagaggtgatgcaattgtagagaaattatgaaggaaccttctatagaagcttgctaacccatggaagctcctaatatctcccacactttttggggtgggccattcttggatggccttgattttctcaaggtccacttggaccccatttctaccaactacaaaacctaagaaaactatattatctacacaacaggtacacttctctatatttgcatagagggtggttttcctaaggactgatagaacatgcctgagatgtcctaagtgatcatctatgttcctactgtacactaaaatatcatcaaaataaacaactacaaatctacctatg

SEQ ID NO: 13017 - DNA, 420 bp, Glycine max
  unsure at all n locations
taattctttatattagcgccgncatgcaaacccgcgagaagacggacggttcctgcgttggcgtttccctctaactattacggagaataagggagagaatgttgaatgtgacttgtgtctccaaagactctcattcatcaaactttcaacctaggggtacacactgcttctattatatcggctatgcacctcgtcctgctaacctttttgtgaacactttcttgaaacagttctcttgtaaaactctgctgcgaagatatagcttagctatcaccaccgcccctacatagtatactcactcctttaaaaactatctttgaaaagttcttcatgaacgtgagcgttgctctctccactgtctaatagctatgtgtacttcttggaagaaacccatagtttgtcccccccccttatatgtcg

SEQ ID NO: 13018 - DNA, 420 bp, Glycine max
  unsure at all n locations
taaaactcagcttgaggattatggngtacccatcacatgtggtactaggtggcggtcgggcgatggtgcacatcaagttntccacatccacaatgcgcgcataaacccaccatcctctgttgcccacctccaactgagctcacgtactcccacgtagcccataccctcgtttctctcaacactgggtccccatcaatcctcccaagcttccacaacatccaagcaacacaacattcaaacagcacaagctatcacagccaagcaaaacagagcaaaggcagataactctgctcaacacaccaaccaaaatcacagcttttctcacttagagaccccagtaataattccttcgatccaattcactaaccgttggatcgactccaaaattgtactggaagtctacagtgcataagcctacat

SEQ ID NO: 13019 - DNA, 125 bp, Glycine max
atcttcagaatatagtgataaggtacaagctctaaaggcagagcttgaaagagcccgaatagtctaagagaagttcaagtccatagccatcagagtctgaccataatatgacgatctaacggacg

SEQ ID NO: 13020 - DNA, 483 bp, Glycine max
  unsure at all n locations
cttctccctccacattctcatgagtttattaacaacttagataccatcaanaancaccncccgctgcccatgacccctgttgaccctctattagcgaccttagatactaacttgcaccagctgccagcagctcactcgccatcgagctagttgttctncaaaagcacctggaaaacttctggatagccatatgggtctgaattttattttgacccccgctttatactaaatacacacgctngcccttttatgctgattcttttttccgtaacgttacggaaacttacgaaatttcgtattgatactttgttntctcttccgtaaatggtntgggaacttacggattacataatcatccctttttgcgttccgaatgttccgaacttacgaatgtgcattacactccttttgactttcgcctgtacggaattcacaggtgtgcataatgctttctctgacttccacatcccaaaatttacgatg

SEQ ID NO: 13021 - DNA, 329 bp, Glycine max
  unsure at all n locations
agcttgtccttggtttagacatgattggtacatgatttgngacttgtaggattcaatttgggcaaaattggatgagggaaagagtggttttcgaaatctgcactttatgcagaattttgctgttgaaatgtgcagcagaattttgtataagtgcagaaaaatgcttgtgtatggttggctgtggaaagggtagtgcacatggngttctggacattggatagtagatcccaacggtcaaaatgtaggcttatgtactagagacttccagtaaaattttcgagtcgatccaatggttaacgacttggaacgaagaaaaggttactgggata

SEQ ID NO: 13022 - DNA, 535 bp, Glycine max
  unsure at all n locations
ctctcagcgacttaacacatatgttatgatggtggnaataatattatctctttattgtcatnnaactacctcacaagtctgcgagcagcgttgagaccccttctttgaacgccatctattatgagaactatagatactgcagcttgagctcggtcaaccacgtatccaacgaatggaatatctgatcgcctatacttcaacaacatctcatatggatgaatgactctggcatactataagctcatgcacggaaaatgtaattatgaaattgagatgcccgaagaaacaccatattctatttaaccatgcattacgtaccatgtccaattatttatgttttaagtgaaacgggtgtatgatcccaacatggttggctcctaacacatgatactaataatggagcgtgaagtttcacactccttccttctttgataatgttttgagaagaaaacgccccgatgagcaacctgataactaatggtctgcactctatcacatcaataaggttttgaacgcatatgcataagatgcgacn

SEQ ID NO: 13023 - DNA, 400 bp, Glycine max
  unsure at all n locations
atcttcaatcttctcacaaaggagaagacaaagtaaataaggtgtgtctccaaactcttaagaggtgagtttgaatccttacatatgaaagagtcggagtccatttctgattattnttcaagaattcccgtagtttcaaatcaactagaaagaaatggtgagaagttaaaagatgtaagaattatggagaagatactatgctcgttagatcccaaatttgtgcacattgttgtgacaatcaaggaaaccaaagatttagaaactatgatgatagaaaaacttcaaggatcactgcaagcttatgatgagaagcataagaagaagcanaagatcactgagaaaatcttcaagatgcaactaaaggagaaagaagaaagtcgaggaaatgagagaagtcaac

SEQ ID NO: 13024 - DNA, 385 bp, Glycine max
  unsure at all n locations
nnggacttctatgttctgggaacctctccttncttatgtgtacccaaactccatcacctggttcaagcatgactntctttctgctttatgtggcttgccttgcatagctcgcagttttcttttcaatttgagccttcacttgctcatgcagcttcttcacatactcagctttagcctgtgcgtccttatgcttaagcatagcaatgttaggcatatgcaacaaatcaagaggaagtcaaggattaaatccatacactatcttaaatggtgaacaattagttgtgctatggacagtccgattataagcaaactcaacatgaagcaaacatgtntcccaagattaagaattttcttaaaacagtcctaacagtgacctaaagcctat

SEQ ID NO: 13025 - DNA, 336 bp, Glycine max
tttctttgagtcttttcaaacgacaataacttttgactcggatgtccgattgagagccgtagtatatcgagacgctcgtaattgaaaacggaagctctaagcacattcaaacgacattaacttttgactcaagtgtccgatggagtcctgtactatatagagatgctcgaaattgaagtctgaagctctgagataaatcaaatgacaattactttctactctgatgtccgagggaataccgcactatatcgagacacttgtaattgaagatgaagctttgaggatattctgacgaaattactttttactcggatgtccattgagtcctgtgctata

SEQ ID NO: 13026 - DNA, 435 bp, Glycine max
  unsure at all n locations
cctctctcccactctcactcgcaatgtatntataatcgganttcactctataatcacgcatcctttccccatcgtagtcgctggngcttgtgaccctttatagcgacgtagctacgagctctgtttaattgcaccgttcataaccgtgtcccaacgttcccagaataactttgacgtggatcgctgaagctctatgttaatcgagcgtctcatatatacaggctcatccgatccgcgcaaaattttgcttggtattgatagagctatatttacattaggcctgactattaccgggcctaaccacatcaacacaaagctattgccccgagtgtatagacctccgttgacccccatttatgcaaaaacaggcctgatcgagcccggtaatactttggccagaacaataaaagccaatatcttaagccatgtcacatc

SEQ ID NO: 13027 - DNA, 413 bp, Glycine max
  unsure at all n locations
ggnatctttcttgccttatgggcaacaactagagagagattctattgagcacttgatgctattctctaattacaaatggacccgtactctaataatctaggctctaaaagtctgatttatagaaaacggcacctggttatcgatgacacattaacgcgcatcacactcacggtatcgtatgtaacgcttgaccttaatctatgccaagtaatccgagtagaatccctgcttcggcatgaccagtatagagacaccgtttacctaaaccctgtatacccttacgtttattcagcatgaagaacacctccattagtatgtaagtctgagattgtacatcactgagaattgattagtcccatcttgacgcccctatcatagcttatagagatctgaaatggcctcggacagctacg

SEQ ID NO: 13028 - DNA, 106 bp, Glycine max
atatttcacggcatcacaatgataattacagctcttcatattgtgctgataccaaatctcaaggtgattattcattactttagcttgtcttgtgcacaatctccta

SEQ ID NO: 13029 - DNA, 405 bp, Glycine max
  unsure at all n locations
tagctttctcttatatgtaaagtttattataaagtttatcctttcattaatgcagctctaacactntctcacaccatatgaagagactaaaagcaaattgatagaaatcaatttaagtgttagcaaaactgacaagtgactctttttttactcatatgaaccttcttcatgggatctccaatcacaaagattgggtggccatcacttgtttgttttcaagtggcttaagtcccattcccctcgatgtttctaatatcatattctttcctaaaggtttagcaaaagatctgctgagtttctttctaacttcacataatctatggaaatngttccatcttttagcagctacttaaccacattatgtctcagttgtatatgtctaatttcatcgaatgttttattctt

SEQ ID NO: 13030 - DNA, 318 bp, Glycine max
  unsure at all n locations
tganaanatatactttttttataggaaacatttcataacaacgaatatgatgaccttgtcatatgtcttgcacccatgcatggcctgtntgttggttggttatgcacaactctttacatagatnnttttattgcatattcacccataaacacagccacataagatgctcgctccataagttcatcattttcatttggatttgattcaaaattctcaaccaagtcattcatctttgacctgtatagaaacaatattacacaatacaacatatatcaagatacacatgattaaacataagttcattaccaaccataatat

SEQ ID NO: 13031 - DNA, 410 bp, Glycine max
ttgcatgcaagcttctagccaaatggacttaccttgaattaattcctttgatagcccttttgagccttgtttccctttccttgttttgaagctcactataagccttaagtgaaaaaccatgatatcaccaaatctttaaggaattttggagctttggaattgttctgggaataagtgtggggggtttttgtttcattggataacatgttttgttggctatgcttgatgatgtattttgggccatacttgatgtacattgtatattggttaaatgttggacatgctgaatgagattgttgttctcacaggctacagagcaaaagaaaaatcgaaaaagaataagaacagcaataaagttgagtgaataagatcttaaatggcaaaagaatgatgagactcttggttctact

SEQ ID NO: 13032 - DNA, 248 bp, Glycine max
  unsure at all n locations
agaaaagaagagaaaaggagaanaggagaattcccgatcaaaagaatcggaagaaagcaaaaaaggaaagaaaattcccaatcaaagatcgggagaaaacagaagaaatatacagaaaggtctttggaccanacgacatctgaacanatacagagttatcaccanagtaaatatagaaagaaaggaaaccacgacctanagtggtcccctccctttgattgccaaccaaaatcccgtgcgtcggtgac

SEQ ID NO: 13033 - DNA, 400 bp, Glycine max
  unsure at all n locations
agcttcaaggctaagtcttcatgttgctccccctatctctaacatccgatggattctggccgccggaaatacactttttttgtagtgagtgtagtgtcaggagtggtccagagagtacttgttgtagctagaaatggcatagagaatacttgattgtaatcaaagaatttattagtggaacccttcaaggtttgaagaataattggacgtaactcaagagttggggtgaaccagtataaaacctttgtgttttctttactgcttctatataactagttattctctataagttctacactactataaccaagttntgtgaactggttttctaagaacaatgtgatttcaaatcccttggatgatacccatcgtccattgagaaaagcnntttaaagttttc

SEQ ID NO: 13034 - DNA, 405 bp, Glycine max
  unsure at all n locations
gctgggcacaacaccatgttgnacanatgatcattcatcacttattctaaataaaaagaaaaaaaaaatctaacggcctgcttagaagtagaagtaggaattttacccaattggttttttcacaccaggtgatgatttcacccaagccacgggaaataaccaaaaacattaatggatttggttcgaatgcacatataatttacactagcattcaaaacaactagttcaaaagtcattttgacagagaaaagaaaaaaaaattacactaacaatgcatcaaaattaaaccaaaaataaaggcttaactactggttagtccctggatttanggaccctatttttnttaanntcctaaatttaaaaataatttttttaccgtgacaattgntntctagtcataataan

SEQ ID NO: 13035 - DNA, 397 bp, Glycine max
  unsure at all n locations
agcgtctatttctgtaggtgtatcagnntgaattctgaacaatgagggctctaaatgtgaacctgatgctctgtctggaaatgcaagtgcaatttgtatttgtgcatgtcatgtcctacaaaacggacgaagtggaagtggaaatgaacatagattgctgcccaaggaacaagttatccttcctcgctactgcttcttttgcaagggctattttatattatttattaattacccgtgaactacataattgaagttatatagacagctgactgatagtggctatcatttgtctttgatctgaattacagtctgcagtgaccgacatatctaaattcagctaacgcatgttttgaaagaaaagaagtgcatgtatgaatttgtgttcactttaatgtga

SEQ ID NO: 13036 - DNA, 425 bp, Glycine max
  unsure at all n locations
nttgaacccatgatgaagcctcttagatactacgctctaggcaacttctcataacctgctcttgtgcgntgaaggagtctaaagccagattagaatcattcctaagggactaagccttctatctgacttcttctactcaatcagcatgaaaaggcattgaagggtgccatacttctatctttcttgcacttcgtcttggacctgtccttttgggacagcctctctcttcacaccttgaaccaggactaaaacctatcccttctatataaatcctacttaaccgctaaaggaacgtaagtgcatttctattctaaaaggagaggggttggcaagctacttgaatggacatctgagatggcatcaaccgagcacaaacagatctggctgctagaatgaggcaatgaaccttctacataagtatgcct

SEQ ID NO: 13037 - DNA, 353 bp, Glycine max
  unsure at all n locations
agctttcattatcgnaaaggtctacattatgctcgctgcgtaaatgccggagcgttcctccactcgccaatatcccagctggaaatcacgagggcatggtcgtaccaaatccaatgtactcggaacatcatcttcgtatatcgcgaccacttgaccttcattccccagacccgcgcttataaagctcctacttatgtggcaaggtgggcttcctgtaccttcttgtctcaaccgcgagctttgactaccgttcttccttcacgcgatgcttatctttatatctgcctgagtgggcttatagcctatcccatacttcccacgattgcctttggcatttatcaagctagttatac

SEQ ID NO: 13038 - DNA, 354 bp, Glycine max
  unsure at all n locations
acaccatatatagtccctactattctctactagcatgactcatattatttgggttctacccataagatccaatttactttgaatcttctgagccattgtttatcgtgttgtgaggtatatatccgttatgatcaatatgttcaaagcattgaaggggagcttgagatataattcggctttgtggtgaaagaaggaaacttgagattctctttctttgtgaacgacggaagcttgacattntagttactctggtcaacgtgcgaagtatatatgatacatataattgcaaattttctagacttagaaaactgtgcgaaacttataattcatcatcttattatatactttacacat

SEQ ID NO: 13039 - DNA, 417 bp, Glycine max
  unsure at all n locations
agcttttatctccaaaaatcgcttgaatccgttcaaggtccaacgccttaacagtctcttttacttttatcggttaaaatgaacctttcaaaagtctaaaatcaaccctacgcgtaactttcttgctttcaaagaactacgtaggtctgagttcctcatcgtaattgaggatacgtaggagcaagagccacactcttgtagacctcaaaaattaaaaaaaaaacataaaaaagggaaaataaacaaatattgaagtcatgattttgcacacttgattaaaggctgtcgtcccttgagccacgctcccaaaccttttatccttcaaattcatagaccccttttcggtttttctaacattttcctcanataaacgttggtggcgactccgcgcgttntccttccttggaagacacaccc

SEQ ID NO: 13040 - DNA, 356 bp, Glycine max
  unsure at all n locations
cttctttgtgagggtctctagttgcttggctaagagctagttctgggctagtagtgcgtcttgtgatgtgagctcgagaaaactcttctttgtaggtgtgtaggctcgatcatgaaggatggcatggtcactgactgccatattttcaatcaactccatagcttcatcaggtgtctttagtttgatcttcccaccagcggaggcatcaagtaactgcttcgaatggngtcataagccatcaatgaagttattgagttgaattagctcgctgaacccatgggtgggagtcttctagagtaaaccaaggaagtggtcaagagcttcactcagtgattcatcggggaattagtggagtg

SEQ ID NO: 13041 - DNA, 392 bp, Glycine max
  unsure at all n locations
agctctgcatttatatgttattggaagaaataggtaaatgcttcacgtagatacaattgttcccaatcatctcctggttttttgtttagtcttacttacaataatagtctttaagctaaaaaactacaataatctaattataaactattttttgaacacaaaataaacccaataaacaattgatataaaataaaacacttgggtagaggcaaccccctactattagattgtgatcccacaagcaccttcggctgtcagatgatgtgttgtatntcattctatctttcgcttacttttcatgcttagattgcatgcattccatggtaacttaagtttagattcatgaataaatctcttagttttttcttttccttttcaaacattggtatgct

SEQ ID NO: 13042 - DNA, 390 bp, Glycine max
tacaaatgagtggtgcaggtggtgacgcttagattacaatattcacctgagagtcaaagactaatcaaaggactagtgcacagccaacccatgtgcacattggagctgttgagcgtatggggatgttaggattcaattgtaaggtatgtaactcgagtctcacatggaaatatgtgattctagcatggcgtttatacagcctttggctctcctactacaatggctagcttctgtgacatagttttcctaacgttcttaccacacacatttcaagactaatggtatgagacactggaacactaaagagaggctaatgccagcatccaccacatataatttctcatgtttatatatccaaaataatggataatgcaagagcacaccaatgct

SEQ ID NO: 13043 - DNA, 411 bp, Glycine max
  unsure at all n locations
ttctntgtccataaaaatcacttaanaaaccgttttgaagtccaacgcctcanacggtcctctttgcttttattggttaaacatgaactctcgaaagcataaaatcaacatgtaactttgtcgctactttcaaatccaagagatcattaatgggccaacaccttaacgtttctcttctttaatagaattcaaagatcatttaatggtccaacgccttanacgacttttgttcggtcaaaatatatcctgcaaaaaaaataaaaacaacttaaccaacgcttagttcttatagaactgcgtaagtttgatttcctcatcacaattgacggatacgtangagcgagggaaacacccttatcgaccacaataagataaaaaatacaaagggctaaaaagacataaaaacgtaac

SEQ ID NO: 13044 - DNA, 442 bp, Glycine max
  unsure at all n locations
ttgaacccccttgttgaagcccattgatntnccgacntatngagactcaagcttcactggctttgacccagagcgtttgtcattntctctgctattncaagtgcataaagaccaaggccacccagggcaacccaaaattggtgattagaatatgcatttttcttaactggaaacaaagaatatcccacccttttcttaacagatagtaagttcaccaatgatacttttatcatacccttctatcagtatgcacccgttgcttaaccacatacacctccatcttccgtgcaattgaacagaattagaacggttgctaccagggaaacattaattgattctcagagggttgcattggcattttctaagattaatcatccatttgagaccccttctcaaaatagtattctctaacttgnggctaggaacaatatctatcaggcct

SEQ ID NO: 13045 - DNA, 51 bp, Glycine max
tcagcaccttgtctgcttgcgtgtataattagccaggcggatacagggcag

SEQ ID NO: 13046 - DNA, 420 bp, Glycine max
  unsure at all n locations
cccacccagcaacaaataaaaaaaaagatgaaaacgccgtcgcncataagagcgtgacctgtgaacctgaatcgaccctgagacccaccaccaaactaactccctacacccagattcgaacaatgtttagcaccgatcaagactgctgcgcaaaacgcacatagtggcaagaagctacaactgcttcaaggtaaatgacatgcacaaaggcccccacgtgtaggaaagatacacacatgaatacctatccccacggtaggacccaaccaatgatggagcagccgaattaaaggactggacgaggtagccacttcccttaggacaatgacgagcgaagacatacctaccactggagttgggcaccgagcaaagacaccatacaatgaacatgcgtctacacgctgctgcaacaagaaaccc

SEQ ID NO: 13047 - DNA, 411 bp, Glycine max
  unsure at all n locations
ttcttttatttgggtaanaggctcacattcactntcttctacatcatattcaaacttgtccaaataaataataaagtcatctcgactcaaagaaagtcatataagtctcatacaattaatatagaacctatatcctaatgtcacatcctatcagagcgtggtgttcccgtgtcctctagcatgaggctcttcatagtcatccacctattcatctgctcccccgaacacaagttcaagatcatcacaggatccaaacacaacaacgcacagggagtgagttatcacattcctagcttatagagaaacaagacaattaaatatacatattatataaatgagataccacttgcttaaacatagctcacgtaacttcaccacttcgtcattcataattcacttttcaattatcaa

SEQ ID NO: 13048 - DNA, 450 bp, Glycine max
  unsure at all n locations
tttgacccccttcattganacgcattcatgtangcgacagtgtgcactactccagcttcgaagagaggtgtacatcaacatctcgctcaggctatacgctggcttatcgagcgtacgctaagcgccacactcattggctaatctcaatgaacaatctggtaagaatatgacctgtatatgttgcactgaatgctaccggttcatctcactaagctgcaccgcttcatccattctgctagcgaaaatagcacacgcttagcctgaacttacgtatgtgcacttagcggctcttaattgcgcttaacgcacaacgcgaacactgtccctatttaagccttanatcatattttttatagtaggttggcggatagctgacactttgatgtctagtgattctacagagagaaatgaanggtctaactccagagagtgcgatagatttagtgagtg

SEQ ID NO: 13049 - DNA, 549 bp, Glycine max
  unsure at all n locations
actgcgcagcacacacagcggctcggggtgcagaaggtagagataaaccgcnaactcctnccgagcgagagcttgaacctgaaacatctganaccatggacaccacgcgagccgagagccccggaagccggaagccacttttgcagctaagtgaatttatctacgtccaagagctgagcacgcaaccacaacccgaacggcgaaaccgggcaccccaggagtcccacaacgagcacccgcgaatcgcacgccgcgtgacacaaccacgagtaggaggagacacgcaaacgactggacgaaccgctccacatgaagaacaaacatcggtacatcgctggaaaaaagcagcgggcaaggcactagggaaaaggacaccatgcacgccggcggaggacccacagcgcgccaataggccagaaggccatcgatcagccgcaccataaaaggaagcacaccgagtataacgcaccagtcggccgggaggaccagaccaaatgggcacgctgtagaatgacacgagacaaaacgcgagagaaaccaacgccgacg

SEQ ID NO: 13050 - DNA, 504 bp, Glycine max
  unsure at all n locations
acccacagcccttaattctacaatagtattcaatagaccacgaaacttgacacttgatcnctcacccccaagccgccggacaccttgancccctcgttggacccattcgaaatgcaaaccatagaaacncagctggcttgcaaccaacctctcagagacgatatcgtgtttcagactcattattttcgccagggatcttagcggtggaaccaatgagtctaagtcctagggcttactcacgcccgggaacaagaagggtgtgaatgatgaatccttagaaaggctacattgagtccatactaaagaggataagctgactcgtacaccgaagagcgtctatcgataagtctaacgctggtgagactctagcaaagcgaaatccacttgtgtaagcatcatcaagccaagactttggttaacggctagaaaggaacgaagacccattcatggagttagataaatcctatcgtaaaaacacacgcttatagcgcacaaacagaaacn

SEQ ID NO: 13051 - DNA, 262 bp, Glycine max
  unsure at all n locations
ttgttganaggttgcatatatttgaggctttaggccaagagtgagtataagctagcccttatcgttggatctgtaatcttgtttataggtcttgtgtggtaaaataagagatcttatcaatgatcttgtgtgagaaaagcttactaaggcacctgttctagctcttactaacttttctaaaacttttgagctagaatgtgatgcctctggagtgggagttggagctgctttgttgcaaagagggcccctattgcttatttag

SEQ ID NO: 13052 - DNA, 244 bp, Glycine max
  unsure at all n locations
agcaagtcatgtattacacaagttcgtatatctaacggtatatcttatcgtgacttcatttatttgtcataaatatcgatacatcttaagaaaatatttttatagacagaatttccgacagagaatagtaaatgaagtattacatattatacacaacatgggatgttgactggatatacctatcgtgtgagaatatcatacgcacatcatagagcatattctctctatgttggcntacatctaa

SEQ ID NO: 13053 - DNA, 363 bp, Glycine max
  unsure at all n locations
tatcttctgtttaaaacaattgagcatcagctattattcagcanaatattagagatgtatgttaacagtgatctattaactttttaaagttttacccatgtttgaaagaatagaaatgctggacagggtgagctaatcctatccaattntactatgaattcagtaactaanaaagatagcatctagatatctgccaacagcctcataccatgtaagctgatattgttgtttacaggggaggtaggatacagctaaataacaacttataaaatanataagccgtaagttatttacatgcccaaataatntcaaanaggattagatagagaaatcacagtgtcccttacttgcatttgcttatgg

SEQ ID NO: 13054 - DNA, 381 bp, Glycine max
  unsure at all n locations
tcccttccaccccaactttccagattntattgcctttngcatctgtaacataggcattgccttctgcatcaactgcaacatcatctgcgaatgatttctcatcacctgcatccaatggaaaattgatattgtcacaaaaggcccaccagttgtatgtctaagctaacacaattttgaaagctataccccatgttatgaagccacgagaatatangacatgcaattaatagaagtactgacgtangtangccattttccttttgttatttattgacatgcatagttcataactaatacattgngaatgtgggtcacggtgcaattgacaaccattcatatgtttttttctttcttacatncttcttgcacacatgaataaca

SEQ ID NO: 13055 - DNA, 378 bp, Glycine max
  unsure at all n locations
agctctttttaatttcattctcttgctcgggtctccaaaccaattatctctaaagtataacaagttatgaaatggtacacacaattagaaaaatatgaaatttacaatttcagataaaaaaatcagcattattatccatttcaaccattgaactaattcattaacagaagaataatttaccttanaatgctgganaaaagttcctgatgatcttttggaattgctccccatgtaagccaaggctgaccanattgttgcctaatggacaaagtgacagcctttgccgcaaccttagatggatgaaacctannatataaaaataattcatcanaatagtaaaagatcaaatgatgcatcatatataatgataattatata

SEQ ID NO: 13056 - DNA, 379 bp, Glycine max
  unsure at all n locations
cgtgtgacaattcactgtgacagtcaaagtgccattcacttagcanatcaccaaatgtaccatgagaggacaaagcacatatatgtgaaactacacttcattagatatgtgattgaatctgagaaggtgaaggtggagaaggtttcaacagaagaaaactcagctgatatgttcacaaagtccctctctagtgtcaagttcaagcactgtctggacttgataaattntgaagatgcctaaagtagattggtataagtgcagccctgaagcacaaggtagacacttgttgatttggagtcaaggtggagaattgtggtgtgtgactcanaatcacaaatggcacaagtgagaaggctctaagaggtgctgtcataacagt

SEQ ID NO: 13057 - DNA, 310 bp, Glycine max
  unsure at all n locations
agcttgtgagatctgaagacttcttcagacatgtagaactggggaagactgacaacccaataggttcaaacgtgacctcaagtgtttgttgatcaactatcacgactaaacacgttgggtttgaacgctccccacactcaccctcgaggcactgagatccttatagtccttgagggtactctctatgttggatntgtgacttccaatcaagatggaaatcacctcttcaacaaagtgctgaacaaaggtgatgtgtttgtgttcccaatcggtctcattgatttctgcatcaatgtgggatatggcaatg

SEQ ID NO: 13058 - DNA, 256 bp, Glycine max
  unsure at all n locations
tttttcaagagatttactctcttggtatcgattaccagagaatgtaatcgattaccagtggccaaaaatgaattacaacagctattaaaatttgaattcaaaatttgcacttgtgtatggattacacatatatggntatcgattaccagcagttactgaacattttaattcanatttaaaagcttgaatcgattacacatatactgtaatcgattaccanaggagattttcagaaaatattctcaatagtcacatc

SEQ ID NO: 13059 - DNA, 355 bp, Glycine max
  unsure at all n locations
agcttcagattacantttttgttcatacaaatcagccgattgttgatccagagcataatgttaccacacaataaactgtacatatatatgacctacagtgatatctgctactaatgcaaaaatctaaacctaagatttgaataccactgattatagtgagtggcaaaatccttctcttaaatatttcagccaagaccataacataaacactgtccaatcattttagtttccccataacaaaaacactttactttctttgatgtttgtaacatggataatcagaaattaccctgcagagctagtgatagtgctcactcgcggtacataattgctatgctatctatcccaccttgac

SEQ ID NO: 13060 - DNA, 392 bp, Glycine max
tgtgtgtatgcacagttatttgttaagtgattcccacaagtcatttgaatttccaatatagttataaaatgcaattcaatgttgaagcataaaaaaactggatattaataactacaataatggtgaaaacaaccaaattagcgaagctaaaaggctaaatatttaaaaagctaatgatcgctcaacatgtaaattaacaaaccatcattttaaaacccagagaatacaaattaaaattcaatcactattggtgtcgccccaattctttatgtcttctataacaatttcccaaactttgtcatgaggcctctggtagaatgagaagtcgtatccactattgttgggtgagtcaacaatccatacatgcattctaaatgttaataggggtctat

SEQ ID NO: 13061 - DNA, 334 bp, Glycine max
  unsure at all n locations
agcttctgttgttcaatttcgagcttgtttacatattatgctccctaatcggacatccgtgtganaagtgataaccaaatgaatttctcgagagcttctgatgtttaatttcgagagtatcaatatattataaccctgaatcggacctaagtgtgaaaagctatgaccattgaatttctggagtgcttccgttgatcaatttcgcgcgtctctatatgtgagtgacctgaatcagacatccgagttaaaagctatgaccatttaaatttctcaagagcttgcgtagttcaatttctagcggctcgatatgcgatgtgtatgaattggagattcg

SEQ ID NO: 13062 - DNA, 336 bp, Glycine max
gtgcctgtatatcgatgcgcctgaagtcgacatccgagtgaagaggtatgaccatttgaatttctcgagagcttcctatgtttaattgtgagcgtctcgatatattatacgcctgaatcgaacctcagtgtgaaaagttatgaccatttgaatttctttagagcatccgctggtcattgatcagcgtctctatatgtgatgcaccttaatcggacctccgcgtgaaaagctatgaccatttgaatttctcgagagcttgcgttgttcaatttcgagcgtctcgacatattatgcgcccgaatcggacatccatgggagaagctatgaccatttgaa

SEQ ID NO: 13063 - DNA, 418 bp, Glycine max
  unsure at all n locations
agcttcaacattcaatttctagcgtctagatatattacaggactcaatcaaacatccgagtaaaatgttactgtcgtttaaatttgcttagctctccagctttaaatttcgagcgtctcgatatatgacgggactatatcagacatccgagtaaaaagttattgtcatttgaatttgcttagagattcaacattcatcttcgagtgtctcgttatattacgggactcaattatacattcgagtaaaaagttattgtcgtttgaattntctcagagcttcaacaatcaatttcgagcgtctcgatatattacgggactcaatcaggcatccgagtaaaaagttattgtcgtttgaattggctcagagcttcaacattcaatttcgagcgtctcgctatattacgggactatatcagaca

SEQ ID NO: 13064 - DNA, 432 bp, Glycine max
  unsure at all n locations
tgacgcagcatgaggcacttaanactanagcttagcaattcaacgacagtactctntactcggatgtctgantgagttccgtgatatatcaagacgcttcaaattgaatgttgaacctatgaaccaattccaacgacaattactatttaatccgatgtctgaatgagtcccggtatatattcagacgctcgaaattgaatggtgagagcttaggcanattcaaacgaccataactttttacttcgatgtctaattgaagtccgtaatatatcgagacgctcgaaaatgaatggtgaacctatgagccacatcanacgacaataactctttactcggatggttgaatgagtccataatatatcgagacgctcgaaattgaatggtgaacctctgagccaattcaacgaccataaacttttactcggatgtccg

SEQ ID NO: 13065 - DNA, 387 bp, Glycine max
  unsure at all n locations
agctnttaaacaaaaaagctatttgtcatggcataatgattgcaagaaaagattttttgatgggaattatgatgagaataaaaaatttcagtaatgtggagcaggtgtggtaggacaatgggggagaggacccaaaagtttgtaaaataaaaatggatctgagatgtgatctaaaaagaaaaagactgagaattcaaaattctcagtgaagccactaagaaagtacttcgagtttagtagtaaaagcaacttttgttagagatgtcacatggaagagtgcgaagacattattaaaacaagaattctgatcatagggtattgtattgaaagcatcgtattaaatagccacttggtttgtaatgctagctagctatctaaaaaaaatta

SEQ ID NO: 13066 - DNA, 405 bp, Glycine max
  unsure at all n locations
tattatgtgttgatgattataacacacacacacacatgtatatgaattgttaaaataatttatgaattaatagttcanataataaaattaaattgaaggaaattaatatatcaagattcaatgataaatacttccaatgcattnttagtttaattatttattaattntttgaattgaaaatagtatagttcaatttaatagatacatgttttgtgccatgtaaatattaatattgtgagatgttcatatgattcatgaggtgtgataacatgctgtgttgggattataacattatgattgagattgagtgtgtgtgataaattgagtatgtgttgaattgtaagatacatgtgtattaagattntatacacattgagttgtgagttatgaactgtacaatcacat

SEQ ID NO: 13067 - DNA, 387 bp, Glycine max
  unsure at all n locations
agcttgtaactgagtcttagctatatatcaacacagagagaggaaacacataatgaaaactagcattgctaagcaatcaaacaagagtatnaccctgatcattttttaactaaagaaacttgaggaaagcaaagtattntatgtgttcagtgcacttgagaaagtcaagctacatcaagctagaattttttattgtaaattaatttgacgtcataaactcgtatgtatacaaaatgaagaattanaaatgttggtgtttctcttagatttattgantagtatcaagtcgttagttgtcaatgtaaatattacatntatcaataatattattgtttgacaataaaaattaaaattgttaattaaagtaaaaaaatacatatataaact

SEQ ID NO: 13068 - DNA, 333 bp, Glycine max
  unsure at all n locations
ttacaaacttaattaactgcatanaaatttactntaagatccttanataatacatatcatgagttcatgacggcaatgtttaaatgtatcaattctattaaatttgagctcgttcaattatttcatacgtattattaatataatttctaaaataattattataaaaattaacgataagtatgattacatgaaagtgtataattaatttatattattgatacctagtctattttgtcatatcttcacttttaaatntgaattgtacatctaacaatntaatacataatattgaatcaacagtcaaacaaataattcaaccaatttatcttctta

SEQ ID NO: 13069 - DNA, 413 bp, Glycine max
  unsure at all n locations
agcttgcttcacgccatctcagtatgaggatcccatcgaaaccttgtttaaactcacccaaagcggtatggttcaacattgntaccttcctcgccaaaatcgcctcccatacctatcaaaaggttgtcaccggaagagatagccattcgtcgtgattgaaggccatgctttaattgtgatgagaagttaagttgagggcataaatgtccctccaagttcttcctcctcatcgccgatacagatgactaactagaaggtgatctctcttccgatatgctggtttcaatggaaccgcaacaggctcagataagcatacatgccctgtctggtcatttggcgcttgaaccttacgatngtttggacgtatcgcggactagaccatggtgattctaattgatggaggaaatacacat

SEQ ID NO: 13070 - DNA, 289 bp, Glycine max
tgtagctacctcatgtactcctctaatgactatggcatcatttctggcgctaaactgctgggagttggaggccatcttctcaattaaatttatggcttcagcaggagtcatgtctccaagggctccaccactggcagcatctatcatacttctctccatattactgagtccttcataaaaatattggagaagaagctgttctgaaatctgatggtgggggcaactggcacatagtttcttaaaatctctccagtactcatacaggctctctccactgagttgtctaata

SEQ ID NO: 13071 - DNA, 408 bp, Glycine max
  unsure at all n locations
atcttattctactanggactttagacaacatgcatttcattnttttcttttcgaaatcatacaaattgttcacattcatggtagcaacatgcctaaagggaaccttcatatcaagatgcaaatattgtaataactctntaaacctcctatgttcaacaaaagagaatggaagatcatgctcaataatcatcatagatatcatctcatgtaccacactntgatcaatntttttatttcttaatctcccagcatgatcaagaataatatttccaacatcactattagaatgccttcaaatatacatcacatttccncatatgacgttgtaggttgaagtctcattcttattgtcaccgcccacataatctttcaaacatatttgcatttactcctcactttttcatcact

SEQ ID NO: 13072 - DNA, 370 bp, Glycine max
  unsure at all n locations
agtaatccatatgtggattgaaacaagcttcctgtcagtggtatttaacactttattangttatctcttcatttgattttgaagagaacgccatagatcaatgtataccagaagatcaatgggaagtaaatattgtttcttggtttggacgtggatgatattttgcttgtggtttatgttaacggtatgctatatgagatgaaataatttctctcaagaactttgatttgaggaatgggtgagacatttatgtcatngccttaagatcatacaaaagatctaggtttttgagtttgcttacaggcatattcacatagtttagagaggttaacatgaagattgtcacaagtgtactccattggaaggtatt

SEQ ID NO: 13073 - DNA, 254 bp, Glycine max
atctatgactgtacatttgatatcgttgagtgaattacgacttcattctaatcgatgacatgctgtggtctatgacgactttaggcttcatgtatagatttgctacatgacctttagggcgcatcgcaaccatggcctcaaggcgaaggtatctggtcttttaatcggtcacattggagatttaatcgattactatatcaacttttagttttgagcgaaaacgagtgccaattgaattgattactatgttatta

SEQ ID NO: 13074 - DNA, 181 bp, Glycine max
cgctgtattatgccaagacttgtctaattaatgcttctcaaccagtattgatctcctcattcactgcccagtctctccattctttcattattttacatgagacatcaagtcgctgatcatgtagataggtatgtactattataatattagacggcatcaacctatgcttgctatatacaag

SEQ ID NO: 13075 - DNA, 406 bp, Glycine max
tagcttgtgtttcaaaataatgatttggttaacatatgcttgctgtaaattagagttagaaatcattaaagaaccagcaaagggaatgctacagacaagaatttacacagaagcataaccttaagaaaataaaatatttttaatgaagttaacaaaattacaaaatatatctttgtagtatttctaaatatggggtgtcagattaaataatatttactaaacttttcataaaataatggacaataaatagcaaaggaaaagcgcagacacgagacttttgccaccaatccataaacatcacggtattaaaaaaagagactcaaatcaaggggggacgagaacacaccaggcttgtcgaacaggggcgcagagatacttaccatgcacagaaacacacagcgacgcc

SEQ ID NO: 13076 - DNA, 359 bp, Glycine max
  unsure at all n locations
tgtggagagaggcctccagcatgagcaactgcatgcattntatacaatccatagttagaggcagaacgagtagagactctgcaagcagcaaggagtagagaggccttgctgacattcaaaaccatgccccgagtgttcttttattctttcggtatttggctcaacttgctagtggttgaacatttattctttcatcattcggagaaaaatagaattctgaatgattgatttcagatttaattatatgatacatttgtgtgttagagacataccactatgtctaatgcttatgtagtacaactagtatactcagaaattaatatgactaataacatatcaaggttcctaactaatgatgc

SEQ ID NO: 13077 - DNA, 372 bp, Glycine max
agcttcagcctcaatttaaaaccttgcaaataaaaatcttatcatttttttttggaaaaggctgagaatgcaccgagcaataacaaagactgcgttctttgaatgataaaagggaattaccttccatatctgctgaagacacgctccaagtcacgggaacgagtcatcgaagacaagtgtccaacgtcgaggcgggtattactatatttatcatcatggcgaggcatcgttgatttcttccagctctgcaaaacaagcaactgaatgttgaaattcaattcaagaaaaaggccacacagaaacccctttttcaatggcataacgatcatcgatgacattagcaataacgtgagggaatgatgattgatgata

SEQ ID NO: 13078 - DNA, 371 bp, Glycine max
  unsure at all n locations
actcagctgttttcggttgggaattaattttttaagtgacggagagtttaccgtagatgaataaccacacttataattatggatcgatctttgcgtgagtctgatgatgagcaatttttttttttgaaggggatgataagcatgttaaaatatagttgggttatacatagaaatttgtgtattaataattaataataagattagactcttactaataattactaatangattaaactcttatatttataggttaaatagtagtttatgattcataaactttccacattgtataactgtatgtgtactaaacacattatttcaaaccttagcctgatccttatatatttaaatgcttattaactcatacacg

SEQ ID NO: 13079 - DNA, 270 bp, Glycine max
tttgcatgctagcttgttgttatagccatgtttggatgagtaaaacatacccattctgttctaagaggtttgagatgatgttagtgatgtttatatgctgaaattgctgatggaaaactgttagagaagaaaggtagaactaacctagggttataaagtgataatgtgatgctatgagtggagaaaataagagaggctgtgatagtttgaatgctaagtctgaattctgtggtaaatggatgttaaagtgatgtaatactacctagaaat

SEQ ID NO: 13080 - DNA, 498 bp, Glycine max
  unsure at all n locations
cctcaccgcctcattatctcatttgtgttcgatagtacaccttactttataaccacccaacctcnttccgctcacaccattcggcttctgagccttaatgaacatcatacggcttgaactagcttttgtcgggtgcaaaaaatacaatgtggtccgctaggtttttctgcgagccaaccgagtgtgttcggcgacattgcatgttcccatgcactcagccatgaaaacattatcccacaatcgaagagaaaaaaaaaaacatataatgacctgatacttggatcggaagataatgctgggttgacgtctgccattaaaaaagaccgatcgaggtctaaaaataaaagaatcaccagatgacgccgatcgagcattttctaattgacatcatccaaatattattcagggataggatagaaaaacagtagctgataccatgcgttatgtaatcccgactgacatttttcagccgacagtgcacaagatgtctttacaacg

SEQ ID NO: 13081 - DNA, 418 bp, Glycine max
  unsure at all n locations
agcttcaagtttgngttcctaagcttggaattgcatttgggcacctattttgaatctcctatgctgtacctacatataagaaacagtcccactctcccaattntacgaaatcatattcatacatcattggggcatttcaccgagcacttggtgagcgcatgtttgaacataaattgcaagaggatggggacaatgtggtatgccccattgcttcagaatacagcataagcctaaggccttcttattcanatcctcaactcaagaaaacaagcacaaaaacaaaccaaaactgccccacanatataagcacattctcacaattnggagcaccaaaagatgaagaaaatataccaatgggaagctaaaaacatcaagaattgaatacttactttgtggagtgaataataacaccaaaaat

SEQ ID NO: 13082 - DNA, 407 bp, Glycine max
  unsure at all n locations
nntgaaagtgattcctgcggatgtatgtgaacttgganatggttgatacaagttntaanatattttcctaagccctggtgattaggttgagtcatnctcaagttngacttttgtttcattccaatgaaaatggtagaaagtacctatcattacataacctaactagtagtaacttgggttctcactctcacgttnttttcctttcatcatttgaatttcgaaaattactcccatactaaattganggcgtgccctagcactacaagaaaatttgtgctttgtgattagttggtcatgcccttcaaatccgatagggcgataggggtactcttaatttgagtatntatgtaattataatcatacttaatgcataattaaattataangtaatatcataattataatcn

SEQ ID NO: 13083 - DNA, 421 bp, Glycine max
  unsure at all n locations
agcttgatatatcttangcaactgctagagatgttgttattgcttcaagactacacacgtgagcctacttagaggtaagggattagtttatcgtaattggggttagagtgaacatgtgtaggaatccttagaggatcanattgnggttaattttggggttcaattgatgccttgatacgaattggatggtttaattaagtgtttggctctgaatgttagaaacctagaaaattangaattcttgattcttgcatgttttcttgaaattgattaaagggtttgttccccatgatgtgatcacatgttctatatatatatatatatatatatatatataatggatgagaagtgataatgtgttagtgagaaggtgttatgatacatgtcttgtgaacaggtgtgggactatacagttctcgat

SEQ ID NO: 13084 - DNA, 413 bp, Glycine max
  unsure at all n locations
agtgacactatgatactcagcttctattctatntaganattcatgaaggtgttataatgtctganatctatgggattaagatggtcattgaccaatccctattntatgatttaacaaaattgcctagtgaaggtgtaccttttgagggtgcactgattgatgaatggaaattcgatttctctgtgcatgatgcccgccggttggtttgcaccaaccaagcggatatgaccggaaggcttcttgccggttcattggcttttgaaatccgcatcctccattaccttatagttcacatattgcttcctagatcttcaaaccttgcccaggtttctgaagaagatctcattgtcatgtgggcctttcataaaggtttacanattgattgngcacatcttgttagatatcgcatgcat

SEQ ID NO: 13085 - DNA, 425 bp, Glycine max
  unsure at all n locations
agcttctcgtgatcttgtgtcatggtcatattgagacatgtgtgtggtccaccccattgtgtgactctccatgaatcagtttttttagataaaattgccctcatatagaataggcaaggacattgcgcttttattcaagcaacaaacaacatacctgttcgatttgctttcaacaactttgaaagtttgatgcaccttcataacatattattttagtgcattttttaccgcatctttggtatcaaaatccatgccaacatataattcttgtccaacattaaaactcgatggcatctccaaaccacaaatgtcttcctcatcaagatgactccagttgatattgttataatgcanagcatcattccaaaatggattntcaattccttgtacacctaatagttaaaaaaattcaaatcatacttatt

SEQ ID NO: 13086 - DNA, 369 bp, Glycine max
  unsure at all n locations
agagacgtggcgtttaacgagaaaggcatgaaggattggtcttcanagtctcaataggagtcgatggtgatcgctgacaaccatgaagaanattatgaaaggctactagatccaacacctgatgagccataatcatccaggaggccatagaggaatcctcaactctcagctagattgcaagattatgtcatgtttaatgacaaagatacatctaatgaagagattatcaattttactttatttgcagactgtgatccagttatttttgaagaagcctcaagtgacgagaattggagaaaggcaatggatgatgagattcgtgctattgagaagaatgacacatgtgagttggtggacttgacaacaaac

SEQ ID NO: 13087 - DNA, 393 bp, Glycine max
  unsure at all n locations
agcttctatataaggttcgttcctaatttctctacaattgcatcacctctcaatgagctagtgaagaagaatgtggcatttaactggggtgaaaaacaagagcaagcctttgctttgcttatagaagagcttactaaggcacctgttctagctcttcctaacttttctaaaacttttgagctagaatgtgatgcctctggagtgggagttggagctgttttgttgcaaggtgggcaccctattgcttattttagtgaaaaacttcatggtgcgacccttaactaccccacctatgataaagagctttatgccttaataagagcactccgaacttgggaacattaccttgtntccaagggaattgtcattcatagtgatcaacaatcacttaag

SEQ ID NO: 13088 - DNA, 235 bp, Glycine max
  unsure at all n locations
tgaatcggacctcagtgtanaaagttatgaccatttgaatntctcgggagcttccgttgttcaatttcgagcgtctgtatatgtgatacgcctgaatcgaacatccgtgtganaagttatgaccatntgaatntctcgaaagcttccttggttcaattccgagcatctcgacatattgtgtgcccgaatctgaccttcgtgtgaaaagttatgaccatttgaatttctcgagagc

SEQ ID NO: 13089 - DNA, 411 bp, Glycine max
  unsure at all n locations
agcttatgatctgtatattatgtctaagtataagccgagtttttgacctctacggtacacaagccctccaagctctaagttcagtatgaacgaaagtgattaagatatttgtaatataagtttatttcttgtacgatacacaaatataagcacacaaaaagtaacattttttagggtgttacactattaactatngggtcaaatgcatgcttggctttctacttcaaactaatttacctttttttttccttcttgtttgttccagctgtaatggctctaaaaaaatgaaagtaataaaaaataattatttataaattttgaaaatntaaaataaaaaatatctttaaaattganaacaaaaaataaaaatagactttttttcttaaattaaacaaatcgtttaatcactac

SEQ ID NO: 13090 - DNA, 313 bp, Glycine max
  unsure at all n locations
attttgcattgatcattactgagctatatggtggatccattatcatactatattataatttcgcccagcttgatgatggggattaaacccatttgagcattaaaataactgacacttaatgaggtcccatacctttcctttntaccatattgcattgatcattattgacgtatatgttagacacgtacattatcataatataagtataatcaagaaaaaccatagacatcatgtattggaatacctcatgatcaaatttaaattgaacttacactagtttatgattggaaaatgtactggaattgggtgaatt

SEQ ID NO: 13091 - DNA, 380 bp, Glycine max
  unsure at all n locations
agcttgtaactcgttaatccatcaaaacattntttattcatatatgctcgtccaacttcctgatacactntcaatagaatatgcaagccgttgtattgcgatatttgangttttcatagcacaggagtttttatattcaaatcaatctaacatanaaataagaaatcattataaaaaactgagaattgaactacattgattttttgttatttttttggatgatctttctcttacattaatcattntggnttaatttattatttatgtttttgaaattgaaccaaaccgtaatattgttattaacaactcgattattttaatattctatgcatatatcatttgaaatttataatatttgtagtgttgtgtatacaatataa

SEQ ID NO: 13092 - DNA, 268 bp, Glycine max
  unsure at all n locations
cgcgtattcataaattaaagagaaacattatctnccttacacgacggcttttgccgactaagctcagtcaacagaaccctttctctctttctctttctctctctctctctctctcttctctgagggccaagagtctgccattgacggtgtggaaggaagaatttttcattttttccccctttgacggattagtttctcttttcttagaaaaatattatttatataatcaaaaataatagaatatttaatatatgtatattagttcatg

SEQ ID NO: 13093 - DNA, 403 bp, Glycine max
  unsure at all n locations
agcttggccatatgaaggatattctcttgcatgctgagttagtgcttggaattgcaactgatcgcagagaggatgaagggccacaacttctaatttatcggtttcttggtgatgatcttgacagtatggcgagtgatgctatgtggactgatgctaatggcgttgttgtgggttgtgaggattctaaacagagaaaggagctaaaggggtttctccttgattgtgttatagaatatctagaatcaaattgctgccaatattttaactctggatccaaggcatggacaaagctgcccttatgcatganagctgagatgttggctcaagaggtgaagagggagatcaatgagtggttatctatggttgggatggtacctgatgaaattatagaatgggaaatgag

SEQ ID NO: 13094 - DNA, 275 bp, Glycine max
  unsure at all n locations
agatatgttactccgcaaccaaatttatgtattatatcagacaggggaaccagtttgctagcagctttacaatccgaacgtgttggttggaatgaaccagatgtttcgtctgtgtattgcattccccacattgcatcaaatttcaacaaacagtttaaaaatggtgacttaaaaaaacaagtaatcaatatgggtatgtttcttcctatttcatgcatcatattctggctttattacatgtntactaatagtaccgttggatagagaaatttaat

SEQ ID NO: 13095 - DNA, 705 bp, Glycine max
  unsure at all n locations
cgtgcatcactcacaactcgcacaattcgccgacagtgacacgtcatngccgttctcntaacctcctagagagagagattgagacttgaggcctctggaaaccctagcacagacacggcgtacccgtggagcctccatagacgatcagcgagcaagacattaacgaggtgactggcttatatagagcatgactgaagcacaaccacattgcggaccatacatgcaccgccatctggtccgagacggacaccactcacaaaaagacatgcaagaccctagatctagctgatctagcccacacaactcgcatgaccctgtcgtagatggagctaatccgtgcaacagaccagtaaagtatgctagctaccgacgaggaacgctaatgaccgtgtacgcgcatatctagacaggcgcgatcctcgtagggaacaagacagatccgcagcctcgacgattatcaagcggctgtgctcgccacaacgtacactagcgacgtgtattgcacgccntggacatcaacctacgacatcggactatctctctctctacagagcattgacactcacacacacagctaatggcggtgctcaagtgagcttgaccacacatgcgtgcgtaacatagtgagctatgtcaaacgcacgacagcttcacaccgatatanagcgacagacactatgaccacaccgcgccacgtgacgtccg

SEQ ID NO: 13096 - DNA, 314 bp, Glycine max
tttgaatgaagcctttgacatatctcctagattgcaatcttaagatataaggatgagatctacgactcaatgtcagtcagataatttaaagattttttggaataatgttgatatcaagataatgatgaaatttgaactcaatgtgtgtaaagataaaattgtatctcttggcgtattattaatcttttgaatatttatacaagagggtggaccttgacataaatgcgaagagtgactctggtcatttactattagtagactaatcacatattgactctaacctatatgacttattggcgatgacctttgaactg

SEQ ID NO: 13097 - DNA, 398 bp, Glycine max
  unsure at all n locations
tagcttgtgactcttggcaatttctttaaaactagtcacttaaaaagttgtgacttttgaaagaatcttcagaaacaagtcacttgaagaattgtgacttttggaaatgtatttttcgaaatcagttactggtaatcgattaccattaaggtgtaatcgattacacatcaacatatgtgactcttcattntgaattntgcaaattaaaacgtttagaagctctggtaatcgattacaagtattgtgtaatcgattacataagtttgaaatactttaaaattgtttaaatataagttttaactcttgaaatttgaaatcttaacattctaaaacactggtaattgattactaccttctggtactcgattaccagagagaaaaactctntggtaatgatt

SEQ ID NO: 13098 - DNA, 382 bp, Glycine max
  unsure at all n locations
tgaagaggatgctntaatggagggaaagatagagagaaggggggagcacgaaattgaatgaataaaagagggagagaagtggaactttgaagtgtgtctcataagactntcattcatcanagttacaacaagtgttacacatgtttctatttatagactaggtagcctccttgagaagctttcttgagaaaacttccttgagaagcttctttgagaatacttccttgagaagctagagcttagctacacacacccctctaataactaagctcacctccttgaggagcttccttgaaaagatcctaaagaagctagagcttatctacacacacctctctaatagctaagctacaccccatgacaaaatacatgaaaatacaaa

SEQ ID NO: 13099 - DNA, 318 bp, Glycine max
  unsure at all n locations
agctttcttctggataaactccacggttgtagagaatgctgatcaaattcccatattaaaatacttataaatatcacaacttttccagccacatgcataattgcaatgcaaaaaataagacccataataaattaaaaaaataaaaaatgcaggacacaaggatcaaacctgttggcagcatatcctgatttgaanaaatcaccaaataaaaacanaaatcaggcanaagttcacaaaaaaatacacaggtatgcaaaaaatgatagaaatcggaggaaagcgagataagagaagagggataggaataccgaagaactc

SEQ ID NO: 13100 - DNA, 379 bp, Glycine max
  unsure at all n locations
tactgaagttatcaccaattagatggaacatctcatganatatatnaattcttttgggtggaaaaacggagcaatagaagagttacatgtggataacaagcagagtaaagactcacgctacaccatgaatgggaaactaagtttaaaatatatttttgttctcactttgtagcattntcttttattgttntgtaagcaaaaagaatcaaacaatgaaaatctattccacaacatatcccagcatgctggtgcctgatgcagcacgaaatgtgaggcaacaaattcaagaattacatggcanagctagaagtcagtaactgatgccccnacaacattatgaatgcccccattcatgtagcatttgaagctaatgtttcat

SEQ ID NO: 13101 - DNA, 406 bp, Glycine max
agcttcattgctaagggacattcctgaaatagttgttttgcattatcaacaatagctccacaatgataacaaatagaggcaaaagaaaaaataaaccctacattcaaattatcatccgtagatgaacaatcatgaatccatctccaaaacaaaaaggattttgatggcgagattccttttttacgtaagatcttatgccaagataatgattgcaagttagtttggaagaaagataacactcctttaaaagtcatgtttcctaaatttgaggggatccacatgggtttatctatgatctcctctaaaggaataataaaaaatctaatgtcttccgctagctaggaaaagatagtgcgaactcttgagggaagcacccacatttattcctatttaagcccttcaccat

SEQ ID NO: 13102 - DNA, 332 bp, Glycine max
  unsure at all n locations
atgaacaggactgctactgtgtaagaagtgtgtcgggttgggagcatacccagatgaatcccttttgaanagcggtcgatgaccacaagaatggtggtatagccacgaaatgcgggtaatccagttatgaagtcgagagacaagtcctcccatggccgacagggaactggtaccgagcataatagacatgtggccttcttagtttcatatttcgtgtgttgacagtcgacacatgaagcatattcagtgtgctcatcgaggtggtcaataatagcttgtcagaactgagcatattctaaatcttgagccaactgggcctttaattcctccag

SEQ ID NO: 13103 - DNA, 381 bp, Glycine max
  unsure at all n locations
aactgaggggctagctgggcatttgtctgctagaggaattatagcagctactgctatctgaacgtgctcaaacgtctcacttaacattaatagcacgttcactactgagccaaaacaaattcgaccgttgcttcacacgtccctctacattcctcaatcaaacttatattntcgtggtaatctcaatttcagcataccccaacagctctcagagatttacgaaatcattccaaacgctctgcttctccatggctacctcaccaaaagaaacttcagctccttgttcaccctctgtaccatcatctccatcatccaccanagcaccatcaaaccaggaacgacctgaattcaatatccagcccatacagatgattcctggtc

SEQ ID NO: 13104 - DNA, 432 bp, Glycine max
  unsure at all n locations
tatgcatgtgaattatgacgcatcatcaagattcaagccaaggctattgtgcaagcaatcaatggggcaaaacacaccaaatgattatgatgatggatggctcanattctcacaaaggtaaactcatcactttcaaattgagctntcaaaactatcatgacatgtagagaagaatcaaggatttcaagtcacaaaatgtcaagaactgttatnttcaaaacaattacccatttcttgaacatatcctataattcaaagaagaacatgcaaattcgtacgtgcacacaacattgacccaaaatattaaactgaatatccgacgaaactaacaacattaacaaattaacacaactaacaaattaacaaaaccaacattactagcataaccaaagaacacttccccccatacttaaacaacacattgtccttcat

SEQ ID NO: 13105 - DNA, 567 bp, Glycine max
  unsure at all n locations
cggatgatcgcttcagtcttcnggtatccgtgcacanccangcanaagcncctncactctcaagggacgttcatatatgtgctatatanttcaggtanatgntntatgttcgctatgngccacaacagaactgaggcgtatgtctaaggtggtaattcagacacctatgtgaactcattcaccaatgctatatcatacacatgggttgtggtctcgacactcatactatctaagaggatgtattcccgtgcgttatacctcaaagaagcctacaatgggtgagcaaacatagacatatcacgctcacgtcgaccggactgaggaaagacaacatatgttctcataacgatttaataaaaccggactggaacacatccagggcatacacagaataacgtcgatctgacgtagaagataaacaactgaggcaattagcaacctgattattagagatctgtacaggagcattgctagcagacattcgtagttaaaactcacccgcgtgcagggtgtctaacgagcaggtcatatatctatgaatacactggtntggcgagttcgctcccg

SEQ ID NO: 13106 - DNA, 256 bp, Glycine max
  unsure at all n locations
atcatcgagatcttcatgatanacaatagaaactagtaatccttgacttgattcgatcctcgataatgcaatgcataacatgccatggctaaagacaggatttggcagataaagttacaccatacaaggtgagacgccttgatacttgttaatagacattgcatgagataacatgattggagatagtcttctcaaaagattaagaggccacggtgattgagaacgcaacattgacattcttgggatgtaaacatta

SEQ ID NO: 13107 - DNA, 402 bp, Glycine max
  unsure at all n locations
gcttcctcggagccatttcctgcgagaacaaacatntacaagttatgtttactaggttttgcatatctgaacgcacaanaagtcatgctaatccctctgatnttagaacgaactcacgtaatctatgtatgcacacgcgtatgtgtggaatatcctactatttatatcaacatagaggccatccaacagattctaattgtcatacatatatatgcattagaaaagaacacacattctcacgctcaaagcattgcgtcaaagttcacacttaattatatcctaaacatttactattacagactacctacacatatctgaaatatatatcatacaaaatctattggttctctctcatttatatatatgcatattggaaagctattacattctgccacactggca

SEQ ID NO: 13108 - DNA, 402 bp, Glycine max
  unsure at all n locations
tgtccgcacaagaaanaatactaaaagggattttgggtcaatacctcagtctgtcttaccaaggaaaatggatcatttttaaggtccaacgccttaaaatgactcaccttgcaagtaaaaagaatcgcttgattcacccttaagaaagaactacgtaggtctgatttcctcttcgatggagggtatgtacgagcaagagccccgcttttgtcgacctcaaaataaaaaagaaataaaagtttaggtacacaatttcacacaattctaagataaggctgttgttctttgggacaaacgtgagaggtgcttatacctttctcaaatgtacatacgactcctgaatctggaatattcttcatgaccgantctcttcggtcttttcgacattttccacaaataaac

SEQ ID NO: 13109 - DNA, 413 bp, Glycine max
  unsure at all n locations
tgaaagcctagctatgtcatgcgaatatccttgtcaaagaagtggagttgaagaaagagtatattagaatatagagagaaaagtgtgtaataagatgggtgatgtgatagagaaagataagatagaacaatacgtactatagaaaattgttgtacaaatcatgtaactccacaggaaatgataatgtaaaattgagaaagataacagtgaagaagtataacatgaagaggaatgattcacaaactaacttttactctaaacatntcattgccattcattattgttctctgtctctctgtttctattactagtgtgtctagataacaagtgagagaattgattctaatccataagatcatggtgacaccatgaataagctgaagctagtatgtgttgcttctctcttaacatga

SEQ ID NO: 13110 - DNA, 550 bp, Glycine max
  unsure at all n locations
cgctgcccatgatcctatcgattggtcgaaccttagantactcaagcttctgtacaaccattctcatgtagctagcatacanagtccagccgactctggncagtgtagattgtnctgcaatgaccaagagggatgatgttgtattctgtgactgctctaatacattgcgctttgtcatctaaagtcatgccaacctccactataccgactggtggttatacattgtgttactgatgaacgaaatggtgtcgatcaatgaagtgcggtacgtggtcacatgacaagtctactggacacctatggtgcggatattgccacggcggagatggaggtagcattggctaccaacaccctcgtcatacggatggtcaatcgtttggctgactgatgtgatccaagaacctgtgatccttcatactgactgacatcatccatcgttttatcatgacatcgacttatgtgatctntgatagcactgcgatgtccatcttcgtttgatgacacgtatgggaacntagagaacgtggcctataggggatgagagtagctn

SEQ ID NO: 13111 - DNA, 446 bp, Glycine max
  unsure at all n locations
tggaaattctgatcgcctatacttcaacaacatctcataaggatgaatgactcgggcatactttaagcttatgcacggaaaatgtaattatgaaattgagatgcccgaagaaacaccatttcctagttaaccatgcattangtaccatgttcaattattttgtttttaagtgatacgggtttatgatcccaacatggttggctcctaacacatgaaactaagaatgtagtgtgaaagttcacgcttcccccttctttgtttntagtttgtagaggataacgcaaggatgagcaaacatgaaaacaaatggtatgcaattttgcagatcanaaagtttgttgaacgcatatgcatgatgatgccatgactcatgcaaaatgtgaggctggatatgataacggacanatgcacgatatgtccattatgatagtatgaagagatgctta

SEQ ID NO: 13112 - DNA, 490 bp, Glycine max
  unsure at all n locations
acactatcaaactcagcttcataaagtntccacttctccgtgttaccggcanagatattaatntagttagcggttaaccacattatgcaattctaagtgtatttttggggaaaaaatgttcttcttttaaatttaatattattccaaaaataaattcaattaaacacatattaaatataaattctcatacacgagtgagaaataacattcatgttcttgttcccctttttatctatattgcgtaactatgacttagccgcacatgcaacagataaggaagagcaacgtcatgccttcacttttcaataatgcttggatatagaaggaataaaaaagtgagaaatattcctgttttggaggggtggaggtttcacctgtgataggaaatangacacagaacaataaataagaaatataatgaattttgtattattttattaaagagaaatattataaaattatatttgtaaattatttggttcggataaaa

SEQ ID NO: 13113 - DNA, 398 bp, Glycine max
  unsure at all n locations
tctcaaagggcatggttatttctagtntcctaacaatatctaagaatctcaccaaatatctgttcttctccttcttggatggtaccacaagatatggtacttccgcaccttcattcacagctttttctctctttttctctctagcttgttcacttctactcctctcttcactcttattattatcatctttttcatttcttatcattacataatactttatcttggccatttaatatctttttcttgaccattattcgctcttcttttgcctaatttccttaacctttcacatcatctttcttatcatcaatacctctattttcagcatctatcttcttgggcacgacaacactgacctcatcctccgcctccacaaacctttaacttcttgtcttcac

SEQ ID NO: 13114 - DNA, 293 bp, Glycine max
  unsure at all n locations
ntgagccaattcanacgacaataactttntactcagatgttttatatattctcgtgatataacgagacgctcgaaattgaatgtagaagctctgagctaattcaaacgacaataacattttactcggatggctgattgactcctgtcatatatcgagacgctcgagattgaatgctgtagctctgatcgcattcagacgacgataactggttacacggatgtgtgattgagtcccgtgatatatcgaaacgctcgagattgaatgtgtgatctctgagccaatccgcacgact

SEQ ID NO: 13115 - DNA, 215 bp, Glycine max
ctcggatgtccgagtccggagcataatatatcgatttgcgtcgtttagatcatcggaagctctagagagattcagatggtcataactttccacatggatgtctgaataagacgcgcaatatatcatgatgttcgaacttgaacaacggaagctctccagcaatactgatagtcataactttatcctcggagggacgattcatgcgcagaatatat

SEQ ID NO: 13116 - DNA, 349 bp, Glycine max
  unsure at all n locations
ntctactatgttgtcacataagtctgcaatgcaatcagatntgaaaatattatgaanagtgaatagtagatcgagtgaatcttanactgtataaactagctgattgcctagaaaactacaacaaagaaagcaaatatataatcctggcaggtcatgaaaacttgatcttgcaacaaatttgagaaaaagtaaatagctataatcatttgatgaagcactagaaaatttaacttgcttgagaatcatgacacattaacttgctggaaaatcatgacacattaacttgctntttagacacacatcttggtttgcagtgcaatataatcaagagcctaattataaataattc

SEQ ID NO: 13117 - DNA, 429 bp, Glycine max
  unsure at all n locations
cgcttgtgaagcttctatggaggctggatctttgagcttcaatgaggttcttcaatggcgattntccaccatggagatgcagcggaaggcaaaggagaagatgagaggggaggcaccatccactagggaataagccatggaagaaggagcttctccaccaagaatgtgccttggataagaagcttgaagaggatgctctaatggaggaaaaaaaagagagaaggggggagcacggaattgaaggaattaaagatggagagaagtggaactttgaagtgtgtctcataagactttcattcatgaatattacaacaacgtgtacacatgcttctatatatagactaggtagcttccttgagaagctttcttgagaaaacttccttgagaagcttctatgagacaacctccttgggaagctagagcttaact

SEQ ID NO: 13118 - DNA, 387 bp, Glycine max
acagtccacaagcaccattctcttcagtagagaactaaccaagtatgtttgcacgattatcaaaagagagagtggagaagctttcaattaccgacttggagtctggtaatggcaggcctccactccccgaggagagagattccaaattggagccattgttgtctaaagatcattgaagtctactttgtatcataaggtaaaaagtgtatttagccattctttcagaaaaaataaaatgaataggttaacagtaaaccgggtgtaatcaagccaacgttaaacaatagcttgtgtatatttgattggccggttgctgtaaaattaaatgaacttttaagaatggtttattaatgaaatctcctggctgctggtatccctaatacaaca

SEQ ID NO: 13119 - DNA, 85 bp, Glycine max
tccattatgtatttgagtaattagtaatatatctgtttatggttacgctatcttaaacatttccatggattaatgatgaaatatg

SEQ ID NO: 13120 - DNA, 228 bp, Glycine max
gactcatcacgtcatctaataaccttggcgtggatccaagtgcgccgatcatccatgtgcatactcatgtcttggtggcatactcaccgatgcttatttctctatgaaattcatcataactaagaaaacaccaaggcgcccctataacagtcgctccctaacaatggctaatgaagatggcgtgtgtgaacaaatcaaagccaatctatcggtcttaaaacatcaaat

SEQ ID NO: 13121 - DNA, 445 bp, Glycine max
  unsure at all n locations
ntgagccacaatcctgactcaccatanaccttgacgccaggtgagaatgtcaatccttaccctcggaagcaaaaaagaatagaggggaaatttccaatcaaagaataagagaatgagaatttccaatgaaagcaaaaaaagaaaagaaggaaaattccccaatcaaagagtgggagaaagcacaaaaagataagataggaaattcccaatcaaagaatgggagaaagcaaaaagaaaagatagataattcccaatcaaagaatgggagaaagaaacaaagagaacagaaggaaagaaagctcctgatcaaggatcgaaagaaaacagaagatatgtgcagagaggtctttggaccggacgatatctgaacaatacagaattgtcaccaaatgaacaaagaaggaaggaaaggaaaccacgacctaaaatggtcttctccctttga

SEQ ID NO: 13122 - DNA, 400 bp, Glycine max
  unsure at all n locations
tcaggttgctcattccagatngctgcanagaaggacagagatctgtattgtgatctattcaagaacatagaccacagactcttgcaacaggtgtagatctcttattcatggcaagctgagttactaggttgaccaaggcatcaagttttccctcaagccttttattttcaatagatgaagatgaattcttggccacctcatggactcctctaaggacaatagcatcatttcttgcactgaatagttgggagttggaagccatcttctcaatcaaattcctagcctcagcaagagtcatatcaccaagagctccatcactggcagcatcaatcatactcctctccatgttgctaagtccctcatagaaatattgaagaatgagttgctcagaaatctggtg

SEQ ID NO: 13123 - DNA, 369 bp, Glycine max
  unsure at all n locations
ntacttcaatatgttccanatcattaagaatcttggagatatcatccaattgttcagaggctgctcttgactctgctatcttgaaggtgcagttgttgcttcaagcatagccgatttgcaaaggactttgtcatatacaatgagtccagtttcaaccacattgaggcttctgtcttttctcttgcaacttctcttaaagctctatctccaacgcatataatgattgcacttctggctctatcaatcatctttgattgctcctttgagcttagagatatagacatctattcttctcctttaagagcttctgcacagtcatgttgaatcaagattgcttacatcttgattctccataacctgaagtcattt

SEQ ID NO: 13124 - DNA, 380 bp, Glycine max
  unsure at all n locations
cgtaccccagtcatccataaacctatntggaacattagacattgtcatactcctaatttcgccggagattattatntgatgatatacaacctttgattggccgcttcaagatacttggcaccctttgttgcacaatatgtgaagtcccgagatgtgccgaaaatcanaaggaagcaggcttacgcgatccgtgaaaatatcgtaatgtgacagaaatccaaaggaagtgtttttcgcaatccgtgagttatcgtaacttcttcgaaagctaaacaagagtaaatacataatccgtaaagattcgtaaccttgcggaaagaaaataagtatcggtactaaattcgtaaagnttcgtaacgttacggaaaaagaattacaaa

SEQ ID NO: 13125 - DNA, 385 bp, Glycine max
  unsure at all n locations
ntaagagataccattaanactaaagtagttcctaaacaattatcaattgttgaagcttcgccgagtgtcctcattgaataacctttattcaaacctttcaaagttagtgataatgctaaacgaacaattatggaacttagagaaactaaatccttaattgaaggcgtatgtgacaatcatagcgaattactaaacaagattagtagtttgcttaaagtcattccagatactccccaagcttcggaaaatacttgcaaaatggtcacaaaaagtacctccgaattaattaatgttattaatgaagatagtgaccaaaacttagattacacgactgatataggatcagtgtcataaaagactataaatccatttaactcctaacact

SEQ ID NO: 13126 - DNA, 96 bp, Glycine max
caatggctcatacctcacataggtcatcaaccattccttcttatcttcaatacggtgctcacctatcaagcgcgagcagttataccgactcgcact

SEQ ID NO: 13127 - DNA, 428 bp, Glycine max
  unsure at all n locations
tctagtcgtccatagacctcctcataggtactgttcagcanacgttgtatctgtgcattcatcgcatccagtaacagacgttgaacgccgtcctactgatgatactcgtcaccaccaccacctgctccagccataattcaacaggaaaaaaaatgtgcaataaaaattattaaggtttcaagacctcacaacactctactcacgtgtttaactcttagatggtagtacacttgtgtttaatgctctcaataagcttttgtgtaatgtattccctcttgccttttaccactcgtgtttcctcttaagttcctggatggaccaaattagacacacaaggtaatataaaataaaaggaaagacaatataatgatcacaaacagatttgatttgngataacaacttggacttngatttgataataatatatt

SEQ ID NO: 13128 - DNA, 385 bp, Glycine max
  unsure at all n locations
aggtgggtagtatggctggtggtggtctggtatatgtggttgcacatatatgccattatctntaatgatcataagcgaagtgtcaaggtggttgcaaatgttttcaagtacagggcttggtcatggctaatggaaaaagtggttaaaggcattggggcatcattctacgaatgctgaattgagtttggccattgtatgccactgtcatttatattctgcaaactatggacggtaagttgatgctagggggttataactgtgactgaacggcggaagctatgttgacttaatttcgggcaataattcttgtatttagtattaacgggatgtttaaattgttggctatgaagcacgaacatgccgctgaagtgccgcgttccgcgtc

SEQ ID NO: 13129 - DNA, 339 bp, Glycine max
  unsure at all n locations
atgacatttagctcacaggtcaagaacacttcatgataacaaagatgatgatctcaagaatcanagaatgagttcaagatgttcaagattgaatcaagaacatttcaaggttcaagaggaaattagatttcaagaatcaagaatcaagattcaaggttcaagcttccaagaataagaatcactattcaagactcaagattcaagaatcaagagaagatattctcnagatcagtatgaaacagttttttcagatcctgactagcacgtgcattcttctccaaagctatctaccacagagtctgtactctctggtgactgtgaccagattattgtgatcaa

SEQ ID NO: 13130 - DNA, 307 bp, Glycine max
tgaatcggacctcagtgtgaagagttatgaccatctgaatctctcgggatcttccgttgttcaatttcgagcgtctgtatatgtgatacgcctgaatcgaacatccgtgtgaaaagttatgaccatttgaatgtctcgaaagcttgcttggttcaattccgagcatctcgacatattgtgtgcccgaatctgaccatcgtgtgaaaagttatgaccatttgaatttctcgagagcttccaatgtgtagtttcgagcgactcgatatattatacgcatgaatcggaccttagtgtaaaaagttatgac

SEQ ID NO: 13131 - DNA, 478 bp, Glycine max
  unsure at all n locations
ntatatctatggtaaagcagaagaggatatacccttacgggaatcaatattaggaaatatcaaatcttagttntgaataataatgagaatgaagagaggacattgatgatagagatgaaagaatgaatacacacttgcaactgcgcataggaccaatgactagaggttgtgactccttgaagctgtgcgatgctcttttctgtacactccaacgtaacactttcaaaccctacattctattatatttatttcgttataaaagagagagacacttcttttaagatggttttcataaccgtcttagaatggtagtttctaaggcagttcttgcaaaaccgtcttagaataattgcatttatttacaaaaatgtcaccgtgtgtctttctagaatgattctctatcaaccgacttataatcaacgtcgtaaaaatagctttctctagtagtgaatgcatggtgcttaagcgacttaagtga

SEQ ID NO: 13132 - DNA, 362 bp, Glycine max
  unsure at all n locations
ggggagaagtgaagaagaaaagggttcagccncttcggcacttctctctctctctcgaaattactgaggaaaattagtggcatgaagaanatccaagccgaggcgcttccgtaacgtttccgtgagtaattacgcgaagattctcgaccgttcttcaagattcatcgttcgttcttcgttttcttcagtcttcaacgggtaagtacctcaaaccgagcttttcaattcattctatgtacccgtggtggtccacattntgtatcatgtatttttattctcgttttcatttacttttaatacccncttttaacgtgcttaagccatttatttaagtcatttctcgcctaatctnaaaataaaat

SEQ ID NO: 13133 - DNA, 378 bp, Glycine max
  unsure at all n locations
tctgtccctgaganactggttcccagaagacaacagggagtttagattgttgtaaccctagccttgcaacaagtcctagggaagtagacacggagatggacaagaaaatccgcagtattgtgagtagcattttaaaagacgcctctgttcctgaagctgatgaagatgttccaacatcttccaccccgaatgtttctgtgcctgatgttgagaaagatgttccaacatcttccggcccaaatgctgaagccctcccttcacccagtgaagaggaatcaacagaagaagaggatcaagcctcagaggagacccctgcaccaagggcaccagaatctgctccaggtaacctcattgacttggaagaagtcgaatctgatg

SEQ ID NO: 13134 - DNA, 409 bp, Glycine max
  unsure at all n locations
tctntgctcttgctcttaacaattgcanaagcaatnggaataatgtgtctactattatcttgtccaatggcagttaacaaagtaccacaatattacgtcgcaacttgtttgtatggataattactatgattatgtccttcaattctacacaatgaagattgcttaggcatatctggaattgattcgtccatctcattatgcatacaactagagactaaccttttcactatgactcatcaatctgaagaatcaaacataaaatatggactcaaatatgaagaccatttatcttcgtttccaacggaatgaaactgatgctaataaactntatgaatgttgttcaacctgtatacagggtcaacacaatcatcataatttatatggcgagaaacacctgccgcaattgcat

SEQ ID NO: 13135 - DNA, 425 bp, Glycine max
tctataccaccccatttctctcctcctttggcaacatcatatagccaaagtgcgtggcaatcaacacaagattatataactaaagtttacataataaatcataagtctcaacagaatataagacaatcatccaaaagttaaaaccaaatataatccaagcataaataagtcataaccaaatataattcaagcataaaagactaagtgccaattatcgaaagataacaaaagttcagaaaatgataccgtaaaaagcatagcctaatacacggcttataataaaagataataacatcctaaaaactaagacggtggtggaaggtcgaagctctgacgaagataagttacatcctcttcaagctgcgtgatgcgggtatccatgccttcaaagcgaccatccacagaatcaaatcgctcaccaacat

SEQ ID NO: 13136 - DNA, 591 bp, Glycine max
  unsure at all n locations
tctctctatctcggcgtangacactaccatantagtgatctcgtacatacgtncgctcctactccncaccccacgnctgaccctganacgttttctaggacacttaaatctcacttctctacgggaaaatcttgctgccagcgcttgtaattaaattgttcaatgtctgctgaaaaacatcagctggggctggttaactaccgatgctggctactgttatatctattccacccctgaataatacctggacgatagccatactgaaatgttcgatcggattcatccgggcatagcttctattaagacctctatatgtcatatattcctgagcgacagtcgctaacatatttttccatcaataataagaacatcatgcttatttgcatagggggctaacacttttatagctcatgaaatgaaagcatgcctatgttcagcgatacacaatcttcctctatagatccctactcgacctacattgaatttttgtaggnatacccaacaagcaacctcttctacataagaaatatatctacaaagatgtaaaagatctgaaggatgcgaaaaaatcgccgggctttaaacaccatg

SEQ ID NO: 13137 - DNA, 453 bp, Glycine max
  unsure at all n locations
ctanagtcgcatatcttanaggaaacgaatcanaattgatgatgtacatatgagactaatttggtggttcataaaatatctagctgtcaaacataagttntactaactagaaatgaatgctgggtagagcattactatcaatatgatatcaacatgataaattacctggaatagtgggtggggaaccctgatctccatagccaagtttcgctggtattttcagcttccgcttctcaccaagacacattcccaataatccctggtcccaacctgcaaagagaggtagtgatcatggaatactctatcttgaaagatttcccatcaatcataaaccagtaatttgtaacaaaattacatcatacatactagtatgattatgtaaatacacgcatgcatgtatgtgagcataaattatagctcatatgtcttggtgggtatgtaaataaataatat

SEQ ID NO: 13138 - DNA, 515 bp, Glycine max
  unsure at all n locations
gtgacncctgacnatgatcgccatagagnangcgacacaanatactcaagctctggacacttaatatntgagagagaactgcatttccgatcttgagatgaattgacaaagccagcagcacaaacaataggtggtgcaatctgaattttccctgtcacatcgctttgcacatcacctgtctgtctctacattacaatgaacatgcatatgctcgcccacctataacttcatcgcgaactttatagacactgtgtctatataatacctgctagtgtatgagtacatntgccacatctacaggtttcaccgcctcttgtatgatttgactgactcgctttgaagatgacatnctgcgtggttgggataccctgacgtgtcgacacatatttcatgcacatgctgctatagctattgggcataatcttacctccgtatgatggttcatggatgtcgcgcacaacgattttaaccttcctgcagaattccactcttcaatatataagaggtggtggccg

SEQ ID NO: 13139 - DNA, 479 bp, Glycine max
  unsure at all n locations
cgtgggcanantgacccacgggctncgcttgttatataattgttctattgtccgctgacaaacatgactaggtgctgcgtgactaccgatgctggctactagtatttctatacctcccctgaatcatagcttggagcgaatgcagatttcagaaatgttccgatcggaatcatccggtcatgcctctttataagacctccatctgttatcttttcctggccgacctcagctagcattcctctcaagcaatatcggcgaatcatgtcttttgccaatgtgtgctaacgttttcgtggctgatgcattatatgcttccagggtcagtctgtaacaagtctgcacgatatatcttatctgacctaccttgatatcttgaacgacatccgacagccatactctgttaccaaaacatatatatctccacgttggtaaaaattctgagtgtctgtggaattatcctcgagcttcgtcgatctacc

SEQ ID NO: 13140 - DNA, 233 bp, Glycine max
aaactcaagctctgattcgaatttgagcgtctcgaattataaatgactcaatcggagtatcgagtcacaagctatcgaccgtcgaaagtgctcatagcgtctgtcagatattcgaatgtctccatttattacaggactctatcgatcatccaagtaaaagttattgtcatttgaatttgctcatagctactgatacaattccctgcatctcgagttactacaggactcactca

SEQ ID NO: 13141 - DNA, 264 bp, Glycine max
aaggacacagcatacagtaatcggcaacggtttatggacctgttatatagaagaacgcattgggtctgttgcttatcgtctcaagtaaccggcagaagctctcatacaccctgtattccactgttcattataaaaaccattcaaagggtcactggaatgcgtaacacaagtgcactgaccgaagcaatataaccaccatcaaccctcgatcatgcctatgactatcttagacgaagcgaagaactacagctcatgggcctctag

SEQ ID NO: 13142 - DNA, 564 bp, Glycine max
  unsure at all n locations
cgatcgccattgggccttgatgacagctgcactancngacacnacagcnngctcatgcttatgagtccctatctgtacggaaacgaagccgcacgtgtgtatgtacatttgtacactcatgacggtggcacgactgacatattgctagcttgtcactacaatcactatgctctaacataaagatgaatgcagtgtagagcattactatactcatgatatccacatgatggattacctaaaacagcgagtgacgaacccgagactccatagcctgattacactggtattctcagatttcgtctcgtattcagacacatccacaatggtcgcgtggcccaactccgcaagacaggcagtgatcaaccacaactctatcttgaatgacttatcatcagggttatgccagaactcttgtgcataagcacatgcgacatgctactgagaatatgtgattacactctagcacgtgtgtgaccatcaattatcgcgcatatgttgaggtgggtctgtacatacatattatcacccctatcttatgactgcatcgataaaacatctctaccg

SEQ ID NO: 13143 - DNA, 337 bp, Glycine max
tctgacagaccatacaagtttcctaacgatttctaattatgtgggccattaactctatcatatgctgacaatagccgaaaagcccatgaatctattcaggggcggagtaagtgttcgccactgctatggccttggctaactattagggaactttttgactcctgttcaaagtaagagcgaatctggcctgccacattgctgtctcttggtgccatgaatcaataaccctctcccatagctcgctatctgctgatttcttgagcgactatcctctacctctgcactgagtcacgctaatttacttcttttgcctcattatgacggccacatttccttc

SEQ ID NO: 13144 - DNA, 351 bp, Glycine max
  unsure at all n locations
tcataatgaagtagccaagtagtgcacccaagaagcatgatttactctgtcntatttagaaggttgaaatgctacactaaatacttactaataaaattaaagtaattacatttgtaattgctaatttattaaataatatgtattttctggtatgaacgtggttctttcggcttacggaaagcatattatgttggttctaaaaaactaaatttcttacattaatgcttatgataccaatagggaggtcatgcataatgggttggttcctcatgatctctttttaatctaaagtttacgaatttagtaactcaatattctccttatttttccatgaatattgcagcggggcta

SEQ ID NO: 13145 - DNA, 254 bp, Glycine max
  unsure at all n locations
ctgagccaattcanacgacaataactntttactctgatgtctgattgtgtcccgcaatatatcgagaccttcgaaattgaatgtctaagctctgagccaattcaaacgacaatatacttttactcggatgtctgattcacgtcccgaatatatcgagacgctctaaattgaatgttgaacctctgagcaaatgctaacgaaaataagtttttcttggatgtcttggtgagtcccgcaatatatcgagaccctcg

SEQ ID NO: 13146 - DNA, 328 bp, Glycine max
  unsure at all n locations
cgccacccagctcgcccaggcgagcanggtagcttcctccattatcaactaccttctggaggaatcttatggagggcccaagtgggcctggttgctatgcgcactcccattattactaaggacaccccctgccttatcttaggtgatcctatcttcttaaagttacggaaacttacgaattncgtaacgatacttgtcttctttccgtaatgatacggaaccttgtagattgcataatcatccttcttttgacttacggcatgttacggaacctcagctaatttgcaacgatgcttccattatagttctggtgtgtcacggaacctta

SEQ ID NO: 13147 - DNA, 353 bp, Glycine max
  unsure at all n locations
gtttacttctgaacaattttacttatcttcctcanattagggtgtatcatgactaacaaagacatgattatcattttttggcttatgaggtttacaaaagacatgatcatcattggtggctcaaataaggtgcaaaggataaattattatcaaacgttggattttaagctgagtggcttaaaataagaacaaacataaataaggtcttgatcacttccacctcatgtaattaatctaacagtctaagaataatgccaaatcangaaaataaatatagacgttttctcacacgtaggtntcacacaactcaccacgacaagacaaagttagttgcttaccataccatgatttct

SEQ ID NO: 13148 - DNA, 500 bp, Glycine max
  unsure at all n locations
tactcagcttagggtcactttatttccaagtntaatctacattagatattcttgacttgaagttctgttcctattctgactttaactgagatattaagtgtaatatttgagtattttgcaatatggtcagtgcaatgacctgatcaatttaatacactgagatgctgcaaatattttctcacagtttcaataaaaacaaaaaatgatgcatttaatttgtgaaacaaaaaaactgggcagtcatcctagcaagtccttgatcttatcaaaatcacaatctcttttatgatttgccatgtgttgatcacttggttgccccctggatggttgatataattgaaacaaatgtgagacatttgtaaagggaatgaatgtctttttcagaacttattgagaagtacttcttacatacaagaatattctggagaatctgaactaccaaaattggttcagaacttggccatgcttgatctcatccaatttgatcattttcaataact

SEQ ID NO: 13149 - DNA, 432 bp, Glycine max
  unsure at all n locations
ngacangccgacttgtntaagtaataataataataactattatctataacanttttatggcattatgaatgacagtatgaagtggcatanagtgcttagagagttcccttgcatgtgaaaaattctcaaaaagaaaaggacttatattaaaaggataatacaaccagattaatacttcccaagacaagaatgttttgtaaagacattttcagacaatttaaatatttttatttggctatattagtataaatcatgtctaattcatatattntttaatattatgttctttattttcattttcttttgatatactttgtgttttaataacttgaattcaatatgaatttgtacattacttatacaaaattttataattggtcttttgggtagtatttcactacgttttaaaacaatctaatggttaaagatgtc

SEQ ID NO: 13150 - DNA, 323 bp, Glycine max
  unsure at all n locations
agatgaagatgaatccgtggccacctcatggactcctctaagattttagcatcatttcttgcactgaattgttgggagttggaagccatcttctcaatcaaattcctagcctcagcaggggtcatatcaccaagagctccaccattggcagcattaatcatactcctctccatgttgctaagtccctcatagaaatattgaagaaggagttgcttagaaatctggtggtgagggcagcttgcacacaatttcttgaatctttcccagtactcatacaagctntctccactaagtttcctaatgccggaaatgtctnttctgat

SEQ ID NO: 13151 - DNA, 446 bp, Glycine max
  unsure at all n locations
acatgatacatgtcanggctcggtttgtttcaatgataaaagggatgccccacattatttccatgacacanatgcaaaanatgatgatttggaaattttatgcaaaactggtcatgcgtgcgcctatggggacgctcaagtgtcaaatttttatggtcatgtgatgctagggctcacgattcatttcctccatattaaatcaacccaatgtttccaaaatatgtccttttatcaatttgtgcattcctccaagtccatttcaggcgtccggngaaatttcatagcattcacccttcatgtgtacacatttttttttcaaaaactagctatgatcagcgaatttttcttttatagaatagttggaaccatctctttcacaacatgtaattttagctagacacttatttctcttttccacctctttttacttgcttctgtttcctatt

SEQ ID NO: 13152 - DNA, 312 bp, Glycine max
  unsure at all n locations
ntctttggaccttgaacaggcaactaactcctctntcanaaccatgccatgtgctcgcgactggtccctttcttcccttcgcaacttgagttcactattgctaccccatagagctccgcgaaatttgttccggccatactcttccttgcgagccctcttggtctcttgttcaaaggctcttgcggtaattgcattcttttcccgtaacccggcacactccttccgaacgtgtgtaacggccaacttgaacttcttcttggccagttttgcctttcctaacttgctttagagagctaggacttctttgtcttc

SEQ ID NO: 13153 - DNA, 401 bp, Glycine max
cactaagaaactcagctttaccttccattttaaagagcagtaccaaaagggtttagtttgtagactgagaattgaagcacaaccaaagctcaaagatggtgtggtgtgcactaaagttcttgacattctaaacaaatacttctttccattattgtgtatttattcatgaataactgctgtcatccgcaacttgaaatgtgagagagaaagagatcctctttattttccaattgttcctaaaattacagaattcaaccatcttagaattcagcgatcactggttgaattcacaatattaaaagataaagtcagtccatagataatcttccatttgaatcctatttccaatgtatcgctaattaaacaatcaaattaaactatcttactttgacaagaccact

SEQ ID NO: 13154 - DNA, 313 bp, Glycine max
ccacgagaatgatttcaagattgagtcggcagcaagtcaagaatctagagacattcgatatccagaatcaagtttcatgtttggagaatcaagaagctagagtcttcgagattcatgactcactattcacgaatcgagagataactcactcaagatcagttctaaagtttttttcaaaacattgagtagcacatgacgttctcaagaaatgctttaccaaagagctattactctctgtgtatcgattaccaatagcggatattgttttccaaagctttcaactgcatgtacaaccttccaatcgatggctata

SEQ ID NO: 13155 - DNA, 371 bp, Glycine max
  unsure at all n locations
ttgtcaccaactaggctactatccaatatgtgtgatagttctcacaaacccagatataatagagagcgaaagactcgttatttgattgtgtctgaacctcagtttttatcgcattctgtcttattctttacttatttggtgtatagagctcatgtgtatgtgttaagtgtgtaccgttgagtagaacagactatcttcgaacaaaaaaactcaaagagttatgagaaggagagattgtaagcatatttattgagcacgactcgtgctgacctaacaccacctgtgttgaattaacactcccatttctcatagaacgctatngctaccagcatgacccatgctcagccaacacgaccatgctactcagcatg

SEQ ID NO: 13156 - DNA, 415 bp, Glycine max
  unsure at all n locations
tctacatgaagcaaccagctcgcctgtgtgagcatgttacttcatacttaagccatcagctcgatagggcgagctgagctcgcctgagcgagttgagttcgcctgagcaagctgggcggtaagttgctcccctatttggctataaaacggcatgggatgctgangggaagatgctcaccacccttggcaagcatatttcacttaaaagacttttgtcttacagggacttcaatgtctttttcctttacatttcagacacattcaaagtcttttgtcttgcagagacttcaatatcttctgcctttacatttcagagactatcacatacnttttccttgtagagactctaatgtcttctatctcccccttacatttcaaagactatcaatgtcttttatcatgcagagaattcaat

SEQ ID NO: 13157 - DNA, 413 bp, Glycine max
  unsure at all n locations
ntatagcagattntagtaatgacccactaacttctaattanaataacttattgccattaacctagagaattaaaagaacttaatggctgagtgtaactgaaattgtggcaaccaaaagtcaccccaacagtcactatttggtctcccaaaaagctgatgcctangttgccaattgggcccttattacaacttgaactaaacctaactaaagcccttttagttgattaacctaaaacatattttggtcagccgactttacaaagattgggccattatttagacaaattgaacactctaaaattgagacaaagtggtgccatttagtcctcccccatttgggccatgatacaactcacaaccttggacttttctccttgagacttgngcttgtattcaaatagtatggacaacac

SEQ ID NO: 13158 - DNA, 336 bp, Glycine max
  unsure at all n locations
caagtccatagccatcaaagtctgaaaagagtatgatgaactaacggatgtcaatatggccacagctgaagccttggaatgagaaaccaataatgcccgaaaggaagaacacgaccaatgcaaacttntgaggagctttatatggcaacaatagtgatctcaagctccgaagacgtgaaaggaatcatcacaggtcaaaggcatgatcttgatagacgagctaaatgcttgccttaggtcgaagagacatttgtccaacagttaagcgagactgaacggaatatgtgggccatcatcgatgagtgcaaagagaagctacatctagcagcgactcac

SEQ ID NO: 13159 - DNA, 300 bp, Glycine max
  unsure at all n locations
tgataatcagatgacagaaatcaaaaataagattaccttgtattgtaatgtattactctactcctgcaaaggatgagtgagagacagagccacagaatattccaatgaaggaatgtgcaccacaaaataaaatattatcccttttttttttttatttgtgggtaaataaccaaatccatgtcaaaagtaggatgcattcataaattggtctctaaagatgataattataaattntattgtgaacgtgtaaaaaatatgataaattaattttttctggtaaaatntataaaattattttat

SEQ ID NO: 13160 - DNA, 469 bp, Glycine max
  unsure at all n locations
tgcagacnctcctatgacacatccaggactatcatctccaagttcattcttgtcctcagcatgtgccttctccattggagatcaaggtgacatgtggagtccaaagttcacagataattcatcttttgatgtgcgcttagacaatcctttccatgtggaaagacttaaagagtgtagtgggccatatagcaccatggttgaagtatcatggctttatagagaaagtcagaagtcggctgatactgagacactgctcctgaatctagtgtgaagctgttatatacttatacttgattgagataacacactagaatgaactctttggttctaagttgagttctaatgagcatgtgctattatgttcgtatggacacttatttgtcggctagaacaagtagacctcggcatgttgaagcaccaagagaagatagctatttggatcaacatacactatgctttagcgatgcat

SEQ ID NO: 13161 - DNA, 443 bp, Glycine max
  unsure at all n locations
tccatcagataacctcaattaagcattcgattcagttcaggtttcaaagagactcacgaaagtgcatgtcaattcttggaattatctatgaggtgcacaagctcacaaaacattaagtataaagacaaataattaactcaaacgttatattaatgtgagaaaattacatctaatagagttcaatcctttcttctcctagctaagaaagaaactagacacttatgaaatacaagaagagagaagataatatgattnttcagtaaagggtggtgtgtacaggtgttctcctaggttttttgctgctgcctatgcctttctatttataaaatcatagatgtgttttatagaggcaaatgatcttcttaatttacaaaataatataatctatactaggaaattatctctttagctaatataatatgtgttaattggtgcaattatct

SEQ ID NO: 13162 - DNA, 336 bp, Glycine max
  unsure at all n locations
catgagcaaatccaattataggctnatgtcccatanaatgacgtccattatcaattggngtactcatcttccttttctctctagagtttaacggttgaacatttagtcacactcaatttctcttaagcactagccttgtcgtaagcttgaaaggtgatccaattgtcactatttatcttgaatgtctgcaagaatcaataggtcttttgttttggtttgcaagaatgcgcatnttacgtaaataacaattttttttcaataaaatgatgcccttttctttcaacaacaaataggcaaacataaaggatcaattgaaacgactaaagtcttcactat

SEQ ID NO: 13163 - DNA, 467 bp, Glycine max
  unsure at all n locations
tgtagcacagatgacgaaactctgcaactntgcccacanatttagtgtttctcataattatagacaatctattaatagaagctgtgatggtaacatttagattccaccttagagatattgttgtgatatattcaatatgaaaaatcattatttggaaagacccaaaccatttgggagttatgtcatcataatcgctattgacataggcaagacccaagaaggtgcccttgatggcaaagtaagcttttctctaaaattgaagggtggtccattttcatctctaagatgtctctctctaatgtatggggggtgttgatcaagagagataaagtgatgaactctgattgaagaaattggtaagacttgacgcaagggaagatcaatcaattgctcccggcattgaaaatctgcgaaagatagttcacgagcgaggcatagtgcaaatgacagaagatactatatcacta

SEQ ID NO: 13164 - DNA, 415 bp, Glycine max
gtaacctcatcgtctctcacagtctttagaattgagagcctatccaattcttgtgttcggactctcagccacttatgatagccgccgatgatcccattactgcttcccctaagctctctgtcctttcttcatgccgcatcccatgccttgcgaactccttggagtaccctcgcgttgtggtcaccgaaaccccgtgcgatgaaaggcgtgatgctctcctctgatggcactcctctcatggggtagccaagctgtcttatggcgaggacgagattataattaatacaacctcttgttccatcaagggaacattcggacatccttcgcatgaagatagaatcctgattcttccttccttctagcgagggaacaagataacagacacccctccatgctagccaagagttggtcccaa

SEQ ID NO: 13165 - DNA, 385 bp, Glycine max
  unsure at all n locations
ntacagcagaatttagtgatgacccactaacctagaattaatataacttattgccattaacctatggaattaaacaaaacttaatggctgagtgtaactgaaattgtggcaaccaaaagtcacccccaacagccaacaagtcagccaccatttggtctcccaaaaggctgatgcctaagttgccaattgggcccttattacaacttgaactaaacctaactaaagcccttttagttgattaacccataacatanttttggtcagccaactttacaaagattgggccattatttagacagactaaacactctataattgaaacatagtggtgtcatttagtcctcctccatttgggccatgatacaactcacaaccttggactttc

SEQ ID NO: 13166 - DNA, 553 bp, Glycine max
  unsure at all n locations
ttgaccccttgantttgatctacctatgngacactccagantactcaagctttgcggatttggactatgccagtgagaggatacacgtgggtcccacaagaagctattctgatcatcctactaagacgactgagaaaactggcgccaatgtaaaaggtgataaagaaggagaaacccatgttgtgactgccattcctattcgtgtcaatgtttatccaccagaaccgctcacaatgtgtattaactcatatcaataacaagaactgctgcgtatccaccagccagatatgcacaaatgccattcctaaatcaaacacagagccttgctagcgcacttcctatgactataacgacctttagcacacacgccataagacatcaacaaatatgaatttgcaggcaatcgacatgtggggtgaccccagattccgttgtcatgtgcgcaactagatgccataatcactcaataatcaatgcgtagcgtacaccgaaacagggtcctcaatctcattatttgaggaacgatcgacacactggtgctatcgtgaagact

SEQ ID NO: 13167 - DNA, 374 bp, Glycine max
tagcagatgctgcagctgcaagttctatggaagagatggcgaagccatatgatccttatgccaagaaacgcaagaacttaatagctcgtaactcctcaattgagaggagtcgcagttgcgcaaatattggtggaatatcatagcgacccacaaacatacgtcgaggaggaacatcttgtctcactctgagctgtagcgaagagggtaggagctccacttcaatatctcctccatgcactcttcctcctcttcatccgcgcgtcattaataggacatcgctgcctcaatcgtcttcttcaacctgacgaaatcctccttggaggtcatattcctggactgatctgcactctgttgctgaggctcatgatatatct

SEQ ID NO: 13168 - DNA, 474 bp, Glycine max
  unsure at all n locations
tctcanagaagctacgaggaagcttctagaggaagcctcttaatgaatcttctagagaaagctacatgaagctgtctcggtaaaaacgctgcccagccttcatcaattgttggatcttctcgaaattcggccttaaacttcacaagacacttgtcaatcatctgatcattgagatctttgagaagatgtctggagtgtgctagaagcctcttaatgaagcttctagagaaaactacatgaagctgcctcggtagaaacgctgcccagccttcgttaaccgttggatcttctcgaaatttggtttgcaacttcacaagacactntaccatagattaaccgttggtatctttgagataatatctggagtgtgctagaagcttccgttcccgagagcatctcttatgtaagcatttcagcctttgctttcttgtagcttacgaagaatgtcatgtcttcttctttctcttcttcata

SEQ ID NO: 13169 - DNA, 412 bp, Glycine max
  unsure at all n locations
tcggaagaaagtgatgaggtacaagccctanaggcaaagcttgaaagatctctgngtagtcaaagagaagttcaagtccataaccatcacagtctgaagagagtatgatgaactaaaggacgtcaatatggccaccgatgaagccttggaatgagaaaccaagaaggcccgaaaggaagaacacgaccaaaacaagttctgaggggctttatagggtagcaatagtgagctcacactctgaagaggtgaaaggaatcatcacgggtcaaaggcatgatcttgaaggacgagctaaaagcttgccttangtcanaaagaaatttgtcccaacagttaagcgagactgaagggaatatgtgggccatcatcgatgagtgcaaagagaagctaaatctagcagcgactcatgagc

SEQ ID NO: 13170 - DNA, 454 bp, Glycine max
  unsure at all n locations
agtacttgcagttgctcagcttaggcaagcacctgagctctgctgctctattgngtttattcataaaatgccaggttggtgttcttttaataaactgacctgtgaagtctgcaatgaaagattgtcctgtcggatatcattcatatgctagataagtagttctctttaggggcagtgtagctagattacttgataaagagtagacagatgtgacatatatgatttgcatgccaagagtctatttgattatctgatgttgattattctagtctacactatttatgcagctgttgtagaatcattaatcaatactgggaaacaaatagcagctgtacattntattcatgccttccagctccaagaaagcttcctcccagtgccccttctgaatgcatacctcaagaatcgaatgagaaattcacaagttaagactggaaatgtgcgtgacatcact

SEQ ID NO: 13171 - DNA, 432 bp, Glycine max
  unsure at all n locations
cactatcaaactcagcttatagactctgttgctntnagaagaaaggaacaagatcttattatagaatacacaactagttttgttaaaaggagaaagacgaggaggagaaataaatattatagtataatattatatatttagaataatcaaataaagccattgagttaattaaggataatntaatttaattagtgtaaaagttactctccctaccaaatgttccaatcttagaggagagtcaaaattaattggggagggattttaattctcctcccctttccttcaaaattttgaactaaacaacataaatttataaaaatccctacctccaaccgaacactatatntaaagtacatgcatggatcacaagggtntggtctgtactattttcctttgctattntaaattcagaaaacagcgagtagaatatta

SEQ ID NO: 13172 - DNA, 401 bp, Glycine max
  unsure at all n locations
tcgaggtcaaccagaagaacctanactccgcggtgcaatcagacagagggtaaccccgccaacaaaccatgtcaataacgtaataagtntgatccgcctgtgccaccccaaaaatcacatacaaagaanaagaaaacagaaaacaaaaacacgacattcattcgaataacctagaaaagtagcaaattcagacctcgtgaaagatgcagtccaatatagagtaggaggggtccttcttccttgccccgctcggcaagccggagggaaaccgatgcagaacggcaccgttccgcagacggcttatcgtcgctccgttgcacgaaacgacgaaacaccgtttcccggaagggcgagcgaagacgaacctganaacgatagaaaacggagtttgttaagttaat

SEQ ID NO: 13173 - DNA, 502 bp, Glycine max
  unsure at all n locations
aggtgtatcaccttctcccaccacctccttatccgtgagggagaggaacctaattntgtccaaagcctagaatgtgcacattattcgccattaacaaatcgttcaacaattaaaaaaaaatttaaatgcaaggattttccaaatgtaaacaaaaatactttnttttaaaaaaaaaaaaaaaagcgcttacatcagaagcattggaaatcaactctctgaggaagatatccttgttactgtagagagaattgatgatgatatccataagccgcgacacttccgcttggaactcaaatttctccacgttgctctgaagagatttcttcgagatcgactacacctccctttcaatcgcaacaacacgcacacgtttatacacacaataacaagagaacaagagataaagggaaataaaacaacgaacacctcttgatgacatttgaatcggtaaaaggccatgaggcacatcactgatcttgtcctttaccttcggtggatctac

SEQ ID NO: 13174 - DNA, 293 bp, Glycine max
  unsure at all n locations
ntggataatgagttttattcaaaagttagtcgtataaagcgattaacatactccnccaaatntacagatttgcttgtcctcaagcaaagaaagaatagttcacttgcctcaagtgacaaagatagtggccaatcaaaagaatatggtgtttgattcatcaaggacatcaaccatatgaactaaatatcatggaatgcttaaatcaatcacttctcacaagcatgcaactcttcacagataggagcacaagtattagagtcacagctgaaataagctagtaagcatgacagaaa

SEQ ID NO: 13175 - DNA, 441 bp, Glycine max
  unsure at all n locations
tattcaagactaagatacactacanaaacatgtntattatgtgtngattataaacaaaatataaaaatgatgatgaaatggtaatttgctacttttnttttaaaaaaaaaataacagtaaggagtaaaaagagcatcaaagagggtgagaatagcacccctatccttcgcaccccttccttccttttattnttttcaccactaaaaggagcttgacaaatagattttttagtcttagaaatacacgaagggaaaaaataatcttggataaacaataaacaataatcttacttttaattaatatttaatcttgaagagggataatgaatatttattntcaccagaacaattttgtgagtaaaaatatacatatacattattcttactcactatcacactgtcctcttaataattcatatatgtacattctgttaattttttc

SEQ ID NO: 13176 - DNA, 312 bp, Glycine max
  unsure at all n locations
ctttcanatgtggagaaggtgtgtccaacaacaaatataagaccattntatgtgttaaaaagtaagagaaagatcgtacatccgtatctcccttggatattcaatagaattcttagcaagctcagctcacgacaattagaagaaggaataacacagactaacatgggcacacgcacatgatggtagtaaaaggttttggcctcaatnggattattctaattatgaaaagtacgagagtaaattgaagatttgaaaaatcacaaaacagcacatactcaattcagcangacanaaatgcattgagtatattac

SEQ ID NO: 13177 - DNA, 558 bp, Glycine max
  unsure at all n locations
cgcccccttgaccccttgatgtcctngtctcactangcgacactacagactactagagctcgaagcccatgtggatctatctgaatctatcagggatattattatcgtcttccacttacgcgaggggtggaggacgacctggtctctctactgtgggacgcctatcacgatgacgaccaacacgatgacgaccatctgcatgaccacgttcagtacgtggacctaggacaggaccctatcttctccttctcacatattgcaattactatgacagacagagtgaacttgttactctatatatgactgatacttgctccgaaaactatccccagatgagcctgttcataagattgattacgcagcgtcaggctacaatacttaatatcccgtctactgtctatgcatacgaaaactacgctcacgtgtgtatactactgatacttgcatattaatagatctagcagactctaaactgaaatcttggctggcgaaacatacagtgtagatgccgataggccattattcgacttggcatacccttcgtgactttcacacccg

SEQ ID NO: 13178 - DNA, 493 bp, Glycine max
  unsure at all n locations
tctttcattcattgcatataatgagactctnttatgtgtcccttttctccttgaacaccttcttggaggatatattccattcggacccactcttgttgctccactcttcttgatgtttttagatgaaggacaactcatcatccttattagattcttctntagattacccattagaagttgtccatgctcagtgctttggacacacttttagacgatgacctggatgacgattcctttgacgatggtgtgttccttactttctgagcactaagagcaagtgaatttcctttcttgacttcttcatctagttgaagttcttattcatggacctttaaagttccaacaagttcttcaagggacatggaatcaagattctgtagcacccttaaagctatgacctgtgatctncactctctagacaaacttctcaagatttatcaatgtgatcatagatatcatatagtcttcctatagatcttaattcatttgatat

SEQ ID NO: 13179 - DNA, 434 bp, Glycine max
  unsure at all n locations
taaggccatgganaatagcccacagcgcagccatgagaatggtacatgatcccagctntgcgganaacccataaatgaaggtaccaaaattatcacaaataacccctccacaagaagccttggcaccatgatccatcacactagcatcacaattaagagccacctgtcctacatctagagcttcccatctaatgtcgtgagtcccatgaatgctgccactgttgtcaacaagtatatcactgcgggagttagcagccacacaagatgtcacgaaactagaaatcctctcaataacctccgtcacattccacttggttgccttaaaaatgaattcattcctcctctaccaagatatatgcaacgcaattgcaaagaatgttctccaataaacacaccctctcacacctaaaattggacatttggagcatggagct

SEQ ID NO: 13180 - DNA, 485 bp, Glycine max
cgaagggacacacacatttcctaggcccaaagtctcttctgtttaatttttttacctacacctatactcgtcactcctttcacagccaattaacatagatgtagaccttcctctactacctgagtttgtatacgaccttaggatcaccgtcacaaattcgttctcattagcatcggatcgagcccaccagaaaacatgccttctggacttcaacacttacaaagcaatgcacataatggatgtgctctaccaaagaattaatgcagtcaccctccacatatgcaaagccgacagagaatgtcataccaatcagtgtcatctcaacatagtcgaacagagagagtctaaccggtttgatttgtaagagctcggtatcagagacaccaattacatgtgttgactagcttactacataggggtgcatcaaaagatatactatccacgtgttcattcttattgtgagcaacgaaatactgataacgact

SEQ ID NO: 13181 - DNA, 493 bp, Glycine max
  unsure at all n locations
acactatgatactcagcttggactcttggcaatatctttanaactagtcacttaaatagttgtgacttttcgaaaaatcttcagaaacaagtcacttgaagaattgtgacttttggaaatttatttttcaaaatcagtcactggtaatcgattatcattaaggtgtaattgttacacatcaacagatgtgactcttcattttaaattttgaaaatcaaaacgtttagaagctctggtaatcgattacacaagtagaaaatgtttaaacataagttgtaactcttgaaatttgaaatcttaacattntaaaacactgataatcaattactaccttctggtaatcgattaccagagagcaaaagtctttggtaatgatgttgtgaaaacttcttgtgctactcaatgtttagacaaacttttttaatacttatcttgattgagtcttctcttgattcttgaatattgagtcttcaatcttgatcttgattattct

SEQ ID NO: 13182 - DNA, 455 bp, Glycine max
  unsure at all n locations
ctggtttggaattgagctagtattattaacagttatgttttcatgagctttttagtatgatnggatttgttgaacttattatacccttttttatacatagcgttcttgctaatttatctacaaatagtattatttgaagatcatcatacataaactntacgtctgttcaaatcatgcggtagtttgatcattgaggatgacatatttttggctggtttgtaggattgagaatgacaaggtggaaaactattccatcactcatagcttcaataagcaggaaaattggactaaatctctcatgtacactctttgcaatttgaaatgggccctctattggtgttgtggaaatactaacttccagcccctttcaagcatggtatcttcgcatgctgaagtgcctgctgtagggtctctgtacacgaaacgtggtgttgatgccanatctgaatctcgaa

SEQ ID NO: 13183 - DNA, 365 bp, Glycine max
  unsure at all n locations
ntcatctagccaagattatacaaaggtgttacaagagaacctaacgatttctaattatatgggccatcaaatctatcatgtgctgagagtaattgattagcccatgaatctcctcgggggcagtgcacacttcggccatggcttttgctttggctaacagacgcgggaggtcttgacttccattcatggtcaaggcgaacctatccatccacatagtcgcttcttgatgcaacgcatcaatcaccctccctcttgcttctttttcgacatacacttgtgcaaaatcctccactagctnttgttcatgggccatggactggttcaattctttcttgtattgccctatgatagctagcatgctttgc

SEQ ID NO: 13184 - DNA, 213 bp, Glycine max
  unsure at all n locations
agagccaacacaggaaactataannctttatattacagcaaatagtggactagatgttgtatactttctttctggtggcaaatgtgtgctaggacttgggataactgccctctctacctgtaaatttatttcggaatatgccttattggtccactaaatatctgtgatttgccacttatcactaagttatatatacctgcgaaaaaaataaat

SEQ ID NO: 13185 - DNA, 224 bp, Glycine max
  unsure at all n locations
ngctctgtgggcttctatggaggctggatctccgagcccatcgaggtctcttaatggngaaaatccaccatggagatgcagcggaagacaaacgagaagaggtgagaggaggatccatccactaatgaataagccatggaagaaggagcttcaccaccaagatgagccttggataataagcttggagaggatgcttcaatggacgaaaagaaagagggagagaa

SEQ ID NO: 13186 - DNA, 339 bp, Glycine max
actcagcttgacctggaccttgcattgacccttcacttatgaagtgctctattgccttatgctctttggatagccctctatcattcccttcttcttgaaaagaatccatcctcagttgtgcatccaaaacacctacatcacaagaagacaggtcagcgacattgaaagtagagctcaccccatactcacttggtaagtcaatcttgtaagcattgtcattaattctctcaaggaccttgacaggtccatcacccctatgttggaagtcagatttcctttgtgaaggaaatctatgcttccttagatgtacccaaatctaatcttctggttcaaatacca

SEQ ID NO: 13187 - DNA, 397 bp, Glycine max
  unsure at all n locations
tgatgtgaganagcgtggaagagtcagacttcctactttnatttgttgaccacagagtggtacctggagatatgtcgcgggggtcaggagaccttgaggacatcacgtggggtgctattgcccaaaaccaagcttggccaatcccgacccaacccgggcatagtcagtcagtgagaacctgtgacgtacctaatcaagcgagctcctggcagtcaaccaatgaaagatcatagtccaccaagcaaggaggcttgtgtggcggctggccagctatctatcttgggtgttattagaaaaatacactctggtaatcgattaccatacatgggtaatctactatgagggttaaaacttgaaacatgacgttcaatagcttctgggaatcgattaccaatgg

SEQ ID NO: 13188 - DNA, 373 bp, Glycine max
  unsure at all n locations
gacactatgatactcagctgggtgctatgacatacatgatccacctagattggagcttcatgattaaacacatactacttccctaatgctataaagtcaatgaaataacaatggcaggttattaagcttaagctctaactttacaactggacaattgtagtgaagcatctaagtgaaaggcaaaccgcatctatcagctgggaatttttccccanagtattcaagcaagaactttcttctgcaagttgtcagcacacaatancgttcancagcaagcaatgactccataatagctcttctttggttttcctggtacattggagactcacatgttactaagagaacagggataacttgtctccagaatatatgc

SEQ ID NO: 13189 - DNA, 415 bp, Glycine max
  unsure at all n locations
cctctagcaaaaggttagaaagcgtgattctccaccaacagactctctgtaaccttcaacataaatatatatgactataatggtttatttcaatcagatacattntgctctaaggacttttccaccattatcaaatattatactcttaatttctaaatgtaagtntcttttatatatggttgatattttaaaactaattttcttaaaaacttaattatataacaaaattgtgtcataccattcattntatcatactaatactttgtcaaataaatctttcatatatatatatatatgtgtgcgtgtatatttgaaatttattcttcataatgctttataacataatctatttaaaatctaatcagacaacanattgctctataccatagaatttactatagtaatacctttcatc

SEQ ID NO: 13190 - DNA, 423 bp, Glycine max
  unsure at all n locations
tcgcacttgataatggagaacacatgttcagcgctatgcaatgacattcatggtgctctgaacaaaggtggagtatggaggattgccttgagggtccgcacttangcaatcatgaaactcagctccaaactcgaaagtggaggacacatgaacagccctaagcaagaacattcatgtggctccggaaaaggatgagaatggaggattgccttaagggtcctctcttatgcaatcatgaaacacagctccaaactcaaaagtggaggacacatgaacagccctaagcaataacattcatgtggctccggaaaaggacgagaatggaggattgccttgagggtcctctcttatgcaatcatggaacacaactccatactcaaaagtggaggatacatgaacaaccctaagcaataacattcatgt

SEQ ID NO: 13191 - DNA, 459 bp, Glycine max
  unsure at all n locations
tgtaggattatggcgtacccatcacatgtggtactaggtggcggtcgagcgatggtgcacaacaagttttccacatccacaaagcgcgcataaacccaccatcccctgttgcccacctccaactgagctcacgtactcccacgtagcccatatcctcttttctctcaacaccgggtccccatcaatcctcccaagctttcccaacatcaaagcaaaacaacattcaaacagcacaagctatcacagccaagcaaaacagagcaaaggcagaaaactctgccaaaacaccaaccaaaaccacagcttttctcacttaaagaccccaataacaattccttcgatccaattcgttaaccgttggatcgactccaaaattttactggaagtctatagtacataagcctacattttgaccgttgggatctactagcaaacatncagaactcattctgtactact

SEQ ID NO: 13192 - DNA, 412 bp, Glycine max
  unsure at all n locations
tgccacccagctcgcccaggcgagctaggttgcttcctcctgaagcaaccttcttctggaggaattttctagaaggcccaagtgggtctggttgctatttgcacccccatttttactaaatactccccttgctcttttttggtgattctttttccgtaacgttatgaaactttacgaatttcgtaacgatgattgttttctttccgtaatgtagcaaaaccttacggattacgtaatcatcccctttttaccttccggagcgttacagaactttacggattgcgcactaacacttccttttaatntctggcatgtcacagaacttcacgaattgtgctacaatactttcttttgactttcggcatgtcacagaacttcacgaactgtctagcgatgggtgccaagtacctcg

SEQ ID NO: 13193 - DNA, 329 bp, Glycine max
  unsure at all n locations
tgcctcccagctcgcccaggcgagctaggttgcttcccccataagacacttccttctggagaacttcctggaaggcccaagtgggcctggttgctatttgcaccctctgtttactaaatacaccccttgcctttttttgttgattctttttccgtaatgttatagaactttacgaatttcgtaacgatanttgtttgctttccataatgtcacgtaaccttacggattacgtaatcatcttttttttgactctcggaatgtcacggaacttcacggattgtgtaacaatgctntcttttgacnttccgcatgtcacggaacttcacgga

SEQ ID NO: 13194 - DNA, 378 bp, Glycine max
  unsure at all n locations
tgaagaggatgctntaatggaggacaagaaagttagaacgctggatcacganatacaaggaataaaagatggagagaagtggaactatcaattatgtctcacaagactctcattcatcaaagttacaacatgtgtcacacatgcttctatttatagactaagtagcttccttgataagctttcttaagataacttccttgagaagctttcttgacataagtctcttgtgaagcttgagcttatctactctcactcctctcaatactaagctcacctgcttgagaaacttccttaagaagattcctaaagaagctagagcttagctactcttacctctctaatagctaagctcacctcccttagatgataagctagagc

SEQ ID NO: 13195 - DNA, 233 bp, Glycine max
  unsure at all n locations
tctgcaatgctntaacatgtcctcgttgaagcgcgaggggatgtcgtggacgtagatgtagcgccccccgcatgggtcgctcttgttgtctgcggttcggagggcacggtcgaaggggaaagtgggtttctccggttgggaaattttctcggggaagccgaggtttttacgaggttgttgaagttggagagtgatggggactacngngttagggttggtgggttggtggcgga

SEQ ID NO: 13196 - DNA, 449 bp, Glycine max
  unsure at all n locations
tgtattaaatgcatgtcccttcatgtaaagtctatgttgatatgttagtgtgtcttgtacttcaacagagaagttacttctttcatcatagcaagtctacaacaataaagcacactctttgatgaggatcaatgtcttctagattgtggatttcatttattcttcataggactttgacatatcctagaagaatgccttttgcatgaaagaatcttagacataagagtattaaatgaagattttanatgcactacttaaatgttatatcaaatcatcttgtgtgtgtatcgtttaaatatttgaatgcacagagacagatcatcatctaataacatatcaagacccaacatttattatttataattatgcgcatctaatcaaaataatcaggagttatgattcatcattaagacttaaccatttcttgacttaacaacactactaatcaa

SEQ ID NO: 13197 - DNA, 381 bp, Glycine max
cttgcttatgggcagtagcaccccacctgacgtcctcaaggtctcctgacccctgcgacatatctgcaggtaccactctgtggtcaacaaacataagtaggaagacccacgctttctcacatcaagcttattggattatggggcacccgtcatatgtggtactaggtggcgatcgggcgatggtgcaaattaactctcccatttccacaagtcaggcataagcacaccattcccagttgcccaccttaaaattgagctcacgcactcctacctagccttatactcgttcctttcaacaacaggtccccatcaacgcctctaagctttccaatatccaaaaatcaatttcatttgtctgaaacaccctaaacaaaaaacaag

SEQ ID NO: 13198 - DNA, 366 bp, Glycine max
  unsure at all n locations
tgcttctacattggatgccttagtctcctttttcgngtatgaattgtagattgattattattgcttgtaagaattattgatgcatagtggaaatctaattcaagttgtggattagataactggattagcttatctaaaaatagagagtgaaccagtataaaagattgtgtctttttctctcttgctcacatctttcactcattcaaggtttaatcaactcattcaagttttattcaaggtttgaaaacattcaagttttatgatttttgaaataaggatgttaatgaaggatcatgtgtaacgaaggatngattaagtattgattacatatttcatggaatgcatcattaaaggttctttattcca

SEQ ID NO: 13199 - DNA, 428 bp, Glycine max
  unsure at all n locations
tatccctagaggggatggaccttttcaggttntggagaggattattcaaactcgacaagtgcatcggatcacgcaagtagtataaaacggtaagaaccgagtatcaaactctcggngaacttgtgttacttggtaaagctatattcattgaataggtgtctagtattaaaagatatgtgtagactatgaacaggtatgtaaactaactattaaaaggaaaatcacgtgagtaatgatgtgtaaagacaactagacaacacgttggtcttcctattaggtgcctgattttattaagatattctctacttaacaatgctcatgtgttcaatggcgtctcctgaaatgctaaaccttgatntctcatgatagtctagcctaatgctgatcaagcatcgtcctcggatctctcttgttggacctaacttgac

SEQ ID NO: 13200 - DNA, 372 bp, Glycine max
  unsure at all n locations
tgttactaaggaagaagtttatcatgttgtttcctctatgatatcgtataaggcacctgaacctgatgggtattagaaaatattttttaagatattttgggaaaaggttggagatgatgtttggagatttgttagagaagcgattcagaaggtatgtttgatgtgtaggctgctaagactattattgtcctaattcctaaaggtgattctcaaaaaacatttagagtgtgtttggatagagaattttaacaaaggaaagtaatttatcagagaatttanatttttctaatctagaattcattggttggatgtntttttatgaagaattaaatttttggaatcttataccggaatttaaacaactaaaatgtg

SEQ ID NO: 13201 - DNA, 359 bp, Glycine max
  unsure at all n locations
ctttcagcccacgtcgganacccttccaacccgaaacttagccagcaaggggcacccgctcaaccacaaagggcccccgctcaaaacccggctactacacaacctcgcctcgctggcatttccaaccctccagtgaagaagcttctggagtttgccctgattctgttgtcgtacacagatttgttgccatctttgatcgccaaccaaatggcgatggtgacccttagaaggatttaccagtctcatttccctcggtgttacaaccccaacgctacctatgcttatctggcgggtaccccggggcattcgatagaatagtgtgtggccctcaagcatgaggtccaaagtttgatcgacgc

SEQ ID NO: 13202 - DNA, 328 bp, Glycine max
ctcctacaccaggaacaactgttctaggttagcaaaggcataatcttcacctgcttcaatggcccagagccttttctctagatgatccaaccttcccatttctgtcatagcatgagggctactacatgtgggcacacgcactaccgcgtaacccatattctcccttctctcaacaccgggtccccatcaatccttccaaacttccacaacattcaatcaaaacaacattcaaatagcacaagctatcacagcccagccaaacagatcaaatgcacaaaactgtgcctaaacaccaaccaaaaacacagcttttctcacttaaagaccc

SEQ ID NO: 13203 - DNA, 99 bp, Glycine max
tagataagatacctggtccttagtcctatctttccatatagtacattttcttgtctgccatagtttatgggatcagtaggtattactgaaattattact

SEQ ID NO: 13204 - DNA, 445 bp, Glycine max
  unsure at all n locations
tgattcanattagaagctaaccacataaactaaaggatattatgcaagctcattgtccctcaaatgaatatagaattaagagggttgcaatgcaaattgcaagttcccttttaggtaaaattatttatcatttgagttttatccttaaaaattatggttactatttgaaggcttttgtacactctagttgttattcaattctcttcaaaagttaaatnttcaaatgaattagcagaagtaccttgcttctatgaagcccatacagtggaccagctaatacaagaaaccaaatttatgtgatatggtcatgacatttaccatgggacacgtgacttcacacttagtgtagtacatttttcatgaaattagtttaaatcatcatatagaacgagcccttacacaacagtaaacttgtgccttgatattgatcatgagttcgaatctg

SEQ ID NO: 13205 - DNA, 360 bp, Glycine max
  unsure at all n locations
atcacatgtggttctangtggttgtcgggcgatggtgcacaacgggaatttttcacatccaaaatgcgcgcataaacccaccattccctgttggccacctccatctgagctcacgtactcccacgtagcccatatcctcgtttctctcaacaccgggtgcccatcaatcctcccaagctttcacaacatccaagcaaaacaacattcaaatagcacaagctatcacagccaagctaaacagagcaaaggcagaaaactgtgccaaacaccaaaccaaatcacagcttttctcactgaaagacccagtaacaatttcttcggtccaattcgtaacgttggatcgactcataaatttactgg

SEQ ID NO: 13206 - DNA, 442 bp, Glycine max
  unsure at all n locations
gccgactaatttanaatcatattttttgaacagtaaaatctaattactttctaaaataacatgatttatgggttaatggtgaccctagctccatattaatatgaattgtatggagctaaggtctcataggaccattatgcaaggccaagtgggttggcccgagagcctaagaccaaaataacagctttaaatacagtacaagagatgattgaaaaatagtgtaaccaatcatgctatagggaattaatagatgcatagttgaaaccttggatgcttagttggaggtatagccttgcaaacaactgcttcaagcattctattcgaatcaagtttgacgcaccaattgataagttgataaactctaaacaagaatcccaacacctttggtactttcatgcttcatccaactctgacagttctattccatatactatcccaatca

SEQ ID NO: 13207 - DNA, 413 bp, Glycine max
  unsure at all n locations
tgtaggattatggngtacccgtcatatgtggtactaggtggcgatcgggagatggtgcaaatcaactctcccacatccacaaatcacacacgaacccaccatccccagttgcccaccttcaactgagctcacgtactcccacgtagcccttatcctcgtccctctcagcaccgggtccacatcaacccctccaagcttcctcaatatccaagcaattcaatatcaaaacatcatgaactaccctaaaccaaaccattcaaacacaatgttagatgttaaaagttattttcatcttgtttggttgctatagccaagaggactcgtcaaatattattagagaatatattgctaaacaatttctaacacctatgcactctngcgtgatccctctatagtcaattatatgaatcata

SEQ ID NO: 13208 - DNA, 229 bp, Glycine max
tatattctttacgatcaagcatctaacataacattaatattgcgctctctagatgaaaccaacttcaaataaatcttataaattcgcatacttaaaaagtttacttggccactacacaaactggatgcataatttaacctaccatcgacaccataaaatattctacagttacaaaatggtttctcaatgggcaaaatgacttatatccgtatgggttccattcttgaaa

SEQ ID NO: 13209 - DNA, 287 bp, Glycine max
ttgtgttgtatccagaacattcgagactatctcttttatcttagtgagagtgattctcctaacttctagagtgattcaagaacaccctggctatatcaaaggactttcacaacgcttgtgtgttgccctcgccggaaagagtgattctttcctatctttcatatgtcagcttgttcttcttaaccatcattacagaaaatgcacttctgcccagaattatctcgagccataactcccgtcttacgcacttaagttaagctatatttgtacctaccttgaatttcaag

SEQ ID NO: 13210 - DNA, 295 bp, Glycine max
taagtatttattacctatacttaacagaatatacttataacactaccaaataaccataaattggaagagttatatacaatttacacaagttttatacacaaaagttagtcgtattcaccgactaacaactcccctaaatttacagttttgcttgtcctcaagcaaaaagagaacaactcacttgtcctcaagtgacaataacatgcagtgactatgtacacaggtgtatgcaacaaaagttagtgatttcatgataagagaatgaagtacaatgccctgatcacttgtcattcac

SEQ ID NO: 13211 - DNA, 424 bp, Glycine max
  unsure at all n locations
tagggtgattaggtgctcctaaagtagccaaaaataagaactacgatgtatcataaatttagtttgcttttgaaacagcaaagaaattntattgaatcattatagagacacatgatttatttcccaccacatcgtctagagtgtttcacagtgttagagtaattggtattttgtaatggttattgtatttgtcttactctctacagtttttttgcttctgttgtaccctaaaaggggctatgtatagggcaggctcccttatgcctgaacctgtcacatctatcctttctattgtacttcatcatatattattaatataagtcngtgccaagtgagagaataactcttgagcacttttgatctagacctttcctctttagtcacagcttcatgtaaaagtcccctacctgtaatattgaacatc

SEQ ID NO: 13212 - DNA, 363 bp, Glycine max
  unsure at all n locations
tgtcatcaagactgtcattgctcgtggcacttttggcactgtccatcgtggaatttacgatggccaagatgttgcaggtatactccactacactacactctgttgctttgctctcacagttgaaaagttgagttgtcattcgatgtgtgtctgaatgttctcatatatgcaactatgtgtttcacgaaaacaaagaagaacatgcatagtttgattttccctccatttattacacctgtgtgtttgacaccacatacatgtgcaaggggggaagatttgtttacttggagaagttcatgtagttggtcctttcaacttacaatgtngcataatgtgcacatgcttccaaaactgtatgttgat

SEQ ID NO: 13213 - DNA, 454 bp, Glycine max
  unsure at all n locations
tggtaaanataaagctcattctaacctatttcactaagctntactgtcaatcttatgaatcatttgataagtgctgaattgctgattgagtaagtgcttaattaagctacttacccaaacaaaccttgattattatataacgaatgtaataaataaatacaaatcatataattttcctgattactacctttgcatgacatactgaactttggcactaagactgaactcagacataatgatacacatttcgaatacaagtcataactgataatataatgatntacttggaacagtcatatcaaaaggctttacaagtggatccttcatacaaagcagctgctgagtgcctggccattgttttaacggatattggtaccaacataaagcttgcaggaaatactcangaaggaatcaaaaatactttgaagctctcaaaatagatccacactatgct

SEQ ID NO: 13214 - DNA, 414 bp, Glycine max
  unsure at all n locations
ntgagggattggtctttgccagtgaaaggatcgatgtgggtctgaaaaaatgcaattttgatcgtcctactaggacgactgaganaactggggcaaataaagagggtgaggatgagggagaaacccatgctgtgactgccattcctgtacggccaagtttcccaccaacccaacaatatctttactcagccaataacaaactttctccttacccaccacccagttatccacaaaggccatccctaaatctaccacaaagtctgtctaccgcacttccaatgacgaacaccacctttagcacaaaccataaacaccaaccaagatgtgaattttgcagcgagaaagcctgtataattcaccccaaattcagtgtcctatgctgactttgctccatatctacttgatnattcaatg

SEQ ID NO: 13215 - DNA, 319 bp, Glycine max
  unsure at all n locations
gggatntccttntagtagggaatctatccttcctaagaatgttccaaacccagtccccctcattaagaactagctcctttcttcctctattgcccttagttgaatacacctatgtttggttctctatttgggtcttaaccctctcatgcaacttctttacaaactctgacctagattccccttctttatgtataaaaaaaagtgtcaagtgggaggggaatgaggtctaagggtgttaagggattgaacccatagacaacctcataaggggattgctcgggggttctatgaacccccctattgtacgcaaattctacat

SEQ ID NO: 13216 - DNA, 356 bp, Glycine max
  unsure at all n locations
ggcatgatttacattctccccctttctcaagcaaattcttcttgacatcatcaatttcttcatgatttaaagataaaactttgtaagacataaaagattttcataaaaataatttcagaagatgaaaacagatattgcaaatcaaacaaagtttttaaataaaatcaaattcaaaccctaggtcagttgaaaatagaagagagatgaaagtagtaagacacatagatttatagtaggtttgtctcaaccactaagactacgtncatttcttagttaaccattaagttccattaactttaataagttacaggtattaatcactaccacttctagctctacaactcaggctctacccc

SEQ ID NO: 13217 - DNA, 301 bp, Glycine max
tcggtattcaatttcgatcgtctcgatgtattacgtgactttatcagacatctgagtaaaaacgttattgtcgtttgaatttgctgagagcttcaacattcaatttcgagcatctcgatatattacgggactcaatcagacatccgagtaaaaagttattgtcgcttgaattttctgagagcttcaacattcaatttcgagcgtctcgatgtattatgggactctatcagacatctgagtaaaaaagttattgtcgtttgaatttgcccagagctacaacattcaatttcgagcgtcttga

SEQ ID NO: 13218 - DNA, 410 bp, Glycine max
  unsure at all n locations
tgtagccattagaagagaatgagcatgtggttggaagtatgactggaaatgttagtcagtttgtcagattgattgtgagggaatgcattaatcgtatccagtgagagtgtgatccttaaattttgagagaaacgactatcatttagtactgatttttgcgtgaatctctgaagtatggactaaatgcatgaaattgaggatgatgaagaccatgtttgattgtgatagccacttagccaaaaagctgaccatgtgcttgaatgaattatcccttgtacctagtttgagttgaatgaattattgattgatggaaccctgagcctatacagtgttatctcctgctaccttgacttaggttgtangagagcatcatccacatgaagcatgngtcanagcaaatttgtcccaaa

SEQ ID NO: 13219 - DNA, 451 bp, Glycine max
  unsure at all n locations
gagccatcgtctccatgctgcatcagaagactaaganctctcccctgacggnggagatacgagtagtgaagtcaaatatagcacgcatgacagtgctatgcagaaagcttaaaggatgcaccttatcctcaccccacagtggctgaaggtacccaagacataagcgcggagaaagagcctcaaaccccagccctgaccatttaccagataagcccgaatgacacaagcaatataggtttgtgtgacgacactcctgatataggcccaaagcctaaggaaagctcatcaaggtgtagctcgaacccaaacccacgcagagcatgcctgtcaggaaggacctcaccaaccatgagcacaagcgcaagactaatgtgctacaccagaacacacacccgctcgcttgagaatcatcaaacatgccagtgacacaccccagccttatcatacacag

SEQ ID NO: 13220 - DNA, 331 bp, Glycine max
  unsure at all n locations
tcttctaaggtaaatantttccagctagagattatcttaactctatctctnggatcagttacttcatgcccactttcaagggtttggaaataagaactaacatgaaaatcaaaacaatatggccctgtgtgcgttgtgaggtgtattgtatgtgactgtaaatgaatgcttgaatctataagggtgcatcatatcctctaaatatgctataaatagaagtgtgcgtgtggcttccctatggccttcagcacatgtattaatttatggaatcaacatataatatatacaaagagattggacagcttttctactctaactagttttatattat

SEQ ID NO: 13221 - DNA, 449 bp, Glycine max
  unsure at all n locations
tgaatggaaaacaacatcgctttaggaagcattaaaaacacgtataacccaagcctgtggttgttaacaacatcgcgttagttaacaatcattcataacgataaaaaaatatacaataatataaggttttagtttgtgttgaggaattagatagacacatacgtttgtgctgcttccttcaaattttccgcatcaaagtacagctacgtttgtgttccggccattatcacgttagcactatcaatgtttcactaatcaatatcaaagtgtttataacataaggtgtgatatttataattgagtaatctatatctttctacaaatnttttaagatataatcangttgtattattatgtcttatttagtttattataaaagtttgtgcctactctggaggcaaggcatcacacactttgattgcttgggtaggcagcttctaatcctaaat

SEQ ID NO: 13222 - DNA, 423 bp, Glycine max
  unsure at all n locations
ntagttcactacttcaagtagtgcacgatntgcttccagatgaaaacacgttgccaaaaagttattatcacaccaagaagatattgtgtccaatgggtatggagtattagaagattcatgtttgccctaatgattgcatattgtacatacatgagtntcaagatatgcacaaatgccctaggtgaggggtatcatggtacaaagtgaaggatgatgacgagtgtagtagtgacgaaaactcaaagaagggacccccaacgaaggtattgtggcatcttcccatcattccaaggtttaagcatctatttgctaatggagattaacggaaaaaaccttacatggcatgcanatgggtgaaactacgatggaatacttcatcattcggctgattccacccagtggaagaagattgattgttatatc

SEQ ID NO: 13223 - DNA, 393 bp, Glycine max
  unsure at all n locations
tgctctanantacattgatgtttgtatttatgggaggaggttgtatgccattnttgttttaagagtagtgtcccactggtaaaactaactttccaaatgtttgccttcgcaggaaatggccccgaggaagcttgcctcaaagaggtccaggaaggacaagacagccgaaggaactagttccgctccggagtatgacagtcaccgctttaggagcgctgtacaccagcagcgcttcgaggccatcaagggatggtcgtttctccgggagcgacgcgtccagctcanggacgacgagtatactgatttccaggaggaaatagggcgccgacggtgggcatcactggttactcccatggccaagtttgatccagaaatagtccttgagttttatgc

SEQ ID NO: 13224 - DNA, 384 bp, Glycine max
tctaagaaacagaagagagattcagttgaaaaacatgcggctgtgagattgtcaagctgcttgagactggccaagaagccacggctcgaattatggtatacatgatttccatacagtcaaggttttaaattgcggttgcggtttcatcgtgtcacttgatattgtgctcgcattgcagttgtggaccctaaaaagaacttgacattgtagccaaaatcatggttgcaggccgtttataaaaccttgcatatgatgtttagtgctgcaactcttctatttgagaatattataccaatggcttacgacatatagaatattcttctggtaatttttctttggtagcacaggtgctgatgtggtcatctgtgcatgtagaacatatta

SEQ ID NO: 13225 - DNA, 432 bp, Glycine max
  unsure at all n locations
tagctacacacacccctctaataactaagctcacctccttgataagctttcttgtttatattcctaaagaagttagagcttagctacacacacaccccatgccaaaatacatganaatataaaaaaaaagtccctacaacaaagactactcaaaatgccatgaaatacaagactaaaaccctatactactagaatgaccaatatacaaggcccaaaagaagataaaacttattctaatatttacaaagaagagaggacccaaccttggtccatgggctcagaaatctacccctagggttatgagaaccccaaggccttctttagcagctctaacccaatcctcttgaagtcttctatcttatacncttgtngggtaggattgcattaacgttgaccaaaccaaaccaaagagcatagaaaatctatttaaat

SEQ ID NO: 13226 - DNA, 312 bp, Glycine max
aactaagcataactgatagggagatcaccattcacattccagaaaatacaggagctttaatagtacagaaaatgaacagtgagagtatcattataagaaacagtactgctgatcagcaactaacaaactaatggactaactaaccatctaacagaataaatgcgactgaaattacggtgaaatgacaaacataaaatgtactggcttatctctaataagcaagggattgaaagcgctactatggataattgcaaataatcgatgtgatcataaatgccatactatatgtgaagtgtcaacattataaccctg

SEQ ID NO: 13227 - DNA, 274 bp, Glycine max
  unsure at all n locations
ctcctgaacccttctttacaaaaattgtagaacttttntggttactctaacgttatgctcgagtggacgttagtggcgactcttacttattttctccttatgagacgaacatgctatcttatatttgctttcgtcgtaccgtactatggtaagttgcgacaaccatctataaatatgtatttattcgctttactatgttaaaacgattgacgtttctaagatgggtctttcacaaaaccgtcttataaagtagctatactacgacgattttctg

SEQ ID NO: 13228 - DNA, 333 bp, Glycine max
  unsure at all n locations
cgaagtgagacagtgtggaagagacagnccgcctacttttatttgacgaccatagagtggtacgtggagatatgtcgcgtgagtcacgataccttggggacgctccgtggggtgctattgcccaaaaccaagcttgatcaatcctgacccaacccgggcataatcagtcatggagaacctgtgacgtacctaaacacgcgagctcctggtagtcaaccaataaaagaacaaataccacaaagcaaggatgcttgtgtggaggctggccacctatggatcttgagtgatatctacaatatggcctctcgtaatcgattaccaccggtgtgttat

SEQ ID NO: 13229 - DNA, 395 bp, Glycine max
  unsure at all n locations
tattaagaaaatcgtccgatcgttagttcgattaatattaatttgagatttgattctcttatataatgtctcgatttaaatttgatggataaaaaaaatacgattaaaaataaatatttttatatactaaccaatataatgatgaaaaagaaaactcattaattatttttatagacgcattattgaatgacatcatagatttttatatactaagcattttctgatacatgtttgtctgtttttttaacatattcttggcatgagccgagccaagccaaagccaaacgaggagccacgccactaacatctttctcgctgaaacgacgacaattaanattatctaaccttcacgccagttcgctgcatccaacgagaacagcgcgactacaattaga

SEQ ID NO: 13230 - DNA, 313 bp, Glycine max
  unsure at all n locations
tgtaatcgattacacacatactgtaatcgattaccagaagatttttttcaganaacattctcaacagtcacatctttttgtgtggttcttgaatgagtatcataggcctataaatatgtgacttgagacacgaatttgataagagtttttcagaacaaaaaggtcttatcctcttataaagagaaatcgttttatcctcttacaaattccttggccaaattacttgtgattcaataaggaattatttgaatgctcaaattgttcaatctatctttttcaagagagatttcttcttctcttcttcttcattctg

SEQ ID NO: 13231 - DNA, 382 bp, Glycine max
  unsure at all n locations
tatttgtaantttttctctctttaaaatgagaagctaggttttatagattatttatttatttatttaaaagctcttaaaattataatgagcttatatttaaagaagataaaaatagaaaaataagctctttaaaaaagctcattgaaggcgcttttgaccaacttaagtgagctcttttgaaaggagcacacttcgaatcctatctcaccccttttttatgcttattttgtttctcaccatcacactatatttggctgatatgtatatgagctgatnctttatttgattttcaaattgcaaactaattgattctgtatatatatatatatatatatatatatacacacacccacacacacactgtcaatgccaaaaatacaa

SEQ ID NO: 13232 - DNA, 359 bp, Glycine max
tctcccgcaattttctataaatagggggagatgttaagtataaaatggttcagccccttaggcacttctctctcttttgaatttgcttaggaaaattgtttccgtgaagaaaatccaagccgaggcacttccgtaacgtttccgtaacgttttcgtgagtgatttcgcgaaggttttcgacgttcttcattcgttctacatcgatcttcagccttcaacgggtaagtacctcaaaccaagcttttcaattcattctatgtacccgtggtggtccacattttgtttcatgtatttttattctcgtgttcatttacttattatacccgcttttgatgtgcttaaaccatttatttaagtca

SEQ ID NO: 13233 - DNA, 384 bp, Glycine max
  unsure at all n locations
tgccatgcgattgcggagaggttggagatccatctcaaccctatggtggtcacgccaagcacatcgacacatgagctgatcgaataatgcctcangattatcaggagtgtcacacnaaactagctagtatatgttaggtcttgacgcatgcggcgcacggatcagtcgtagtttatttacacantttatgttgaaattcgatctctatgttaggattgcctaatctaacttaatggatgatattaagattgtgatcaactcgctgcctattaaagtaatttttgaaaagtgttttttaaatatgttttaaatcttaattatcactatactatgtataattataagcacctggttgatgtcgtctagatgatcgatccaatcatg

SEQ ID NO: 13234 - DNA, 391 bp, Glycine max
  unsure at all n locations
tgaacaaggaaatntgtatgaagcacatgaattaataagatatgatcaataaataaaggctcattcctagatcatagatctattgagttctctatttcagatcttgaatcaaaaatgtcatcacacatganaatgggtgcatacttggtaactgcagtttgtttggtcaataatcaataatataacatctctcagaaagagatcgaggcaaaggtctcacctgagataaacaagtgtaagatcctgcataatacgtaattggattttacttccataacaagcaaataacattttaaacctggggagcactattacatatttacattgcacatactgtaaaaatcctaaaggcgttcctagactatcaatgatacgaagcaataggatcttg

SEQ ID NO: 13235 - DNA, 458 bp, Glycine max
  unsure at all n locations
ctaatctttcaaagataaccaattcaagctcaaaggtaattatgtaaagcaagattaatatgtactaaacaagcatgcctagctctaaacaatcaatacaatgtcacacctattaaatatgttntggcatctaaaatatcaaaatcaaaactaaaaaagatgagccttcaatctacaatgcattcgttattgtattaattcacatgctggggtggcatgtcttttaggttactactctgatctatactattatgcattaagatntgtaccaatatgtgcgctcaccaaatgggatattcatttaaaatcctttgtgttatgaaaactgaaaattaaactgctttttatatgtactatngaaggggcanngtgaaagcgcatctatatatatatatatatatatatatatatatatatatatatatatatatatgaatgggttaaacaactgaattgtn

SEQ ID NO: 13236 - DNA, 413 bp, Glycine max
  unsure at all n locations
ntgagggattggtctttgccaatgaaaggatcgatgtgggtctgaanaaatgcaaatttagtcatcctgcttggacgaatgaganaactggggcaaatgaagagggtgagaaagagggagaaacccatgctgtgactgccattcctatacgaccaagtttcccaccaacccaacaatgtcattactcagccaataacaaacctcttccttacccaccgcccagttatccacaaaggccatccctaaatcaaccacaaagcctgtctaccgcacttccaatgacgaagaccacctttagcacaaaccataaaacaccaacaanaatgaattntgcagcaaatagcctgtagggttcaccccaaattccgttgtcatatgctaaacttgatcccatatccactcanntattcaat

SEQ ID NO: 13237 - DNA, 412 bp, Glycine max
  unsure at all n locations
tgtaatgcatgttcataccacatcttatcaccctcaccttgcccccaatatatacgcatcttanagagtatatcttcttcattcatagaatttgctttatttaccaacatccaaggttcatatacctctttgcttttttaattttgatatgaatatccttcgatatgtcccctgaattcctacaatcacaatcactaattgatttaccttctttgtcattctctttcagtgcatgttgtggtctagccttcgatccacttcctttagagcttgctaatttcgagcaaccaatattggctagacaaactagtttctcatgacaaatatcctatcgtggaccatatttcttgcataagaaacaaaccaagtgtacataaaccttcatatttatggaggaaatatcactccatga

SEQ ID NO: 13238 - DNA, 438 bp, Glycine max
  unsure at all n locations
tgcatttggaattgcgaaagccccactccatcattaggatttgtacctgacatctcaaacaaacaaatcaaacgtaacaagacaattatagttgctgtttgaatacctcacccactcaagtgtatcacacaattatggcttttctctaatgaaacactcttgccttttaccactctaattccccttgagttcttaagcaattcaagagattatggccacaacaaagaacaattcaccaatatgtgtaaggtaaggctagacaaggaaaaggttaaccaagaaaaaggctaacaatgtttttaggcacaaatgaaggaaataaaattcagaatttaggaattcaagtaacaatccttcatgcaaccaatatattaccttanagagttttttttnttaagttcttcaagcatgaaccattcagcccaatnnttttttttt

SEQ ID NO: 13239 - DNA, 358 bp, Glycine max
tgtaagcctattacagtagtgtacaaccgaattctttcttctcataaaagaaagaaggataaagggaaggtagtggttgttcctttaaaaattaccttctagcggagtatttataatgtatatgatcttacatggtatctatttgctctagtgagtgtatacagaacaaagagtcatttgagcaatatatttcaccacctccaaactgcaaagttttgtatgtcccatctcattctccacaaaatggtcgggaacagtttacagcatgcttgtggataccacatttgttctattggagaattcctttctacaactatgacgcgcatcaatatttgtggctgcctcatcacttttggta

SEQ ID NO: 13240 - DNA, 425 bp, Glycine max
  unsure at all n locations
tctatataagctgaaccattntatcaataaacacaagttgagttttattcagaaaattagagtttatctcttttatcttagtgagagtgattctcctaaattcttgagtgattcaagaacaccctggctgtatcaaaggactttcacaacctttgtgtgttgccctcgctggaaagagtgattctttccttcctatcatctccacccttgttctttcaaaccacaattccagaaaatccacctctgcccaaaattatctcgtgaccataactcccatttcacacactcaaattaagtgattcttgagcctaaattgaatttcaaaacgagacctttcacctcgttttggaatcacctcatttggagccctgtagctttccgtattgccatttctatatttctgtccagccaccacttaacctacg

SEQ ID NO: 13241 - DNA, 359 bp, Glycine max
  unsure at all n locations
tgagatgaggaagtgttgaagggtgaaacttcttgcttatattgttgaccacagagtggtacctggagatatgtcgcgggggtcaggagaccttggggacgtcaggtggggtgctattgcccaaaaccaagcttgaccaatcccgacccaacccgggcatagtcggtcagtgagaacctgtgatgtacctaaacaggcgagctcctggcagtcaacagataanaggaacaaagaccacaaagcaaggaggcttgtggtggctggccagctgtgaaacttgattgatatgtgagatatggactctggtaatcgattaccaatggtgggtaatcgattacaagggcttataaatgaagaca

SEQ ID NO: 13242 - DNA, 347 bp, Glycine max
  unsure at all n locations
tctcaaggaggtgagcttagttacgaaagggtgcgtgtagttaagctctatcttctcaaggaagttttctcaaagaatcttctcaaggaagttttctcaagaaagcttcttaaggaagctacctagtctataaatagaagcatgtgtaacacttgttgtaactnttatgaatgagagtcttgtgagacacaactcanagttcaacttttttccctttttatccttcaatttcttgctccacccctctctctttctcttcctctttctattcctgcattgaagcatcctctccaagctctttatgcaacgctcatcttggtggtgaaactccttcttccatggcttat

SEQ ID NO: 13243 - DNA, 425 bp, Glycine max
  unsure at all n locations
gtgtgacaaaaaaaaaacactnttatgatatcacttttctttttaccttctaaggatagtactaaaaaaaatttcctcggagttttagcttattttaaaaaaaattaattaaactttttatcactgtacatgacacacatgtttaatctagtccttgcacaaaaagaaaagatttccaaatcagtccttgtatattaaggctaccaaaacaaattagtagctacaactctgcagttctctgctgcaccatcacaaatgctgaattacaaattgagcacaagacagaatgaaccaaactagattgtccttcttatntgtaatcttcatangacatcagtagcctattattcttattccagacattccaaaaaatctgcttgtgttaattcttttgacattcaagcttgtgatggctgcacacactg

SEQ ID NO: 13244 - DNA, 327 bp, Glycine max
  unsure at all n locations
tgcatgggatccctgtnacaaattatttgaagnnagtgcactaatatttgaagggtacgcaaatatgaagcgaaaacgcacgtggagggaaagaagagagttgtatatataactgcaccaaattgtcatacaatgagggttgaacgtctaagagtgttctcaagaagggtgataagagagttcacatttgtgtcactggcgacatgggttgagtaaatttcctccaaaatctgttcatcggacatgcatggatagtggctcctgctcattctcagcattctggaggagagacttggtagacattgacattattatgctcatctctcg

SEQ ID NO: 13245 - DNA, 376 bp, Glycine max
gtcttgaaatcgtacattaacagctctaatatacaacttgagatcttctccttctacttctccactcatgattaaaatatctacaagaatcgcgttagaagtgatcgtaaataggccatacaatatcctcacacaaatactctcacgtgtatatactaaattcttttcacccgtgtgtcactctttttggatctttccctctaatagtttcaccactcttgccttataccacccaacttctacttatgaactctaaagtaagaacatctgcggttgatgatacatgacaataaacaacaaggagtccatgataactttattgagtaagatcaaccatagagcaaatcgagaatagcgaattcgacacaagggattt

SEQ ID NO: 13246 - DNA, 348 bp, Glycine max
  unsure at all n locations
nttgtgtacataagttntgtacatcacattatatgtattggtgttagtcaatgaatacgactaacttttgtgtataaaacttgtgtaaattgtatcaaactcttccaatttatggttattttgtagtgttataagtattttctgttaagtataggtaataaatacttagtacttccattttgtgtgtttaataatcattttctctcaatttcaggttaattaggcaagctttgaaaatgttgtttttcatcttctcgctaagccaatctgctggcttagcgagcgttcactaagcgcaacactcatgggctaagcgcgaggaagactctagaagaagatgagctgtac

SEQ ID NO: 13247 - DNA, 294 bp, Glycine max
  unsure at all n locations
cttgcttctacaaatatttctgcctgctgttattaacaaaaatcaacatttcactctaaaaataagcatggatgtttgctgctttaattacaagggaaaaatcacagtccaaattgacaatactctgcaatttgcacacgtttctaaaaattaaatgtctcacctgcaaaactgacatgaaatgaanaactcataatctctttgttcactttgaaaatcatcatanacgtttgcttctttaattacatgggaaaaatcacagtccanattgacaacactttgcattatgagttg

SEQ ID NO: 13248 - DNA, 418 bp, Glycine max
  unsure at all n locations
tccatcaggtggttggcccatttcttcttgactcanattcttcaagggatggcaccaatcctccttccaattcccaatatggcaacccaaaaacaaggaaacagagacaagcaataaccaaagaccaaaaaaaatgaaatgaaagctaaaccaatggagttttaacaagacaatttttcaaggattattcaacaattaaatcaatgaaaaggacatagaatcaagctatgactcaaagagaaacttagaatggctctagagtagagtaaaanaacaaaaaaaaaaagactcaacaaacccctagctttggcacttgttttcacagtaaatttaaattgaaatttcggaactaagattagtataacataggcaccaattatagaataatttttgagacanaacaacaagcacacttccc

SEQ ID NO: 13249 - DNA, 292 bp, Glycine max
gacctatagaaactcaagcttcacatggagctacatcatgtggtatcagagctcaccatcaataacttgtggtgttacaatcaccaccaccaccaccatcaatgtctctgccaccatcattgtccctgccaccaccatcattattaacaataccacctctgtcattgccaccacaaccactaccaaggtcattgcaaccaccaccacaccgccatcaccaatatcgctacctccaccaccccaccatcgacattgctaccacccccactatcgctgccaccacctaaagtga

SEQ ID NO: 13250 - DNA, 446 bp, Glycine max
  unsure at all n locations
ngatgtcattcanaacacactatgtcgacctatatgaagactatcatgcattgtttatgtaattgtattcattatgcgatataatttgttgtaacccgttactaaccaattaatattattaagtactcgtttggttaagcaagaaaattgttggcccaacaaaaatcatttacgcgtgcagcatacatcattgtcataattgacaacacataatgacatgcatgcgtattatagtttgaccgcgacaacacattggctgacttgactacacattctgaaggaaacataatcacgaaacatgttcacgcgttgtctattatttgtaaacaaagttaagcaatcgctcggtcacaaccatctatatatatgacagacacggctaataaatcacacattatcttattttcaaatagtctcccaattgatacacaaagtatgacattttt

SEQ ID NO: 13251 - DNA, 389 bp, Glycine max
  unsure at all n locations
tganaggaaacaccactgtcgttgtgaacaatgtatccatttggaaaaataaaacctaatgtggagttcacaactgtctgactgcttgtctctcccaagaattccatagttttttgtaagacttgggttgatactgaaacttgtgctttcttacagggttaggttgtgccatatatatagatgactnttaatatcagtgctgcatttttttaagattaaaaatacgcatgcacatgctttctgtatgtgttgtcaactacacgaatgacgtgacatgctttagcttgcatcagatctgcatgtgtagtcatggtgtgcagggtcctttcacgcgcttttatgtaatgcagacnnacaattatcatacacgatttttccacatgtgtagt

SEQ ID NO: 13252 - DNA, 394 bp, Glycine max
  unsure at all n locations
tatcctcaaagatatattttataagaattaaattcaatttctctcattcttgttttatgataaatttatgtatttttattttaaaattagaattctaaaaacatatccttttcagattgaagaatgaaattcaactaacctgcacgaagaataaatgattctcatttacaataaattaaaggtatactttttttaacaataatacatcttttaagttcatatttcttataattagaatcaaaataataactctcttttttttttaatgagagagtatgttataaacacagacatccaataacataacagagcagcactttaaagtggaagacacttgtccctaattttccgaaagatgccatgattcttacgtggaaaagaatatntcctttat

SEQ ID NO: 13253 - DNA, 396 bp, Glycine max
  unsure at all n locations
tggacttcctatattntgngaacctctccttcctcatgtgtacccaaacccaatcacctggttcaagcacgactttctttctgcttttgttggcttgccttgcatagctcgcatttttcttttcaatttgagccttcacttgctcatgcagcttcttcacatactcagctntagcgtgtgcgtccttatgcttaaacatagcaatgttaggcataggcaacaaatcaagaggagtcaaaggattaaatccatacactatctcaaatggtgaacaattagttgtgctatggacagcccgattataagcaaactcaacatgaggcaaacatgcttcccaagatntaaggtttttctttaaaacagtcctaagcagtgtacctaaagtcctattgacta

SEQ ID NO: 13254 - DNA, 435 bp, Glycine max
  unsure at all n locations
gcttcctagaagagagtagggggaccctnggtgatggttgtccacatattagtcgctgtagtgctaagtgttttatatgatgaaaatcctaccggccagagctaggtgccacccaggaacctatgggctacgttgacttctccctacaaaatgtcttctttctaggtaagtaccacatacaactcccaaagctcctggaaataaaattattgcgtacatatntagattaaagtttctaaatttatagttttaatttaagttaatttacagagtataaaaatgctacttaactcatatttttataaaactaagttttcatgccaaagctntatgtgcaaatgtatttttgagagtaatcaaacgtgtcttcaaaataagtttatcttttaaactgaatntgctccaacaagccaacatagcccatgtgttatggct

SEQ ID NO: 13255 - DNA, 406 bp, Glycine max
  unsure at all n locations
tatctattgtgtggctgggggataatttaactctacaagcaaaatatcctactttgtatttaataagcaatcagcagacctttctatttctattttttacacatttaaaactcaaacatataaaatatataacaaactaacaaagataaagacaaaaaaaaggaaatataaactcacctcacttgctgctgctgcccatcatttcactctcacaacaaataggaatcatgtaccttcatggacggatccacataaagctctaaggagatgattgctcccattaagatattttttgtacttaaatatatttaataaaaaaattactntccaaattgggccatatgtctaattcaatcacccgcacacctttcttcagtgcatntatgatggggacgtcactgcagtc

SEQ ID NO: 13256 - DNA, 352 bp, Glycine max
  unsure at all n locations
gcttaacaatcaatttcgagcgccttgatattntacgggactcaatcagacatccgagtaaaaagttattgtcgtttgaatttgctgagtgcttcaacattcaatttcgagcgtctcgatatattacgggactcaatcagacatccgagtaaaaagttatcatcgtttgaatttggtcagagcttcaacattcaatttagagcgtctcatatattacgggactcaatcagacatccgagtaaaaaggtattgtcgctcgaaaatcctcaaagcttcggtattcaatttcgagcgtctcgatatattatgggactcaattagacatccgagtaaaaagttattggcgtttgaa

SEQ ID NO: 13257 - DNA, 436 bp, Glycine max
  unsure at all n locations
tgtagaatggccagacatgatacatgtcagggtttggtttggttcaagggtaaaagtgatgccccacattatttccatgacacagatgcaaaaatgatgatttggaaactttatgcaaaactggtcatgcatgcacctatgtggacactcaagtgtcaaatttttatgctcatgtgatgctagggctcaggattcattccctctattttagtcaacccaatgtttccaaaatatgttcttttatccatttgtgcattcatccgagtccattntgggcgttcggggaaatntcactgcgttcacccttcgggtgtacacacatttttttcaaaaaccagctatgatcggcgaatntcccanagaagagttggtagtcatctcttttcaaaagcatgtcgngttttcagctaaacaacttattcttggtttcttttcc

SEQ ID NO: 13258 - DNA, 358 bp, Glycine max
tgcatgagaggcttccttggggaggaagtgttacacccctccaatagcaaagctcaccccatgggaacacacacccctccaatagctaagctcaccgccccccaaaatacaaaaaaaaagaccctactacaaagactactcaaaatgccctgaaatacaaggctaaaaccctatactactagggtacccttaacttgtagggtagggtgtccttaatttgtagggtaccctacaaacctaaaattgaccaaaatacaaggcccataagatggaaaacctattctaatatttacaaagataagtaggtgcatacttagcccatggacccaaattctaccctaaggctcatgagaatcct

SEQ ID NO: 13259 - DNA, 435 bp, Glycine max
  unsure at all n locations
gctgaaggaagaaagagagagcttgcggatgaggtgaaacagtttacaaggcgaaaaacagagcaaggaagcaaaagccttagcttttaggaggatcttaggtttaggagtgatttctaggtttctagaggtggaggagacatccccaccactgtgtaatctattattttctttgaaaatcccctttttacttgtgaaaggtgttgccttgtgatggaaggttaaacccctttgttgggaaattctgttgagaacttgatgtaaattcttatcctatctatttgaggttatttntatgtgttcattgcttatatctgtgctttaattactgcatgctattggtctgatcatccatttgtgtgtaaagttaggatttttatcattggaaaattgattaattcttagaactggatagagcaaggctagataactaca

SEQ ID NO: 13260 - DNA, 370 bp, Glycine max
tcaacatgttaaacatcgctcacctactgaaactatttaattattcaatatcctcggatcgaccaaagtatacgtataatataaaattaaaaaaatgtacaaatcaaagacagtcctacatgtaatttcagtagatttgtaaaattaaaaatatgtacaatataaagacagtgaatacctgcatataattactatacatgctaattttttcacgttacaattttttgattaaacataagctaaaattataacttgttgaatatatatatatatatatatatatatatgtatacatatataactcaccgtaatgtttggaatttaaaaataaaatcagtaatatattctaagaagcctataatgacaatat

SEQ ID NO: 13261 - DNA, 439 bp, Glycine max
  unsure at all n locations
tgtcacacaatctgtttcataatcatattagttgtactttgttctggacatcaatacaatatgcaaacgcacgtatctttctatgcnaataaattgtttactaatgtaaaaaggtttaattactctgccgtccctgaacttttactaaattctgtgatgatgtgcattntaatatantttttattcaggctangcttgattggacttaagaaccggttcaatgttgatctattattatgtaaaaccaattttaagattgccagtatttanactaacaagcataatttattaaaattattttaatcgatttgaaaattatcttttggagttacaaaattacttattaaattgctatagtttcattttataattcatttnttaagacttaaataatttgtaagtcttgaactgtttgatgaaatttaatatttctctggat

SEQ ID NO: 13262 - DNA, 416 bp, Glycine max
  unsure at all n locations
tacaagtgcccaaaccaagaattgtctcatttgtacaacncttagtatanattcagcaaactnaaagacaatggtnngaagagctcaangagcccaagagtttatactcaagatgcaactatgggttggagtttatttggatggattacatagcatttggtctaaagaactaattaaggcctattttctatttttcctttaattttcatattttattttcatgtaataagttcatatgactattgacatctttgaggtcaatttttatgtttttaggcttcccaagttattttcatgtaataagttcatatgactattgacatctttganggtaaattttatgtttttaggcttcccaagttattatagtggttagtgggaattaattctaagtggaataatttctaggggatgtt

SEQ ID NO: 13263 - DNA, 419 bp, Glycine max
  unsure at all n locations
tgactaggcgagttgattntagccttagtttcactttagttattagtcgattcaattaagaatgagaaatcccaaagagaaaacatccgattgatttttcgctttattttactaaaagggtatttttttgattattatattattattttacctcttttttgatttccaacgtggttacggcacgaccgaacggtcggaattcattttaaccgaaattaacggatgatacaattcaaacgatcagtgganatttattttatttttagattaggcgagaaatgacttaaataaatgactaaagcatgtcaaaagggggtatagaaagcgaatganaacgaatataaaaatacatganacaaaatgtggaccaccacgggtacatagaatgaattgaaaagctcggtttgaagtacttaccc

SEQ ID NO: 13264 - DNA, 385 bp, Glycine max
  unsure at all n locations
taacaaccttaganatcaagtgatcataaattccgaaatatatggggagtaaacgtatatacaattgtttgttgcttgcttgaatcttgatttcaggtattgtattgtcatcatcaaaaagggggagattgtagatgcaattgcctttgatgttttgatgatgatcatgatgatgtgttacaattgatgcaaatgggcttttcaagattaaattcaagacaatacttcaagattacaagtcacaacatcaagatgatcactagaatattaggaagggaattcctaattgaattagcanaggtttggccaagtgatttaaattaaaaaagtgtttctcanaggttntactctctggtaatcgattaccagaggatgtaatcgatta

SEQ ID NO: 13265 - DNA, 399 bp, Glycine max
  unsure at all n locations
nngatttggtttagacatgattgatacatgatttgggacttgtaggatttgatttgagcaagattggatgaggggaagtgtgattttcaaaatctgcacttatgcagaattttgctgtcaaaataggtgcagcaggattttagcttggtgcagaaaatgcttgtgtgtggttggctggngaaagagtagtatagaatgagttctggatgtttgctagtagatcccaacggtcacaatgtaggcttgtgcactatagacttccagtaaaactttggagtcgatccaacggttaacgaattggatcgaaggaattgttactgtggtctttaagtgagaaaagctgtgattntggttgatgtgttgagcagagttttctgcctttgctctgttttgcttgct

SEQ ID NO: 13266 - DNA, 183 bp, Glycine max
cgtaaatctccacgtgtcaacgggcttgtcagccgtgattgacgaagggcgcagaagacgacgttagtctctgcgtgctatcatgcttttcgtcttacagacaacaaaaagtttatacggataaccactcgggtatttccgcccgtcaacgtgactcaaaagtcagaatgacagaacttgtga

SEQ ID NO: 13267 - DNA, 337 bp, Glycine max
  unsure at all n locations
tcagagtctttgattcatcataagcatctacacctttcaatccctaaatgttcaatgttcatagtctgttatctgcatccaagtgaaagtccaactattactctcgtttcacgagtcttggatccaacaaattacaattcatggagcagatcaatgtttactgctttgagtgcaaagaataaagttgagttcgttgatggaaccattacacgcacaacccccttgatatctaatcatttttatatgatgcttggaagagatgcaatgatgaaaccctaatttgtggataaactnttcagcatcaacaaactanggaacctatntaggactctctgaa

SEQ ID NO: 13268 - DNA, 306 bp, Glycine max
  unsure at all n locations
agctnttcgtcttacagacagcananaagaatgtntatacggataaccacttgngtatttccgctcgtcagcgtgactcanatgtgagtatgacagatcttgtgatcgcggaagatgacgtaaatctccgcgtgtcaacaggcttgtcgacgcgattgacgaaaggcgcagaagacaacgttagtctctgcgtgctattaagcttttcgtcttacagaccgccaaattaatgtttataccgataaccactctggtatatccgctcatcagcgtgactcacatgtgagtatgacacatcttgtgagc

SEQ ID NO: 13269 - DNA, 589 bp, Glycine max
  unsure at all n locations
cacctcccacacccactcactacatgagcgaacaggtcgatgacccacagtatggtgatantaaacaancnagggtacagnnntnnnnncttgagccatagtagnccggcgaanncccnccgacccagggatgctctagaggcgacccgcaagcatgcaagcaagagatggtctaatctgcatattgcattaagcgcgggagcaagtcatggaagtataggccacgaaaatggtaaccaagagcaagagaagacaaagaccccacaaagaatgaatgaaacaacgacagccaatagattcgataacgatcggaagaagaacctatatgtatgaaacaaacgcaagaacaagtaatcagggcctaattatgactgatggcaggcataaaggaatcggacatcctaatgcacctccggagaagacatacaatatggaccctaaaaggcaacgaaaataccagcgaaagaaatgacgctgaatggaaggcatactggaacatacggcacaaccattggccatgacctacacacacgaagaaaacatgagaccagaaacaccagggacaatgacataagcatacgaatctacg

SEQ ID NO: 13270 - DNA, 429 bp, Glycine max
agcttttcgattcattctatgtacccgtagtggtccacattgtgtttcgtgcattattattctcgttttgtttactttttataccccctgttgacgtgcttaagccattttacttaagtcatttctcgcttaacttataaataaaataaatttccaccgaacgtttgaattgtattatccattaacttcggttaaaataaattccgaccgttcggtcgtgccgtaaccacgttggaaatcaaaaagaggtaaaaaataatataataatcaaaaagacatcttttagtaaaataaagcggaaaatcaatcggacgttttctctttgggatttctcattcttaatcgaattgattaataactaaagtgaaactaaagggctaaatcaattcgcctagtcaagctcgtccataaaaataggcttttgaagtt

SEQ ID NO: 13271 - DNA, 419 bp, Glycine max
agcttagcatgcactccatgcttagcccgcactgaaagcttagcacactgcatgcttagcgctcagaaagcccatagcgaagcccaaatgtgcgcttagcacataagctcgcgctaagcgcgaattcagcgtgaatattaagctacatggagcctatataaggaggaagaaacaaaagggaaagacataccgagtctcagaactctctagtgaagtaatccacagtttgagcctctcccttaggggaaaccctctttccttagtcattctccattctcttactattagtcatccatccccttcttctattagcctttgaagtgtaaagtctctcatgcctatgagaggttaaaccccctctgttggagcctagtagccaaagcccttgtaatgaaactgctcttcttatttattaatgc

SEQ ID NO: 13272 - DNA, 603 bp, Glycine max
  unsure at all n locations
cgcacgcccactctcaacccntagaatacaagggagngtaanaaattatacactgagcgcggtcacgaccttntacactantncagtnnaataggnaggtnnggccctgaaagccatggggagaccnggcnaannccannngaacccggcgagcanacaagaagaactgcaagcgagcaagcagcacttataccaaccagcaagaaaaaacatagaagcgggcacccggtgcggaacacgatccagataccgccacccgccaagtcaagagcaaccgaagctcgcgaacgacgaacgaaacacaacgagcaccaaggacaacacaggcgcaatgcaccggatgagcgaagggaccacaaagacacaaaacagccacatgactgaccggaaggcgaccgacatacgaaaaaagaggcgacagcgcagacagagagaccaaaacaggaaacggccgcaccgcggacaacaccgcaaagaaccagaaagagcgaggcgcacacaaccagaacaacagaacaggagcgccaagactacagaagaaaacagaaaggaaaaaagagacaccacgcgcaaaacaaggacgatcaagcaaggagacgaaac

SEQ ID NO: 13273 - DNA, 391 bp, Glycine max
  unsure at all n locations
ttgcttatagctcaatggacttaccttgaattaattcctttgatagcccttttgagccttgtttccctttccttgttatgaagctcactacaagccttaagtganaaaccatgatatcaccatatccttaaggaattttggagctttggaattgttttgggaataagtgtggggggttcttgtatcattggacaacttgttttgttggctatgcttcatgatgtaatttgggccatacttgatgtacattgtatattggttaaatgttggacatgctgaatgaaatgttgtttctcaaaggctatagagtaaaaaaaaaatataatcggaaaataaaaatcgaacaaaagaaaaagaaaggcaatatagttgagtgaataagatcttaaat

SEQ ID NO: 13274 - DNA, 396 bp, Glycine max
tagcttccatcaagtggtaatcagagcacaagagcttcaagtaggtgttccttaaacctccattaattttttgatttaccttctcttccattgttgtttcttcatcttttttctccatgtatctcctcacatgtcttgtgctaaatgtttttaacatgattctttagagtttccaccgattaaacttgctatagaaactagatttgattttctatggttcacaattgttgttcttgttcttgaaccatatattgtgtcgagtttacgtacctttgagatttgtcttgttatattctttggctgaaacctaaaccataaaattcttacaaatatattaaagtataagaaaacctcaataatctagagtgacttgttcacctattgcaagtttgtcat

SEQ ID NO: 13275 - DNA, 320 bp, Glycine max
agcttgtatcaatagaagagtatgagcctgtgattgaaagtatgactgaaaatgttagtcagattgtcagattgattgtgaaggaatgcattaaccatatcccaatgagagtgtgatctttaaattttgagagaaacgaatgtcatttagtactgatatttgcgtgaatctctgaagtatggactgactgcatgaaattgatgatgatgaagcccatgtttgattgtgatagccactttatccaacaagtctaccatgtgattgaacggaatatccctagtacttcattttgagctaaatgaattattgagtgattgaac

SEQ ID NO: 13276 - DNA, 420 bp, Glycine max
  unsure at all n locations
agctntgaaaactctctggaacttggacctttctctctttagaagtctctaaacatgcaaaagctttgataatttcccaaactcccctccaaaatctgatttcaggcttaaataggtggctttgtttgtgctagcacgcttagtgcaactatggaccgctcagcgtgcattagtggatttcggcttagcgcgtgcgtttctcacttagtggatggactgaagtggtgcgcttagcgggatgacccttcgctcagcgcatatgcacaactcatccttcttccagattcttcctcgtaaccggngagtgttgtgctcagtggatggctcactaagccagaagattggcttagcgagcggatgataatcaacacttcacaaactttctaaattaacctaaaattaagaggaaatggttattaa

SEQ ID NO: 13277 - DNA, 410 bp, Glycine max
  unsure at all n locations
agcttgcataccacgcaaccgaatgaacattattgctaatcgaagcttgagagtgaggaataatcatgggtacaattatgcacgattgcaaatatatgtcgagaaaatagctaatagcatatagtaattcggcaataggaaatggcctaagagcatatcccttgtcggngaaccagacaataaacataatgcttgcttaaatgagatatgcttataagaacatccaagaaagaaaagctaatgccaaatgtgactgaattgcttacaagaattatgcctattctgctaacatgaccatgaataccaaaatgctacaagaagcgggacaccttgcatgtcatcagtaagctcaactgagattctacgataaatcacatggtanaactatctttaagcagaactcagcaaag

SEQ ID NO: 13278 - DNA, 400 bp, Glycine max
  unsure at all n locations
agccttgttattactcaagaaaaggaagagaagaattggcatgtcataaatgcgtgtataacaaatattgaacatcagttacaagaggaaccctcttccctggcccagcgtgacccctgtccccatccctatccctcaccactaatntttttttctgttacatacgtgattgggaacagatacatcgttatatgatagcaagctatgcatatcaaagcttgagtcacatttgaggggtatcccaatcaaacctgcgctgtgaatagacctcataatcaattggcctagtatcaacaacgtaatcaactgtgtgaatgccctncaaaagagttggttgaaaactatcattacttgaaggcagtaatttatacacgactaataattcaagagtgaatatagc

SEQ ID NO: 13279 - DNA, 436 bp, Glycine max
  unsure at all n locations
agcttgacttacgcagnaaaaacgtggtggctgtcctcaacagttttaaaagtataaattgatggttntaagtgtttaaatagtgtataaatgattactaatggatgctaccaagtttataacattatgtaaagaaaaaactaaaaattgaatgtgtttagggtcttgaaaagctttgtttttttgtgtaaaatgtaagtgttgctcacaaaaacagtttgaataaaaaaggttgataaacatagggaaaattgcgtgaaaagtggacccaatgagcaaccaaaaacattgaaaaatctaatattaaattcttttctagttttttaagagactcattnttcacacaatctttactacgtgtgggtataaggactcaagcttgtaacaccccgacgaattacaccaaaaagagaaggatctggagtctgtgtatgta

SEQ ID NO: 13280 - DNA, 244 bp, Glycine max
  unsure at all n locations
atcactcctacatctcatctctagcatgcattntctttctttacccactcctcacgtttggttttttagggaaaaacaccataactaaacgcgccgcaagggatccctatcgcaccagatccaaatctagaacgatgggtgatcaagaagagacgcatgaacagatgacagtcgacatgtcggctctgaaagaacaaatggcctccatgatggaggccatgttangtattgaacaactcatgga

SEQ ID NO: 13281 - DNA, 389 bp, Glycine max
  unsure at all n locations
agcttgtgagttgtgacatgtagtactacaaatacccccaccatacctcttttcccgttatcacaaactttgtcgaatgctattgctactctagaacaatgatctttagttaatctacactcaactgtaattccatcatataattaccttgcaaaccctaaaatcagagaacattgagtttgttgtagctccatatgaagtagatgctcagttagcgcacatgtgtcaacttggagtagaaaatggtggagttgtagcggtgatcacacaagatagtgatctaatagcatatggttgtccagctataagaactcctccaatactgtcatatcgtgcatgaaggtttactggtcttttgatatctngatatatatactatntcactatta

SEQ ID NO: 13282 - DNA, 430 bp, Glycine max
  unsure at all n locations
agcttgaagaactttccaagaaagtcatcccacgaacttgaattccactcacttaaagttttattacagctaggctatgtaacaagagctactctttttcctaccttgactttttatccatataaaaatatgaaggtttttgccgagaaggttttaatgagacctcatcctacaaatattatcaatgaagaaatatttcaacaatcacacttatgtcattatattactcctttnttaatattgttccccctagaataccctctttggctaaggttaaacttcattaatcataattagtagttccctcctgaataccctgttgaactaaggtttaacttccttaatcataattaatagttccttcctaaaaactctcttcggctaaggttaaacttcataataatcataattaacagtntgaattttcaac

SEQ ID NO: 13283 - DNA, 428 bp, Glycine max
  unsure at all n locations
agcttaagctccttcaactgcacaaggctcttaatatttgaagagtatccttgtggaaccttcacctgacgaagacactgacaaaaacttatcttctccttcttggacaaagtatggcaggctgggggcaagtaaattttcttcccatcagaccttggatgcaactgtgctcttatacccatatcagctagatcttgacgggtattcaagccatccttcgtcttgccttgaatgttaaggagcgtcccaataacactgtcacaaacatttttctccacatgcataacatcaatacaatgtctaacgtcaagatcacaccagtacggaagatcaaagagaatggacctcttcttcatatgcaactctgacttttatccttcttttgngtcttcccaaatacagtgttcaggtgttgaacccgctgatat

SEQ ID NO: 13284 - DNA, 266 bp, Glycine max
tgtttaaatgatgaggcataggtatagaatgtcttaaactatcgcttcgcgtgtttatatacatcttagtcttttatcatgcatactgattgatgagatctgaggcgggtgaagctttcttattctctaagtacgtaagaacttacttctactcgaactttggctaccaacatcgatataattgattgcctcgtttgctaatcgaatgtccaagtcaatctcagacataggaaggatctataccttatgataatctattaccccat

SEQ ID NO: 13285 - DNA, 394 bp, Glycine max
  unsure at all n locations
agcttcacctttttgtactcctcatagtacgtgcatgagaatacatgctctattatcatctcccactccaagtaggcctccagatcattctttcctttaaatggaggaatgttgagtntaataccatccattcggttatcgctaggaacaccatcattccctcttgtgctcctttcttcttcattatgatctctattctccatttgagccaacctctcatggagcgcatcatcttgatgtttcattaacctctccaaatgttgcatcaaagcttgcatttggaattgccagagccccactcatctttatgattatacctgaatctcaacaaacaatcaaccttacacacaatatagtgctgttgaatcctccccatcagagatcacacattatg

SEQ ID NO: 13286 - DNA, 390 bp, Glycine max
agcttgatccaagaagcacgttcatgctctgtctggatctacctaacgttgaatttggaaatgaactgagttacatgtaattcaaaaatgttattgaaccatggttgacgtattgattgttaaacaatggatcatatagacaagatggactacaacctttgtcatttagtccaattctcttatcttctcttctatattggtcatccaatcttctgtaatttggtggagcacccattcgtgtagaaaggaacgtccactctagtggttcattaacatatgttgtgttgaaattgctactattatctattgtaacatgttttcagttagacaattaggtgttgtccgctttataaggagcttagtattctacgattagagatcttgacatca

SEQ ID NO: 13287 - DNA, 421 bp, Glycine max
  unsure at all n locations
agcttgcgggcatgtaacattccgaatactaaaaagggcggtaagtgatcgtcagtgcccaagagatttggtacagacaaagagcaactccttgcaagtttccagttaaagagatacatgaattaatcgaatacacactctaataagaggatgtagaggttgtgcaagtatgagagtgtatagtggaagataaagatcatggaaggcctccaaganatgtagaaagacctaagatgaagaatcctttaattagactaaaagaacttgtgaatgggatgattttagagaacaaccccatggttgggctggaaataccaaagagtggaagagtaaagagtccaaaggagaattataggttatcaacacattacatggtcaagcctaaaatggaagaaaatagtccatggtggtgcatgtggaa

SEQ ID NO: 13288 - DNA, 418 bp, Glycine max
agctttaacctcattgtctctcacaatctttagatttgggagccaatccaatccttgtgtccggactctcagccacttatgatagccgccgatgatcccattactgcttcccctaagctctctgtcctttcttcacgccgcatcccatgccttgcaaactccttggagtacctttgcattggggtcactgaaaccccgtgtaatgaaaggcgtgatgcttttgtctaatggcgctcctctcatggggtagccaagctgtcttatggcgaggacatgattataatttatacaaccccttgttcccattaagggaacatgaagatagaatcttgattcttccttccttctagtgagggaaccaattaacagacgcccctctatgctagccaagagttggtcccaattcgactatctttct

SEQ ID NO: 13289 - DNA, 400 bp, Glycine max
  unsure at all n locations
agcttgtacagttaaatataccaaggtgctgtgctgaaataagactaacaatntgtgcataagcttagacgagcccttgcagttcataatcagtattttgtagatgtctacttgcgcatgcatatactatagttaaactattatacagatgatgggcataaacttattgaagcctaaagataaagagtatactgagtgcctgngtggtgatgtgctaggctaanagcacggaatttggtacccttggccaagttgttttagttcacttaacctggttgtacagtgcatatacaagtctttactcatttaagaaattattacaatgtgtatatgctagttaatatcttgagggtttcgggcttcccaatacaagaataaagaatcagctggtaaacttgat

SEQ ID NO: 13290 - DNA, 397 bp, Glycine max
agcttatctcgttgaacgaaagacatcctataagtacattgcataaggtacatgcatcaattaataggtattttatcattatggactttgaacttttctcgtctccgaaagtggtcaataagtgaacatatcctatattttcatttgtttctcagcaaagtctatcagttcctctgggaatggctcaatatagctttccataatgcccaactgtttaaggaggactagtagaggatatcaaccgagttcccattgtcgagtaggaccttgcacactaggaagtttgccacctatatcttgatgaccatcggatcattgtgacatctttcaatgtccccgaaatcctcgattgtgaaaataataggcggcatgcttctaaagacctatttctcatctt

SEQ ID NO: 13291 - DNA, 435 bp, Glycine max
  unsure at all n locations
agcttaatcccttgaaaattgagggtaggagatttgccctggattcatctagggactactttccttagcacccttatgttcaatacattcgataaataaaaatagttttttttttgctatatgcatgagagtttcaatgctagttgtcacacaaatgtattacacaaaagtacctatcacataaagagtggctatgcaatttagaatgcatcaagaagttttagattgtgtggctacattctttggaaccaaaggcaatgcatcgaanaattactacatacccatatctaacgggaatttctattttcttggttggctnttctgagggagacgtcaccacatgttatgcaggatggtggaagcagtcaatattgtatcattatcatgaatttgcanagaatattactcggtgaaagagctgtatatacaatgatg

SEQ ID NO: 13292 - DNA, 184 bp, Glycine max
actgggatagattctgaatagtttgccagccgttttggatggctatctttatttaaaggaatctgtccctcatattgtatgcacaaaattaatttggaagctgattacaagctcgtgagacaaccttcaagaatgcttaatcctagtatgaaagaagaagtaagaaaggaagtcctcatgttgc

SEQ ID NO: 13293 - DNA, 398 bp, Glycine max
  unsure at all n locations
agctngagatgaggaagtgttgaagggtgaaacttcctgcttttattgttgaccacagagtggtacctggagatatgtcgcgggggtcaggagaccttggggacgtcaggtggggtgctattgcccaaaaccaagcttgaccaatcccgacccaacccgggcatagtcggtcagtgagaacctgtgatgtacctaagcaggcgagctcctggcagtcaacagataaaaggaaaacaagaccacaaagcaaggaggcttgtggtggctggccagctgtgaattttgtgtaatatgtggattgtggcctctggtaatcgattaccaaggcggggtaatcgattacaaggcttaaaaatgaagacagggggctaagatggtctctggtaatcgattaccat

SEQ ID NO: 13294 - DNA, 428 bp, Glycine max
agcttaggctaaactttagtaagctacttgagctgagtctagtcttacatgagggatctgtgaacgaaactcagtttaagttagtctaaacctaagagggctgtctaaattgggtgtagtcttaaatgagggatctacggacgaagcctggatattcagcctgacgagggatcgagggtttagtaatttaggctacaacatagaacacaagagcatgattgattagagaaatatatttatatgcatcggcttgtttgttagaaagacccaacatatctacctattgttgtcattttatagtgtttagcatacaagtttagtttaaattctatttgaaattatcgcttatacatgttctctcaacaatgcttcgattctgaacttaattcaggctaacattagctccctgtgttcgatactcggattca

SEQ ID NO: 13295 - DNA, 314 bp, Glycine max
agcttctgttttcaattacgagcgtctcgatatattatgggactgaatcgcacatccgagtcaaaagttaatttcgtttgaatttgcttagagcttatgttttcaattacgagcgtctcgatatactacgggacacagatcgacctgcgagtccaaagttattggcgatgacatttgctcagggcttctgttttcaattacgagcgtctcgatagattacgggactcaatcggagatccgtgtaaaaagatattgtcgtgtgaatattctcagagcttcagttttcaataccaagcgtctcgatatactacggg

SEQ ID NO: 13296 - DNA, 383 bp, Glycine max
  unsure at all n locations
aggcgaatcagctcgtactcgagatactctgagtgacctgctgcatgcaagctntaccatcagaatttacatatgcttcattaacagaaattaccatccacttaaagttagcaatgagccattaacctacgaaattaaaagaacttaaatggttgagtgtaattgaaattgtggcaaccaaaagtcaccccgaagttgatgcctaagctgccaattacgcccttattacaacttagactaaaccaaatcgtcttagaatatgatacagtgacattntnttaattaaaacaatgaacattgttttttactacacacattataagatnggtatcaataactgtcttagaatgtcattgggtggcagtgttgaattatggggaatg

SEQ ID NO: 13297 - DNA, 422 bp, Glycine max
acagtgctgatgctgactatacctacccatcctgtagctcttgtacagcctgtccaccctcagactatgatccacagctatatctaatgctctgatgcccaactgacgttggatggcatatcatttaattttatggtttccgaacctagaattgctagctcagattacattcagaagcatgctactaacagcccatagaatctccagcactgactagatcagagctgaaagacgaactctgaattgtaagcctcaggatgctaggcgtcagacactctaatcacagtctactataacactagagatctaccggctccgttcatctaatgatcgtgtcgccgattcatgttccctctgatattagaagccgaatatctacacgccaattactcggagcttgatgaagatagaacacaactccg

SEQ ID NO: 13298 - DNA, 420 bp, Glycine max
  unsure at all n locations
agcttgataacacgcagagactaacgtcgtcttttgcggccttcgtcaatcgcggccgacaagcccgttgacacgcagagatttatgtcatcttccgcgcttacaagatctgtcatactgagttttgagtcacgctgacgggcggaaatacccgagtggttatccgtataaactttntgttgtctgtaagacgaaaagcctgatagcacgcagagactaacgtcgtcttctgcgcccttcgtcaatcgcggccgacaagcccgtttacacgcggtgatttacgtcatcttccgtgctcacaagatctgtcatactgacttntgagtcacgctgacgggcggaaatacccgagtgtgtatccgtataaactntttgcattctgtaagacgaaaagcttgataacacgcagagactaacgtc

SEQ ID NO: 13299 - DNA, 416 bp, Glycine max
  unsure at all n locations
agctttatcattgaataattgactttgaccaaagagaagagagaagaaagaaggaggaagaaaagtcacagtttcctcccttcttcctttccaatagtaatagctgttgctaacaataaaaagggtcacccacacaaccactttctccctcatcatcgctcgctcaatcgaggtcttctcgatttccttctctacaacacaacacaacacaacgctctcttctcttctcttgcaaccaaattacaacttgttccactctctactactctataaggtaagcctttcttttccttctttcactcactcatacataaaaacttttcatcttcgcttcttttcggtggctcttcttctgngtagatccaagtttcaaactttctttggttatggatttggccccgacccaccctttcttc

SEQ ID NO: 13300 - DNA, 408 bp, Glycine max
agcttgttgcataaaaatatattaattgggtgagtgaaaaagttttgatcaatagctcccttgggtatagttcttaggaaacttgcacaaaaaagtaagattgataattagttacgtgacggtataatgtttacttatttgtaagaagagccttagtagcaactttccaaatcacaattctacaaggtgttcatgtgtccaagaaaagtttattctaaaattacaatatgtcagtatgaattcatgatatcatataaatttgatactcacataaagttaagagtgaatgtttgaaagttagcggttagcttatttatgttcagatttgttctgaaaccttctaagacatcatcttataattgttactttgaatatttaaacaataaatataacaccctttgactgccc

SEQ ID NO: 13301 - DNA, 396 bp, Glycine max
  unsure at all n locations
caagctaacatacttagaaatcaagtgatcatgtattccgaaatatagggggagaaaacggatgcacantttatctataaacaattgtttgttgcttgcttgaatcttgatttcaggtattgtattgtcatcatcaaaaagggggagattgtagatgcaattggctntgatgttntgatgatgatcatgataatgtgttgcaattgatgcaaatgggcttttcaagattaaaattcaagacaatacttcaagattacaaggcacaacatcaagatgatcactagaatattangaagggaattcctaattgaattagcaaaggtttggccaagtgaattanaataaaaagtggttttcaaaggttttactctctggtaatcgattaccagaggatgt

SEQ ID NO: 13302 - DNA, 344 bp, Glycine max
  unsure at all n locations
agcttgcatttggaattgcgaaagccccactccatcattaggattagtacctgacatctcaaacaaacaaatcaaacgtaacaagacaattatagttgttgtttgaatacctcacccactcaagtgtatcacacaattatggcttttctctaatgaaacactcttgccttttaccactctaattccccttgagttcttaggcaattcaagagattatggccacaacaaagaacaattcaccaatatgtgtcaggtaaggctagagagacaaggaaaaggttaaccaagaaaaaggctaacaatgtattgaataatatttggatgatgtccattangaaatgtcg

SEQ ID NO: 13303 - DNA, 415 bp, Glycine max
agcttttcgattcattctatgtacccgtagtggtccacattgtgttttgtgcatttttattctcgttttgtttactttttataccccctcttgacgtgcttaagccattttacttaagtcatttatcgcttaacttaaaaataaaataaatttccaccgaacgtttgaattgtattatccgttaactgcggttaaaataaattccgaccgtttggtcgtgccgtaaccacgttggaaatcaaaaagaggtaaaaaataatataataatcaaaaagacatcttttagtaaaataaagcggaaaatcaatcggacgttgtctctctgggatgtctcattcttaatcgaattgattaataactaaagtgaaactaaaggctaaaatcaattcgcctagtcaagctcgtcccataaaat

SEQ ID NO: 13304 - DNA, 423 bp, Glycine max
  unsure at all n locations
gcttggtccccaacgctctgttcaagctttcccaaaatctagaggtgaatctangatctctatcagatactatactagatggctcaccctataatctaacaatctcacttatatacagggaagtcaacttctccaaggaaaatctgatattaataagaatgaagtcagcagacttggtcagtctatcaacaataacccaaatagaatctaaacctctaggggttctaggtagtcctaccacaaaatccatggaaatactgtctcacttccactanggtatctctaaagatagtaactttcctgaaagtctctgatgttctatcttagccttctgacagattaggcatgcatacacaaactcactaacctctctcttcatattgnngccaccaaacatcatctttaaatcctgatacatcttgt

SEQ ID NO: 13305 - DNA, 434 bp, Glycine max
  unsure at all n locations
agcttatgctgcanacatctacaacagaccttctcaacctcagcagcaaaatcaaccacaatagaacaattatgacctctccagcaacaggtacaatcatgggtggaggaatcatcctaaccttagatggtcgaatccttcacaacagccgcaacaacaaccttattttcaaaatgttgctggcccaagcagaccatacgttcgtccaccaatccagcagcaacaacagcaacagccgcagaaacagcaaacagttgaggctcctccgtaaccttcccttgaagaacttgtgaggcaaatgactatgcaaaacatgcagtttcaacaagagaccagagcttccattcagagcttaactaatcagatgggacaattggctacacagttaaatcaacaacagttccagaattttgacaaattgccttctcaatctg

SEQ ID NO: 13306 - DNA, 417 bp, Glycine max
  unsure at all n locations
agcttcaacatcagaccacttccagggtgctggaactacttcacatggacttgatggggcctatgcaagttgaaagccttggaggaaagaggtatgcctatgttgatgtggatgatttctccagatttacctgcgtcaactttatcagagagaaatcagacacctttgaagtattcaaggagttgagtctaacacttcaaagagaaaaggactgtgtcatcaagagaatcaggagtgaccatggcagagagtttgaaaacagcaggttcactgaattctgcacatctgaaggcatcactcatgagttctctgcagccattacaccacaacagaatggcatagttgaaacgaataatatgactttgcaagatgctgctatggtcatgctncatgccanagaacttccctataatctct

SEQ ID NO: 13307 - DNA, 400 bp, Glycine max
  unsure at all n locations
gcttgtatgacttgagaagtttcttcacaggtgtttcttttatacttctcaccgatttgcttccaacgaatntaattctatctaaaaaaatcttcggtccgtataaatgttccttttctttgcttgcttatgattatgggtgttcatacaccgatttggggttatatatctatatatgtatatatatataacaacaaccattctttctctgctgaacgtcttcttttctctctttgatatgatgaaacgcactaccttgctgatatgttgtatttcaatatttggggatcagttctggtcatatattggttgatggatcttgaaatgttaacatatctctttatatttacgtttaacacaatgtcatgtgatttcaacctgctgaaagacatgcatgaca

SEQ ID NO: 13308 - DNA, 421 bp, Glycine max
  unsure at all n locations
agctntaaccgatcgtttaagccgttttctcacctaataaatgataaaatgaatttcaaccgatcatttgcgttgtaatctcatttaatcactgttaaaacaaaatctaaccgatcgttcacgctgtaacctcagttaaacaaaataaaagcaaaataataataaaataatcaaaatatcttgaaaaaaaataataaaataatcaaaatatctttgaataaaataatcaaaaaaatcaatcggacatttttctttggaagtttccttggatcaattaactaataaccaaagtgaaactaaggctaaaatcaatntacaaatcatagtttgtccgtaaaaatcactaaaagaccatttaaggtccaacgccttagacgggcctctntgcttatatcggttaacatggaccgttcaaaagcat

SEQ ID NO: 13309 - DNA, 412 bp, Glycine max
  unsure at all n locations
agcttgtatttaanaatgttntanaaatacttttaattaatatttgaatntttattcctttattaatatatatgtgaggggtagagggtgtcacaataaccacacgcagtggttacatagattgtatgttttagttttgttttgctattgcctgttgtttgtggcatttgaggaagggaggactcacccttgcaaccaccattttagggggaggtcatggagcatccacagaggatgttcacttggatcaatagctaccgctacaactacacgatggaggaagaagcgctcctccacacacactttggttacatctggtgccactntntgttgttagatgagcctangataccatcgatcaccgtagagacacacactacgtatcacttgtaggtcttggtaatgacaactc

SEQ ID NO: 13310 - DNA, 421 bp, Glycine max
  unsure at all n locations
agcttgttaatacttcaaatagatttgacacatttaattaatttatgataccaagttagtaataataaatccttaaaattagaaatgaaaaaatgaattaaatctataaggttgactcatttaacctactaaatggagtgagttggaatttccaaccactctcaaaactagactcaatctagctttttttttttgggaaggtattggttgaatctattgaaacaaaactctttttagaagcttaagttttaatgataacaaacttttaagaagtaaattataagttatctaaagagatggtttgctttgagatgtgttttaataagacagaacttgatcataagcataaagaaaggtgtgaagcctttagaatggaaagtcttttanacatagattcttcctattaaaaataggactacca

SEQ ID NO: 13311 - DNA, 420 bp, Glycine max
  unsure at all n locations
agcttctcgggtggtgggtttgtacgaccatctctgagaccttaaaaagtgttggtagtttattagatgatagttgatagttgatagttttagagaattattttagaaagaagactatgtcattgattttttggatgatcaattacaacataccaattgcctatttataggctcaagtcaccaacctctcaatggcggtgaatgtttctacattactttaggtctttctagagttttcatgatagtactagattcttctatcttatacatacacttatagttctagattgttctatcatatttatacacattatagttctagattgttctaccatattcatacacactatatttaagaatattctaganatttatagcaatttcaacactcctccttgatgcanatttctgtgactccga

SEQ ID NO: 13312 - DNA, 400 bp, Glycine max
agctctacatcagaatttagtaatgacccactaacctagaattaaaataacttaatgccattaacctagggaattaaaaaaaacttaatggctgagtgtaactgaaattgtggcaaccaaaagtcacccccaacagccaacaagtcagccaccatttggtctcccaaaaggctgatgcctatgttgccaattgggcccttattacaacttgaactaaacctaactaaagcccttttagttgattaacccaaaacatattgttggtcagccaactttacaaggattgggccattatttagacaaactaaacactctaaaatcgagacaaggtggtgtcatttagtcctcctccattagggccatgatacaactcacaaccttggacttttctccttgaaac

SEQ ID NO: 13313 - DNA, 410 bp, Glycine max
  unsure at all n locations
agcttgtccttaaattcagttaagagcaacgcaaagctcacattatctgcttcaactcctaaacaatccaaaatttttggcttctggttttatgtcaatacatcaaaatcttatgttttacttgtgtcatcatgtaatgcttcctctactattgattccataaaacagaaaaaaaaacactaaaaaatgaaacctaatatcatcaacaacataaaccaaaatttttggctgctggttttgtgcccattccccacatttgatcttcgatgatccaatctacaaatctcccccccgccccccataaaaatgaataaaagaaagaaaataaaagaaacttcagaaaccagttcagaaagaanaaagcgctaaatttaaaatccaattgaaaaattaaatatgaagaaaaatga

SEQ ID NO: 13314 - DNA, 417 bp, Glycine max
  unsure at all n locations
agcttcccgtcagtgttaatggcggcacccacgtcgganagagaccctgcatgttatttgtttagaaacgaaccccctttggtaaattgtttgtaaaacaagccctgtacggtaaatttgccgtgctttgaactatttcataacaaataaatgaattaaacaaaaacacgtgtggtaaccttcttttcagtctaggactctaagggagccactcttttttccccttcctagtnggatttgttgctctcgaccaaagcagaaaagtaaagctgaatggggaataaggaagcagtataataaggaatcaaaaccaattcttcacatcacatccattggttntttttttttnttgtcctttcgttggttaagaattagatattacatccctttgtttgtagttaaaaaataattttaatt

SEQ ID NO: 13315 - DNA, 319 bp, Glycine max
aatcaatgttggggggtggtgatagatgcacaagaacttaggttcaattgtcgtctcttccactatgagattgaatgtctgatttgagtggatgcaagttcttgttacttcatcctcactaataaatctcacagtagcacgcacactgaaagctcacgtgtactctctgttattgcctgagacaattgttagtcgatgaatacaactagcttctgtgtataaaacatgtgtaaattgaatcaaacctccaccatatatggatgctttgtaggattataaatactttttgttaagtacttgtaatagacacttaatactt

SEQ ID NO: 13316 - DNA, 397 bp, Glycine max
  unsure at all n locations
agctttacatactcgcctagatctctttctgaaacgcgtctcgaactcggacctccacccggccgagtcaaaggccgagttcgagtccaacgcgctgcaaggccctgttgtctcgggaacgagtcanggaagcggcgagtacttcctccgagtcggaatcggaaagccaccgagtcaagcctacgtggttctcgacaccggaagcgacgtgagctggatccaatgcgcgccgtgctccgaatgctaccaacaatcggatccaatcttcgacccgatttcgtcgaattcgtactctccgatccgctgcgacgagccgcagtgttagtcactgtacctctccgagtgccgcaacagcacgtgcctctacgaagtcttctacggtgacggattctacacc

SEQ ID NO: 13317 - DNA, 432 bp, Glycine max
  unsure at all n locations
agctntgatcaaaatctaacgacaataactttntactcgaatgtccgattgtctcccattgtatatcgagacgttaaatattcagaatagaagctctgagcaaaatctaacgacaataactttttactcggatgtccgattgtgtcctgtagtatatcaagactctcgaaattcagaactgaagctctaagcaaaatcaaatgacaaaaaaattttactcggatgttcgaatgaatcccgtaatatatggagacgctcgtatttgaaaacggaagctctgagcaatatcaaacgacaataactttntactcggatgtctgattgtgtcccatagtatatcgagactctcgaaattcataacagaagctctgagcaaaatcaaacgacaatanattttaactcggatgttcgaatgtgtcccgtagtatatct

SEQ ID NO: 13318 - DNA, 191 bp, Glycine max
gccggagaggtcgatgatagataagaactaccggactcgaatatgttatgggagattgtgtttttacatggagtactattatacaagacattgtgacactttttacttgtgatgacgagtatgtagctgcaacttcttgcgcatgttatgccgttaggcttagaacatagttggacgaactatagttgttg

SEQ ID NO: 13319 - DNA, 540 bp, Glycine max
  unsure at all n locations
cccaccgcacccccaatacttatgtgagtattaacaatggtgtaccccattntaattcaggatttggnggcgtttgaagctgtgagacatgaaancaggcgaacactagccccgggatgcattaagacggctgcagtctgttagctnttattataataactgactcaccatatacctagacgctaggtgagaacgacaatccttaccctttgtagcaaataacaagaggacaatgaccatatcccatcatagacgaagcgaaaaaacaagagagatagataatatccgatcaaaggaagaaagagaggaaaggaaattcccatatagagagtgggagaagaacaaaataaaaggaaacaaggaaccgagctcttggcaatgatcaaagaaaacaatgaaataacaataaggttatgggcatacaaaatcgaacaattcgatagtaccaaagaacaaaaaagatatggagccatacctagagtggcatctcctatgataccacaatatctggcgaagaaatatacctttgcgatagaaaaa

SEQ ID NO: 13320 - DNA, 91 bp, Glycine max
atcttacagcgacgcagctgccgctttttggagctaggctttgctcactcactcgggtcataggtaagctcgatctccttgtgaagcttgc

SEQ ID NO: 13321 - DNA, 393 bp, Glycine max
agcttctggctgagaagactaagaagaagctggaggaagctgcatagtcaggaagcgttgatggcgtcatcgaccctccatcccccgtcagacgccacgtgaagtggaagatggcccgcaccaagaaaacaggggagatgacgactgatgccgcaaaggaaattgcttaaacaattgtaagtcattttcaactaaccattataattatatttcaatattttgtgaatgccatgtacaactgtgtcttttctgtgcaggattcctttgaggagcaagtgacacaaggatccttcatcccacatggacgtcaggatgttctcactgctgctattggacgtccagagcaccctgtacgtgttcatgctgctggagccggtgtcaccatcaagcaat

SEQ ID NO: 13322 - DNA, 411 bp, Glycine max
tagcttaacattatgatcaaatttatctgcttcaaccagttacagaaatgactggtcacaaagtaatcactatatcataattgatggataccaatgtaaccataaatgttatacattcacagtgaatgaaagcacctcacaacaatgtaatatatttattgtcacataatcatcaacaatgctacaaatgctgataacacatttactaattctatcgaatacaccaaaattgttattcctaactgatgattaagcctttttacaccgcatttctctatgctcttaaaaataagatgtccatttcatgcgaattgttgtcatggtgtccttgtcaatggcatccatcaccaaaccctacaagttatatatataacagtagtgatgcagataataaattgagtcaactgatat

SEQ ID NO: 13323 - DNA, 322 bp, Glycine max
agcttaaagagccagcatattggtgccatcgccttatgagtatgcaagaacgtattatctaccataaccgagtcgtgatgagacatcataaatcataaataataatagtaattgtacgtagagagaactgcatcgaggaaaacatgatggatgataactcaatgtacatgtggttaactggaattatcatattacctcggcttgagcccaaagattatagatgtacaatgatttgctcgatttacagagcagagagaggacatacctcgatcgtaaaggatacctatggaagaatggatgataggatgactcttatccgacg

SEQ ID NO: 13324 - DNA, 401 bp, Glycine max
agcttgtatgtccttctttggctgtgagaaggagttctcatccattacatttgcagatgtaagcacagtctctgttgacccagataactgcaatgagtttggttccagtccatcaagagagactttgaggttcacggcagtggtaccgaagttcacaacctgcaaaagtcaattgattcagattgatgacagtgctaatgaaagcataaatggatgctctccatttactttatccaccattttctccattcctatcgcttttataagatattgggaaaataaataaaatggaaatgatacacactttatgggaagtaacatttattcttttccaaagcttattgatggaataatggagaggacccaaacccaatgacagcatttagagcacaacaaatcta

SEQ ID NO: 13325 - DNA, 410 bp, Glycine max
  unsure at all n locations
agcttgtataatggctagacatgatacatgtcanggtttggtttggttcaaggataaaagggatgccccacattatttccatgacacaaaaatgcaaaaatgatgatttggaaactttatgcaaaactggtcatgcatgcacctatgcggacactcaagtgtcaaatttttatggtcatgtgatgctagggctcangattcatttcctctattttaatcaacccaatgtttccaaaatatgttcttttatcaatttgtgcattcatccgagtccatttcgggcgtccgggaaaatcttcacagcattcacccttcaggtgtatacacattntttcaaaagctagttacgatcagtgaatntntccatagaaaagttggaaatcgtctcttttanaagcatgttggtcttt

SEQ ID NO: 13326 - DNA, 430 bp, Glycine max
  unsure at all n locations
agcttacatatgaaggtcttgtaaaattttctgctcgggtatcaatccaggtaattggatatacccaaacccaatactgaaatctctgatttagtaattggtttctgaggacaaatatgacaaaccaatattgtaacttaattacataagagactaatagatttctatgacaganagaaaacataaagttcttattgaattgatggaataaaaaaagccaccaatgttaggtgagctgaaattatttatacctatacacacaagcacttaaccatagtgcacttataattagttctaacagactagtaactaactgtaaccaacagagaacaaacaaaaaatacatttgcaatgtatatggtaatggacagtattatgcctttgaaagaacatgcaaatacatgtggctgcttagttgtagacatgtttt

SEQ ID NO: 13327 - DNA, 312 bp, Glycine max
tttattgttgaccacagagtggtacctggagatatgtcgcgggggtcaggagaccttggggacgtcaggtgaggtgctattgcccaaaaccaaacttgaccaatcccaacccaacccgggcatagtcggtcagtgagaacctgtgatgtacctaagcaagcgaactcctggcagtcaacagataaaaggaaaacaagaccacaaagcaaggaggcttgtggtggctggccagctgtgaattttgtgtaatatgtggatggtggcctctggtaatcgattaccaaggtgggtatcgattacaggcttaaaatg

SEQ ID NO: 13328 - DNA, 425 bp, Glycine max
  unsure at all n locations
agcttgaaatgaggaagtgcggaagggtgagacttccttcttttattgttgaccacagagtggtacctggagatatgtcgtgggggtcaggagaccttggggacgtcaggtggggtgctattgcccaaaaccaagcttgaccaatcccgacccaacccgggcatagtcagtcagtgagaacctgtgatgtacctaaacaggtgagctcctggcagtcaacagataaaagaaacgaagaccacaaagcaaggaggcttgtgtggtggctggccagctgtgaactttgagtgttatatggngtatggcatctggtaatcgattaccaagggtgtctaatcgattacaaggattaaaagtgaagacaggaagctaagatggcctctggtaatcgattaccaaaggtgggtaatcgattaccaggctta

SEQ ID NO: 13329 - DNA, 418 bp, Glycine max
  unsure at all n locations
agctntcccacagtcccaaatgacatttcaaactaggattacctcactctaatctccaattaccactaaatccagatttggcttttcaaatcctcaaagcatcacacttttccactcatatcactacattctcactttttaaccctaggttaactctaccctacatctctatcagttttccatcagccatttcagcacacaagcatcacaagcatcatcataaaaaccctaaaacagaatgggtaagcttgactcataccaaacattagcatgttttcaacaaatttcttcacaaataactatcataaggcataaacctagtaaaactacccatcatacctcccanaacccaatacccacgaaaatntatgtgagaagaagtctacccaaacctgaaatgtgaagtcccacaatggag

SEQ ID NO: 13330 - DNA, 415 bp, Glycine max
  unsure at all n locations
agcttgtgtattcaatatcttgatgaggatgttccatatgttctcaagactggactaatacatttgctgcccaagtttcattgtcttgcaggtgaagatcctcataagcatcttaaggagttccatattgtctattccaccatgaaaccccctgatgtccaggaagataatatctttctaaaagcttttcctcattctctggaggaagtggtgaaagattggctgtactaccttgctcccaggtccattaccggctgggatgaccttaagagggtgttcttagagaaattcttccctgcatctaggaccactgccatcagaaaatacatttcaggcatcaggcaacttagtggagagagcttgtatgagtactgngaaagattcaagaaattgtgtgcaaactgttctcaccact

SEQ ID NO: 13331 - DNA, 413 bp, Glycine max
  unsure at all n locations
gaggctntggagagtngaggctctacccacaagaagggtggactcccccncacaacttaaatctctgatttaataatacgtgtctcacgacaaatatcataaaccaatattgaaacttaattacatacaatactattcgactattatgacataaagaaaacatacgatgttcatatgatcgatggaataaatcaagtcacctatgttaagagagctggacttatacatcctatgcccgcgagcactgtacccttgtgaacttatgattaattctatcatacgagctactaacatgagccaacagagcacagacctctaatacataggctatcgatatggaaatggaacatataatgcctttgaaataacatgctaaaacagtgtgtgcttaattatacacatgatctgctccg

SEQ ID NO: 13332 - DNA, 425 bp, Glycine max
  unsure at all n locations
tagcttattctacacctactagtttattcttaatggtttctaaaataacatcaagcttaaaggggttaaaagccaacacctatattnttgaatgtcaggatacaagtttcaaaactaaaattttacatcttatcttagtcttgtaaaaaaagaccatatatttaattctgaacagcaaagtaatcttagatagaaaaagaataatcggaatggaatgagatataatgttctcataataacagctcacctctgtaacaccaggcagcattattcctcgtcatttaatctccttaatttgtatattatcttttgataaatcaaataggtccctatataagacgatagagttattttgaagacttcanaaatccacattcaaaactactttcttcaatgtttaaagtgtgaggtatagtctcacatag

SEQ ID NO: 13333 - DNA, 415 bp, Glycine max
gaaatagaaccaaaacatatatgtaattaagaaaataacgcatagatgatcaaatattattattttgtgcggtataatcaaaggcatagaaaatgcatacgatgagttgaatccgcagaatcaagcactgtgtattaaattatgtgctacttcacatatagtcgatagtttaatttcaaagagtcaagttttgagctgtgagtattatatacgatgaataaagaataaccggccgttgctcgtaaacaaggccgtacaagtatgctgcagccgtatggcttgcacttataacttcgaactgcgcagtcgaattgcttactgcccacatattgaatgttagtggtacactaatatttcatatcattgacaataattagcttactttggagatgaattaatccttactctatactac

SEQ ID NO: 13334 - DNA, 354 bp, Glycine max
  unsure at all n locations
agctntgatttttatctacaaacaagctgtgatatttatgttgaacacgtatgttttctttgatttttatctacaaaaaagcttgattgttatctacataaaaactttgggtttatatatgtatcattgggtaactttgttttttcgcaacccataagcttaaatttttttgggtgttctgcctttatattttttttccctttaacactagctaaagttatttgaatgggttatattcttttatttgtctgtccctttagttagacacttccagtttgatattcaaatatatgacagtgctttatatcacatatatgacattctttgtctatgtcttatctttattatcaaata

SEQ ID NO: 13335 - DNA, 383 bp, Glycine max
agcttctgtccctgagaaactggttcccagaagacaacagggagtgaagattgctgaaaaccctagacttgcaacaagttctatggaagtagacacggagatggacaagataatccgcagtattgtgagtagcattctgaaagatgcttctgtgcctgatgctgagaaagatgttccaacatcgtccaccccaagtgtttctgtgcctgatgctgagaaagatgttccaacatcctccgctccaaatgctgaagccttcccttcacccagtgaagaggaatcaacagatgaagaggatcaagccgcagaggagacccctgcaccacgggcaccagaatctgttccaggtgacctcatcgacctggaagaagtcgaatctgatg

SEQ ID NO: 13336 - DNA, 382 bp, Glycine max
agcttgcctcaaagaggtccaggaaggacaaggcggccgaaggaactagttccgctccggagtacgacagtcaccgctttaggagcgctgtacaccagcagcgcttcgaggccatcaagggatggtcgtttctccgggagcgacgcgtgcagctcagggacgacgagtatactgatttccaggaggaaatatggcgccggaggtggacatcactggttactcccatggccgagttcgatccagaaatagcccttgagttttatgccaatgcttggccaacagaggagggcgtgcgtgacatgagatcctgtgtaaggggtcagtggatcccgtttgatgccgacgctatcggccagctcctgggatatctgttggtgttgga

SEQ ID NO: 13337 - DNA, 405 bp, Glycine max
  unsure at all n locations
agcttttattttgatgataagtttagatatcctgagaattctgctcatggtcaactcccaagaacagtggatgtaattgcagaagacgaccttgntgattcttgcaagcctggagatcgagtggcaattgtggggatatataaggctctagcaaggaagaggtagtgtgaatggagtatttaggtagctccagacaatatactgacataactcctttgcacttgcttgctttcttgaacagaaacttgattgactgattntcatgtangactgttctcatagccaacaatgtttctcttctcaacaaagaggataatgcaccaatctacagtgttgaagatgtcaaaaacattaaagagatagctactagagatgatgcatttgatctgctaagtgattcacttg

SEQ ID NO: 13338 - DNA, 423 bp, Glycine max
  unsure at all n locations
agctntagtcaaacagaataatccgaaaatgtcaaagaattgggtgttgaanaagcataacaagactttctgtgattggtttaaagatacaatctttgcagatgagaatgcttcagaaacattaagaangctagcagatgggcctaaaagaaatgttataacctggcaaggatacgacataaacaggtattcattttacacaaaagcacaagatgacaaaagtacaatgcagaacagcggggtcaccctaagggctgaatctcaacactttgcaagtgtcaatgatgccaatccctgtgtagcttccatcccttactttgggttcattgatgaaatttgggagcttaattatgtgaaatttacagtatgtattttcaaatgtanatgggttgacagcaacaccagtgtgcgcaccgatgatat

SEQ ID NO: 13339 - DNA, 344 bp, Glycine max
  unsure at all n locations
agcttgaatggatgtatcttccaaattaaagtaatgaaatgtagagaaaaggaacatttgcaacataatgagaagataatttgcagtctaacactcaaaccacttttataatacttgatccgtttcagaatatgtcattcaagataattgcacaaagattaagaaagccactaattagtctcaattatcataaaatataatttatttcctttttatcaaaatattggcactcctgactccactaatgccattgctatctctcattccacttggtagagataagagagacaaagatatagttgggacaanaaaaattcaaactttaattttctaaaatgacagat

SEQ ID NO: 13340 - DNA, 314 bp, Glycine max
agcttggcttagcgggaaaggatgcgctaagcgccaatatcattctgttttgaagtcattggaagtgcgcttagtgcaggtagtggcgctaagcctgaatcactcactgtaagttgaagcttgatgtacgctaagtcttgcatctcaggctaagtgcatattgcagaaagatttttggtgttgcagaaagcgctaagtgttgttgttgcgctaagccccaaatgcttactggaagttataacttcaggttgggcttagcgcgaggctaggctaagcgctagtgtttcaaactcaaatgtcacgttggcacgcta

SEQ ID NO: 13341 - DNA, 433 bp, Glycine max
  unsure at all n locations
agctnttcataacactgaatttgatttctgataattgattactaaggtcacaagatcatatgaagggggtaggataaaatcagtttatattatgaagtggataagaaccacagtacatacataattcacagaaaaatgtctcatttaaatctacaaggcaaaacaacatttatcacttatatttcatttgccataataagtgacaaaacaaattatgactaanaacataatccagacagacaataatagtcttgagggaaccaatatcaatatcaacatacaacacacttgggtaaatcatcaagctagcataactacaaaaccaaacatggtgtggttgtcattatgaacctttaatttcaaaacanaaatgaaatatgannagtggataatggcatatgaatctcttcactgtaacaactgaccaaactac

SEQ ID NO: 13342 - DNA, 430 bp, Glycine max
  unsure at all n locations
agctttctcataagtcctaaatgacatttcaaactaggattaactccctttaacctccaaataccactaaatccagatttggccttccaactatcaaagcctcactctttttccactcataacatcacattctcactttctaaccctaggttaactctacccttcatctctagcagttttccataagcaatttcagcacataaacatcacaagcatcatcataaaaaccctaaaacagaatgggtaagcttgactcacaccaaacatgacaagtttaacatgctttcatcaaatctcttcagaaataactatcataaagcataaacctagtaaaactacccatcatatctcccanaacccaatacccacgaaaaattatgtgagaagaagtctacccaaacctgaaattntgaagtcccacacgtagaga

SEQ ID NO: 13343 - DNA, 368 bp, Glycine max
tgatggattgcccagtgcatcaattccttccaagtagtaaagttaaaacggaagtcccagtgtcgaattcacatggactttgcttataattaggtagatgaatattttattaatacaagaaccaaagaaaattgtgtgaaaaaggctatgaaaaaaatagtaatttaaaatgatagaaaattcaatccaacaagaagttgattaaacaagaatctaaattaattacttaaaacataactgagaagaaaatccagttattatagaagttaaattctaaagatgagaatgttgggaacttagcctactagagctactatttgatgtgatgttcataatttttctctatgtatagatattccaatttacac

SEQ ID NO: 13344 - DNA, 414 bp, Glycine max
  unsure at all n locations
agctngcctggtacatcactcttaggtggtgcattcatcttaccaagcccctcattgagcagtgtgttaggtacttgttcccaggttcaacaacattaacaactccatactcaagtttccttatatattctcccatgcttttacctccaacgcatgcataagcttgtatattgatgaatgcccaatagccaatataaccttctcagtttgtgaggccaattcccttgttagtgacattgttaaagcatgaaaccctgtcaaaaattaaaaaacaaacaccccatgtaaatacctagacaaaaaaatctaanatataacgcactcagttagatgtgaagcacacacaaccctttaacaatacattcttagaatatgtttgaatggaggaatttagagagaaatagcacanatgat

SEQ ID NO: 13345 - DNA, 421 bp, Glycine max
taagcttgagtagtaaaatgtttcaaatcctatacatgggactgctacagattgtcggtaacaagtatttgaaatagtttagcgcaagattaaaaaatctatgtgggatacagttacttctaatggagcagatgattttgaaatgactgtctagaatttcataactattattttatcacttaatcagagcccaaatcatgtttatcaatttttagattcttaactagaattagttatagttttgattacataagagatccttacaaatttaatctctcattcattataattatataaagtttctgactgaaaccagcaggaaaactctcgatccttgaaacaccttgcggatgaaatgagtggtccattatctccaatgtcacttcctgcaccaaagcaactcatattcactcctggagtt

SEQ ID NO: 13346 - DNA, 391 bp, Glycine max
  unsure at all n locations
agcttgaatgtcgcttttgttaatcaagtgttactttatgcatttgtagatattaggctgctgtcgattattttgcattgcgatgaatgagtcagattccgaagcattgcatccagaaaacgaattatagaataaacgctttcactgtacggtccttattcaagagtctttctaacaatgagtagtagtatattaaacataattcactataaacatattttgactctcattataattatcatgtaatgtaatagaaaaaaactattccaaaataattattattttaacatcttactataatattaattattctttcctttatataacttataatattaatgattgatagtaaaatctataaatanattaataatgacaaaattaatttcat

SEQ ID NO: 13347 - DNA, 407 bp, Glycine max
  unsure at all n locations
agcttgtcatttatcattactcactcagtgtctctctccattattcataggtcaagtcattatgatgtattaaaatgtttcattgcatcgcgatgatttcgacacataattgtgtctatgatattttatggcgcgatcaccctaagagatgattgagttgggcctaatgtaataagacagtgatcagactaagaccttgtaaggaagattgtggatcagaacataatccgatcttagagggtacatagtccctcagcctcaaacaagagatgtgcagagactaagtgtgttgagatggaaatacaatctgatccaagagatacacagccgcctagtctcagtatgagatgtatagagactaatggtatagggattagagcacgatcctatcangggaggtacatatt

SEQ ID NO: 13348 - DNA, 401 bp, Glycine max
agcttgtggcttgttcaatgcttcgagcttaaaccttgaaggcttgctgcctctgaagtttcttctgtgagcgtagaactcgctcatgggcttggaagtaccggagtggctgtaccaagcttgtgctacggctatcagaacttgcaagtcttgtggctcgtgttggtgttcgtggatctctggactcttcttcatggcactgagaaaacgttgtcttcatgaggaggccatggttatgttagatactatcgtggaaggaaggcctcacatctgacatatgaagcagacgcaacttctttctcctttttctgtcactgggaaatatgaatgcattttgtctttgttatcctaattcttgtgaccatgaggttatatctgaccttgagtaacataataagaat

SEQ ID NO: 13349 - DNA, 410 bp, Glycine max
  unsure at all n locations
agcttcaacatcagaccacttccagggtgctggaactacttcacatggacttgatggggcctatgcaagttgaaagccttggaggaaagaggtatgcctatgttgttgtggatgatttctccagatttacctgngtctactttatcagagagaaatcagacacctttgaagtattcaaggagttgagtctaagacttcaaagagaaaaagactgtgtcatcaagagaatcacgagtgaccatggcagagaggttgaaaacaacaggtttactgaattctgcacatctgaaggcatcactcatgagttctctgcagccattgcaccacaacagaatggcatagttgagaggaaaaacaggactttgcaagaggctgctagggtcatgcttcatgccaaagaacttccctat

SEQ ID NO: 13350 - DNA, 389 bp, Glycine max
  unsure at all n locations
agcttgtatccaatagaagagaatgagcatgtgattgaaagtatgactganaatgttagtcagattgtcagattgattgtgaaggaatgcattaaccatatcccaatgagagtgtgatctttaaattttgagagaaacgaatgtcatttagtactgatttttgcgtgaatctctgaagtatggactgaatgcatgaaattgatgatgatgaagcccatgtttgattgtgatagccacttagccaaaaagctaaccatgtgtttgaatgaattatcccttgtactcagtttgagctaaatgaattattggttgattgaaccctaagcctatacagtgttatctcctgctaccttgacttangttgtaggaaagcatcatccacaagaagc

SEQ ID NO: 13351 - DNA, 426 bp, Glycine max
  unsure at all n locations
gctcaattgcttcaggttgctgcattgaagggcaaaggtctgtatggtggtcaacaaaagaacaccaaccacaaacccttgccacaaggacagaattctgaatcaagggccacttggttaccaaagtaaccaatggcatcaggttggcttcaagcttcttaatttcagatgatgcagatggggttgtaactaccctcatgcactcctttaatgactatggcatcatttcttgcgcttaactgctgggaggttgaagccatcttctcaattaaatntcctgctttcacangagtcatgtctccaaggctccaccactggcagcatctatcatacttctcttcatattactgagtccttcataaaaatattggagaaagaagctgttctgaaatctgatgggtggggcaacttgcacatcagttcttn

SEQ ID NO: 13352 - DNA, 433 bp, Glycine max
agctttggataaccaagcctatcagaatgctagacgaaatatagatgggaatagatgtaacaatggcggtaatgacggaccgaggcataaccgggttgagggagtaaagctcaatgttcctcccttcaaaggtagaagtgatccaaatgcctacctggactgggaaatgaagactgagcacgtatctgcctgcaatgactacactgatgcgcaaaaagtcaagctagcagcagctgaattctccgactatgcccttgtttggtggcataaataccatagagaaatgttgatagaggaacggcgagaggtagatacatggactgagatgaaaatggtgatgagacaaaggtatgtgcccactagctataacagaaccatgcgacagatactccaagggctgtcccaagggactctaaccgtcgaagaatattat

SEQ ID NO: 13353 - DNA, 424 bp, Glycine max
  unsure at all n locations
agcttgcaaatctgttntaagtccaagcccataaataaaataaaatctgggcaagataagataagatttgataaaataaaatctagatgaaataaaatttagataagataagataagataaaatctagatgaaataatatctagatgagataaaatctggataagaaaaaatttgataaaattgtctgctttcttcaagtctaagcccaattccagattcaagcccaattgcttacaattctcctgaaattaaattaaaaacacaaaattagtcaagtaggcccaaatgataaaactgcataattaatttgacaattaaggctaataagtaattaaaatggtgacaaaaagggttaagaaataggagaaaatgatgacacatcacacacctaacatgcataatctaatctttnttaatcactag
